United States Patent Application Publication US 2022/0211838 A1 - sequence listing, part 5

SEQ ID NO: 6713 - protein, 1365 aa, Artificial Sequence
  SARS-CoV-2/Australia/VIC01/2020__EPI_ISL_406844 spike protein (1-1211)(K986P_V987P) WhcAg construct
MFVFLVLLPLVSSQCVNLTTRTQLPPAYTNSFTRGVYYPDKVFRSSVLHSTQDLFLPFFSNVTWFHAIHVSGTNGTKRFDNPVLPFNDGVYFASTEKSNIIRGWIFGTTLDSKTQSLLIVNNATNVVIKVCEFQFCNDPFLGVYYHKNNKSWMESEFRVYSSANNCTFEYVSQPFLMDLEGKQGNFKNLREFVFKNIDGYFKIYSKHTPINLVRDLPQGFSALEPLVDLPIGINITRFQTLLALHRRYLTPGDSSSGWTAGAAAYYVGYLQPRTFLLKYNENGTITDAVDCALDPLSETKCTLKSFTVEKGIYQTSNFRVQPTESIVRFPNITNLCPFGEVFNATRFASVYAWNRKRISNCVADYSVLYNSASFSTFKCYGVSPTKLNDLCFTNVYADSFVIRGDEVRQIAPGQTGKIADYNYKLPDDFTGCVIAWNSNNLDSKVGGNYNYLYRLFRKSNLKPFERDISTEIYQAGSTPCNGVEGFNCYFPLQSYGFQPTNGVGYQPYRVVVLSFELLHAPATVCGPKKSTNLVKNKCVNFNFNGLTGTGVLTESNKKFLPFQQFGRDIADTTDAVRDPQTLEILDITPCSFGGVSVITPGTNTSNQVAVLYQDVNCTEVPVAIHADQLTPTWRVYSTGSNVFQTRAGCLIGAEHVNNSYECDIPIGAGICASYQTQTNSPRRARSVASQSIIAYTMSLGAENSVAYSNNSIAIPTNFTISVTTEILPVSMTKTSVDCTMYICGDSTECSNLLLQYGSFCTQLNRALTGIAVEQDKNTQEVFAQVKQIYKTPPIKDFGGFNFSQILPDPSKPSKRSFIEDLLFNKVTLADAGFIKQYGDCLGDIAARDLICAQKFNGLTVLPPLLTDEMIAQYTSALLAGTITSGWTFGAGAALQIPFAMQMAYRFNGIGVTQNVLYENQKLIANQFNSAIGKIQDSLSSTASALGKLQDVVNQNAQALNTLVKQLSSNFGAISSVLNDILSRLDPPEAEVQIDRLITGRLQSLQTYVTQQLIRAAEIRASANLAATKMSECVLGQSKRVDFCGKGYHLMSFPQSAPHGVVFLHVTYVPAQEKNFTTAPAICHDGKAHFPREGVFVSNGTHWFVTQRNFYEPQIITTDNTFVSGNCDVVIGIVNNTVYDPLQPELDSFKEELDKYFKNHTSPDVDLGDISGINASVVNIQKEIDRLNEVAKNLNESLIDLQELGKYEQYIKGGGGSDIDPYKEFGSSYQLLNFLPLDFFPDLNALVDTATALYEEELTGREHCSPHHTAIRQALVCWDELTKLIAWMSSNITSEQVRTIIVNHVNDTWGLKVRQSLWFHLSCLTFGQHTVQEFLVSFGVWIRTPAPYRPPNAPILSTLPEHTVIC

SEQ ID NO: 6714 - protein, 1365 aa, Artificial Sequence
  SARS-CoV-2/Germany/BavPat1/2020__EPI_ISL_406862 spike protein (1-1211)(K986P_V987P) WhcAg construct
MFVFLVLLPLVSSQCVNLTTRTQLPPAYTNSFTRGVYYPDKVFRSSVLHSTQDLFLPFFSNVTWFHAIHVSGTNGTKRFDNPVLPFNDGVYFASTEKSNIIRGWIFGTTLDSKTQSLLIVNNATNVVIKVCEFQFCNDPFLGVYYHKNNKSWMESEFRVYSSANNCTFEYVSQPFLMDLEGKQGNFKNLREFVFKNIDGYFKIYSKHTPINLVRDLPQGFSALEPLVDLPIGINITRFQTLLALHRSYLTPGDSSSGWTAGAAAYYVGYLQPRTFLLKYNENGTITDAVDCALDPLSETKCTLKSFTVEKGIYQTSNFRVQPTESIVRFPNITNLCPFGEVFNATRFASVYAWNRKRISNCVADYSVLYNSASFSTFKCYGVSPTKLNDLCFTNVYADSFVIRGDEVRQIAPGQTGKIADYNYKLPDDFTGCVIAWNSNNLDSKVGGNYNYLYRLFRKSNLKPFERDISTEIYQAGSTPCNGVEGFNCYFPLQSYGFQPTNGVGYQPYRVVVLSFELLHAPATVCGPKKSTNLVKNKCVNFNFNGLTGTGVLTESNKKFLPFQQFGRDIADTTDAVRDPQTLEILDITPCSFGGVSVITPGTNTSNQVAVLYQGVNCTEVPVAIHADQLTPTWRVYSTGSNVFQTRAGCLIGAEHVNNSYECDIPIGAGICASYQTQTNSPRRARSVASQSIIAYTMSLGAENSVAYSNNSIAIPTNFTISVTTEILPVSMTKTSVDCTMYICGDSTECSNLLLQYGSFCTQLNRALTGIAVEQDKNTQEVFAQVKQIYKTPPIKDFGGFNFSQILPDPSKPSKRSFIEDLLFNKVTLADAGFIKQYGDCLGDIAARDLICAQKFNGLTVLPPLLTDEMIAQYTSALLAGTITSGWTFGAGAALQIPFAMQMAYRFNGIGVTQNVLYENQKLIANQFNSAIGKIQDSLSSTASALGKLQDVVNQNAQALNTLVKQLSSNFGAISSVLNDILSRLDPPEAEVQIDRLITGRLQSLQTYVTQQLIRAAEIRASANLAATKMSECVLGQSKRVDFCGKGYHLMSFPQSAPHGVVFLHVTYVPAQEKNFTTAPAICHDGKAHFPREGVFVSNGTHWFVTQRNFYEPQIITTDNTFVSGNCDVVIGIVNNTVYDPLQPELDSFKEELDKYFKNHTSPDVDLGDISGINASVVNIQKEIDRLNEVAKNLNESLIDLQELGKYEQYIKGGGGSDIDPYKEFGSSYQLLNFLPLDFFPDLNALVDTATALYEEELTGREHCSPHHTAIRQALVCWDELTKLIAWMSSNITSEQVRTIIVNHVNDTWGLKVRQSLWFHLSCLTFGQHTVQEFLVSFGVWIRTPAPYRPPNAPILSTLPEHTVIC

SEQ ID NO: 6715 - protein, 1365 aa, Artificial Sequence
  SARS-CoV-2/Wuhan/HBCDC-HB-02/2020__EPI_ISL_412978 spike protein (1-1211)(K986P_V987P) WhcAg construct
MFVFLVLLPLVSSQCVNLTTRTQLPPAYTNSFTRGVYYPDKVFRSSVLHSTQDLFLPFFSNVTWFHAIHVSGTNGTKRFDNPVLPFNDGVYFASTEKSNIIRGWIFGTTLDSKTQSLLIVNNATNVVIKVCEFQFCNDPFLGVYYHKNNKSWMESEFRVYSSANNCTFEYVSQPFLMDLEGKQGNFKNLREFVFKNIDGYFKIYSKHTPINLVRDLPQGFSALEPLVDLPIGINITRFQTLLALHRSYLTPGDSSSGWTAGAAAYYVGYLQPRTFLLKYNENGTITDAVDCALDPLSETKCTLKSFTVEKGIYQTSNFRVQPTESIVRFPNITNLCPFGEVFNATRFASVYAWNRKRISNCVADYSVLYNSASFSTFKCYGVSPTKLNDLCFTNVYADSFVIRGDEVRQIAPGQTGKIADYNYKLPDDFTGCVIAWNSNNLDSKVGGNYNYLYRLFRKSNLKPFERDISTEIYQAGSTPCNGVEGFNCYFPLQSYGFQPTNGVGYQPYRVVVLSFELLHAPATVCGPKKSTNLVKNKCVNFNFNGLTGTGVLTESNKKFLPFQQFGRDIADTTDAVRDPQTLEILDITPCSFGGVSVITPGTNTSNQVAVLYQDVNCTEVPVAIHADQLTPTWRVYSTGSNVFQTRAGCLIGAEHVNNSYECDIPIGAGICASYQTQTNSPRRARSVASQSIIAYTMSLGAENSVAYSNNSIAIPTNFTISVTTEILPVSMTKTSVDCTMYICGDSTECSNFLLQYGSFCTQLNRALTGIAVEQDKNTQEVFAQVKQIYKTPPIKDFGGFNFSQILPDPSKPSKRSFIEDLLFNKVTLADAGFIKQYGDCLGDIAARDLICAQKFNGLTVLPPLLTDEMIAQYTSALLAGTITSGWTFGAGAALQIPFAMQMAYRFNGIGVTQNVLYENQKLIANQFNSAIGKIQDSLSSTASALGKLQDVVNQNAQALNTLVKQLSSNFGAISSVLNDILSRLDPPEAEVQIDRLITGRLQSLQTYVTQQLIRAAEIRASANLAATKMSECVLGQSKRVDFCGKGYHLMSFPQSAPHGVVFLHVTYVPAQEKNFTTAPAICHDGKAHFPREGVFVSNGTHWFVTQRNFYEPQIITTDNTFVSGNCDVVIGIVNNTVYDPLQPELDSFKEELDKYFKNHTSPDVDLGDISGINASVVNIQKEIDRLNEVAKNLNESLIDLQELGKYEQYIKGGGGSDIDPYKEFGSSYQLLNFLPLDFFPDLNALVDTATALYEEELTGREHCSPHHTAIRQALVCWDELTKLIAWMSSNITSEQVRTIIVNHVNDTWGLKVRQSLWFHLSCLTFGQHTVQEFLVSFGVWIRTPAPYRPPNAPILSTLPEHTVIC

SEQ ID NO: 6716 - protein, 1365 aa, Artificial Sequence
  SARS-CoV-2/Australia/QLD02/2020__EPI_ISL_407896 spike protein (1-1211)(K986P_V987P) WhcAg construct
MFVFLVLLPLVSSQCVNLTTRTQLPPAYTNSFTRGVYYPDKVFRSSVLHSTQDLFLPFFSNVTWFHAIHVSGTNGTKRFDNPVLPFNDGVYFASTEKSNIIRGWIFGTTLDSKTQSLLIVNNATNVVIKVCEFQFCNDPFLGVYYHKNNKSWMESEFRVYSSANNCTFEYVSQPFLMDLEGKQGNFKNLREFVFKNIDGYFKIYSKHTPINLVRDLPQGFSALEPLVDLPIGINITRFQTLLALHRSYLTPGDSSSGWTAGAAAYYVGYLQPRTFLLKYNENGTITDAVDCALDPLSETKCTLKSFTVEKGIYQTSNFRVQPTESIVRFPNITNLCPFGEVFNATRFASVYAWNRKRISNCVADYSVLYNSASFSTFKCYGVSPTKLNDLCFTNVYADSFVIRGDEVRQIAPGQTGKIADYNYKLPDDFTGCVIAWNSNNLDSKVGGNYNYLYRLFRKSNLKPFERDISTEIYQAGSTPCNGVEGFNCYFPLQSYGFQPTNGVGYQPYRVVVLSFELLHAPATVCGPKKSTNLVKNKCVNFNFNGLTGTGVLTESNKKFLPFQQFGRDIADTTDAVRDPQTLEILDITPCSFGGVSVITPGTNTSNQVAVLYQDVNCTEVPVAIHADQLTPTWRVYSTGSNVFQTRAGCLIGAEHVNNSYECDIPIGAGICASYQTQTNSPRRARSVASQSIIAYTMSLGAENSVAYSNNSIAIPTNFTISVTTEILPVSMTKTSVDCTMYICGDSTECSNLLLQYGSFCTQLNRALTGIAVEQDKNTQEVFAQVKQIYKTPPIKDFGGFNFSQILPDPSKPSKRSFIEDLLFNKVTLADAGFIKQYGDCLGDIAARDLICAQKFNGLTVLPPLLTDEMIAQYTSALLAGTITSGWTFGAGAALQIPFAMQMAYRFNGIGVTQNVLYENQKLIANQFNSAIGKIQDSLSSTASALGKLQDVVNQNAQALNTLVKQLSSNFGAISSVLNDILSRLDPPEAEVQIDRLITGRLQSLQTYVTQQLIRAAEIRASANLAATKMSECVLGQSKRVDFCGKGYHLMSFPQSAPHGVVFLHVTYVPAQEKNFTTAPAICHDGKAHFPREGVFVSNGTHWFVTQRNFYEPQIITTDNTFVSGNCDVVIGIVNNTVYDPLQLELDSFKEELDKYFKNHTSPDVDLGDISGINASVVNIQKEIDRLNEVAKNLNESLIDLQELGKYEQYIKGGGGSDIDPYKEFGSSYQLLNFLPLDFFPDLNALVDTATALYEEELTGREHCSPHHTAIRQALVCWDELTKLIAWMSSNITSEQVRTIIVNHVNDTWGLKVRQSLWFHLSCLTFGQHTVQEFLVSFGVWIRTPAPYRPPNAPILSTLPEHTVIC

SEQ ID NO: 6717 - protein, 1365 aa, Artificial Sequence
  SARS-CoV-2/India/1-31/2020__EPI_ISL_413523 spike protein (1-1211)(K986P_V987P) WhcAg construct
MFVFLVLLPLVSSQCVNLTTRTQLPPAYTNSFTRGVYYPDKVFRSSVLHSTQDLFLPFFSNVTWFHAIHVSGTNGTKRFDNPVLPFNDGVYFASTEKSNIIRGWIFGTTLDSKTQSLLIVNNATNVVIKVCEFQFCNDPFLGVYYHKNNKSWMESEFRVYSSANNCTFEYVSQPFLMDLEGKQGNFKNLREFVFKNIDGYFKIYSKHTPINLVRDLPQGFSALEPLVDLPIGINITRFQTLLALHRSYLTPGDSSSGWTAGAAAYYVGYLQPRTFLLKYNENGTITDAVDCALDPLSETKCTLKSFTVEKGIYQTSNFRVQPTESIVRFPNITNLCPFGEVFNATRFASVYAWNRKRISNCVADYSVLYNSASFSTFKCYGVSPTKLNDLCFTNVYADSFVIRGDEVRQIAPGQTGKIADYNYKLPDDFTGCVIAWNSNNLDSKVGGNYNYLYRLFRKSNLKPFERDISTEIYQAGSTPCNGVEGFNCYFPLQSYGFQPTNGVGYQPYRVVVLSFELLHAPATVCGPKKSTNLVKNKCVNFNFNGLTGTGVLTESNKKFLPFQQFGRDIADTTDAVRDPQTLEILDITPCSFGGVSVITPGTNTSNQVAVLYQDVNCTEVPVAIHADQLTPTWRVYSTGSNVFQTRAGCLIGAEHVNNSYECDIPIGAGICASYQTQTNSPRRARSVASQSIIAYTMSLGAENSVAYSNNSIAIPTNFTISVTTEILPVSMTKTSVDCTMYICGDSTECSNLLLQYGSFCTQLNRALTGIAVEQDKNTQEVFAQVKQIYKTPPIKDFGGFNFSQILPDPSKPSKRSFIEDLLFNKVTLADAGFIKQYGDCLGDIAARDLICAQKFNGLTVLPPLLTDEMIAQYTSALLAGTITSGWTFGAGAALQIPFAMQMAYRFNGIGVTQNVLYENQKLIANQFNSVIGKIQDSLSSTASALGKLQDVVNQNAQALNTLVKQLSSNFGAISSVLNDILSRLDPPEAEVQIDRLITGRLQSLQTYVTQQLIRAAEIRASANLAATKMSECVLGQSKRVDFCGKGYHLMSFPQSAPHGVVFLHVTYVPAQEKNFTTAPAICHDGKAHFPREGVFVSNGTHWFVTQRNFYEPQIITTDNTFVSGNCDVVIGIVNNTVYDPLQPELDSFKEELDKYFKNHTSPDVDLGDISGINASVVNIQKEIDRLNEVAKNLNESLIDLQELGKYEQYIKGGGGSDIDPYKEFGSSYQLLNFLPLDFFPDLNALVDTATALYEEELTGREHCSPHHTAIRQALVCWDELTKLIAWMSSNITSEQVRTIIVNHVNDTWGLKVRQSLWFHLSCLTFGQHTVQEFLVSFGVWIRTPAPYRPPNAPILSTLPEHTVIC

SEQ ID NO: 6718 - protein, 1365 aa, Artificial Sequence
  SARS-CoV-2/Guangdong/GD2020087-P0008/2020__EPI_ISL_413863 spike protein (1-1211)(K986P_V987P) WhcAg construct
MFVFLVLLPLVSSQCVNLTTRTQLPPAYTNSFTRGVYYPDKVFRSSVLHSTQDLFLPFFSNVTWFHAIHVSGTNGTKRFDNPVLPFNDGVYFASTEKSNIIRGWIFGTTLDSKTQSLLIVNNATNVVIKVCEFQFCNDPFLGVYYHKNNKSWMESEFRVYSSANNCTFEYVSQPFLMDLEGKQGNFKNLREFVFKNIDGYFKIYSKHTPINLVRDLPQGFSALEPLVDLPIGINITRFQTLLALHRSYLTPGDSSSGWTAGAAAYYVGYLQPRTFLLKYNENGTITDAVDCALDPLSETKCTLKSFTVEKGIYQTSNFRVQPTESIVRFPNITNLCPFGEVFNATRFASVYAWNRKRISNCVADYSVLYNSASFSTFKCYGVSPTKLNDLCFTNVYADSFVIRGDEVREIAPGQTGKIADYNYKLPDDFTGCVIAWNSNNLDSKVGGNYNYLYRLFRKSNLKPFERDISTEIYQAGSTPCNGVEGFNCYFPLQSYGFQPTNGVGYQPYRVVVLSFELLHAPATVCGPKKSTNLVKNKCVNFNFNGLTGTGVLTESNKKFLPFQQFGRDIADTTDAVRDPQTLEILDITPCSFGGVSVITPGTNTSNQVAVLYQDVNCTEVPVAIHADQLTPTWRVYSTGSNVFQTRAGCLIGAEHVNNSYECDIPIGAGICASYQTQTNSPRRARSVASQSIIAYTMSLGAENSVAYSNNSIAIPTNFTISVTTEILPVSMTKTSVDCTMYICGDSTECSNLLLQYGSFCTQLNRALTGIAVEQDKNTQEVFAQVKQIYKTPPIKDFGGFNFSQILPDPSKPSKRSFIEDLLFNKVTLADAGFIKQYGDCLGDIAARDLICAQKFNGLTVLPPLLTDEMIAQYTSALLAGTITSGWTFGAGAALQIPFAMQMAYRFNGIGVTQNVLYENQKLIANQFNSAIGKIQDSLSSTASALGKLQDVVNQNAQALNTLVKQLSSNFGAISSVLNDILSRLDPPEAEVQIDRLITGRLQSLQTYVTQQLIRAAEIRASANLAATKMSECVLGQSKRVDFCGKGYHLMSFPQSAPHGVVFLHVTYVPAQEKNFTTAPAICHDGKAHFPREGVFVSNGTHWFVTQRNFYEPQIITTDNTFVSGNCDVVIGIVNNTVYDPLQPELDSFKEELDKYFKNHTSPDVDLGDISGINASVVNIQKEIDRLNEVAKNLNESLIDLQELGKYEQYIKGGGGSDIDPYKEFGSSYQLLNFLPLDFFPDLNALVDTATALYEEELTGREHCSPHHTAIRQALVCWDELTKLIAWMSSNITSEQVRTIIVNHVNDTWGLKVRQSLWFHLSCLTFGQHTVQEFLVSFGVWIRTPAPYRPPNAPILSTLPEHTVIC

SEQ ID NO: 6719 - protein, 1365 aa, Artificial Sequence
  SARS-CoV-2/Sweden/01/2020__EPI_ISL_411951 spike protein (1-1211)(K986P_V987P) WhcAg construct
MFVFLVLLPLVSSQCVNLTTRTQLPPAYTNSFTRGVYYPDKVFRSSVLHSTQDLFLPFFSNVTWFHAIHVSGTNGTKRFDNPVLPFNDGVYFASTEKSNIIRGWIFGTTLDSKTQSLLIVNNATNVVIKVCEFQFCNDPFLGVYYHKNNKSWMESEFRVYSSANNCTFEYVSQPFLMDLEGKQGNFKNLREFVFKNIDGYFKIYSKHTPINLVRDLPQGFSALEPLVDLPIGINITRFQTLLALHRSYLTPGDSSSGWTAGAAAYYVGYLQPRTFLLKYNENGTITDAVDCALDPLSETKCTLKSFTVEKGIYQTSNFRVQPTESIVRFPNITNLCPFGEVFNATRFASVYAWNRKRISNCVADYSVLYNSASFSTFKCYGVSPTKLNDLCFTNVYADSFVIRGDEVRQIAPGQTGKIADYNYKLPDDFTGCVIAWNSNNLDSKVGGNYNYLYRLFRKSNLKPFERDISTEIYQAGSTPCNGVEGFNCYFPLQSYGFQPTNGVGYQPYRVVVLSFELLHAPATVCGPKKSTNLVKNKCVNFNFNGLTGTGVLTESNKKFLPFQQFGRDIADTTDAVRDPQTLEILDITPCSFGGVSVITPGTNTSNQVAVLYQDVNCTEVPVAIHADQLTPTWRVYSTGSNVFQTRAGCLIGAEHVNNSYECDIPIGAGICASYQTQTNSPRRARSVASQSIIAYTMSLGAENSVAYSNNSIAIPTNFTISVTTEILPVSMTKTSVDCTMYICGDSTECSNLLLQYGSFCTQLNRALTGIAVEQDKNTQEVFAQVKQIYKTPPIKDCGGFNFSQILPDPSKPSKRSFIEDLLFNKVTLADAGFIKQYGDCLGDIAARDLICAQKFNGLTVLPPLLTDEMIAQYTSALLAGTITSGWTFGAGAALQIPFAMQMAYRFNGIGVTQNVLYENQKLIANQFNSAIGKIQDSLSSTASALGKLQDVVNQNAQALNTLVKQLSSNFGAISSVLNDILSRLDPPEAEVQIDRLITGRLQSLQTYVTQQLIRAAEIRASANLAATKMSECVLGQSKRVDFCGKGYHLMSFPQSAPHGVVFLHVTYVPAQEKNFTTAPAICHDGKAHFPREGVFVSNGTHWFVTQRNFYEPQIITTDNTFVSGNCDVVIGIVNNTVYDPLQPELDSFKEELDKYFKNHTSPDVDLGDISGINASVVNIQKEIDRLNEVAKNLNESLIDLQELGKYEQYIKGGGGSDIDPYKEFGSSYQLLNFLPLDFFPDLNALVDTATALYEEELTGREHCSPHHTAIRQALVCWDELTKLIAWMSSNITSEQVRTIIVNHVNDTWGLKVRQSLWFHLSCLTFGQHTVQEFLVSFGVWIRTPAPYRPPNAPILSTLPEHTVIC

SEQ ID NO: 6720 - protein, 1365 aa, Artificial Sequence
  SARS-CoV-2/Tianmen/HBCDC-HB-07/2020__EPI_ISL_412983 spike protein (1-1211)(K986P_V987P) WhcAg construct
MFVFLVLLPLVSSQCVNLTTRTQLPPAYTNSFTRGVYYPDKVFRSSVLHSTQDLFLPFFSNVTWFHAIHVSGTNGTKRFDNPVLPFNDGVYFASTEKSNIIRGWIFGTTLDSKTQSLLIVNNATNVVIKVCEFQFCNDPFLGVYYHKNNKSWMESEFRVYSSANNCTFEYVSQPFLMDLEGKQGNFKNLREFVFKNIDGYFKIYSKHTPINLVRDLPQGFSALEPLVDLPIGINITRFQTLLALHRSYLTPGDSSSGWTAGAAAYYVGYLQPRTFLLKYNENGTITDAVDCALDPLSETKCTLKSFTVEKGIYQTSNFRVQPTESIVRFPNITNLCPFGEVFNATRFASVYAWNRKRISNCVADYSVLYNSASFSTFKCYGVSPTKLNDLCFTNVYADSFVIRGDEVRQIAPGQTGKIADYNYKLPDDFTGCVIAWNSNNLDSKVGGNYNYLYRLFRKSNLKPFERDISTEIYQAGSTPCNGVEGFNCYFPLQSYGFQPTNGVGYQPYRVVVLSFELLHAPATVCGPKKSTNLVKNKCVNFNFNGLTGTGVLTESNKKFLPFQQFGRDIADTTDAVRDPQTLEILDITPCSFGGVSVITPGTNTSNQVAVLYQDLNCTEVPVAIHADQLTPTWRVYSTGSNVFQTRAGCLIGAEHVNNSYECDIPIGAGICASYQTQTNSPRRARSVASQSIIAYTMSLGAENSVAYSNNSIAIPTNFTISVTTEILPVSMTKTSVDCTMYICGDSTECSNLLLQYGSFCTQLNRALTGIAVEQDKNTQEVFAQVKQIYKTPPIKDFGGFNFSQILPDPSKPSKRSFIEDLLFNKVTLADAGFIKQYGDCLGDIAARDLICAQKFNGLTVLPPLLTDEMIAQYTSALLAGTITSGWTFGAGAALQIPFAMQMAYRFNGIGVTQNVLYENQKLIANQFNSAIGKIQDSLSSTASALGKLQDVVNQNAQALNTLVKQLSSNFGAISSVLNDILSRLDPPEAEVQIDRLITGRLQSLQTYVTQQLIRAAEIRASANLAATKMSECVLGQSKRVDFCGKGYHLMSFPQSAPHGVVFLHVTYVPAQEKNFTTAPAICHDGKAHFPREGVFVSNGTHWFVTQRNFYEPQIITTDNTFVSGNCDVVIGIVNNTVYDPLQPELDSFKEELDKYFKNHTSPDVDLGDISGINASVVNIQKEIDRLNEVAKNLNESLIDLQELGKYEQYIKGGGGSDIDPYKEFGSSYQLLNFLPLDFFPDLNALVDTATALYEEELTGREHCSPHHTAIRQALVCWDELTKLIAWMSSNITSEQVRTIIVNHVNDTWGLKVRQSLWFHLSCLTFGQHTVQEFLVSFGVWIRTPAPYRPPNAPILSTLPEHTVIC

SEQ ID NO: 6721 - protein, 1365 aa, Artificial Sequence
  SARS-CoV-2/Hong Kong/case42_VM20002493/2020__EPI_ISL_414527 spike protein (1-1211)(K986P_V987P) WhcAg construct
MFVFLVLLPLVSSQCVNLTTRTQLPPAYTNSFTRGVYYPDKVFRSSVLHSTQDLFLPFFSNVTWFHAIHVSGTNGTKRFDNPVLPFNDGVYFASTEKSNIIRGWIFGTTLDSKTQSLLIVNNATNVVIKVCEFQFCNDPFLGVYYHKNNKSWMESEFRVYSSANNCTFEYVSQPFLMDLEGKQGNFKNLREFVFKNIDGYFKIYSKHTPINLVRDLPQGFSALEPLVDLPIGINITRFQTLLALHRSYLTPGDSSSGWTAGAAAYYVGYLQPRTFLLKYNENGTITDAVDCALDPLSETKCTLKSFTVEKGIYQTSNFRVQPTESIVRFPNITNLCPFGEVFNATRFASVYAWNRKRISNCVADYSVLYNSASFSTFKCYGVSPTKLNDLCFTNVYADSFVIRGDEVRQIAPGQTGKIADYNYKLPDDFTGCVIAWNSNNLDSKVGGNYNYLYRLFRKSNLKPFERDISTEIYQAGSTPCNGVEGFNCYFPLQSYGFQPTNGVGYQPYRVVVLSFELLHAPATVCGPKKSTNLVKNKCVNFNFNGLTGTGVLTESNKKFLPFQQFGRDIADTTDAVRDPQTLEILDITPCSFGGVSVITPGTNTSNQVAVLYQDVNCTEVPVAIHADQLTPTWRVYSTGSNVFQTRAGCLIGAEHVNNSYECDIPIGAGICASYQTQTNSPRRARSVASQSIIAYTMSLGAENSVAYSNNSIAIPTNFAISVTTEILPVSMTKTSVDCTMYICGDSTECSNLLLQYGSFCTQLNRALTGIAVEQDKNTQEVFAQVKQIYKTPPIKDFGGFNFSQILPDPSKPSKRSFIEDLLFNKVTLADAGFIKQYGDCLGDIAARDLICAQKFNGLTVLPPLLTDEMIAQYTSALLAGTITSGWTFGAGAALQIPFAMQMAYRFNGIGVTQNVLYENQKLIANQFNSAIGKIQDSLSSTASALGKLQDVVNQNAQALNTLVKQLSSNFGAISSVLNDILSRLDPPEAEVQIDRLITGRLQSLQTYVTQQLIRAAEIRASANLAATKMSECVLGQSKRVDFCGKGYHLMSFPQSAPHGVVFLHVTYVPAQEKNFTTAPAICHDGKAHFPREGVFVSNGTHWFVTQRNFYEPQIITTDNTFVSGNCDVVIGIVNNTVYDPLQPELDSFKEELDKYFKNHTSPDVDLGDISGINASVVNIQKEIDRLNEVAKNLNESLIDLQELGKYEQYIKGGGGSDIDPYKEFGSSYQLLNFLPLDFFPDLNALVDTATALYEEELTGREHCSPHHTAIRQALVCWDELTKLIAWMSSNITSEQVRTIIVNHVNDTWGLKVRQSLWFHLSCLTFGQHTVQEFLVSFGVWIRTPAPYRPPNAPILSTLPEHTVIC

SEQ ID NO: 6722 - protein, 1365 aa, Artificial Sequence
  SARS-CoV-2/USA/CruiseA-23/2020__EPI_ISL_414482 spike protein (1-1211)(K986P_V987P) WhcAg construct
MFVFLVLLPLVSSQCVNLTTRTQLPPAYTNSFTRGVYYPDKVFRSSVLHSTQDLFLPFFSNVTWFHAIHVSGTNGTKRFDNPVLPFNDGVYFASTEKSNIIRGWIFGTTLDSKTQSLLIVNNATNVVIKVCEFQFCNDPFLGVYYHKNNKSWMESEFRVYSSANNCTFEYVSQPFLMDLEVKQGNFKNLREFVFKNIDGYFKIYSKHTPINLVRDLPQGFSALEPLVDLPIGINITRFQTLLALHRSYLTPGDSSSGWTAGAAAYYVGYLQPRTFLLKYNENGTITDAVDCALDPLSETKCTLKSFTVEKGIYQTSNFRVQPTESIVRFPNITNLCPFGEVFNATRFASVYAWNRKRISNCVADYSVLYNSASFSTFKCYGVSPTKLNDLCFTNVYADSFVIRGDEVRQIAPGQTGKIADYNYKLPDDFTGCVIAWNSNNLDSKVGGNYNYLYRLFRKSNLKPFERDISTEIYQAGSTPCNGVEGFNCYFPLQSYGFQPTNGVGYQPYRVVVLSFELLHAPATVCGPKKSTNLVKNKCVNFNFNGLTGTGVLTESNKKFLPFQQFGRDIADTTDAVRDPQTLEILDITPCSFGGVSVITPGTNTSNQVAVLYQDVNCTEVPVAIHADQLTPTWRVYSTGSNVFQTRAGCLIGAEHVNNSYECDIPIGAGICASYQTQTNSPRRARSVASQSIIAYTMSLGAENSVAYSNNSIAIPTNFTISVTTEILPVSMTKTSVDCTMYICGDSTECSNLLLQYGSFCTQLNRALTGIAVEQDKNTQEVFAQVKQIYKTPPIKDFGGFNFSQILPDPSKPSKRSFIEDLLFNKVTLADAGFIKQYGDCLGDIAARDLICAQKFNGLTVLPPLLTDEMIAQYTSALLAGTITSGWTFGAGAALQIPFAMQMAYRFNGIGVTQNVLYENQKLIANQFNSAIGKIQDSLSSTASALGKLQDVVNQNAQALNTLVKQLSSNFGAISSVLNDILSRLDPPEAEVQIDRLITGRLQSLQTYVTQQLIRAAEIRASANLAATKMSECVLGQSKRVDFCGKGYHLMSFPQSAPHGVVFLHVTYVPAQEKNFTTAPAICHDGKAHFPREGVFVSNGTHWFVTQRNFYEPQIITTDNTFVSGNCDVVIGIVNNTVYDPLQPELDSFKEELDKYFKNHTSPDVDLGDISGINASVVNIQKEIDRLNEVAKNLNESLIDLQELGKYEQYIKGGGGSDIDPYKEFGSSYQLLNFLPLDFFPDLNALVDTATALYEEELTGREHCSPHHTAIRQALVCWDELTKLIAWMSSNITSEQVRTIIVNHVNDTWGLKVRQSLWFHLSCLTFGQHTVQEFLVSFGVWIRTPAPYRPPNAPILSTLPEHTVIC

SEQ ID NO: 6723 - protein, 1365 aa, Artificial Sequence
  SARS-CoV-2/Hong Kong/case85_VM20002868/2020__EPI_ISL_414519 spike protein (1-1211)(K986P_V987P) WhcAg construct
MFVFLVLVPLVSSQCVNLTTRTQLPPAYTNSFTRGVYYPDKVFRSSVLHSTQDLFLPFFSNVTWFHAIHVSGTNGTKRFDNPVLPFNDGVYFASTEKSNIIRGWIFGTTLDSKTQSLLIVNNATNVVIKVCEFQFCNDPFLGVYYHKNNKSWMESEFRVYSSANNCTFEYVSQPFLMDLEGKQGNFKNLREFVFKNIDGYFKIYSKHTPINLVRDLPQGFSALEPLVDLPIGINITRFQTLLALHRSYLTPGDSSSGWTAGAAAYYVGYLQPRTFLLKYNENGTITDAVDCALDPLSETKCTLKSFTVEKGIYQTSNFRVQPTESIVRFPNITNLCPFGEVFNATRFASVYAWNRKRISNCVADYSVLYNSASFSTFKCYGVSPTKLNDLCFTNVYADSFVIRGDEVRQIAPGQTGKIADYNYKLPDDFTGCVIAWNSNNLDSKVGGNYNYLYRLFRKSNLKPFERDISTEIYQAGSTPCNGVEGFNCYFPLQSYGFQPTNGVGYQPYRVVVLSFELLHAPATVCGPKKSTNLVKNKCVNFNFNGLTGTGVLTESNKKFLPFQQFGRDIADTTDAVRDPQTLEILDITPCSFGGVSVITPGTNTSNQVAVLYQDVNCTEVPVAIHADQLTPTWRVYSTGSNVFQTRAGCLIGAEHVNNSYECDIPIGAGICASYQTQTNSPRRARSVASQSIIAYTMSLGAENSVAYSNNSIAIPTNFTISVTTEILPVSMTKTSVDCTMYICGDSTECSNLLLQYGSFCTQLNRALTGIAVEQDKNTQEVFAQVKQIYKTPPIKDFGGFNFSQILPDPSKPSKRSFIEDLLFNKVTLADAGFIKQYGDCLGDIAARDLICAQKFNGLTVLPPLLTDEMIAQYTSALLAGTITSGWTFGAGAALQIPFAMQMAYRFNGIGVTQNVLYENQKLIANQFNSAIGKIQDSLSSTASALGKLQDVVNQNAQALNTLVKQLSSNFGAISSVLNDILSRLDPPEAEVQIDRLITGRLQSLQTYVTQQLIRAAEIRASANLAATKMSECVLGQSKRVDFCGKGYHLMSFPQSAPHGVVFLHVTYVPAQEKNFTTAPAICHDGKAHFPREGVFVSNGTHWFVTQRNFYEPQIITTDNTFVSGNCDVVIGIVNNTVYDPLQPELDSFKEELDKYFKNHTSPDVDLGDISGINASVVNIQKEIDRLNEVAKNLNESLIDLQELGKYEQYIKGGGGSDIDPYKEFGSSYQLLNFLPLDFFPDLNALVDTATALYEEELTGREHCSPHHTAIRQALVCWDELTKLIAWMSSNITSEQVRTIIVNHVNDTWGLKVRQSLWFHLSCLTFGQHTVQEFLVSFGVWIRTPAPYRPPNAPILSTLPEHTVIC

SEQ ID NO: 6724 - protein, 1365 aa, Artificial Sequence; identical to SEQ ID NO: 6714
  SARS-CoV-2/England/200990660/2020__EPI_ISL_414523 spike protein (1-1211)(K986P_V987P) WhcAg construct

SEQ ID NO: 6725 - protein, 1365 aa, Artificial Sequence
  SARS-CoV-2/Australia/NSW09/2020__EPI_ISL_413595 spike protein (1-1211)(K986P_V987P) WhcAg construct
MFVFLVLLPLVSSQCVNLTTRTQLPPAYTNSFTRGVYYPDKVFRSSVLHSTQDLFLPFFSNVTWFHAIHVSGTNGTKRFDNPVLPFNDGVYFASTEKSNIIRGWIFGTTLDSKTQSLLIVNNATNVVIKVCEFQFCNDPFLGVYYHKNNKSWMESEFRVYSSANNCTFEYVSQPFLMDLEGKQGNFKNLREFVFKNIDGYFKIYSKHTPINLVRDLPQGFSALEPLVDLPIGINITRFQTLLALHRSYLTPGDSSSGWTAGAAAYYVGYLQPRTFLLKYNENGTITDAVDCALDPLSETKCTLKSFTVEKGIYQTSNFRVQPTESIVRFPNITNLCPFGEVFNATRFASVYAWNRKRISNCVADYSVLYNSASFSTFKCYGVSPTKLNDLCFTNVYADSFVIRGDEVRQIAPGQTGKIADYNYKLPDDFTGCVIAWNSNNLDSKVGGNYNYLYRLFRKSNLKPFERDISTEIYQAGSTPCNGVEGFNCYFPLQSYGFQPTNGVGYQPYRVVVLSFELLHAPATVCGPKKSTNLVKNKCVNFNFNGLTGTGVLTESNKKFLPFQQFGRDIADTTDAVRDPQTLEILDITPCSFGGVSVITPGTNTSNQVAVLYQDVNCTEVPVAIHADQLTPTWRVYSTGSNVFQTRAGCLIGAEHVNNSYECDIPIGAGICASYQTQTNSPRRARSVASQSIIAYTMSLGAENSVAYSNNSIAIPTNFTISVTTEILPVSMTKTSVDCTMYICGDSTECSNLLLQYGSFCTQLNRALTGIAVEQDKNTQEVFAQVKQIYKTPPIKDFGGFNFSQILPDPSKPSKRSFIEDLLFNKVTLADAGFIKQYGDCLGDIAARDLICAQKFNGLTVLPPLLTDEMIAQYTSALLAGTITSGWTFGAGAALQIPFAMQMAYRFNGIGVTQNVLYENQKLIANQFNSAIGKIQDSLSFTASALGKLQDVVNQNAQALNTLVKQLSSNFGAISSVLNDILSRLDPPEAEVQIDRLITGRLQSLQTYVTQQLIRAAEIRASANLAATKMSECVLGQSKRVDFCGKGYHLMSFPQSAPHGVVFLHVTYVPAQEKNFTTAPAICHDGKAHFPREGVFVSNGTHWFVTQRNFYEPQIITTDNTFVSGNCDVVIGIVNNTVYDPLQPELDSFKEELDKYFKNHTSPDVDLGDISGINASVVNIQKEIDRLNEVAKNLNESLIDLQELGKYEQYIKGGGGSDIDPYKEFGSSYQLLNFLPLDFFPDLNALVDTATALYEEELTGREHCSPHHTAIRQALVCWDELTKLIAWMSSNITSEQVRTIIVNHVNDTWGLKVRQSLWFHLSCLTFGQHTVQEFLVSFGVWIRTPAPYRPPNAPILSTLPEHTVIC

SEQ ID NO: 6726 - protein, 1365 aa, Artificial Sequence; identical to SEQ ID NO: 6706
  SARS-CoV-2/Australia/NSW10/2020__EPI_ISL_413596 spike protein (1-1211)(K986P_V987P) WhcAg construct

SEQ ID NO: 6727 - protein, 1365 aa, Artificial Sequence
  SARS-CoV-2/Switzerland/1000477797/2020__EPI_ISL_413023 spike protein (1-1211)(K986P_V987P) WhcAg construct
MFVFLVLLPLVSSQCVNLTTRTQLPPAYTNSFTRGVYYPDKVFRSSVLHSTQDLFLPFFSNVTWFHAIHVSGTNGTKRFDNPVLPFNDGVYFASTEKSNIIRGWIFGTTLDSKTQSLLIVNNATNVVIKVCEFQFCNDPFLGVYYHKNNKSWMESEFRVYSSANNCTFEYVSQPFLMDLEGKQGNFKNLREFVFKNIDGYFNIYSKHTPINLVRDLPQGFSALEPLVDLPIGINITRFQTLLALHRSYLTPGDSSSGWTAGAAAYYVGYLQPRTFLLKYNENGTITDAVDCALDPLSETKCTLKSFTVEKGIYQTSNFRVQPTESIVRFPNITNLCPFGEVFNATRFASVYAWNRKRISNCVADYSVLYNSASFSTFKCYGVSPTKLNDLCFTNVYADSFVIRGDEVRQIAPGQTGKIADYNYKLPDDFTGCVIAWNSNNLDSKVGGNYNYLYRLFRKSNLKPFERDISTEIYQAGSTPCNGVEGFNCYFPLQSYGFQPTNGVGYQPYRVVVLSFELLHAPATVCGPKKSTNLVKNKCVNFNFNGLTGTGVLTESNKKFLPFQQFGRDIADTTDAVRDPQTLEILDITPCSFGGVSVITPGTNTSNQVAVLYQGVNCTEVPVAIHADQLTPTWRVYSTGSNVFQTRAGCLIGAEHVNNSYECDIPIGAGICASYQTQTNSPRRARSVASQSIIAYTMSLGAENSVAYSNNSIAIPTNFTISVTTEILPVSMTKTSVDCTMYICGDSTECSNLLLQYGSFCTQLNRALTGIAVEQDKNTQEVFAQVKQIYKTPPIKDFGGFNFSQILPDPSKPSKRSFIEDLLFNKVTLADAGFIKQYGDCLGDIAARDLICAQKFNGLTVLPPLLTDEMIAQYTSALLAGTITSGWTFGAGAALQIPFAMQMAYRFNGIGVTQNVLYENQKLIANQFNSAIGKIQDSLSSTASALGKLQDVVNQNAQALNTLVKQLSSNFGAISSVLNDILSRLDPPEAEVQIDRLITGRLQSLQTYVTQQLIRAAEIRASANLAATKMSECVLGQSKRVDFCGKGYHLMSFPQSAPHGVVFLHVTYVPAQEKNFTTAPAICHDGKAHFPREGVFVSNGTHWFVTQRNFYEPQIITTDNTFVSGNCDVVIGIVNNTVYDPLQPELDSFKEELDKYFKNHTSPDVDLGDISGINASVVNIQKEIDRLNEVAKNLNESLIDLQELGKYEQYIKGGGGSDIDPYKEFGSSYQLLNFLPLDFFPDLNALVDTATALYEEELTGREHCSPHHTAIRQALVCWDELTKLIAWMSSNITSEQVRTIIVNHVNDTWGLKVRQSLWFHLSCLTFGQHTVQEFLVSFGVWIRTPAPYRPPNAPILSTLPEHTVIC

SEQ ID NO: 6728 - protein, 1365 aa, Artificial Sequence
  SARS-CoV-2/Belgium/BA-02291/2020__EPI_ISL_415159 spike protein (1-1211)(K986P_V987P) WhcAg construct
MFVFLVLLPLVSSQCVNLTTRTQLPPAYTNSFTRGVYYPDKVFRSSVLHSTQDLFLPFFSNVTWFHAIHVSGTNGTKRFDNPVLPFNDGVYFASTEKSNIIRGWIFGTTLDSKTQSLLIVNNATNVVIKVCEFQFCNDPFLGVYYHKNNKSWMESEFRVYSSANNCTFEYVSQPFLMDLEGKQGNFKNLREFVFKNIDGYFKIYSKHTPINLVRDLPQGFSALEPLVDLPIGINITRFQTLLALHRSYLTPGDSSSGWTAGAAAYYVGYLQPRTFLLKYNENGTITDAVDCALDPLSETKCTLKSFTVEKGIYQTSNFRVQPTESIVRFPNITNLCPFGEVFNATRFASVYAWNRKRISNCVADYSVLYNSASFSTFKCYGVSPTKLNDLCFTNVYADSFVIRGDEVRQIAPGQTGKIADYNYKLPDDFTGCVIAWNSNNLDSKVGGNYNYLYRLFRRSNLKPFERDISTEIYQAGSTPCNGVEGFNCYFPLQSYGFQPTNGVGYQPYRVVVLSFELLPAPATVCGPKKSTNLVKNKCVNFNFNGLTGTGVLTESNKKFLPFQQFGRDIADTTDAVRDPQTLEILDITPCSFGGVSVITPGTNTSNQVAVLYQGVNCTEVPVAIHADQLTPTWRVYSTGSNVFQTRAGCLIGAEHVNNSYECDIPIGAGICASYQTQTNSPRRARSVASQSIIAYTMSLGAENSVAYSNNSIAIPTNFTISVTTEILPVSMTKTSVDCTMYICGDSTECSNLLLQYGSFCTQLNRALTGIAVEQDKNTQEVFAQVKQIYKTPPIKDFGGFNFSQILPDPSKPSKRSFIEDLLFNKVTLADAGFIKQYGDCLGDIAARDLICAQKFNGLTVLPPLLTDEMIAQYTSALLAGTITSGWTFGAGAALQIPFAMQMAYRFNGIGVTQNVLYENQKLIANQFNSAIGKIQDSLSSAAPALGKLQDVVNQNAQALNTLVKQLSSNFGAISSVLNDILSRLDPPEAEVQIDRLITGRLQSLQTYVTQQLIRAAEIRASANLAATKMSECVLGQSKRVDFCGKGYHLMSFPQSAPHGVVFLHVTYVPAQEKNFTTAPAICHDGKAHFPREGVFVSNGTHWFVTQRNFYEPQIITTDNTFVSGNCDVVIGIVNNTVYDPLQPELDSFKEELDKYFKNHTSPDVDLGDISGINASVVNIQKEIDRLNEVAKNLNESLIDLQELGKYEQYIKGGGGSDIDPYKEFGSSYQLLNFLPLDFFPDLNALVDTATALYEEELTGREHCSPHHTAIRQALVCWDELTKLIAWMSSNITSEQVRTIIVNHVNDTWGLKVRQSLWFHLSCLTFGQHTVQEFLVSFGVWIRTPAPYRPPNAPILSTLPEHTVIC

SEQ ID NO: 6729 - protein, 1365 aa, Artificial Sequence
  SARS-CoV-2/USA/WA8-UW5/2020__EPI_ISL_413486 spike protein (1-1211)(K986P_V987P) WhcAg construct
MFVFLVLLPLVSSQCVNLTTRTQLPPAYTNSFTRGVYYPDKVFRSSVLHSTQDLFLPFFSNVTWFHAIHVSGTNGTKRFDNPVLPFNDGVYFASTEKSNIIRGWIFGTTLDSKTQSLLIVNNATNVVIKVCEFQFCNDPFLGVYYHKNNKSWMESEFRVYSSANNCTFEYVSQPFLMDLEGKQGNFKNLREFVFKNIDGYFKIYSKHTPINLVRDLPQGFSALEPLVDLPIGINITRFQTLLALHRSYLTPGDSSSGWTAGAAAYYVGYLQPRTFLLKYNENGTITDAVDCALDPLSETKCTLKSFTVEKGIYQTSNFRVQPTESIVRFPNITNLCPFGEVFNATRFASVYAWNRKRISNCVADYSVLYNSASFSTFKCYGVSPTKLNDLCFTNVYADSFVIRGDEVRQIAPGQTGKIADYNYKLPDDFTGCVIAWNSNNLDSKVGGNYNYLYRLFRKSNLKPFERDISTEIYQAGSTPCNGVEGFNCYFPLQSYGFQPTNGVGYQPYRVVVLSFELLHAPATVCGPKKSTNLVKNKCVNFNFNGLTGTGVLTESNKKFLPFQQFGRDIADTTDAVRDPQTLEILDITPCSFGGVSVITPGTNTSNQVAVLYQDVNCTEVPVAIHADQLTPTWRVYSTGSNVFQTRAGCLIGAEYVNNSYECDIPIGAGICASYQTQTNSPRRARSVASQSIIAYTMSLGAENSVAYSNNSIAIPTNFTISVTTEILPVSMTKTSVDCTMYICGDSTECSNLLLQYGSFCTQLNRALTGIAVEQDKNTQEVFAQVKQIYKTPPIKDFGGFNFSQILPDPSKPSKRSFIEDLLFNKVTLADAGFIKQYGDCLGDIAARDLICAQKFNGLTVLPPLLTDEMIAQYTSALLAGTITSGWTFGAGAALQIPFAMQMAYRFNGIGVTQNVLYENQKLIANQFNSAIGKIQDSLSSTASALGKLQDVVNQNAQALNTLVKQLSSNFGAISSVLNDILSRLDPPEAEVQIDRLITGRLQSLQTYVTQQLIRAAEIRASANLAATKMSECVLGQSKRVDFCGKGYHLMSFPQSAPHGVVFLHVTYVPAQEKNFTTAPAICHDGKAHFPREGVFVSNGTHWFVTQRNFYEPQIITTDNTFVSGNCDVVIGIVNNTVYDPLQPELDSFKEELDKYFKNHTSPDVDLGDISGINASVVNIQKEIDRLNEVAKNLNESLIDLQELGKYEQYIKGGGGSDIDPYKEFGSSYQLLNFLPLDFFPDLNALVDTATALYEEELTGREHCSPHHTAIRQALVCWDELTKLIAWMSSNITSEQVRTIIVNHVNDTWGLKVRQSLWFHLSCLTFGQHTVQEFLVSFGVWIRTPAPYRPPNAPILSTLPEHTVIC

SEQ ID NO: 6730 - protein, 1365 aa, Artificial Sequence
  SARS-CoV-2/England/20102000506/2020__EPI_ISL_415147 spike protein (1-1211)(K986P_V987P) WhcAg construct
MFVFLVLLPLVSSQCVNLTTRTQLPPAYTNSFTRGVYYPDKVFRSSVLHSTQDLFLPFFSNVTWFHAIHVSGTNGTKRFDNPVLPFNDGVYFASTEKSNIIRGWIFGTTLDSKTQSLLIVNNATNVVIKVCEFQFCNDPFLGVYYHKNNKSWMESEFRVYSSANNCTFEYVSQPFLMDLEGKQGNFKNLREFVFKNIDGYFKIYSKHTPINLVRDLPQGFSALEPLVDLPIGINITRFQTLLALHRSYLTPGDSSSGWTAGAAAYYVGYLQPRTFLLKYNENGTITDAVDCALDPLSETKCTLKSFTVEKGIYQTSNFRVQPTESIVRFPNITNLCPFGEVFNATRFASVYAWNRKRISNCVADYSVLYNSASFSTFKCYGVSPTKLNDLCFTNVYADSFVIRGDEVRQIAPGQTGKIADYNYKLPDDFTGCVIAWNSNNLDSKVGGNYNYLYRLFRKSNLKPFERDISTEIYQAGSTPCNGVEGFNCYFPLQSYGFQPTNGVGYQPYRVVVLSFELLHAPATVCGPKKSTNLVKNKCVNFNFNGLTGTGVLTESNKKFLPFQQFGRDIADTTDAVRDPQTLEILDITPCSFGGVSVITPGTNTSNQVAVLYQGVNCTEVPVAIHADQLTPTWRVYSTGSNVFQTRAGCLIGAEHVNNSYECDIPIGAGICASYQTQTNSPRRARSVASQSIIAYTMSLGAENSVAYSNNSIAIPTNFTISVTTEILPVSMTKTSVDCTMYICGDSTECSNLLLQYGSFCTQLNRALTGIAVEQDKNTQEVFAQVKQIYKTPPIKDFGGFNFSQILPDPSKPSKRSFIEDLLFNKVTLADAGFIKQYGYCLGDIAARDLICAQKFNGLTVLPPLLTDEMIAQYTSALLAGTITSGWTFGAGAALQIPFAMQMAYRFNGIGVTQNVLYENQKLIANQFNSAIGKIQDSLSSTASALGKLQDVVNQNAQALNTLVKQLSSNFGAISSVLNDILSRLDPPEAEVQIDRLITGRLQSLQTYVTQQLIRAAEIRASANLAATKMSECVLGQSKRVDFCGKGYHLMSFPQSAPHGVVFLHVTYVPAQEKNFTTAPAICHDGKAHFPREGVFVSNGTHWFVTQRNFYEPQIITTDNTFVSGNCDVVIGIVNNTVYDPLQPELDSFKEELDKYFKNHTSPDVDLGDISGINASVVNIQKEIDRLNEVAKNLNESLIDLQELGKYEQYIKGGGGSDIDPYKEFGSSYQLLNFLPLDFFPDLNALVDTATALYEEELTGREHCSPHHTAIRQALVCWDELTKLIAWMSSNITSEQVRTIIVNHVNDTWGLKVRQSLWFHLSCLTFGQHTVQEFLVSFGVWIRTPAPYRPPNAPILSTLPEHTVIC

SEQ ID NO: 6731 - protein, 1365 aa, Artificial Sequence
  SARS-CoV-2/Belgium/VAG-03013/2020__EPI_ISL_415155 spike protein (1-1211)(K986P_V987P) WhcAg construct
MFVFLVLLPLVSSQCVNLTTRTQLPPAYTNSFTRGVYYPDKVFRSSVLHSTQDLFLPFFSNVTWFHAIHVSGTNGTKRFDNPVLPFNDGVYFASTEKSNIIRGWIFGTTLDSKTQSLLIVNNATNVVIKVCEFQFCNDPFLGVYYHKNNKSWMESEFRVYSSANNCTFEYVSQPFLMDLEGKQGNFKNLREFVFKNIDGYFKIYSKHTPINLVRDLPQGFSALEPLVDLPIGINITRFQTLLALHRSYLTPGDSSSGWTAGAAAYYVGYLQPRTFLLKYNENGTITDAVDCALDPLSETKCTLKSFTVEKGIYQTSNFRVQPTESIVRFPNITNLCPFGEVFNATRFASVYAWNRKRISNCVADYSVLYNSASFSTFKCYGVSPTKLNDLCFTNVYADSFVIRGDEVRQIAPGQTGKIADYNYKLPDDFTGCVIAWNSNNLDSKVGGNYNYLYRLFRKSNLKPFERDISTEIYQAGSTPCNGVEGFNCYFPLQSYGFQPTNGVGYQPYRVVVLSFELLHAPATVCGPKKSTNLVKNKCVNFNFNGLTGTGVLTESNKKFLPFQQFGRDIADTTDAVRDPQTLEILDITPCSFGGVSVITPGTNTSNQVAVLYQGVNCTEVPVAIHADQLTPTWRVYSTGSNVFQTRAGCLIGAEHVNNSYECDIPIGAGICASYQTQTNSPRRARSVASQSIIAYTMSLGAENSVAYSNNSIAIPTNFTISVTTEILPVSMTKTSVDCTMYICGDSTECSNLLLQYGSFCTQLNRALTGIAVEQDKNTQEVFAQVKQIYKTPPIKDFGGFNFSQILPDPSKPSKRSFIEDLLFNKVTLADAGFIKQYGDCLGDIAARDLICAQKFNGLTVLPPLLTDEMIAQYTSALLAGTITSGWTFGAGAALQIPFAMQMAYRFNGIGVTQNVLYENQKLIANQFNSAIGKIQDSLSSTATALGKLQDVVNQNAQALNTLVKQLSSNFGAISSVLNDILSRLDPPEAEVQIDRLITGRLQSLQTYVTQQLIRAAEIRASANLAATKMSECVLGQSKRVDFCGKGYHLMSFPQSAPHGVVFLHVTYVPAQEKNFTTAPAICHDGKAHFPREGVFVSNGTHWFVTQRNFYEPQIITTDNTFVSGNCDVVIGIVNNTVYDPLQPELDSFKEELDKYFKNHTSPDVDLGDISGINASVVNIQKEIDRLNEVAKNLNESLIDLQELGKYEQYIKGGGGSDIDPYKEFGSSYQLLNFLPLDFFPDLNALVDTATALYEEELTGREHCSPHHTAIRQALVCWDELTKLIAWMSSNITSEQVRTIIVNHVNDTWGLKVRQSLWFHLSCLTFGQHTVQEFLVSFGVWIRTPAPYRPPNAPILSTLPEHTVIC

SEQ ID NO: 6732 - protein, 1365 aa, Artificial Sequence
  SARS-CoV-2/Belgium/BC-03016/2020__EPI_ISL_415157 spike protein (1-1211)(K986P_V987P) WhcAg construct
MFVFLVLLPLVSSQCVNLTTRTQLPPAYTNSFTRGVYYPDKVFRSSVLHSTQDLFLPFFSNVTWFHAIHVSGTNGTKRFDNPVLPFNDGVYFASTEKSNIIRGWIFGTTLDSKTQSLLIVNNATNVVIKVCEFQFCNDPFLGVYYHKNNKSWMESEFRVYSSANNCTFEYVSQPFLMDLEGKQGNFKNLREFVFKNIDGYFKIYSKHTPINLVRDLPQGFSALEPLVDLPIGINITRFQTLLALHRSYLTPGDSSSGWTAGAAAYYVGYLQPRTFLLKYNENGTITDAVDCALDPLSETKCTLKSFTVEKGIYQTSNFRVQPTESIVRFPNITNLCPFGEVFNATRFASVYAWNRKRISNCVADYSVLYNSASFSTFKCYGVSPTKLNDLCFTNVYADSFVIRGDEVRQIAPGQTGKIADYNYKLPDDFTGCVIAWNSNNLDSKVGGNYNYLYRLFRKSNLKPFERDISTEIYQAGSTPCNGVEGFNCYFPLQSYGFQPTNGVGYQPYRVVVLSFELLHAPATVCGPKKSTNLVKNKCVNFNFNGLTGTGVLTESNKKFLPFQQFGRDIADTTDAVRDPQTLEILDITPCSFGGVSVITPGTNTSNQVAVLYQGVNCTEVPVAIHADQLTPTWRVYSTGSNVFQTRAGCLIGAEHVNNSYECDIPIGAGICASYQTQTNSPRRARSVASQSIIAYTMSLGAENSVAYSNNSIAIPTNFTISVTTEILPVSMTKTSVDCTMYICGDSTECSNLLLQYGSFCTQLNRALTGIAVEQDKNTQEVFAQVKQIYKTPPIKDFGGFNFSQILPDPSKPSKRSFIEDLLFNKVTLADAGFIKQYGDCLGDIAARDLICAQKFNGLTVLPPLLTDEMIAQYTSALLAGTITSGWTFGAGAALQIPFAMQMAYRFNGIGVTQNVLYENQKLIANQFNSAIGKIQDSLSSTAPALGKLQDVVNQNAQALNTLVKQLSSNFGAISSVLNDILSRLDPPEAEVQIDRLITGRLQSLQTYVTQQLIRAAEIRASANLAATKMSECVLGQSKRVDFCGKGYHLMSFPQSAPHGVVFLHVTYVPAQEKNFTTAPAICHDGKAHFPREGVFVSNGTHWFVTQRNFYEPQIITTDNTFVSGNCDVVIGIVNNTVYDPLQPELDSFKEELDKYFKNHTSPDVDLGDISGINASVVNIQKEIDRLNEVAKNLNESLIDLQELGKYEQYIKGGGGSDIDPYKEFGSSYQLLNFLPLDFFPDLNALVDTATALYEEELTGREHCSPHHTAIRQALVCWDELTKLIAWMSSNITSEQVRTIIVNHVNDTWGLKVRQSLWFHLSCLTFGQHTVQEFLVSFGVWIRTPAPYRPPNAPILSTLPEHTVIC

SEQ ID NO: 6733 - protein, 1365 aa, Artificial Sequence
  SARS-CoV-2/Germany/BavPat3/2020__EPI_ISL_414521 spike protein (1-1211)(K986P_V987P) WhcAg construct
MFVFLVLLPLVSSQCVNLTTRTQLPPAYTNSFTRGVYYPDKVFRSSVLHSTQDLFLPFFSNVTWFHAIHVSGTNGTKRFDNPVLPFNDGVYFASTEKSNIIRGWIFGTTLDSKTQSLLIVNNATNVVIKVCEFQFCNDPFLGVYYHKNNKSWMESEFRVYSSANNCTFEYVSQPFLMDLEGKQGNFKNLREFVFKNIDGYFKIYSKHTPINLVRDLPQGFSALEPLVDLPIGINITRFQTLLALHRSYLTPGDSSSGWTAGAAAYYVGYLQPRTFLLKYNENGTITDAVDCALDPLSETKCTLKSFTVEKGIYQTSNFRVQPTESIVRFPNITNLCPFGEVFNATRFASVYAWNRKRISNCVADYSVLYNSASFSTFKCYGVSPTKLNDLCFTNVYADSFVIRGDEVRQIAPGQTGKIADYNYKLPDDFTGCVIAWNSNNLDSKVGGNYNYLYRLFRKSNLKPFERDISTEIYQAGSTPCNGVEGFNCYFPLQSYGFQPTNGVGYQPYRVVVLSFELLHAPATVCGPKKSTNLVKNKCVNFNFNGLTGTGVLTESNKKFLPFQQFGRDIADTTDAVRDPQTLEILDITPCSFGGVSVITPGTNTSNQVAVLYQDVNCTEVPVAIHADQLTPTWRVYSTGSNVFQTRAGCLIGAEHVNNSYECDIPIGAGICASYQTQTNSPRRARSVASQSIIAYTMSLGAENSVAYSNNSIAIPTNFTISVTTEILPVSMTKTSVDCTMYICGDSTECSNLLLQYGSFCTQLNRALTGIAVEQDKNTQQVFAQVKQIYKTPPIKDFGGFNFSQILPDPSKPSKRSFIEDLLFNKVTLADAGFIKQYGDCLGDIAARDLICAQKFNGLTVLPPLLTDEMIAQYTSALLAGTITSGWTFGAGAALQIPFAMQMAYRFNGIGVTQNVLYENQKLIANQFNSAIGKIQDSLSSTASALGKLQDVVNQNAQALNTLVKQLSSNFGAISSVLNDILSRLDPPEAEVQIDRLITGRLQSLQTYVTQQLIRAAEIRASANLAATKMSECVLGQSKRVDFCGKGYHLMSFPQSAPHGVVFLHVTYVPAQEKNFTTAPAICHDGKAHFPREGVFVSNGTHWFVTQRNFYEPQIITTDNTFVSGNCDVVIGIVNNTVYDPLQPELDSFKEELDKYFKNHTSPDVDLGDISGINASVVNIQKEIDRLNEVAKNLNESLIDLQELGKYEQYIKGGGGSDIDPYKEFGSSYQLLNFLPLDFFPDLNALVDTATALYEEELTGREHCSPHHTAIRQALVCWDELTKLIAWMSSNITSEQVRTIIVNHVNDTWGLKVRQSLWFHLSCLTFGQHTVQEFLVSFGVWIRTPAPYRPPNAPILSTLPEHTVIC

SEQ ID NO: 6734 - protein, 1365 aa, Artificial Sequence
  SARS-CoV-2/France/HF1805/2020__EPI_ISL_414628 spike protein (1-1211)(K986P_V987P) WhcAg construct
MFVFLVLLPLVSSQCVNLTTRTQLPPAYTNSFTRGVYYPDKVFRSSVLHSTQDLFLPFFSNVTWFHAIHVSGTNGTKRFDNPVLPFNDGVYFASTEKSNIIRGWIFGTTLDSKTQSLLIVNNATNVVIKVCEFQFCNDPFLGVYYHKNNKSWMESEFRVYSSANNCTFEYVSQPFLMDLEGKQGNFKNLREFVFKNIDGYFKIYSKHTPINLVRDLPQGFSALEPLVDLPIGINITRFQTLLALHRSYLTPGDSSSGWTAGAAAYYVGYLQPRTFLLKYNENGTITDAVDCALDPLSETKCTLKSFTVEKGIYQTSNFRVQPTESIVRFPNITNLCPFGEVFNATRFASVYAWNRKRISNCVADYSVLYNSASFSTFKCYGVSPTKLNDLCFTNVYADSFVIRGDEVRQIAPGQTGKIADYNYKLPDDFTGCVIAWNSNNLDSKVGGNYNYLYRLFRKSNLKPFERDISTEIYQAGSTPCNGVEGFNCYFPLQSYGFQPTNGVGYQPYRVVVLSFELLHAPATVCGPKKSTNLVKNKCVNFNFNGLTGTGVLTESNKKFLPFQQFGRDIADTTDAVRDPQTLEILDITPCSFGGVSVITPGTNTSNQVAVLYQGVNCTEVPVAIHADQLTPTWRVYSTGSNVFQTRAGCLIGAEHVNNSYECDIPIGAGICASYQTQTNSPRRARSVASQSIIAYTMSLGAENSVAYSNNSIAIPTNFTISVTTEILPVSMTKTSVDCTMYICGDSTECSNLLLQYGSFCTQLNRALTGIAVEQDKNTQEVFAQVKQIYKTPPIKDFGGFNFSQILPDPSKPSKRSFIEDLLFNKVTLADAGFIKQYGDCLGDIAARDLICAQKFNGLTVLPPLLTDEMIAQYTSALLAGTITSGWTFGAGAALQIPFAMQMAYRFNGIGVTQNVLYENQKLIANQFNSAIGKIQDSLSSTASALGKLQDVVNQNAQALNTLVKQLSSNFGAISSVLNDILSRLDPPEAEVQIDRLITGRLQSLQTYVTQQLIRAAEIRASANLAATKMSECVLGQSKRVDFCGKGYHLMSFPQSAPHGVVFLHVTYVPAQEKNFTTAPAICHDGKAHFPREGVFVSNGTHWFVTQRNFYEPQIITTDNTFVSGNCDVVIGVVNNTVYDPLQPELDSFKEELDKYFKNHTSPDVDLGDISGINASVVNIQKEIDRLNEVAKNLNESLIDLQELGKYEQYIKGGGGSDIDPYKEFGSSYQLLNFLPLDFFPDLNALVDTATALYEEELTGREHCSPHHTAIRQALVCWDELTKLIAWMSSNITSEQVRTIIVNHVNDTWGLKVRQSLWFHLSCLTFGQHTVQEFLVSFGVWIRTPAPYRPPNAPILSTLPEHTVIC

SEQ ID NO: 6735 - protein, 1365 aa, Artificial Sequence
  SARS-CoV-2/Netherlands/ZuidHolland_9/2020__EPI_ISL_414445 spike protein (1-1211)(K986P_V987P) WhcAg construct
MFVFLVLLPLVSSQCVNLTTRTQLPPAYTNSFTRGVYYPDKVFRSSVLHSTQDLFLPFFSNVTWFHAIHVSGTNGTKRFDNPVLPFNDGVYFASTEKSNIIRGWIFGTTLDSKTQSLLIVNNATNVVIKVCEFQFCNDPFLGVYYHKNNKSWMESEFRVYSSANNCTFEYVSQPFLMDLEGKQGNFKNLREFVFKNIDGYFKIYSKHTPINLVRDLPQGFSALEPLVDLPIGINITRFQTLLALHRSYLTPGDSSSGWTAGAAAYYVGYLQPRTFLLKYNENGTITDAVDCALDPLSETKCTLKSFTVEKGIYQTSNFRVQPTESIVRFPNITNLCPFGEVFNATRFASVYAWNRKRISNCVADYSVLYNSASFSTFKCYGVSPTKLNDLCFTNVYADSFVIRGDEVRQIAPGQTGKIADYNYKLPDDFTGCVIAWNSNNLDSKVGGNYNYLYRLFRKSNLKPFERDISTEIYQAGSTPCNGVEGFNCYFPLQSYGFQPTNGVGYQPYRVVVLSFELLHAPATVCGPKKSTNLVKNKCVNFNFNGLTGTGVLTESNKKFLPFQQFGRDIADTTDAVRDPQTLEILDITPCSFGGVSVITPGTNTSNQVAVLYQGVNCTEVPVAIHADQLTPTWRVYSTGSNVFQTRAGCLIGAEHVNNSYECDIPIGAGICASYQTQTNSPRRARSVASQSIIAYTMSLGAENSVAYSNNSIAIPTNFTISVTTEILPVSMTKTSVDCTMYICGDSTECSNLLLQYGSFCTQLNRALTGIAVEQDKNTQEVFAQVKQIYKTPPIKDFGGFNFSQILPDPSKPSKRSFIEDLLFNKVTLADAGFIKQYGDCLGDIAARDLICVQKFNGLTVLPPLLTDEMIAQYTSALLAGTITSGWTFGAGAALQIPFAMQMAYRFNGIGVTQNVLYENQKLIANQFNSAIGKIQDSLSSTASALGKLQDVVNQNAQALNTLVKQLSSNFGAISSVLNDILSRLDPPEAEVQIDRLITGRLQSLQTYVTQQLIRAAEIRASANLAATKMSECVLGQSKRVDFCGKGYHLMSFPQSAPHGVVFLHVTYVPAQEKNFTTAPAICHDGKAHFPREGVFVSNGTHWFVTQRNFYEPQIITTDNTFVSGNCDVVIGIVNNTVYDPLQPELDSFKEELDKYFKNHTSPDVDLGDISGINASVVNIQKEIDRLNEVAKNLNESLIDLQELGKYEQYIKGGGGSDIDPYKEFGSSYQLLNFLPLDFFPDLNALVDTATALYEEELTGREHCSPHHTAIRQALVCWDELTKLIAWMSSNITSEQVRTIIVNHVNDTWGLKVRQSLWFHLSCLTFGQHTVQEFLVSFGVWIRTPAPYRPPNAPILSTLPEHTVIC

SEQ ID NO: 6736 - protein, 1365 aa, Artificial Sequence
  SARS-CoV-2/Finland/FIN03032020A/2020__EPI_ISL_413602 spike protein (1-1211)(K986P_V987P) WhcAg construct
MFVFLVLLPLVSSQCVNLTTRTQLPPAYTNSFTRGVYYPDKVFRSSVLHSTQDLFLPFFSNVTWFHAIHVSGTNGTKRFDNPVLPFNDGVYFASTEKSNIIRGWIFGTTLDSKTQSLLIVNNATNVVIKVCEFQFCNDPFLGVYYHKNNKSWMESEFRVYSSANNCTFEYVSQPFLMDLEGKQGNFKNLREFVFKNIDGYFKIYSKHTPINLVRDLPQGFSALEPLVDLPIGINITRFQTLLALHRSYLTPGDSSSGWTAGAAAYYVGYLQPRTFLLKYNENGTITDAVDCALDPLSETKCTLKSFTVEKGIYQTSNFRVQPTESIVRFPNITNLCPFGEVFNATRFASVYAWNRKRISNCVADYSVLYNSASFSTFKCYGVSPTKLNDLCFTNVYADSFVIRGDEVRQIAPGQTGKIADYNYKLPDDFTGCVISWNSNNLDSKVGGNYNYLYRLFRKSNLKPFERDISTEIYQAGSTPCNGVEGFNCYFPLQSYGFQPTNGVGYQPYRVVVLSFELLHAPATVCGPKKSTNLVKNKCVNFNFNGLTGTGVLTESNKKFLPFQQFGRDIADTTDAVRDPQTLEILDITPCSFGGVSVITPGTNTSNQVAVLYQGVNCTEVPVAIHADQLTPTWRVYSTGSNVFQTRAGCLIGAEHVNNSYECDIPIGAGICASYQTQTNSPRRARSVASQSIIAYTMSLGAENSVAYSNNSIAIPTNFTISVTTEILPVSMTKTSVDCTMYICGDSTECSNLLLQYGSFCTQLNRALTGIAVEQDKNTQEVFAQVKQIYKTPPIKDFGGFNFSQILPDPSKPSKRSFIEDLLFNKVTLADAGFIKQYGDCLGDIAARDLICAQKFNGLTVLPPLLTDEMIAQYTSALLAGTITSGWTFGAGAALQIPFAMQMAYRFNGIGVTQNVLYENQKLIANQFNSAIGKIQDSLSSTASALGKLQDVVNQNAQALNTLVKQLSSNFGAISSVLNDILSRLDPPEAEVQIDRLITGRLQSLQTYVTQQLIRAAEIRASANLAATKMSECVLGQSKRVDFCGKGYHLMSFPQSAPHGVVFLHVTYVPAQEKNFTTAPAICHDGKAHFPREGVFVSNGTHWFVTQRNFYEPQIITTDNTFVSGNCDVVIGIVNNTVYDPLQPELDSFKEELDKYFKNHTSPDVDLGDISGINASVVNIQKEIDRLNEVAKNLNESLIDLQELGKYEQYIKGGGGSDIDPYKEFGSSYQLLNFLPLDFFPDLNALVDTATALYEEELTGREHCSPHHTAIRQALVCWDELTKLIAWMSSNITSEQVRTIIVNHVNDTWGLKVRQSLWFHLSCLTFGQHTVQEFLVSFGVWIRTPAPYRPPNAPILSTLPEHTVIC

SEQ ID NO: 6737 - protein, 1365 aa, Artificial Sequence
  SARS-CoV-2/France/GE1977/2020__EPI_ISL_414632 spike protein (1-1211)(K986P_V987P) WhcAg construct
MFVFLVLLPLVSSQCVNLTTRTQLPPAYTNSFTRGVYYPDKVFRSSVLHSTQDLFLPFFSNVTWFHAIHVSGTNGTKRFDNPVLPFNDGVYFASTEKSNIIRGWIFGTTLDSKTQSLLIVNNATNVVIKVCEFQFCNDPFLGVYYHKNNKSWMESEFRVYSSANNCTFEYVSQPFLMDLEGKQGNFKNLREFVFKNIDGYFKIYSKHTPINLVRDLPQGFSALEPLVDLPIGINITRFQTLLALHRSYLTPGDSSSGWTAGAAAYYVGYLQPRTFLLKYNENGTITDAVDCALDPLSETKCTLKSFTVEKGIYQTSNFRVQPTESIVRFPNITNLCPFGEVFNATRFASVYAWNRKRISNCVADYSVLYNSASFSTFKCYGVSPTKLNDLCFTNVYADSFVIRGDEVRQIAPGQTGKIADYNYKLPDDFTGCVIAWNSNNLDSKVGGNYNYLYRLFRKSNLKPFERDISTEIYQAGSTPCNGVEGFNCYFPLQSYGFQPTNGVGYQPYRVVVLSFELLHAPATVCGPKKSTNLVKNKCVNFNFNGLTGTGVLTESNKKFLPFQQFGRDIADTTDAVRDPQTLEILDITPCSFGGVSVITPGTNTSNQVAVLYQGVNCTEVPVAIHADQLTPTWRVYSTGSNVFQTRAGCLIGAEHVNNSYECDIPIGAGICASYQTQTNSPRRARSVASQSIIAYTMSLGAENSVAYSNNSIAIPTNFTISVTTEILPVSMTKTSVDCTMYICGDSTECSNLLLQYGSFCTQLNRALTGIAVEQDKNTQEVFAQVKQIYKTPPIKDFGGFNFSQILPDPSKPSKRSFIEDLLFNKVTLADAGFIKQYGDCLGDIAARDLICAQKFNGLTVLPPLLTDEMIAQYTSALLAGTITSGWTFGAGAALQIPFAMQMAYRFNGIGVTQNVLYENQKLIANQFNSAIGKIQDSLFSTASALGKLQDVVNQNAQALNTLVKQLSSNFGAISSVLNDILSRLDPPEAEVQIDRLITGRLQSLQTYVTQQLIRAAEIRASANLAATKMSECVLGQSKRVDFCGKGYHLMSFPQSAPHGVVFLHVTYVPAQEKNFTTAPAICHDGKAHFPREGVFVSNGTHWFVTQRNFYEPQIITTDNTFVSGNCDVVIGIVNNTVYDPLQPELDSFKEELDKYFKNHTSPDVDLGDISGINASVVNIQKEIDRLNEVAKNLNESLIDLQELGKYEQYIKGGGGSDIDPYKEFGSSYQLLNFLPLDFFPDLNALVDTATALYEEELTGREHCSPHHTAIRQALVCWDELTKLIAWMSSNITSEQVRTIIVNHVNDTWGLKVRQSLWFHLSCLTFGQHTVQEFLVSFGVWIRTPAPYRPPNAPILSTLPEHTVIC

SEQ ID NO: 6738 - protein, 1365 aa, Artificial Sequence
  SARS-CoV-2/Finland/FIN-313/2020__EPI_ISL_414641 spike protein (1-1211)(K986P_V987P) WhcAg construct
MFVFLVLLPLVSSQCVNLTTRTQLPPAYTNSFTRGVYYPDKVFRSSVLHSTQDLFLPFFSNVTWFHAIHVSGTNGTKRFDNPVLPFNDGVYFASTEKSNIIRGWIFGTTLDSKTQSLLIVNNATNVVIKVCEFQFCNDPFLGVYYHKNNKSWMESEFRVYSSANNCTFEYVSQPFLMDLEGKQGNFKNLREFVFKNIDGYFKIYSKHTPINLVRDLPQGFSALEPLVDLPIGINITRFKTLLALHRSYLTPGDSSSGWTAGAAAYYVGYLQPRTFLLKYNENGTITDAVDCALDPLSETKCTLKSFTVEKGIYQTSNFRVQPTESIVRFPNITNLCPFGEVFNATRFASVYAWNRKRISNCVADYSVLYNSASFSTFKCYGVSPTKLNDLCFTNVYADSFVIRGDEVRQIAPGQTGKIADYNYKLPDDFTGCVIAWNSNNLDSKVGGNYNYLYRLFRKSNLKPFERDISTEIYQAGSTPCNGVEGFNCYFPLQSYGFQPTNGVGYQPYRVVVLSFELLHAPATVCGPKKSTNLVKNKCVNFNFNGLTGTGVLTESNKKFLPFQQFGRDIADTTDAVRDPQTLEILDITPCSFGGVSVITPGTNTSNQVAVLYQGVNCTEVPVAIHADQLTPTWRVYSTGSNVFQTRAGCLIGAEHVNNSYECDIPIGAGICASYQTQTNSPRRARSVASQSIIAYTMSLGAENSVAYSNNSIAIPTNFTISVTTEILPVSMTKTSVDCTMYICGDSTECSNLLLQYGSFCTQLNRALTGIAVEQDKNTQEVFAQVKQIYKTPPIKDFGGFNFSQILPDPSKPSKRSFIEDLLFNKVTLADAGFIKQYGDCLGDIAARDLICAQKFNGLTVLPPLLTDEMIAQYTSALLAGTITSGWTFGAGAALQIPFAMQMAYRFNGIGVTQNVLYENQKLIANQFNSAIGKIQDSLSSTASALGKLQDVVNQNAQALNTLVKQLSSNFGAISSVLNDILSRLDPPEAEVQIDRLITGRLQSLQTYVTQQLIRAAEIRASANLAATKMSECVLGQSKRVDFCGKGYHLMSFPQSAPHGVVFLHVTYVPAQEKNFTTAPAICHDGKAHFPREGVFVSNGTHWFVTQRNFYEPQIITTDNTFVSGNCDVVIGIVNNTVYDPLQPELDSFKEELDKYFKNHTSPDVDLGDISGINASVVNIQKEIDRLNEVAKNLNESLIDLQELGKYEQYIKGGGGSDIDPYKEFGSSYQLLNFLPLDFFPDLNALVDTATALYEEELTGREHCSPHHTAIRQALVCWDELTKLIAWMSSNITSEQVRTIIVNHVNDTWGLKVRQSLWFHLSCLTFGQHTVQEFLVSFGVWIRTPAPYRPPNAPILSTLPEHTVIC

SEQ ID NO: 6739 - protein, 1365 aa, Artificial Sequence
  SARS-CoV-2/Netherlands/ZuidHolland_2/2020__EPI_ISL_414556 spike protein (1-1211)(K986P_V987P) WhcAg construct
MFVFLVLLPLVSSQCVNLTTRTQLPPAYTNSFTRGVYYPDKVFRSSVLHSTQDLFLPFFSNVTWFHAIHVSGTNGTKRFDNPVLPFNDGVYFASTEKSNIIRGWIFGTTLDSKTQSLLIVNNATNVVIKVCEFQFCNDPFLGVYYHKNNKSWMESEFRVYSSANNCTFEYVSQPFLMDLEGKQGNFKNLREFVFKNIDGYFKIYSKHTPINLVRDLPQGFSALEPLVDLPIGINITRFQTLLALHRSYLTPGDSSSGWTAGAAAYYVGYLQPRTFLLKYNENGTITDAVDCALDPLSETKCTLKSFTVEKGIYQTSNFRVQPTESIVRFPNITNLCPFGEVFNATRFASVYAWNRKRISNCVADYSVLYNSASFSTFKCYGVSPTKLNDLCFTNVYADSFVIRGDEVRQIAPGQTGKIADYNYKLPDDFTGCVIAWNSNNLDSKVGGNYNYLYRLFRKSNLKPFERDISTEIYQAGSTPCNGVEGFNCYFPLQSYGFQPTNGVGYQPYRVVVLSFELLHAPATVCGPKKSTNLVKNKCVNFNFNGLTGTGVLTESNKKFLPFQQFGRDIADTTDAVRDPQTLEILDITPCSFGGVSVITPGTNTSNQVAVLYQGVNCTEVPVAIHADQLTPTWRVYSTGSNVFQTRAGCLIGAEHVNNSYECDIPIGAGICASYQTQTNSPRRARSVASQSIIAYTMSLGAENSVAYSNNSIAIPTNFTISVTTEILPVSMTKTSVDCTMYICGDSTECSNLLLQYGSFCTQLNRALTGIALEQDKNTQEVFAQVKQIYKTPPIKDFGGFNFSQILPDPSKPSKRSFIEDLLFNKVTLADAGFIKQYGDCLGDIAARDLICAQKFNGLTVLPPLLTDEMIAQYTSALLAGTITSGWTFGAGAALQIPFAMQMAYRFNGIGVTQNVLYENQKLIANQFNSAIGKIQDSLSSTASALGKLQDVVNQNAQALNTLVKQLSSNFGAISSVLNDILSRLDPPEAEVQIDRLITGRLQSLQTYVTQQLIRAAEIRASANLAATKMSECVLGQSKRVDFCGKGYHLMSFPQSAPHGVVFLHVTYVPAQEKNFTTAPAICHDGKAHFPREGVFVSNGTHWFVTQRNFYEPQIITTDNTFVSGNCDVVIGIVNNTVYDPLQPELDSFKEELDKYFKNHTSPDVDLGDISGINASVVNIQKEIDRLNEVAKNLNESLIDLQELGKYEQYIKGGGGSDIDPYKEFGSSYQLLNFLPLDFFPDLNALVDTATALYEEELTGREHCSPHHTAIRQALVCWDELTKLIAWMSSNITSEQVRTIIVNHVNDTWGLKVRQSLWFHLSCLTFGQHTVQEFLVSFGVWIRTPAPYRPPNAPILSTLPEHTVIC

SEQ ID NO: 6740 - protein, 1365 aa, Artificial Sequence
  SARS-CoV-2/USA/WA-UW31/2020__EPI_ISL_414618 spike protein (1-1211)(K986P_V987P) WhcAg construct
MFVFLVLLPLVSSQCVNLTTRTQLPPAYTNSFTRGVYYPDKVFRSSVLHSTQDLFLPFFSNVTWFHAIHVSGTNGTKRFDNPVLPFNDGVYFASTEKSNIIRGWIFGTTLDSKTQSLLIVNNATNVVIKVCEFQFCNDPFLGVYYHKNNKSWMESEFRVYSSANNCTFEYVSQPFLMDLEGKQGNFKNLREFVFKNIDGYFKIYSKHTPINLVRDLPQGFSALEPLVDLPIGINITRFQTLLALHRSYLTPGDSSSGWTAGAAAYYVGYLQPRTFLLKYNENGTITDAVDCALDPLSETKCTLKSFTVEKGIYQTSNFRVQPTESIVRFPNITNLCPFGEVFNATRFASVYAWNRKRISNCVADYSVLYNSASFSTFKCYGVSPTKLNDLCFTNVYADSFVIRGDEVRQIAPGQTGKIADYNYKLPDDFTGCVIAWNSNNLDSKVGGNYNYLYRLFRKSNLKPFERDISTEIYQAGSTPCNGAEGFNCYFPLQSYGFQPTNGVGYQPYRVVVLSFELLHAPATVCGPKKSTNLVKNKCVNFNFNGLTGTGVLTESNKKFLPFQQFGRDIADTTDAVRDPQTLEILDITPCSFGGVSVITPGTNTSNQVAVLYQDVNCTEVPVAIHADQLTPTWRVYSTGSNVFQTRAGCLIGAEHVNNSYECDIPIGAGICASYQTQTNSPRRARSVASQSIIAYTMSLGAENSVAYSNNSIAIPTNFTISVTTEILPVSMTKTSVDCTMYICGDSTECSNLLLQYGSFCTQLNRALTGIAVEQDKNTQEVFAQVKQIYKTPPIKDFGGFNFSQILPDPSKPSKRSFIEDLLFNKVTLADAGFIKQYGDCLGDIAARDLICAQKFNGLTVLPPLLTDEMIAQYTSALLAGTITSGWTFGAGAALQIPFAMQMAYRFNGIGVTQNVLYENQKLIANQFNSAIGKIQDSLSSTASALGKLQDVVNQNAQALNTLVKQLSSNFGAISSVLNDILSRLDPPEAEVQIDRLITGRLQSLQTYVTQQLIRAAEIRASANLAATKMSECVLGQSKRVDFCGKGYHLMSFPQSAPHGVVFLHVTYVPAQEKNFTTAPAICHDGKAHFPREGVFVSNGTHWFVTQRNFYEPQIITTDNTFVSGNCDVVIGIVNNTVYDPLQPELDSFKEELDKYFKNHTSPDVDLGDISGINASVVNIQKEIDRLNEVAKNLNESLIDLQELGKYEQYIKGGGGSDIDPYKEFGSSYQLLNFLPLDFFPDLNALVDTATALYEEELTGREHCSPHHTAIRQALVCWDELTKLIAWMSSNITSEQVRTIIVNHVNDTWGLKVRQSLWFHLSCLTFGQHTVQEFLVSFGVWIRTPAPYRPPNAPILSTLPEHTVIC

SEQ ID NO: 6741 - protein, 1365 aa, Artificial Sequence
  SARS-CoV-2/South Korea/SNU01/2020__EPI_ISL_411929 spike protein (1-1211)(K986P_V987P) WhcAg construct
MFVFLVLLPLVSSQCVNLTTRTQLPPAYTNSFTRGVYYPDKVFRSSVLHSTQDLFLPFFSNVTWFHAIHVSGTNGTKRFDNPVLPFNDGVYFASTEKSNIIRGWIFGTTLDSKTQSLLIVNNATNVVIKVCEFQFCNDPFLGVYYHKNNKSWMESEFRVYSSANNCTFEYVSQPFLMDLEGKQGNFKNLREFVFKNIDGYFKIYSKHTPINLVRDLPQGFWALEPLVDLPIGINITRFQTLLALHRSYLTPGDSSSGWTAGAAAYYVGYLQPRTFLLKYNENGTITDAVDCALDPLSETKCTLKSFTVEKGIYQTSNFRVQPTESIVRFPNITNLCPFGEVFNATRFASVYAWNRKRISNCVADYSVLYNSASFSTFKCYGVSPTKLNDLCFTNVYADSFVIRGDEVRQIAPGQTGKIADYNYKLPDDFTGCVIAWNSNNLDSKVGGNYNYLYRLFRKSNLKPFERDISTEIYQAGSTPCNGVEGFNCYFPLQSYGFQPTNGVGYQPYRVVVLSFELLHAPATVCGPKKSTNLVKNKCVNFNFNGLTGTGVLTESNKKFLPFQQFGRDIADTTDAVRDPQTLEILDITPCSFGGVSVITPGTNTSNQVAVLYQDVNCTEVPVAIHADQLTPTWRVYSTGSNVFQTRAGCLIGAEHVNNSYECDIPIGAGICASYQTQTNSPRRARSVASQSIIAYTMSLGAENSVAYSNNSIAIPTNFTISVTTEILPVSMTKTSVDCTMYICGDSTECSNLLLQYGSFCTQLNRALTGIAVEQDKNTQEVFAQVKQIYKTPPIKDFGGFNFSQILPDPSKPSKRSFIEDLLFNKVTLADAGFIKQYGDCLGDIAARDLICAQKFNGLTVLPPLLTDEMIAQYTSALLAGTITSGWTFGAGAALQIPFAMQMAYRFNGIGVTQNVLYENQKLIANQFNSAIGKIQDSLSSTASALGKLQDVVNQNAQALNTLVKQLSSNFGAISSVLNDILSRLDPPEAEVQIDRLITGRLQSLQTYVTQQLIRAAEIRASANLAATKMSECVLGQSKRVDFCGKGYHLMSFPQSAPHGVVFLHVTYVPAQEKNFTTAPAICHDGKAHFPREGVFVSNGTHWFVTQRNFYEPQIITTDNTFVSGNCDVVIGIVNNTVYDPLQPELDSFKEELDKYFKNHTSPDVDLGDISGINASVVNIQKEIDRLNEVAKNLNESLIDLQELGKYEQYIKGGGGSDIDPYKEFGSSYQLLNFLPLDFFPDLNALVDTATALYEEELTGREHCSPHHTAIRQALVCWDELTKLIAWMSSNITSEQVRTIIVNHVNDTWGLKVRQSLWFHLSCLTFGQHTVQEFLVSFGVWIRTPAPYRPPNAPILSTLPEHTVIC

SEQ ID NO: 6742 - protein, 1365 aa, Artificial Sequence
  SARS-CoV-2/China/WF0004/2020__EPI_ISL_413694 spike protein (1-1211)(K986P_V987P) WhcAg construct
MFVFLVLLPLVSSQCVNLTTRTQLPPAYTNSFTRGVYYPDKVFRSSVLHSTQDLFLPFFSNVTWFHAIHVSGTNGTKRFDNPVLPFNDGVYFASTEKSNIIRGWIFGTTLDSKTQSLLIVNNATNVVIKVCEFQFCNDPFLGVYYHKNNKSWTESEFRVYSSANNCTFEYVSQPFLMDLEGKQGNFKNLREFVFKNIDGYFKIYSKHTPINLVRDLPQGFSALEPLVDLPIGINITRFQTLLALHRSYLTPGDSSSGWTAGAAAYYVGYLQPRTFLLKYNENGTITDAVDCALDPLSETKCTLKSFTVEKGIYQTSNFRVQPTESIVRFPNITNLCPFGEVFNATRFASVYAWNRKRISNCVADYSVLYNSASFSTFKCYGVSPTKLNDLCFTNVYADSFVIRGDEVRQIAPGQTGKIADYNYKLPDDFTGCVIAWNSNNLDSKVGGNYNYLYRLFRKSNLKPFERDISTEIYQAGSTPCNGVEGFNCYFPLQSYGFQPTNGVGYQPYRVVVLSFELLHAPATVCGPKKSTNLVKNKCVNFNFNGLTGTGVLTESNKKFLPFQQFGRDIADTTDAVRDPQTLEILDITPCSFGGVSVITPGTNTSNQVAVLYQDVNCTEVPVAIHADQLTPTWRVYSTGSNVFQTRAGCLIGAEHVNNSYECDIPIGAGICASYQTQTNSPRRARSVASQSIIAYTMSLGAENSVAYSNNSIAIPTNFTISVTTEILPVSMTKTSVDCTMYICGDSTECSNLLLQYGSFCTQLNRALTGIAVEQDKNTQEVFAQVKQIYKTPPIKDFGGFNFSQILPDPSKPSKRSFIEDLLFNKVTLADAGFIKQYGDCLGDIAARDLICAQKFNGLTVLPPLLTDEMIAQYTSALLAGTITSGWTFGAGAALQIPFAMQMAYRFNGIGVTQNVLYENQKLIANQFNSAIGKIQDSLSSTASALGKLQDVVNQNAQALNTLVKQLSSNFGAISSVLNDILSRLDPPEAEVQIDRLITGRLQSLQTYVTQQLIRAAEIRASANLAATKMSECVLGQSKRFDFCGKGYHLMSFPQSAPHGVVFLHVTYVPAQEKNFTTAPAICHDGKAHFPREGVFVSNGTHWFVTQRNFYEPQIITTDNTFVSGNCDVVIGIVNNTVYDPLQPELDSFKEELDKYFKNHTSPDVDLGDISGINASVVNIQKEIDRLNEVAKNLNESLIDLQELGKYEQYIKGGGGSDIDPYKEFGSSYQLLNFLPLDFFPDLNALVDTATALYEEELTGREHCSPHHTAIRQALVCWDELTKLIAWMSSNITSEQVRTIIVNHVNDTWGLKVRQSLWFHLSCLTFGQHTVQEFLVSFGVWIRTPAPYRPPNAPILSTLPEHTVIC

SEQ ID NO: 6743 - protein, 1365 aa, Artificial Sequence
  SARS-CoV-2/China/WF0028/2020__EPI_ISL_413791 spike protein (1-1211)(K986P_V987P) WhcAg construct
MFVFLVLLPLVSSQCVNLTTRTQLPPAYTNSFTRGVYYPDKVFRSSVLHSTQDLFLPFFSNVTWFHAIHVSGTNGTKRFDNPVLPFNDGVYFASTEKSNIIRGWIFGTTLDSKTQSLLIVNNATNVVIKVCEFQFCNDPFLGVYYHKNNKSWMESEFRVYSSANNCTFEYVSQPFLMDLEGKQGNFKNLREFVFKNIDGYFKIYSKHTPINLVRDLPQGFSALEPLVDLPIGINITRFQTLLALHRSYLTPGDSSSGWTAGAAAYYVGYLQPRTFLLKYNENGTITDAVDCALDPLSETKCTLKSFTVEKGIYQTSNFRVQPTESIVRFPNITNLCPFGEVFNATRFASVYAWNRKRISNCVADYSVLYNSASFSTFKCYGVSPTKLNDLCFTNVYADSFVIRGDEVRQIAPGQTGKIADYNYKLPDDFTGCVIAWNSNNLDSKVGGNYNYLYRLFRKSNLKPFERDISTEIYQAGSTPCNGVEGFNCYFPLQSYGFQPTNGVGYQPYRVVVLSFELLHAPATVCGPKKSTNLVKNKCVNFNFNGLTGTGVLTESNKKFLPFQQFGRDIADTTDAVRDPQTLEILDITPCSFGGVSVITPGTNTSNQVAVLYQDVNCTEVPVAIHADQLTPTWRVYSTGSNVFQTRAGCLIGAEHVNNSYECDIPIGAGICASYQTQTNSPRRARSVASQSIIAYTMSLGAENSVAYSNNSIAIPTNFTISVTTEILPVSMTKTSVDCTMYICGDSTECSNLLLQYGSFCTQLNRALTGIAVEQDKNTQEVFAQVKQIYKTPPIKDFGGFNFSQILPDPSKPSKRSFIEDLLFNKVTLADAGFIKQYGDCLGDIAARDLICAQKFNGLTVLPPLLTDEMIAQYTSALLAGTITSGWTFGAGAALQIPFAMQMAYRFNGIGVTQNVLYENQKLIANQFNSAIGKIQDSLSSTASALGKLQDVVNQNAQALNTLVKQLSSNFGAISSVLNDILSRLDPPEAEVQIDRLITGRLQSLQTYVTQQLIRAAEIRASANLAATKMSECVLGQSKRVDFCGKGYHLMSFPQSAPHGVVFLHVTYVPAQEKNFTTAPAICHDGKAHFPREGVFVSNGTHWFVTQRNFYEPQIITTDNTFVSGNCDVVIGIVNNTVYDPLQPELESFKEELDKYFKNHTSPDVDLGDISGINASVVNIQKEIDRLNEVAKNLNESLIDLQELGKYEQYIKGGGGSDIDPYKEFGSSYQLLNFLPLDFFPDLNALVDTATALYEEELTGREHCSPHHTAIRQALVCWDELTKLIAWMSSNITSEQVRTIIVNHVNDTWGLKVRQSLWFHLSCLTFGQHTVQEFLVSFGVWIRTPAPYRPPNAPILSTLPEHTVIC

SEQ ID NO: 6744 - protein, 1365 aa, Artificial Sequence
  SARS-CoV-2/2019-nCoV/USA-CruiseA-18/2020__MT159716.1 spike protein (1-1211)(K986P_V987P) WhcAg construct
MFVFLVLLPLVSSQCVNLTTRTQLPPAYTNSFTRGVYYPDKVFRSSVLHSTQDLFLPFFSNVTWFHAIHVSGTNGTKRFDNPVLPFNDGVYFASTEKSNIIRGWIFGTTLDSKTQSLLIVNNATNVVIKVCEFQFCNDPFLGVYYHKNNKSWMESELRVYSSANNCTFEYVSQPFLMDLEGKQGNFKNLREFVFKNIDGYFKIYSKHTPINLVRDLPQGFSALEPLVDLPIGINITRFQTLLALHRSYLTPGDSSSGWTAGAAAYYVGYLQPRTFLLKYNENGTITDAVDCALDPLSETKCTLKSFTVEKGIYQTSNFRVQPTESIVRFPNITNLCPFGEVFNATRFASVYAWNRKRISNCVADYSVLYNSASFSTFKCYGVSPTKLNDLCFTNVYADSFVIRGDEVRQIAPGQTGKIADYNYKLPDDFTGCVIAWNSNNLDSKVGGNYNYLYRLFRKSNLKPFERDISTEIYQAGSTPCNGVEGFNCYFPLQSYGFQPTNGVGYQPYRVVVLSFELLHAPATVCGPKKSTNLVKNKCVNFNFNGLTGTGVLTESNKKFLPFQQFGRDIADTTDAVRDPQTLEILDITPCSFGGVSVITPGTNTSNQVAVLYQDVNCTEVPVAIHADQLTPTWRVYSTGSNVFQTRAGCLIGAEHVNNSYECDIPIGAGICASYQTQTNSPRRARSVASQSIIAYTMSLGAENSVAYSNNSIAIPTNFTISVTTEILPVSMTKTSVDCTMYICGDSTECSNLLLQYGSFCTQLNRALTGIAVEQDKNTQEVFAQVKQIYKTPPIKDFGGFNFSQILPDPSKPSKRSFIEDLLFNKVTLADAGFIKQYGDCLGDIAARDLICAQKFNGLTVLPPLLTDEMIAQYTSALLAGTITSGWTFGAGAALQIPFAMQMAYRFNGIGVTQNVLYENQKLIANQFNSAIGKIQDSLSSTASALGKLQDVVNQNAQALNTLVKQLSSNFGAISSVLNDILSRLDPPEAEVQIDRLITGRLQSLQTYVTQQLIRAAEIRASANLAATKMSECVLGQSKRVDFCGKGYHLMSFPQSAPHGVVFLHVTYVPAQEKNFTTAPAICHDGKAHFPREGVFVSNGTHWFVTQRNFYEPQIITTDNTFVSGNCDVVIGIVNNTVYDPLQPELDSFKEELDKYFKNHTSPDVDLGDISGINASVVNIQKEIDRLNEVAKNLNESLIDLQELGKYEQYIKGGGGSDIDPYKEFGSSYQLLNFLPLDFFPDLNALVDTATALYEEELTGREHCSPHHTAIRQALVCWDELTKLIAWMSSNITSEQVRTIIVNHVNDTWGLKVRQSLWFHLSCLTFGQHTVQEFLVSFGVWIRTPAPYRPPNAPILSTLPEHTVIC

SEQ ID NO: 6745 - protein, 1365 aa, Artificial Sequence
  SARS-CoV-2/SARS-CoV-2/Yunnan-01/human/2020/CHN__MT049951.1 spike protein (1-1211)(K986P_V987P) WhcAg construct
MFVFLVLLPLVSSQCVNLTTRTQLPPANTNSFTRGVYYPDKVFRSSVLHSTQDLFLPFFSNVTWFHAIHVSGTNGTKRFDNPVLPFNDGVYFASTEKSNIIRGWIFGTTLDSKTQSLLIVNNATNVVIKVCEFQFCNDPFLGVYYHKNNKSWMESEFRVYSSANNCTFEYVSQPFLMDLEGKQGNFKNLREFVFKNIDGYFKIYSKHTPINLVRDLPQGFSALEPLVDLPIGINITRFQTLLALHRSYLTPGDSSSGWTAGAAAYYVGYLQPRTFLLKYNENGTITDAVDCALDPLSETKCTLKSFTVEKGIYQTSNFRVQPTESIVRFPNITNLCPFGEVFNATRFASVYAWNRKRISNCVADYSVLYNSASFSTFKCYGVSPTKLNDLCFTNVYADSFVIRGDEVRQIAPGQTGKIADYNYKLPDDFTGCVIAWNSNNLDSKVGGNYNYLYRLFRKSNLKPFERDISTEIYQAGSTPCNGVEGFNCYFPLQSYGFQPTNGVGYQPYRVVVLSFELLHAPATVCGPKKSTNLVKNKCVNFNFNGLTGTGVLTESNKKFLPFQQFGRDIADTTDAVRDPQTLEILDITPCSFGGVSVITPGTNTSNQVAVLYQDVNCTEVPVAIHADQLTPTWRVYSTGSNVFQTRAGCLIGAEHVNNSYECDIPIGAGICASYQTQTNSPRRARSVASQSIIAYTMSLGAENSVAYSNNSIAIPTNFTISVTTEILPVSMTKTSVDCTMYICGDSTECSNLLLQYGSFCTQLNRALTGIAVEQDKNTQEVFAQVKQIYKTPPIKDFGGFNFSQILPDPSKPSKRSFIEDLLFNKVTLADAGFIKQYGDCLGDIAARDLICAQKFNGLTVLPPLLTDEMIAQYTSALLAGTITSGWTFGAGAALQIPFAMQMAYRFNGIGVTQNVLYENQKLIANQFNSAIGKIQDSLSSTASALGKLQDVVNQNAQALNTLVKQLSSNFGAISSVLNDILSRLDPPEAEVQIDRLITGRLQSLQTYVTQQLIRAAEIRASANLAATKMSECVLGQSKRVDFCGKGYHLMSFPQSAPHGVVFLHVTYVPAQEKNFTTAPAICHDGKAHFPREGVFVSNGTHWFVTQRNFYEPQIITTDNTFVSGNCDVVIGIVNNTVYDPLQPELDSFKEELDKYFKNHTSPDVDLGDISGINASVVNIQKEIDRLNEVAKNLNESLIDLQELGKYEQYIKGGGGSDIDPYKEFGSSYQLLNFLPLDFFPDLNALVDTATALYEEELTGREHCSPHHTAIRQALVCWDELTKLIAWMSSNITSEQVRTIIVNHVNDTWGLKVRQSLWFHLSCLTFGQHTVQEFLVSFGVWIRTPAPYRPPNAPILSTLPEHTVIC

SEQ ID NO: 6746 - protein, 1365 aa, Artificial Sequence
  SARS-CoV-2/USA/WA-UW292/2020__EPI_ISL_418077 spike protein (1-1211)(K986P_V987P) WhcAg construct
MFVFLVLLPLVSSQCVNLTTRTQLPPAYTNSFTRGVYYPDKVFRSSVLHSTQDLFLPFFSNVTWFHAIHVSGTNGTKRFDNPVLPFNDGVYFASTEKSNIIRGWIFGTTLDSKTQSLLIVNNATNVVIKVCEFQFCNDPFLGVYYHKNNKSWMESEFRVYSSANNCTFEYVSQPFLMDLEGKQGNFKNLREFVFKNIDGYFKIYSKHTPINLVRDLPQGFSALEPLVDLPIGINITRFQTLLALHRSYLTPGDSSSGWTAGAAAYYVGYLQPRTFLLKYNENGTITDAVDCALDPLSETKCTLKSFTVEKGIYQTSNFRVQPTESIVRFPNITNLCPFGEVFNATRFASVYAWNRKRISNCVADYSVLYNSASFSTFKCYGVSPTKLNDLCFTNVYADSFVIRGDEVRQIAPGQTGKIADYNYKLPDDFTGCVIAWNSNNLDSKVGGNYNYLYRLFRKSNLKPFERDISTEIYQASSTPCNGVEGFNCYFPLQSYGFQPTNGVGYQPYRVVVLSFELLHAPATVCGPKKSTNLVKNKCVNFNFNGLTGTGVLTESNKKFLPFQQFGRDIADTTDAVRDPQTLEILDITPCSFGGVSVITPGTNTSNQVAVLYQDVNCTEVPVAIHADQLTPTWRVYSTGSNVFQTRAGCLIGAEHVNNSYECDIPIGAGICASYQTQTNSPRRARSVASQSIIAYTMSLGAENSVAYSNNSIAIPTNFTISVTTEILPVSMTKTSVDCTMYICGDSTECSNLLLQYGSFCTQLNRALTGIAVEQDKNTQEVFAQVKQIYKTPPIKDFGGFNFSQILPDPSKPSKRSFIEDLLFNKVTLADAGFIKQYGDCLGDIAARDLICAQKFNGLTVLPPLLTDEMIAQYTSALLAGTITSGWTFGAGAALQIPFAMQMAYRFNGIGVTQNVLYENQKLIANQFNSAIGKIQDSLSSTASALGKLQDVVNQNAQALNTLVKQLSSNFGAISSVLNDILSRLDPPEAEVQIDRLITGRLQSLQTYVTQQLIRAAEIRASANLAATKMSECVLGQSKRVDFCGKGYHLMSFPQSAPHGVVFLHVTYVPAQEKNFTTAPAICHDGKAHFPREGVFVSNGTHWFVTQRNFYEPQIITTDNTFVSGNCDVVIGIVNNTVYDPLQPELDSFKEELDKYFKNHTSPDVDLGDISGINASVVNIQKEIDRLNEVAKNLNESLIDLQELGKYEQYIKGGGGSDIDPYKEFGSSYQLLNFLPLDFFPDLNALVDTATALYEEELTGREHCSPHHTAIRQALVCWDELTKLIAWMSSNITSEQVRTIIVNHVNDTWGLKVRQSLWFHLSCLTFGQHTVQEFLVSFGVWIRTPAPYRPPNAPILSTLPEHTVIC

SEQ ID NO: 6747 - protein, 1365 aa, Artificial Sequence
  SARS-CoV-2/Iceland/192/2020__EPI_ISL_417819 spike protein (1-1211)(K986P_V987P) WhcAg construct
MFVFFVLLPLVSSQCVNLTTRTQLPPAYTNSFTRGVYYPDKVFRSSVLHSTQDLFLPFFSNVTWFHAIHVSGTNGTKRFDNPVLPFNDGVYFASTEKSNIIRGWIFGTTLDSKTQSLLIVNNATNVVIKVCEFQFCNDPFLGVYYHKNNKSWMESEFRVYSSANNCTFEYVSQPFLMDLEGKQGNFKNLREFVFKNIDGYFKIYSKHTPINLVRDLPQGFSALEPLVDLPIGINITRFQTLLALHRSYLTPGDSSSGWTAGAAAYYVGYLQPRTFLLKYNENGTITDAVDCALDPLSETKCTLKSFTVEKGIYQTSNFRVQPTESIVRFPNITNLCPFGEVFNATRFASVYAWNRKRISNCVADYSVLYNSASFSTFKCYGVSPTKLNDLCFTNVYADSFVIRGDEVRQIAPGQTGKIADYNYKLPDDFTGCVIAWNSNNLDSKVGGNYNYLYRLFRKSNLKPFERDISTEIYQAGSTPCNGVEGFNCYFPLQSYGFQPTNGVGYQPYRVVVLSFELLHAPATVCGPKKSTNLVKNKCVNFNFNGLTGTGVLTESNKKFLPFQQFGRDIADTTDAVRDPQTLEILDITPCSFGGVSVITPGTNTSNQVAVLYQGVNCTEVPVAIHADQLTPTWRVYSTGSNVFQTRAGCLIGAEHVNNSYECDIPIGAGICASYQTQTNSPRRARSVASQSIIAYTMSLGAENSVAYSNNSIAIPTNFTISVTTEILPVSMTKTSVDCTMYICGDSTECSNLLLQYGSFCTQLNRALTGIAVEQDKNTQEVFAQVKQIYKTPPIKDFGGFNFSQILPDPSKPSKRSFIEDLLFNKVTLADAGFIKQYGDCLGDIAARDLICAQKFNGLTVLPPLLTDEMIAQYTSALLAGTITSGWTFGAGAALQIPFAMQMAYRFNGIGVTQNVLYENQKLIANQFNSAIGKIQDSLSSTASALGKLQDVVNQNAQALNTLVKQLSSNFGAISSVLNDILSRLDPPEAEVQIDRLITGRLQSLQTYVTQQLIRAAEIRASANLAATKMSECVLGQSKRVDFCGKGYHLMSFPQSAPHGVVFLHVTYVPAQEKNFTTAPAICHDGKAHFPREGVFVSNGTHWFVTQRNFYEPQIITTDNTFVSGNCDVVIGIVNNTVYDPLQPELDSFKEELDKYFKNHTSPDVDLGDISGINASVVNIQKEIDRLNEVAKNLNESLIDLQELGKYEQYIKGGGGSDIDPYKEFGSSYQLLNFLPLDFFPDLNALVDTATALYEEELTGREHCSPHHTAIRQALVCWDELTKLIAWMSSNITSEQVRTIIVNHVNDTWGLKVRQSLWFHLSCLTFGQHTVQEFLVSFGVWIRTPAPYRPPNAPILSTLPEHTVIC

SEQ ID NO: 6748 - protein, 1365 aa, Artificial Sequence
  SARS-CoV-2/Belgium/ULG-6939/2020__EPI_ISL_417020 spike protein (1-1211)(K986P_V987P) WhcAg construct
MFVFLVLLPLVSSQCVNLTTRTQLPPAYTNSFTRGVYYPDKVFRSSVLHSTQDLFLPFFSNVTWFHAIHVSGTNGTKRFDNPVLPFNDGVYFASTEKSNIIRGWIFGTTLDSKTQSLLIVNNATNVVIKVCEFQFCNDPFLGVYYHKNNKSWMESEFRVYSSANNCTFEYVSQPFLMDLEGKQGNFKNLREFVFKNIDGYFKIYSKHTPINLVRDLPQGFSALEPLVDLPIGINITRFQTLLALHRSYLTPGDSSSGWTAGAAAYYVGYLQPRTFLLKYNENGTITDAVDCALDPLSETKCTLKSFTVEKGIYQTSNFRVQPTESIVRFPNITNLCPFGEVFNATRFASVYAWNRKRISNCVADYSVLYNSASFSTFKCYGVSPTKLNDLCFTNVYADSFVIRGDEVRQIAPGQTGKIADYNYKLPDDFTGCVIAWNSNNLDSKVGGNYNYLYRLFRKSNLKPFERDISTEIYQAGSTPCNGVEGFNCYFPLQSYGFQPTNGVGYQPYRVVVLSFELLHAPATVCGPKKSTNLVKNKCVNFNFNGLTGTGVLTESNKKFLPFQQFGRDIADTTDAVRDPQTLEILDITPCSFGGVSVITPGTNTSNQVAVLYQGVNCTEVPVAIHADQLTPTWRVYSTGSNVFQTRAGCLIGAEHVNNSYECDIPIGAGICASYQTQTNSPRRARSVASQSIIAYTMSLGAENSVVYSNNSIAIPTNFTISVTTEILPVSMTKTSVDCTMYICGDSTECSNLLLQYGSFCTQLNRALTGIAVEQDKNTQEVFAQVKQIYKTPPIKDFGGFNFSQILPDPSKPSKRSFIEDLLFNKVTLADAGFIKQYGDCLGDIAARDLICAQKFNGLTVLPPLLTDEMIAQYTSALLAGTITSGWTFGAGAALQIPFAMQMAYRFNGIGVTQNVLYENQKLIANQFNSAIGKIQDSLSSTASALGKLQDVVNQNAQALNTLVKQLSSNFGAISSVLNDILSRLDPPEAEVQIDRLITGRLQSLQTYVTQQLIRAAEIRASANLAATKMSECVLGQSKRVDFCGKGYHLMSFPQSAPHGVVFLHVTYVPAQEKNFTTAPAICHDGKAHFPREGVFVSNGTHWFVTQRNFYEPQIITTDNTFVSGNCDVVIGIVNNTVYDPLQPELDSFKEELDKYFKNHTSPDVDLGDISGINASVVNIQKEIDRLNEVAKNLNESLIDLQELGKYEQYIKGGGGSDIDPYKEFGSSYQLLNFLPLDFFPDLNALVDTATALYEEELTGREHCSPHHTAIRQALVCWDELTKLIAWMSSNITSEQVRTIIVNHVNDTWGLKVRQSLWFHLSCLTFGQHTVQEFLVSFGVWIRTPAPYRPPNAPILSTLPEHTVIC

SEQ ID NO: 6749 - protein, 1365 aa, Artificial Sequence
  SARS-CoV-2/France/HF2496/2020__EPI_ISL_418231 spike protein (1-1211)(K986P_V987P) WhcAg construct
MFVFLVLLPLVSSQCVNLTTRTQLPPAYTNSFTRGVYYPDKVFRSSVLHSTQDLFLPFFSNVTWFHAIHVSGTNGTKRFDNPVLPFNDGVYFASTEKSNIIRGWIFGTTLDSKTQSLLIVNNATNVVIKVCEFQFCNDPFLGVYYHKNNKSWMESEFRVYSSANNCTFEYVSQPFLMDLEGKQGNFKNLREFVFKNIDGYFKIYSKHTPINLVRDLPQGFSALEPLVDLPIGINITRFQTLLALHRSYLTPGDSSSGWTAGAAAYYVGYLQPRTFLLKYNENGTITDAVDCALDPLSETKCTLKSFTVEKGIYQTSNFRVQPTESIVRFPNITNLCPFGEVFNATRFASVYAWNRKRISNCVADYSVLYNSASFSTFKCYGVSPTKLNDLCFTNVYADSFVIRGDEVRQIAPGQTGKIADYNYKLPDDFTGCVIAWNSNNLDSKVGGNYNYLYRLFRKSNLKPFERDISTEIYQAGSTPCNGVEGFNCYFPLQSYGFQPTNGVGYQPYRVVVLSFELLHAPATVCGPKKSTNLVKNKCVNFNFNGLTGTGVLTESNKKFLPFQQFGRDIADTTDAVRDPQTLEILDITPCSFGGVSVITPGTNTSNQVAVLYQGVNCTEVPVAIHADQLTPTWRVYSTGSNVFQTRAGCLIGAEHVNNSYECDIPIGAGICASYQTQTNSPRRARSVASQSIIAYTMSLGAENSVAYSNNSIAIPTNFTISVTTEILPVSMTKTSVDCTMYICGDSTECSNLLLQYGSFCTQLNRALTGIAVEQDKNTQEVFAQVKQIYKTPPIKDFGGFNFSQILPDPSKPSKRSFIEDLLFNKVTLADAGFIKQYGDCLGDIVARDLICAQKFNGLTVLPPLLTDEMIAQYTSALLAGTITSGWTFGAGAALQIPFAMQMAYRFNGIGVTQNVLYENQKLIANQFNSAIGKIQDSLSSTASALGKLQDVVNQNAQALNTLVKQLSSNFGAISSVLNDILSRLDPPEAEVQIDRLITGRLQSLQTYVTQQLIRAAEIRASANLAATKMSECVLGQSKRVDFCGKGYHLMSFPQSAPHGVVFLHVTYVPAQEKNFTTAPAICHDGKAHFPREGVFVSNGTHWFVTQRNFYEPQIITTDNTFVSGNCDVVIGIVNNTVYDPLQPELDSFKEELDKYFKNHTSPDVDLGDISGINASVVNIQKEIDRLNEVAKNLNESLIDLQELGKYEQYIKGGGGSDIDPYKEFGSSYQLLNFLPLDFFPDLNALVDTATALYEEELTGREHCSPHHTAIRQALVCWDELTKLIAWMSSNITSEQVRTIIVNHVNDTWGLKVRQSLWFHLSCLTFGQHTVQEFLVSFGVWIRTPAPYRPPNAPILSTLPEHTVIC

SEQ ID NO: 6750 - protein, 1365 aa, Artificial Sequence
  SARS-CoV-2/USA/WA-UW291/2020__EPI_ISL_418076 spike protein (1-1211)(K986P_V987P) WhcAg construct
MFVFLVLLPLVSSQCVNLTTRTQLPPAYTNSFTRGVYYPDKVFRSSVLHSTQDLFLPFFSNVTWFHAIHVSGTNGTKRFDNPVLPFNDGVYFASTEKSNIIRGWIFGTTLDSKTQSLLIVNNATNVVIKVCEFQFCNDPFLGVYYHKNNKSWMESEFRVYSSANNCTFEYVSQPFLMDLEGKQGNFKNLREFVFKNIDGYFKIYSKHTPINLVRDLPQGFSALEPLVDLPIGINITRFQTLLALHRSYLTPGDSSSGWTAGAAAYYVGYLQPRTFLLKYNENGTITDAVDCALDPLSETKCTLKSFTVEKGIYQTSNFRVQPTESIVRFPNITNLCPFGEVFNATRFASVYAWNRKRISNCVADYSVLYNSASFSTFKCYGVSPTKLNDLCFTNVYADSFVIRGDEVRQIAPGQTGKIADYNYKLPDDFTGCVIAWNSNNLDSKVGGNYNYLYRLFRKSNLKPFERDISTEIYQAGSTPCNGVEGFNCYFPLQSYGFQPTNGVGYQPYRVVVLSFELLHAPATVCGPKKSTNLVKNKCVNFNFNGLTGTGVLTESNKKFLPFQQFGRDIADTTDAVRDPQTLEILDITPCSFGGVSVITPGTNTSNQVAVLYQGVNCTEVPVAIHADQLTPTWRVYSTGSNVFQTRAGCLIGAEHVNNSYECDIPIGAGICASYQTQTNSPRRARSVASQSIIAYTMSLGAENSVAYSNNSIAIPTNFTISVTTEILPVSMTKTSVDCTMYICGDSTECSNLLLQYGSFCTQLNRALTGIAVEQDKNTQEVFAQVKQIYKTPPIKDFGGFNFSQILPDPSKPSKRSFIEDLLFNKVTLADAGFIKQYGDCLGDIAARDLICAQKFNGLTVLPPLLTDEMIAQYTSALLAGTITSGWTFGAGAALQIPFAMQMAYRFNGIGVTQNVLYENQKLIANQFNSAIGKIQYSLSSTASALGKLQDVVNQNAQALNTLVKQLSSNFGAISSVLNDILSRLDPPEAEVQIDRLITGRLQSLQTYVTQQLIRAAEIRASANLAATKMSECVLGQSKRVDFCGKGYHLMSFPQSAPHGVVFLHVTYVPAQEKNFTTAPAICHDGKAHFPREGVFVSNGTHWFVTQRNFYEPQIITTDNTFVSGNCDVVIGIVNNTVYDPLQPELDSFKEELDKYFKNHTSPDVDLGDISGINASVVNIQKEIDRLNEVAKNLNESLIDLQELGKYEQYIKGGGGSDIDPYKEFGSSYQLLNFLPLDFFPDLNALVDTATALYEEELTGREHCSPHHTAIRQALVCWDELTKLIAWMSSNITSEQVRTIIVNHVNDTWGLKVRQSLWFHLSCLTFGQHTVQEFLVSFGVWIRTPAPYRPPNAPILSTLPEHTVIC

SEQ ID NO: 6751 - protein, 1365 aa, Artificial Sequence; identical to SEQ ID NO: 6714
  SARS-CoV-2/Portugal/PT0034/2020__EPI_ISL_418019 spike protein (1-1211)(K986P_V987P) WhcAg construct

SEQ ID NO: 6752 - protein, 1365 aa, Artificial Sequence
  SARS-CoV-2/Iceland/202/2020__EPI_ISL_417750 spike protein (1-1211)(K986P_V987P) WhcAg construct
MFVFLVLLPLVSSQCVNLTTRTQLPPAYTNSFTRGVYYPDKVFRSSVLHSTQDLFLPFFSNVTWFHAIHVSGTNGTKRFDNPVLPFNDGVYFASTEKSNIIRGWIFGTTLDSKTQSLLIVNNATNVVIKVCEFQFCNDPFLGVYYHKNNKSWMESEFRVYSSANNCTFEYVSQPFLMDLEGKQGNFKNLREFVFKNIDGYFKIYSKHTPINLVRDLPQGFSALEPLVDLPIGINITRFQTLLALHRSYLTPGDSSSGWTAGAAAYYVGYLQPRTFLLKYNENGTITDAVDCALDPLSETKCTLKSFTVEKGIYQTSNFRVQPTESIVRFPNITNLCPFGEVFNATRFASVYAWNRKRISNCVADYSVLYNSASFSTFKCYGVSPTKLNDLCFTNVYADSFVIRGDEVRQIAPGQTGKIADYNYKLPDDFTGCVIAWNSNNLDSKVGGNYNYLYRLFRKSNLKPFERDISTEIYQAGSTPCNGVEGFNCYFPLQSYGFQPTNGVGYQPYRVVVLSFELLHAPATVCGPKKSTNLVKNKCVNFNFNGLTGTGVLTESNKKFLPFQQFGRDIADTTDAVRDPQTLEILDITPCSFGGVSVITPGTNTSNQVAVLYQDVNCTEVPVAIHADQLTPTWRVYSTGSNVFQTRAGCLIGAEHVNNSYECDIPIGAGICASYQTQTNSPRRARSVASQSIIAYTMSLGAENSVAYSNNSIAIPTNFTISVTTEILPVSMTKTSVDCTMYICGDSTECSNLLLQYGSFCTQLNRALTGIAVEQDKNTQEVFAQVKQIYKTPPIKDFGGFNFSQILPDPSKPSKRSFIEDLLFNKVTLADAGFIKQYGDCLGDIAARDLICAQKFNGLTVLPPLLTDEMIAQYTSALLAGTITSGWTFGAGAALQIPFAMQMAYRFNGIGVTQNVLYENQKLIANQFNSAIGKIQDSLSSTASALGKLQDVVNQNAQALNTLVKQLSSNFGAISSVLNDILSRLDPPEAEVQIDRLITGRLQSLQTYVTQQLIRAAEIRASANLAATKMSECVLGQSKRVDFCGKGYHLMSFPQSAPHGVVFLHVTYVPAQEKNFTTAPAICHDGKAHFPREGVFVSNGTHWFVTQRNFYEPQIITTDNTFVSGNCDVVIGIVNNTVYDPLQPELDSFKEELDKYFKNHTSPDVDLGDIPGINASVVNIQKEIDRLNEVAKNLNESLIDLQELGKYEQYIKGGGGSDIDPYKEFGSSYQLLNFLPLDFFPDLNALVDTATALYEEELTGREHCSPHHTAIRQALVCWDELTKLIAWMSSNITSEQVRTIIVNHVNDTWGLKVRQSLWFHLSCLTFGQHTVQEFLVSFGVWIRTPAPYRPPNAPILSTLPEHTVIC

SEQ ID NO: 6753 - protein, 1365 aa, Artificial Sequence
  SARS-CoV-2/USA/WA-UW261/2020__EPI_ISL_418046 spike protein (1-1211)(K986P_V987P) WhcAg construct
MFVFLVLLPLVSSQCVNLTTRTQLPPAYTNSFTRGVYYPDKVFRSSVLHSTQDLFLPFFSNVTWFHAIHVSGTNGTKRFDNPVLPFNDGVYFASTEKSNIIRGWIFGTTLDSKTQSLLIVNNATNVVIKVCEFQFCNDPFLGVYYHKNNKSWMESEFRVYSSANNCTFEYVSQPFLMDLEGKQGNFKNLREFVFKNIDGYFKIYSKHTPINLVRDLPQGFSALEPLVDLPIGINITRFQTLLALHRSYLTPGDSSSGWTAGAAAYYVGYLQPRTFLLKYNENGTITDAVDCALDPLSETKCTLKSFTVEKGIYQTSNFRVQPTESIVRFPNITNLCPFGEVFNATRFTSVYAWNRKRISNCVADYSVLYNSASFSTFKCYGVSPTKLNDLCFTNVYADSFVIRGDEVRQIAPGQTGKIADYNYKLPDDFTGCVIAWNSNNLDSKVGGNYNYLYRLFRKSNLKPFERDISTEIYQAGSTPCNGVEGFNCYFPLQSYGFQPTNGVGYQPYRVVVLSFELLHAPATVCGPKKSTNLVKNKCVNFNFNGLTGTGVLTESNKKFLPFQQFGRDIADTTDAVRDPQTLEILDITPCSFGGVSVITPGTNTSNQVAVLYQDVNCTEVPVAIHADQLTPTWRVYSTGSNVFQTRAGCLIGAEHVNNSYECDIPIGAGICASYQTQTNSPRRARSVASQSIIAYTMSLGAENSVAYSNNSIAIPTNFTISVTTEILPVSMTKTSVDCTMYICGDSTECSNLLLQYGSFCTQLNRALTGIAVEQDKNTQEVFAQVKQIYKTPPIKDFGGFNFSQILPDPSKPSKRSFIEDLLFNKVTLADAGFIKQYGDCLGDIAARDLICAQKFNGLTVLPPLLTDEMIAQYTSALLAGTITSGWTFGAGAALQIPFAMQMAYRFNGIGVTQNVLYENQKLIANQFNSAIGKIQDSLSSTASALGKLQDVVNQNAQALNTLVKQLSSNFGAISSVLNDILSRLDPPEAEVQIDRLITGRLQSLQTYVTQQLIRAAEIRASANLAATKMSECVLGQSKRVDFCGKGYHLMSFPQSAPHGVVFLHVTYVPAQEKNFTTAPAICHDGKAHFPREGVFVSNGTHWFVTQRNFYEPQIITTDNTFVSGNCDVVIGIVNNTVYDPLQPELDSFKEELDKYFKNHTSPDVDLGDISGINASVVNIQKEIDRLNEVAKNLNESLIDLQELGKYEQYIKGGGGSDIDPYKEFGSSYQLLNFLPLDFFPDLNALVDTATALYEEELTGREHCSPHHTAIRQALVCWDELTKLIAWMSSNITSEQVRTIIVNHVNDTWGLKVRQSLWFHLSCLTFGQHTVQEFLVSFGVWIRTPAPYRPPNAPILSTLPEHTVIC

SEQ ID NO: 6754 - protein, 1365 aa, Artificial Sequence
  SARS-CoV-2/Portugal/PT0035/2020__EPI_ISL_418020 spike protein (1-1211)(K986P_V987P) WhcAg construct
MFVFLVLLPLVSSQCVNLTTRTQLPPAYTNSFTRGVYYPDKVFRSSVLHSTQDLFLPFFSNVTWFHAIHVSGTNGTKRFDNPVLPFNDGVYFASTEKSNIIRGWIFGTTLDSKTQSLLIVNNATNVVIKVCEFQFCNDPFLGVYYHKNNKSWMESEFRVYSSANNCTFEYVSQPFLMDLEGKQGNFKNLREFVFKNIDGYFKIYSKHTPINLVRDLPQGFSALEPLVDLPIGINITRFQTLLALHRSYLTPGDSSSGWTAGAAAYYVGYLQPRTFLLKYNENGTITDAVDCALDPLSETKCTLKSFTVEKGIYQTSNFRVQPTESIVRFPNITNLCPFGEVFNATRFASVYAWNRKRISNCVADYSVLYNSASFSTFKCYGVSPTKLNDLCFTNVYADSFVIRGDEVRQIAPGQTGKIADYNYKLPDDFTGCVIAWNSNNLDSKVGGNYNYLYRLFRKSNLKPFERDISTEIYQAGSTPCNGVEGFNCYFPLQSYGFQPTNGVGYQPYRVVVLSFELLHAPATVCGPKKSTNLVKNKCVNFNFNGLTGTGVLTESNKKFLPFQQFGRDIADTTDAVRDPQTLEILDITPCSFGGVSVITPGTNTSNQVAVLYQDVNCTEVPVAIHADQLTPTWRVYSTGSNVFQTRAGCLIGAEHVNNSYECDIPIGAGICASYQTQTNSPRRARSVASQSIIAYTMSLGAENSVAYSNNSIAIPTNFTISVTTEILPVSMTKTSVDCTMYICGDSTECSNLLLQYGSFCTQLNRALTGIAVEQDKNTQEVFAQVKQIYKTPPIKDFGGFNFSQILPDPSKPSKRSFIEDLLFNKVTLADAGFIKQYGDCLGDISARDLICAQKFNGLTVLPPLLTDEMIAQYTSALLAGTITSGWTFGAGAALQIPFAMQMAYRFNGIGVTQNVLYENQKLIANQFNSAIGKIQDSLSSTASALGKLQDVVNQNAQALNTLVKQLSSNFGAISSVLNDILSRLDPPEAEVQIDRLITGRLQSLQTYVTQQLIRAAEIRASANLAATKMSECVLGQSKRVDFCGKGYHLMSFPQSAPHGVVFLHVTYVPAQEKNFTTAPAICHDGKAHFPREGVFVSNGTHWFVTQRNFYEPQIITTDNTFVSGNCDVVIGIVNNTVYDPLQPELDSFKEELDKYFKNHTSPDVDLGDISGINASVVNIQKEIDRLNEVAKNLNESLIDLQELGKYEQYIKGGGGSDIDPYKEFGSSYQLLNFLPLDFFPDLNALVDTATALYEEELTGREHCSPHHTAIRQALVCWDELTKLIAWMSSNITSEQVRTIIVNHVNDTWGLKVRQSLWFHLSCLTFGQHTVQEFLVSFGVWIRTPAPYRPPNAPILSTLPEHTVIC

SEQ ID NO: 6755 - protein, 1365 aa, Artificial Sequence
  SARS-CoV-2/USA/NY-NYUMC7/2020__EPI_ISL_418192 spike protein (1-1211)(K986P_V987P) WhcAg construct
MFVFLVLLPLVSSQCVNLTTRTQLPPAYTNSFTRGVYYPDKVFRSSVLHSTQDLFLPFFSNVTWFHAIHVSGTNGTKRFDNPVLPFNDGVYFASTEKSNIIRGWIFGTTLDSKTQSLLIVNNATNVVIKVCEFQFCNDPFLGVYHHKNNKSWMESEFRVYSSANNCTFEYVSQPFLMDLEGKQGNFKNLREFVFKNIDGYFKIYSKHTPINLVRDLPQGFSALEPLVDLPIGINITRFQTLLALHRSYLTPGDSSSGWTAGAAAYYVGYLQPRTFLLKYNENGTITDAVDCALDPLSETKCTLKSFTVEKGIYQTSNFRVQPTESIVRFPNITNLCPFGEVFNATRFASVYAWNRKRISNCVADYSVLYNSASFSTFKCYGVSPTKLNDLCFTNVYADSFVIRGDEVRQIAPGQTGKIADYNYKLPDDFTGCVIAWNSNNLDSKVGGNYNYLYRLFRKSNLKPFERDISTEIYQAGSTPCNGVEGFNCYFPLQSYGFQPTNGVGYQPYRVVVLSFELLHAPATVCGPKKSTNLVKNKCVNFNFNGLTGTGVLTESNKKFLPFQQFGRDIADTTDAVRDPQTLEILDITPCSFGGVSVITPGTNTSNQVAVLYQGVNCTEVPVAIHADQLTPTWRVYSTGSNVFQTRAGCLIGAEHVNNSYECDIPIGAGICASYQTQTNSPRRARSVASQSIIAYTMSLGAENSVAYSNNSIAIPTNFTISVTTEILPVSMTKTSVDCTMYICGDSTECSNLLLQYGSFCTQLNRALTGIAVEQDKNTQEVFAQVKQIYKTPPIKDFGGFNFSQILPDPSKPSKRSFIEDLLFNKVTLADAGFIKQYGDCLGDIAARDLICAQKFNGLTVLPPLLTDEMIAQYTSALLAGTITSGWTFGAGAALQIPFAMQMAYRFNGIGVTQNVLYENQKLIANQFNSAIGKIQDSLSSTASALGKLQDVVNQNAQALNTLVKQLSSNFGAISSVLNDILSRLDPPEAEVQIDRLITGRLQSLQTYVTQQLIRAAEIRASANLAATKMSECVLGQSKRVDFCGKGYHLMSFPQSAPHGVVFLHVTYVPAQEKNFTTAPAICHDGKAHFPREGVFVSNGTHWFVTQRNFYEPQIITTDNTFVSGNCDVVIGIVNNTVYDPLQPELDSFKEELDKYFKNHTSPDVDLGDISGINASVVNIQKEIDRLNEVAKNLNESLIDLQELGKYEQYIKGGGGSDIDPYKEFGSSYQLLNFLPLDFFPDLNALVDTATALYEEELTGREHCSPHHTAIRQALVCWDELTKLIAWMSSNITSEQVRTIIVNHVNDTWGLKVRQSLWFHLSCLTFGQHTVQEFLVSFGVWIRTPAPYRPPNAPILSTLPEHTVIC

SEQ ID NO: 6756 - protein, 1365 aa, Artificial Sequence
  SARS-CoV-2/Iceland/189/2020__EPI_ISL_417709 spike protein (1-1211)(K986P_V987P) WhcAg construct
MFVFLVLLPLVSSQCVNLTTRTQLPPAYTNSFTRGVYYPDKVFRSSVLHSTQDLFLPFFSNVTWFHAIHVSGTNGTKRFDNPVLPFNDGVYFASTEKSNIIRGWIFGTTLDSKTQSLLIVNNATNVVIKVCEFQFCNDPFLGVYYHKNNKSWMESEFRVYSSANNCTFEYVSQPFLMDLEGKQGNFKNLREFVFKNIDGYFKIYSKHTPINLVRDLPQGFSALEPLVDLPIGINITRFQTLLALHRSYLTPGDSSSGWTAGAAAYYVGYLQPRTFLLKYNENGTITDAVDCALDPLSETKCTLKSFTVEKGIYQTSNFRVQPTESIVRFPNITNLCPFGEVFNATRFASVYAWNRKRISNCVADYSVLYNSASFSTFKCYGVSPTKLNDLCFTNVYADSFVIRGDEVRQIAPGQTGKIADYNYKLPDDFTGCVIAWNSNNLDSKVGGNYNYLYRLFRKSNLKPFERDISTEIYQAGSTPCNGVEGFNCYFPLQSYGFQPTNGVGYQPYRVVVLSFELLHAPATVCGPKKSTNLVKNKCVNFNFNGLTGTGVLTESNKKFLPFQQFGRDIADTTDAVRDPQTLEILDITPCSFGGVSVITPGTNTSNQVAVLYQGVNCTEVPVAIHADQLTPTWRVYSTGSNVFQTRAGCLIGAEHVNNSYECDIPIGAGICASYQTQTNSPRRARSVASQSIIAYTMSLGAENSVAYSNNSIAIPTNFTISVTTEILPVSMTKTSVDCTMYICGDSTECSNLLLQYGSFCTQLNRALTGIAVEQDKNTQEVFAQVKQIYKTPPIKDFGGFNFSQILPDPSKPSKRSFIEDLLFNKVTLADAGFTKQYGDCLGDIAARDLICAQKFNGLTVLPPLLTDEMIAQYTSALLAGTITSGWTFGAGAALQIPFAMQMAYRFNGIGVTQNVLYENQKLIANQFNSAIGKIQDSLSSTASALGKLQDVVNQNAQALNTLVKQLSSNFGAISSVLNDILSRLDPPEAEVQIDRLITGRLQSLQTYVTQQLIRAAEIRASANLAATKMSECVLGQSKRVDFCGKGYHLMSFPQSAPHGVVFLHVTYVPAQEKNFTTAPAICHDGKAHFPREGVFVSNGTHWFVTQRNFYEPQIITTDNTFVSGNCDVVIGIVNNTVYDPLQPELDSFKEELDKYFKNHTSPDVDLGDISGINASVVNIQKEIDRLNEVAKNLNESLIDLQELGKYEQYIKGGGGSDIDPYKEFGSSYQLLNFLPLDFFPDLNALVDTATALYEEELTGREHCSPHHTAIRQALVCWDELTKLIAWMSSNITSEQVRTIIVNHVNDTWGLKVRQSLWFHLSCLTFGQHTVQEFLVSFGVWIRTPAPYRPPNAPILSTLPEHTVIC

SEQ ID NO: 6757 - protein, 1365 aa, Artificial Sequence
  SARS-CoV-2/Australia/NSW56/2020__EPI_ISL_417408 spike protein (1-1211)(K986P_V987P) WhcAg construct
MFVFLVLLPLVSSQCVNLTTRTQLPPAYTNSFTRGVYYPDKVFRSSVLHSTQDLFLPFFSNVTWFHAIHVSGTNGTKRFDNPVLPFNDGVYFASTEKSNIIRGWIFGTTLDSKTQSLLIVNNATNVVIKVCEFQFCNDPFLGVYYHKNNKSWMESEFRVYSSANNCTFEYVSQPFLMDLEGKQGNFKNLREFVFKNIDGYFKIYSKHTPINLVRDLPQGFSALEPLVDLPIGINITRFQTLLALHRSYLTPGDSSSGWTAGAAAYYVGYLQPRTFLLKYNENGTITDAVDCALDPLSETKCTLKSFTVEKGIYQTSNFRVQPTESIVRFPNITNLCPFGEVFNATRFASVYAWNRKRISNCVADYSVLYNSASFSTFKCYGVSPTKLNDLCFTNVYADSFVIRGDEVRQIAPGQTGKIADYNYKLPDDFTGCVIAWNSNNLDSKVGGNYNYLYRLFRKSNLKPFERDISTEIYQAGSTPCNGVEGFNCYFPLQSYGFQPTNGVGYQPYRVVVLSFELLHAPATVCGPKKSTNLVKNKCVNFNFNGLTGTGVLTESNKKFLPFQQFGRDIADTTDAVRDPQTLEILDITPCSFGGVSVITPGTNTSNQVAVLYQDVNCTEVPVAIHADQLTPTWRVYSTGSNVFQTRAGCLIGAEHVNNSYECDIPIGAGICASYQTQTNSPRRARSVASQSIIAYTMSLGAENSVAYSNNSIAIPTNFTISVTTEILPVSMTKTSVDCTMYICGDSTECSNLLLQYGSFCTQLNRALTGIAVEQDKNTQEVFAQVKQIYKTPPIKDFGGFNFSQILPDSSKPSKRSFIEDLLFNKVTLADAGFIKQYGDCLGDIAARDLICAQKFNGLTVLPPLLTDEMIAQYTSALLAGTITSGWTFGAGAALQIPFAMQMAYRFNGIGVTQNVLYENQKLIANQFNSAIGKIQDSLSSTASALGKLQDVVNQNAQALNTLVKQLSSNFGAISSVLNDILSRLDPPEAEVQIDRLITGRLQSLQTYVTQQLIRAAEIRASANLAATKMSECVLGQSKRVDFCGKGYHLMSFPQSAPHGVVFLHVTYVPAQEKNFTTAPAICHDGKAHFPREGVFVSNGTHWFVTQRNFYEPQIITTDNTFVSGNCDVVIGIVNNTVYDPLQPELDSFKEELDKYFKNHTSPDVDLGDISGINASVVNIQKEIDRLNEVAKNLNESLIDLQELGKYEQYIKGGGGSDIDPYKEFGSSYQLLNFLPLDFFPDLNALVDTATALYEEELTGREHCSPHHTAIRQALVCWDELTKLIAWMSSNITSEQVRTIIVNHVNDTWGLKVRQSLWFHLSCLTFGQHTVQEFLVSFGVWIRTPAPYRPPNAPILSTLPEHTVIC

SEQ ID NO: 6758 - protein, 1365 aa, Artificial Sequence
  SARS-CoV-2/Iceland/280/2020__EPI_ISL_417608 spike protein (1-1211)(K986P_V987P) WhcAg construct
MFVFLVLLPLVSSQCVNLTTRTQLPPAYTNSFTRGVYYPDKVFRSSVLHSTQDLFLPFFSNVTWFHAIHVSGTNGTKRFDNPVLPFNDGVYFASTEKSNIIRGWIFGTTLDSKTQSLLIVNNATNVVIKVCEFQFCNDPFLGVYYHKNNKSWMESEFRVYSSANNCTFEYVSQPFLMDLEGKQGNFKNLREFVFKNIDGYFKIYSKHTPINLVRDLPQGFSALEPLVDLPIGINITRFQTLLALHRSYLTPGDSSSGWTAGAAAYYVGYLQPRTFLLKYNENGTITDAVDCALDPLSETKCTLKSFTVEKGIYQTSNFRVQPTESIVRFPNITNLCPFGEVFNATRFASVYAWNRKRISNCVADYSVLYNSASFSTFKCYGVSPTKLNDLCFTNVYADSFVIRGDEVRQIAPGQTGKIADYNYKLPDDFTGCVIAWNSNNLDSKVGGNYNYLYRLFRKSNLKPFERDISTEIYQAGSTPCNGVEGFNCYFPLQSYGFQPTNGVGYQPYRVVVLSFELLHAPATVCGPKKSTNLVKNKCVNFNFNGLTGTGVLTESNKKFLPFQQFGRDIADTTDAVRDPQTLEILDITPCSFGGVSVITPGTNTSNQVAVLYQGVNCTEVPVAIHADQLTPTWRVYSTGSNVFQTRAGCLIGAEHVNNSYECDIPIGAGICASYHTQTNSPRRARSVASQSIIAYTMSLGAENSVAYSNNSIAIPTNFTISVTTEILPVSMTKTSVDCTMYICGDSTECSNLLLQYGSFCTQLNRALTGIAVEQDKNTQEVFAQVKQIYKTPPIKDFGGFNFSQILPDPSKPSKRSFIEDLLFNKVTLADAGFIKQYGDCLGDIAARDLICAQKFNGLTVLPPLLTDEMIAQYTSALLAGTITSGWTFGAGAALQIPFAMQMAYRFNGIGVTQNVLYENQKLIANQFNSAIGKIQDSLSSTASALGKLQDVVNQNAQALNTLVKQLSSNFGAISSVLNDILSRLDPPEAEVQIDRLITGRLQSLQTYVTQQLIRAAEIRASANLAATKMSECVLGQSKRVDFCGKGYHLMSFPQSAPHGVVFLHVTYVPAQEKNFTTAPAICHDGKAHFPREGVFVSNGTHWFVTQRNFYEPQIITTDNTFVSGNCDVVIGIVNNTVYDPLQPELDSFKEELDKYFKNHTSPDVDLGDISGINASVVNIQKEIDRLNEVAKNLNESLIDLQELGKYEQYIKGGGGSDIDPYKEFGSSYQLLNFLPLDFFPDLNALVDTATALYEEELTGREHCSPHHTAIRQALVCWDELTKLIAWMSSNITSEQVRTIIVNHVNDTWGLKVRQSLWFHLSCLTFGQHTVQEFLVSFGVWIRTPAPYRPPNAPILSTLPEHTVIC

SEQ ID NO: 6759 - protein, 1365 aa, Artificial Sequence; identical to SEQ ID NO: 6714
  SARS-CoV-2/Iceland/247/2020__EPI_ISL_417575 spike protein (1-1211)(K986P_V987P) WhcAg construct

SEQ ID NO: 6760 - protein, 1365 aa, Artificial Sequence
  SARS-CoV-2/Iceland/238/2020__EPI_ISL_417566 spike protein (1-1211)(K986P_V987P) WhcAg construct
MFVFLVLLPLVSSQCVNLTTRTQLPPAYTNSFTRGVYYPDKVFRSSVLHSTQDLFLPFFSNVTWFHAIHVSGTNGTKRFDNPVLPFNDGVYFASTEKSNIIRGWIFGTTLDSKTQSLLIVNNATNVVIKVCEFQFCNDPFLGVYYHKNNKSWMESEFRVYSSANNCTFEYVSQPFLMDLEGKQGNFKNLREFVFKNIDGYFKIYSKHTPINLVRDLPQGFSALEPLVDLPIGINITRFQTLLALHRSYLTPGDSSSGWTAGAAAYYVGYLQPRTFLLKYNENGTITDAVDCALDPLSETKCTLKSFTVEKGIYQTSNFRVQPTESIVRFPNITNLCPFGEVFNATRFASVYAWNRKRISNCVADYSVLYNSASFSTFKCYGVSPTKLNDLCFTNVYADSFVIRGDEVRQIAPGQTGKIADYNYKLPDDFTGCVIAWNSNNLDSKVGGNYNYLYRLFRKSNLKPFERDISTEIYQAGSTPCNGVEGFNCYFPLQSYGFQPTNGVGYQPYRVVVLSFELLHAPATVCGPKKSTNLVKNKCVNFNFNGLTGTGVLTESNKKFLPFQQFGRDIADTTDAVRDPQTLEILDITPCSFGGVSVITPGTNTSNQVAVLYQGVNCTEVPVAIHADQLTPTWRVYSTGSNVFQTRAGCLIGAEHVNNSYECDIPIGAGICASYQTQTNSPRRARSVASQSIIAYTMSLGAENSVAYSNNSIAIPTNFTISVTTEILPVSMTKTSVDCTMYICGDSTECSNLLLQYGSFCTQLNRALTGIAVEQDKNTQEVFAQVKQIYKTPPIKDFGGFNFSQILPDPSKPSKRSFIEDLLFNKVTLADVGFIKQYGDCLGDIAARDLICAQKFNGLTVLPPLLTDEMIAQYTSALLAGTITSGWTFGAGAALQIPFAMQMAYRFNGIGVTQNVLYENQKLIANQFNSAIGKIQDSLSSTASALGKLQDVVNQNAQALNTLVKQLSSNFGAISSVLNDILSRLDPPEAEVQIDRLITGRLQSLQTYVTQQLIRAAEIRASANLAATKMSECVLGQSKRVDFCGKGYHLMSFPQSAPHGVVFLHVTYVPAQEKNFTTAPAICHDGKAHFPREGVFVSNGTHWFVTQRNFYEPQIITTDNTFVSGNCDVVIGIVNNTVYDPLQPELDSFKEELDKYFKNHTSPDVDLGDISGINASVVNIQKEIDRLNEVAKNLNESLIDLQELGKYEQYIKGGGGSDIDPYKEFGSSYQLLNFLPLDFFPDLNALVDTATALYEEELTGREHCSPHHTAIRQALVCWDELTKLIAWMSSNITSEQVRTIIVNHVNDTWGLKVRQSLWFHLSCLTFGQHTVQEFLVSFGVWIRTPAPYRPPNAPILSTLPEHTVIC

SEQ ID NO: 6761 - protein, 1365 aa, Artificial Sequence
  SARS-CoV-2/Greece/16/2020__EPI_ISL_418265 spike protein (1-1211)(K986P_V987P) WhcAg construct
MFVFLVLLPLVSSQCVNLTTRTQLPPAYTNSFTRGVYYPDKVFRSSVLHSTQDLFLPFFSNVTWFHAIHVSGTNGTKRFDNPVLPFNDGVYFASTEKSNIIRGWIFGTTLDSKTQSLLIVNNATNVVIKVCEFQFCNDPFLGVYYHKNNKSWMESEFRVYSSANNCTFEYVSQPFLMDLEGKQGNFKNLREFVFKNVDGYFKIYSKHTPINLVRDLPQGFSALEPLVDLPIGINITRFQTLLALHRSYLTPGDSSSGWTAGAAAYYVGYLQPRTFLLKYNENGTITDAVDCALDPLSETKCTLKSFTVEKGIYQTSNFRVQPTESIVRFPNITNLCPFGEVFNATRFASVYAWNRKRISNCVADYSVLYNSASFSTFKCYGVSPTKLNDLCFTNVYADSFVIRGDEVRQIAPGQTGKIADYNYKLPDDFTGCVIAWNSNNLDSKVGGNYNYLYRLFRKSNLKPFERDISTEIYQAGSTPCNGVEGFNCYFPLQSYGFQPTNGVGYQPYRVVVLSFELLHAPATVCGPKKSTNLVKNKCVNFNFNGLTGTGVLTESNKKFLPFQQFGRDIADTTDAVRDPQTLEILDITPCSFGGVSVITPGTNTSNQVAVLYQDVNCTEVPVAIHADQLTPTWRVYSTGSNVFQTRAGCLIGAEHVNNSYECDIPIGAGICASYQTQTNSPRRARSVASQSIIAYTMSLGAENSVAYSNNSIAIPTNFTISVTTEILPVSMTKTSVDCTMYICGDSTECSNLLLQYGSFCTQLNRALTGIAVEQDKNTQEVFAQVKQIYKTPPIKDFGGFNFSQILPDPSKPSKRSFIEDLLFNKVTLADAGFIKQYGDCLGDIAARDLICAQKFNGLTVLPPLLTDEMIAQYTSALLAGTITSGWTFGAGAALQIPFAMQMAYRFNGIGVTQNVLYENQKLIANQFNSAIGKIQDSLSSTASALGKLQDVVNQNAQALNTLVKQLSSNFGAISSVLNDILSRLDPPEAEVQIDRLITGRLQSLQTYVTQQLIRAAEIRASANLAATKMSECVLGQSKRVDFCGKGYHLMSFPQSAPHGVVFLHVTYVPAQEKNFTTAPAICHDGKAHFPREGVFVSNGTHWFVTQRNFYEPQIITTDNTFVSGNCDVVIGIVNNTVYDPLQPELDSFKEELDKYFKNHTSPDVDLGDISGINASVVNIQKEIDRLNEVAKNLNESLIDLQELGKYEQYIKGGGGSDIDPYKEFGSSYQLLNFLPLDFFPDLNALVDTATALYEEELTGREHCSPHHTAIRQALVCWDELTKLIAWMSSNITSEQVRTIIVNHVNDTWGLKVRQSLWFHLSCLTFGQHTVQEFLVSFGVWIRTPAPYRPPNAPILSTLPEHTVIC

SEQ ID NO: 6762 - protein, 1365 aa, Artificial Sequence
  SARS-CoV-2/Iceland/319/2020__EPI_ISL_417648 spike protein (1-1211)(K986P_V987P) WhcAg construct
MFVFLVLLPLVSSQCVNLTTRTQLPPAYTNSFTRGVYYPDKVFRSSVLHSTQDLFLPFFSNVTWFHAIHVSGTNGTKRFDNPVLPFNDGVYFASTEKSNIIRGWIFGTTLDSKTQSLLIVNNATNVVIKVCEFQFCNDPFLGVYYHKNNKSWMESEFRVYSSANNCTFEYVSQPFLIDLEGKQGNFKNLREFVFKNIDGYFKIYSKHTPINLVRDLPQGFSALEPLVDLPIGINITRFQTLLALHRSYLTPGDSSSGWTAGAAAYYVGYLQPRTFLLKYNENGTITDAVDCALDPLSETKCTLKSFTVEKGIYQTSNFRVQPTESIVRFPNITNLCPFGEVFNATRFASVYAWNRKRISNCVADYSVLYNSASFSTFKCYGVSPTKLNDLCFTNVYADSFVIRGDEVRQIAPGQTGKIADYNYKLPDDFTGCVIAWNSNNLDSKVGGNYNYLYRLFRKSNLKPFERDISTEIYQAGSTPCNGVEGFNCYFPLQSYGFQPTNGVGYQPYRVVVLSFELLHAPATVCGPKKSTNLVKNKCVNFNFNGLTGTGVLTESNKKFLPFQQFGRDIADTTDAVRDPQTLEILDITPCSFGGVSVITPGTNTSNQVAVLYQGVNCTEVPVAIHADQLTPTWRVYSTGSNVFQTRAGCLIGAEHVNNSYECDIPIGAGICASYQTQTNSPRRARSVASQSIIAYTMSLGAENSVAYSNNSIAIPTNFTISVTTEILPVSMTKTSVDCTMYICGDSTECSNLLLQYGSFCTQLNRALTGIAVEQDKNTQEVFAQVKQIYKTPPIKDFGGFNFSQILPDPSKPSKRSFIEDLLFNKVTLADAGFIKQYGDCLGDIAARDLICAQKFNGLTVLPPLLTDEMIAQYTSALLAGTITSGWTFGAGAALQIPFAMQMAYRFNGIGVTQNVLYENQKLIANQFNSAIGKIQDSLSSTASALGKLQDVVNQNAQALNTLVKQLSSNFGAISSVLNDILSRLDPPEAEVQIDRLITGRLQSLQTYVTQQLIRAAEIRASANLAATKMSECVLGQSKRVDFCGKGYHLMSFPQSAPHGVVFLHVTYVPAQEKNFTTAPAICHDGKAHFPREGVFVSNGTHWFVTQRNFYEPQIITTDNTFVSGNCDVVIGIVNNTVYDPLQPELDSFKEELDKYFKNHTSPDVDLGDISGINASVVNIQKEIDRLNEVAKNLNESLIDLQELGKYEQYIKGGGGSDIDPYKEFGSSYQLLNFLPLDFFPDLNALVDTATALYEEELTGREHCSPHHTAIRQALVCWDELTKLIAWMSSNITSEQVRTIIVNHVNDTWGLKVRQSLWFHLSCLTFGQHTVQEFLVSFGVWIRTPAPYRPPNAPILSTLPEHTVIC

SEQ ID NO: 6763 - protein, 1365 aa, Artificial Sequence
  SARS-CoV-2/Congo/94/2020__EPI_ISL_417947 spike protein (1-1211)(K986P_V987P) WhcAg construct
MFVFLVLLPLVSSQCVNLTTRTQLPPAYTNSFTRGVYYPDKVFRSSVLHSTQDLFLPFFSNVTWFHAIHVSGTNGTKRFDNPVLPFNDGVYFASTEKSNIIRGWIFGTTLDSKTQSLLIVNNATNVVIKVCEFQFCNDPFLGVYYHKNNKSWMESEFRVYSSANNCTFEYVSQPFLMDLEGKQGNFKNLREFVFKNIDGYFKIYSKHTPINLVRDLPQGFSALEPLVDLPIGINITRFQTLLALHRSYLTPGDSSSGWTAGAAAYYVGYLQPRTFLLKYNENGTITDAVDCALDPLSETKCTLKSFTVEKGIYQTSNFRVQPTESIVRFPNITNLCPFGEVFNATRFASVYAWNRKRISNCVADYSVLYNSASFSTFKCYGVSPTKLNDLCFTNVYADSFVIRGDEVRQIAPGQTGKIADYNYKLPDDFTGCVIAWNSNNLDSKVGGNYNYLYRLFRKSNLKPFERDISTEIYQAGSTPCNGVEGFNCYFPLQSYGFQPTNGVGYQPYRVVVLSFELLHAPATVCGPKKSTNLVKNKCVNFNFNGLTGTGVLTESNKKFLPFQQFGRDIADTTDAVRDPQTLEILDITPCSFGGVSVITPGTNTSNQVAVLYQGVNCTEVPVAIHADQLTPTWRVYSTGSNVFQTRAGCLIGAEHVNNSYECDIPIGAGICASYQTQTNSPRRARSVASQSIIAYTMSLGAENSVAYSNNSIAIPTNFTISVTTEILPVSMTKTSVDCTMYICGDSTECSNLLLQYGSFCTQLNRALTGIAVEQDKNTQEVFAQVKQIYKTPPIKDFGGFNFSQILPDPSKPSKRSFIEDILFNKVTLADAGFIKQYGDCLGDIAARDLICAQKFNGLTVLPPLLTDEMIAQYTSALLAGTITSGWTFGAGAALQIPFAMQMAYRFNGIGVTQNVLYENQKLIANQFNSAIGKIQDSLSSTASALGKLQDVVNQNAQALNTLVKQLSSNFGAISSVLNDILSRLDPPEAEVQIDRLITGRLQSLQTYVTQQLIRAAEIRASANLAATKMSECVLGQSKRVDFCGKGYHLMSFPQSAPHGVVFLHVTYVPAQEKNFTTAPAICHDGKAHFPREGVFVSNGTHWFVTQRNFYEPQIITTDNTFVSGNCDVVIGIVNNTVYDPLQPELDSFKEELDKYFKNHTSPDVDLGDISGINASVVNIQKEIDRLNEVAKNLNESLIDLQELGKYEQYIKGGGGSDIDPYKEFGSSYQLLNFLPLDFFPDLNALVDTATALYEEELTGREHCSPHHTAIRQALVCWDELTKLIAWMSSNITSEQVRTIIVNHVNDTWGLKVRQSLWFHLSCLTFGQHTVQEFLVSFGVWIRTPAPYRPPNAPILSTLPEHTVIC

SEQ ID NO: 6764 - protein, 1365 aa, Artificial Sequence
  SARS-CoV-2/Congo/158/2020__EPI_ISL_417950 spike protein (1-1211)(K986P_V987P) WhcAg construct
MFVFLVLLPLVSSQCVNLTTRTQLPPAYTNSFTRGVYYPDKVFRSSVLHSTQDLFLPFFSNVTWFHAIHVSGTNGTKRFDNPVLPFNDGVYFASTEKSNIIRGWIFGTTLDSKTQSLLIVNNATNVVIKVCEFQFCNDPFLGVYYHKNNKSWMESEFRVYSSANNCTFEYVSQPFLMDLEGKQGNFKNLREFVFKNIDGYFKIYSKHTPINLVRDLPQGFSALEPLVDLPIGINITRFQTLLALHRSYLTPGDSSSGWTAGAAAYYVGYLQPRTFLLKYNENGTITDAVDCALDPLSETKCTLKSFTVEKGIYQTSNFRVQPTESIVRFPNITNLCPFGEVFNATRFASVYAWNRKRISNCVADYSVLYNSASFSTFKCYGVSPTKLNDLCFTNVYADSFVIRGDEVRQIAPGQTGKIADYNYKLPDDFTGCVIAWNSNNLDSKVGGNYNYLYRLFRKSNLKPFERDISTEIYQAGSTPCNGVEGFNCYFPLQSYGFQPTNGVGYQPYRVVVLSFELLHAPATVCGPKKSTNLVKNKCVNFNFNGLTGTGVLTESNKKFLPFQQFGRDIADTTDAVRDPQTLEILDITPCSFGGVSVITPGTNTSNQVAVLYQDVNCTEVPVAIHADQLTPTWRVYSTGSNVFQTRAGCLIGAEHVNNSYECDIPIGAGICASYQTQTNSPRRARSVASQSIIAYTMSLGAENSVAYSNNSIAIPTNFTISVTTEILPVSMTKTSVDCTMYICGDSTECSNLLLQYGSFCTQLNRALTGIAVEQDKNTQEVFAQVKQIYKTPPIKDFGGFNFSQILPDPSKPSKRSFIEDLLFNKVTLADAGFIKQYGDCLGDIAARDLICAQKFNGLTVLPPLLTDEMIAQYTSALLAGTITSGWTFGAGAALQIPFAMQMAYRFNGIGVTQNVLYENQKLIANQFNSAIGKIQDSLSSTASALGKLQDVVNQNAQALNTLVKQLSSNFGAISSVLNDILSRLDPPEAEVQIDRLITGRLQSLQTYVTQQLIRAAEIRASANLAATKMSECVLGQSKRVDFCGKGYHLMSFPQSAPHGVVFLHVTYVPAQEKNFTTAPAICHDGKAHFPREGVFVSNGTHWFVTQRNFYEPQIITTDNTFLSGNCDVVIGIVNNTVYDPLQPELDSFKEELDKYFKNHTSPDVDLGDISGINASVVNIQKEIDRLNEVAKNLNESLIDLQELGKYEQYIKGGGGSDIDPYKEFGSSYQLLNFLPLDFFPDLNALVDTATALYEEELTGREHCSPHHTAIRQALVCWDELTKLIAWMSSNITSEQVRTIIVNHVNDTWGLKVRQSLWFHLSCLTFGQHTVQEFLVSFGVWIRTPAPYRPPNAPILSTLPEHTVIC

SEQ ID NO: 6765 - protein, 1365 aa, Artificial Sequence
  SARS-CoV-2/USA/UT-00034/2020__EPI_ISL_417977 spike protein (1-1211)(K986P_V987P) WhcAg construct
MFVFLVLLPLVSSQCVNLTTRTQLPPAYTNSFTRGVYYPDKVFRSSVLHSTQDLFLPFFSNVTWFHAIHVSGTNGTKRFDNPVLPFNDGVYFASTEKSNIIRGWIFGTTLDSKTQSLLIVNNATNVVIKVCEFQFCNDPFLGVYYYKNNKSWMESEFRVYSSANNCTFEYVSQPFLMDLEGKQGNFKNLREFVFKNIDGYFKIYSKHTPINLVRDLPQGFSALEPLVDLPIGINITRFQTLLALHRSYLTPGDSSSGWTAGAAAYYVGYLQPRTFLLKYNENGTITDAVDCALDPLSETKCTLKSFTVEKGIYQTSNFRVQPTESIVRFPNITNLCPFGEVFNATRFASVYAWNRKRISNCVADYSVLYNSASFSTFKCYGVSPTKLNDLCFTNVYADSFVIRGDEVRQIAPGQTGKIADYNYKLPDDFTGCVIAWNSNNLDSKVGGNYNYLYRLFRKSNLKPFERDISTEIYQAGSTPCNGVEGFNCYFPLQSYGFQPTNGVGYQPYRVVVLSFELLHAPATVCGPKKSTNLVKNKCVNFNFNGLTGTGVLTESNKKFLPFQQFGRDIADTTDAVRDPQTLEILDITPCSFGGVSVITPGTNTSNQVAVLYQGVNCTEVPVAIHADQLTPTWRVYSTGSNVFQTRAGCLIGAEHVNNSYECDIPIGAGICASYQTQTNSPRRARSVASQSIIAYTMSLGAENSVAYSNNSIAIPTNFTISVTTEILPVSMTKTSVDCTMYICGDSTECSNLLLQYGSFCTQLNRALTGIAVEQDKNTQEVFAQVKQIYKTPPIKDFGGFNFSQILPDPSKPSKRSFIEDLLFNKVTLADAGFIKQYGDCLGDIAARDLICAQKFNGLTVLPPLLTDEMIAQYTSALLAGTITSGWTFGAGAALQIPFAMQMAYRFNGIGVTQNVLYENQKLIANQFNSAIGKIQDSLSSTASALGKLQDVVNQNAQALNTLVKQLSSNFGAISSVLNDILSRLDPPEAEVQIDRLITGRLQSLQTYVTQQLIRAAEIRASANLAATKMSECVLGQSKRVDFCGKGYHLMSFPQSAPHGVVFLHVTYVPAQEKNFTTAPAICHDGKAHFPREGVFVSNGTHWFVTQRNFYEPQIITTDNTFVSGNCDVVIGIVNNTVYDPLQPELDSFKEELDKYFKNHTSPDVDLGDISGINASVVNIQKEIDRLNEVAKNLNESLIDLQELGKYEQYIKGGGGSDIDPYKEFGSSYQLLNFLPLDFFPDLNALVDTATALYEEELTGREHCSPHHTAIRQALVCWDELTKLIAWMSSNITSEQVRTIIVNHVNDTWGLKVRQSLWFHLSCLTFGQHTVQEFLVSFGVWIRTPAPYRPPNAPILSTLPEHTVIC

SEQ ID NO: 6766 - protein, 1365 aa, Artificial Sequence
  SARS-CoV-2/USA/UT-00033/2020__EPI_ISL_417976 spike protein (1-1211)(K986P_V987P) WhcAg construct
MFVFLVLLPLVSSQCVNLTTRTQLPPAYTNSFTRGVYYPDKVFRSSVLHSTQDLFLPFFSNVTWFHAIHVSGTNGTKRFDNPVLPFNDGVYFASTEKSNIIRGWIFGTTLDSKTQSLLIVNNATNVVIKVCEFQFCNDPFLGVYYHKNNKSWMESEFRVYSSANNCTFEYVSQPFLMDLEGKQGNFKNLREFVFKNIDGYFKIYSKHTPINLVRDLPQGFSALEPLVDLPIGINITRFQTLLALHRSYLTPGDSSSGLTAGAAAYYVGYLQPRTFLLKYNENGTITDAVDCALDPLSETKCTLKSFTVEKGIYQTSNFRVQPTESIVRFPNITNLCPFGEVFNATRFASVYAWNRKRISNCVADYSVLYNSASFSTFKCYGVSPTKLNDLCFTNVYADSFVIRGDEVRQIAPGQTGKIADYNYKLPDDFTGCVIAWNSNNLDSKVGGNYNYLYRLFRKSNLKPFERDISTEIYQAGSTPCNGVEGFNCYFPLQSYGFQPTNGVGYQPYRVVVLSFELLHAPATVCGPKKSTNLVKNKCVNFNFNGLTGTGVLTESNKKFLPFQQFGRDIADTTDAVRDPQTLEILDITPCSFGGVSVITPGTNTSNQVAVLYQGVNCTEVPVAIHADQLTPTWRVYSTGSNVFQTRAGCLIGAEHVNNSYECDIPIGAGICASYQTQTNSPRRARSVASQSIIAYTMSLGAENSVAYSNNSIAIPTNFTISVTTEILPVSMTKTSVDCTMYICGDSTECSNLLLQYGSFCTQLNRALTGIAVEQDKNTQEVFAQVKQIYKTPPIKDFGGFNFSQILPDPSKPSKRSFIEDLLFNKVTLADAGFIKQYGDCLGDIAARDLICAQKFNGLTVLPPLLTDEMIAQYTSALLAGTITSGWTFGAGAALQIPFAMQMAYRFNGIGVTQNVLYENQKLIANQFNSAIGKIQDSLSSTASALGKLQDVVNQNAQALNTLVKQLSSNFGAISSVLNDILSRLDPPEAEVQIDRLITGRLQSLQTYVTQQLIRAAEIRASANLAATKMSECVLGQSKRVDFCGKGYHLMSFPQSAPHGVVFLHVTYVPAQEKNFTTAPAICHDGKAHFPREGVFVSNGTHWFVTQRNFYEPQIITTDNTFVSGNCDVVIGIVNNTVYDPLQPELDSFKEELDKYFKNHTSPDVDLGDISGINASVVNIQKEIDRLNEVAKNLNESLIDLQELGKYEQYIKGGGGSDIDPYKEFGSSYQLLNFLPLDFFPDLNALVDTATALYEEELTGREHCSPHHTAIRQALVCWDELTKLIAWMSSNITSEQVRTIIVNHVNDTWGLKVRQSLWFHLSCLTFGQHTVQEFLVSFGVWIRTPAPYRPPNAPILSTLPEHTVIC

SEQ ID NO: 6767 - protein, 1365 aa, Artificial Sequence
  SARS-CoV-2/USA/WI-13/2020__EPI_ISL_417516 spike protein (1-1211)(K986P_V987P) WhcAg construct
MFVFLVLLPLVSSQCVNLTTRTQLPPAYTNSFTRGVYYPDKVFRSSVLHSTQDLFLPFFSNVTWFHAIHVSGTNGTKRFDNPVLPFNDGVYFASTEKSNIIRGWIFGTTLDSKTQSLLIVNNATNVVIKVCEFQFCNDPFLGVYYHKNNKSWMESEFRVYSSANNCTFEYVSQPFLMDLEGKQGNFKNLREFVFKNIDGYFKIYSKHTPINLVRDLPQGFSALEPLVDLPIGINITRFQTLLALHRSYLTPGDSSSGWTAGAAAYYVGYLQPRTFLLKYNENGTITDAVDCALDPLSETKCTLKSFTVEKGIYQTSNFRVLPTESIVRFPNITNLCPFGEVFNATRFASVYAWNRKRISNCVADYSVLYNSASFSTFKCYGVSPTKLNDLCFTNVYADSFVIRGDEVRQIAPGQTGKIADYNYKLPDDFTGCVIAWNSNNLDSKVGGNYNYLYRLFRKSNLKPFERDISTEIYQAGSTPCNGVEGFNCYFPLQSYGFQPTNGVGYQPYRVVVLSFELLHAPATVCGPKKSTNLVKNKCVNFNFNGLTGTGVLTESNKKFLPFQQFGRDIADTTDAVRDPQTLEILDITPCSFGGVSVITPGTNTSNQVAVLYQGVNCTEVPVAIHADQLTPTWRVYSTGSNVFQTRAGCLIGAEHVNNSYECDIPIGAGICASYQTQTNSPRRARSVASQSIIAYTMSLGAENSVAYSNNSIAIPTNFTISVTTEILPVSMTKTSVDCTMYICGDSTECSNLLLQYGSFCTQLNRALTGIAVEQDKNTQEVFAQVKQIYKTPPIKDFGGFNFSQILPDPSKPSKRSFIEDLLFNKVTLADAGFIKQYGDCLGDIAARDLICAQKFNGLTVLPPLLTDEMIAQYTSALLAGTITSGWTFGAGAALQIPFAMQMAYRFNGIGVTQNVLYENQKLIANQFNSAIGKIQDSLSSTASALGKLQDVVNQNAQALNTLVKQLSSNFGAISSVLNDILSRLDPPEAEVQIDRLITGRLQSLQTYVTQQLIRAAEIRASANLAATKMSECVLGQSKRVDFCGKGYHLMSFPQSAPHGVVFLHVTYVPAQEKNFTTAPAICHDGKAHFPREGVFVSNGTHWFVTQRNFYEPQIITTDNTFVSGNCDVVIGIVNNTVYDPLQPELDSFKEELDKYFKNHTSPDVDLGDISGINASVVNIQKEIDRLNEVAKNLNESLIDLQELGKYEQYIKGGGGSDIDPYKEFGSSYQLLNFLPLDFFPDLNALVDTATALYEEELTGREHCSPHHTAIRQALVCWDELTKLIAWMSSNITSEQVRTIIVNHVNDTWGLKVRQSLWFHLSCLTFGQHTVQEFLVSFGVWIRTPAPYRPPNAPILSTLPEHTVIC

SEQ ID NO: 6768 - protein, 1364 aa, Artificial Sequence
  SARS-CoV-2/India/1-27/2020__EPI_ISL_413522 spike protein (1-1210)(K985P_V986P) WhcAg construct
MFVFLVLLPLVSSQCVNLTTRTQLPPAYTNSFTRGVYYPDKVFRSSVLHSTQDLFLPFFSNVTWFHAIHVSGTNGTKRFDNPVLPFNDGVYFASTEKSNIIRGWIFGTTLDSKTQSLLIVNNATNVVIKVCEFQFCNDPFLGVYHKNNKSWMESEFRVYSSANNCTFEYVSQPFLMDLEGKQGNFKNLREFVFKNIDGYFKIYSKHTPINLVRDLPQGFSALEPLVDLPIGINITRFQTLLALHRSYLTPGDSSSGWTAGAAAYYVGYLQPRTFLLKYNENGTITDAVDCALDPLSETKCTLKSFTVEKGIYQTSNFRVQPTESIVRFPNITNLCPFGEVFNATRFASVYAWNRKRISNCVADYSVLYNSASFSTFKCYGVSPTKLNDLCFTNVYADSFVIRGDEVIQIAPGQTGKIADYNYKLPDDFTGCVIAWNSNNLDSKVGGNYNYLYRLFRKSNLKPFERDISTEIYQAGSTPCNGVEGFNCYFPLQSYGFQPTNGVGYQPYRVVVLSFELLHAPATVCGPKKSTNLVKNKCVNFNFNGLTGTGVLTESNKKFLPFQQFGRDIADTTDAVRDPQTLEILDITPCSFGGVSVITPGTNTSNQVAVLYQDVNCTEVPVAIHADQLTPTWRVYSTGSNVFQTRAGCLIGAEHVNNSYECDIPIGAGICASYQTQTNSPRRARSVASQSIIAYTMSLGAENSVAYSNNSIAIPTNFTISVTTEILPVSMTKTSVDCTMYICGDSTECSNLLLQYGSFCTQLNRALTGIAVEQDKNTQEVFAQVKQIYKTPPIKDFGGFNFSQILPDPSKPSKRSFIEDLLFNKVTLADAGFIKQYGDCLGDIAARDLICAQKFNGLTVLPPLLTDEMIAQYTSALLAGTITSGWTFGAGAALQIPFAMQMAYRFNGIGVTQNVLYENQKLIANQFNSAIGKIQDSLSSTASALGKLQDVVNQNAQALNTLVKQLSSNFGAISSVLNDILSRLDPPEAEVQIDRLITGRLQSLQTYVTQQLIRAAEIRASANLAATKMSECVLGQSKRVDFCGKGYHLMSFPQSAPHGVVFLHVTYVPAQEKNFTTAPAICHDGKAHFPREGVFVSNGTHWFVTQRNFYEPQIITTDNTFVSGNCDVVIGIVNNTVYDPLQPELDSFKEELDKYFKNHTSPDVDLGDISGINASVVNIQKEIDRLNEVAKNLNESLIDLQELGKYEQYIKGGGGSDIDPYKEFGSSYQLLNFLPLDFFPDLNALVDTATALYEEELTGREHCSPHHTAIRQALVCWDELTKLIAWMSSNITSEQVRTIIVNHVNDTWGLKVRQSLWFHLSCLTFGQHTVQEFLVSFGVWIRTPAPYRPPNAPILSTLPEHTVIC

SEQ ID NO: 6769 - protein, 1359 aa, Artificial Sequence
  SARS-CoV-2/pangolin/Guangxi/P4L/2017__EPI_ISL_410538 spike protein (1-1205)(K980P_V981P) WhcAg construct
MFVFLFVLPLVSSQCVNLTTRTGIPPGYTNSSTRGVYYPDKVFRSSILHLTQDLFLPFFSNVTWFNTINYQGGFKKFDNPVLPFNDGVYFASTEKSNIIRGWIFGTTLDARTQSLLIVNNATNVVIKVCEFQFCTDPFLGVYYHNNNKTWVENEFRVYSSANNCTFEYISQPFLMDLEGKQGNFKNLREFVFKNVDGYFKIYSKHTPIDLVRDLPRGFAALEPLVDLPIGINITRFQTLLALHRSYLTPGNLESGWTTGAAAYYVGYLQQRTFLLSYNQNGTITDAVDCSLDPLSETKCTLKSLTVEKGIYQTSNFRVQPTISIVRFPNITNLCPFGEVFNASKFASVYAWNRKRISNCVADYSVLYNSTSFSTFKCYGVSPTKLNDLCFTNVYADSFVVKGDEVRQIAPGQTGVIADYNYKLPDDFTGCVIAWNSVKQDALTGGNYGYLYRLFRKSKLKPFERDISTEIYQAGSTPCNGQVGLNCYYPLERYGFHPTTGVNYQPFRVVVLSFELLNGPATVCGPKLSTTLVKDKCVNFNFNGLTGTGVLTTSKKQFLPFQQFGRDISDTTDAVRDPQTLEILDITPCSFGGVSVITPGTNTSNQVAVLYQDVNCTEVPMAIHAEQLTPAWRVYSAGANVFQTRAGCLVGAEHVNNSYECDIPVGAGICASYHSMSSLRSVNQRSIIAYTMSLGAENSVAYSNNSIAIPTNFTISVTTEILPVSMTKTSVDCTMYICGDSIECSNLLLQYGSFCTQLNRALTGIAVEQDKNTQEVFAQVKQIYKTPPIKDFGGFNFSQILPDPSKPSKRSFIEDLLFNKVTLADAGFIKQYGDCLGDIAARDLICAQKFNGLTVLPPLLTDEMIAQYTSALLAGTITSGWTFGAGAALQIPFAMQMAYRFNGIGVTQNVLYENQKLIANQFNSAIGKIQDSLSSTASALGKLQDVVNQNAQALNTLVKQLSSNFGAISSVLNDILSRLDPPEAEVQIDRLITGRLQSLQTYVTQQLIRAAEIRASANLAATKMSECVLGQSKRVDFCGKGYHLMSFPQSAPHGVVFLHVTYVPAQEKNFTTAPAICHEGKAHFPREGVFVSNGTHWFITQRNFYEPQIITTDNTFVSGSCDVVIGIVNNTVYDPLQPELDSFKEELDKYFKNHTSPDVDLGDISGINASVVNIQKEIDRLNEVAKNLNESPIDLQELGKYEQYIKGGGGSDIDPYKEFGSSYQLLNFLPLDFFPDLNALVDTATALYEEELTGREHCSPHHTAIRQALVCWDELTKLIAWMSSNITSEQVRTIIVNHVNDTWGLKVRQSLWFHLSCLTFGQHTVQEFLVSFGVWIRTPAPYRPPNAPILSTLPEHTVIC

SEQ ID NO: 6770 - protein, 1359 aa, Artificial Sequence
  SARS-CoV-2/pangolin/Guangxi/P5L/2017__EPI_ISL_410540 spike protein (1-1205)(K980P_V981P) WhcAg construct
MFVFLFVLPLVSSQCVNLTTRTGIPPGYTNSSTRGVYYPDKVFRSSILHLTQDLFLPFFSNVTWFNTINYQGGFKKFDNPVLPFNDGVYFASTEKSNIIRGWIFGTTLDARTQSLLIVNNATNVVIKVCEFQFCTDPFLGVYYHNNNKTWVENEFRVYSSANNCTFEYISQPFLMDLEGKQGNFKNLREFVFKNVDGYFKIYSKHTPIDLVRDLPRGFAALEPLVDLPIGINITRFQTLLALHRSYLTPGKLESGWTTGAAAYYVGYLQQRTFLLSYNQNGTITDAVDCSLDPLSETKCTLKSLTVEKGIYQTSNFRVQPTISIVRFPNITNLCPFGEVFNASKFASVYAWNRKRISNCVADYSVLYNSTSFSTFKCYGVSPTKLNDLCFTNVYADSFVVKGDEVRQIAPGQTGVIADYNYKLPDDFTGCVIAWNSVKQDALTGGNYGYLYRLFRKSKLKPFERDISTEIYQAGSTPCNGQVGLNCYYPLERYGFHPTTGVNYQPFRVVVLSFELLNGPATVCGPKLSTTLVKDKCVNFNFNGLTGTGVLTTSKKQFLPFQQFGRDISDTTDAVRDPQTLEILDITPCSFGGVSVITPGTNTSNQVAVLYQDVNCTEVPMAIHAEQLTPAWRVYSAGANVFQTRAGCLVGAEHVNNSYECDIPVGAGICASYHSMSSFRSVNQRSIIAYTMSLGAENSVAYSNNSIAIPTNFTISVTTEILPVSMTKTSVDCTMYICGDSIECSNLLLQYGSFCTQLNRALTGIAVEQDKNTQEVFAQVKQIYKTPPIKDFGGFNFSQILPDPSKPSKRSFIEDLLFNKVTLADAGFIKQYGDCLGDIAARDLICAQKFNGLTVLPPLLTDEMIAQYTSALLAGTITSGWTFGAGAALQIPFAMQMAYRFNGIGVTQNVLYENQKLIANQFNSAIGKIQDSLSSTASALGKLQDVVNQNAQALNTLVKQLSSNFGAISSVLNDILSRLDPPEAEVQIDRLITGRLQSLQTYVTQQLIRAAEIRASANLAATKMSECVLGQSKRVDFCGKGYHLMSFPQSAPHGVVFLHVTYVPAQEKNFTTAPAICHEGKAHFPREGVFVSNGTHWFITQRNFYEPQIITTDNTFVSGSCDVVIGIVNNTVYDPLQPELDSFKEELDKYFKNHTSPDVDLGDISGINASVVNIQKEIDRLNEVAKNLNESLIDLQELGKYEQYIKGGGGSDIDPYKEFGSSYQLLNFLPLDFFPDLNALVDTATALYEEELTGREHCSPHHTAIRQALVCWDELTKLIAWMSSNITSEQVRTIIVNHVNDTWGLKVRQSLWFHLSCLTFGQHTVQEFLVSFGVWIRTPAPYRPPNAPILSTLPEHTVIC

SEQ ID NO: 6771 - protein, 1359 aa, Artificial Sequence
  SARS-CoV-2/pangolin/Guangxi/P5E/2017__EPI_ISL_410541 spike protein (1-1205)(K980P_V981P) WhcAg construct
MFVFLFVLPLVSSQCVNLTTRTGIPPGYTNSSTRGVYYPDKVFRSSILHLTQDLFLPFFSNVTWFNTITYQGGSKKFDNPVLPFNDGVYFASTEKSNIIRGWIFGTTLDARTQSLLIVNNATNVVIKVCEFQFCTDPFLGVYYHNNNKTWVENEFRVYSSANNCTFEYISQPFLMDLEGKQGNFKNLREFVFKNVDGYFKIYSKHTPIDLVRDLPRGFAALEPLVDLPIGINITRFQTLLALHRSYLTPGKLESGWTTGAAAYYVGYLQQRTFLLSYNQNGTITDAVDCSLDPLSETKCTLKSLTVEKGIYQTSNFRVQPTISIVRFPNITNLCPFGEVFNASKFASVYAWNRKRISNCVADYSVLYNSTSFSTFKCYGVSPTKLNDLCFTNVYADSFVVKGDEVRQIAPGQTGVIADYNYKLPDDFTGCVIAWNSVKQDALTGDNYGYLYRLFRKSKLKPFERDISTEIYQAGSTPCNGQVGLNCYYPLERYGFHPTTGVNYQPFRVVVLSFELLNGPATVCGPKLSTTLVKDKCVNFNFNGLTGTGVLTTSKKQFLPFQQFGRDISDTTDAVRDPQTLEILDITPCSFGGVSVITPGTNTSNQVAVLYQDVNCTEVPMAIHAEQLTPAWRVYSAGANVFQTRAGCLVGAEHVNNSYECDIPVGAGICASYHSMSSFRSVNQRSIIAYTMSLGAENSVAYSNNSIAIPTNFTISVTTEILPVSMTKTSVDCTMYICGDSIECSNLLLQYGSFCTQLNRALTGIAVEQDKNTQEVFAQVKQIYKTPPIKDFGGFNFSQILPDPSKPSKRSFIEDLLFNKVTLADAGFIKQYGDCLGDIAARDLICAQKFNGLTVLPPLLTDEMIAQYTSALLAGTITSGWTFGAGAALQIPFAMQMAYRFNGIGVTQNVLYENQKLIANQFNSAIGKIQDSLSSTASALGKLQDVVNQNAQALNTLVKQLSSNFGAISSVLNDILSRLDPPEAEVQIDRLITGRLQSLQTYVTQQLIRAAEIRASANLAATKMSECVLGQSKRVDFCGKGYHLMSFPQSAPHGVVFLHVTYVPAQEKNFTTAPAICHEGKAHFPREGVFVSNGTHWFITQRNFYEPQIITTDNTFVSGSCDVVIGIVNNTVYDPLQPELDSFKEELDKYFKNHTSPDVDLGDISGINASVVNIQKEIDRLNEVAKNLNESLIDLQELGKYEQYIKGGGGSDIDPYKEFGSSYQLLNFLPLDFFPDLNALVDTATALYEEELTGREHCSPHHTAIRQALVCWDELTKLIAWMSSNITSEQVRTIIVNHVNDTWGLKVRQSLWFHLSCLTFGQHTVQEFLVSFGVWIRTPAPYRPPNAPILSTLPEHTVIC

SEQ ID NO: 6772 - protein, 1357 aa, Artificial Sequence
  SARS-CoV-2/pangolin/Guangxi/P1E/2017__EPI_ISL_410539 spike protein (1-1203)(K978P_V979P) WhcAg construct
MFVFLFVLPLVSSQCVNLTTRTGIQPGYTNSSTRGVYYPDKVFRSSILHLTQDLFLPFFSNVTWFNTINYQGGFKKFDNPVLPFNDGVYFASTEKSNIIRGWIFGTTLDARTQSLLIVNNATNVVIKVCEFQFCTDPFLGVYYHNNNKTWVENEFRVYSSANNCTFEYISQPFLMDLEGKQGNFKNLREFVFKNVDGYFKIYSKHTPIDLVRDLPRGFAALEPLVDLPIGINITRFQTLLALHRSYLTPGKLESGWTTGAAAYYVGYLQQRTFLLSYNQNGTITDAVDCSLDPLSETKCTLKSLTVEKGIYQTSNFRVQPTISIVRFPNITNLCPFGEVFNASKFASVYAWNRKRISNCVADYSVLYNSTSFSTFKCYGVSPTKLNDLCFTNVYADSFVVKGDEVRQIAPGQTGVIADYNYKLPDDFTGCVIAWNSVKQDALTGGNYLYRLFRKSKLKPFERDISTEIYQAGSTPCNGQVGLNCYYPLERYGFHPTTGVNYQPFRVVVLSFELLNGPATVCGPKLSTTLVKDKCVNFNFNGLTGTGVLTTSKKQFLPFQQFGRDISDTTDAVRDPQTLEILDITPCSFGGVSVITPGTNTSNQVAVLYQDVNCTEVPMAIHAEQLTPAWRVYSAGANVFQTRAGCLVGAEHVNNSYECDIPVGAGICASYHSMSSLRSVNQRSIIAYTMSLGAENSVAYSNNSIAIPTNFTISVTTEILPVSMTKTSVDCTMYICGDSIECSNLLLQYGSFCTQLNRALTGIAVEQDKNTQEVFAQVKQIYKTPPIKDFGGFNFSQILPDPSKPSKRSFIEDLLFNKVTLADAGFIKQYGDCLGDIAARDLICAQKFNGLTVLPPLLTDEMIAQYTSALLAGTITSGWTFGAGAALQIPFAMQMAYRFNGIGVTQNVLYENQKLIANQFNSAIGKIQDSLSSTASALGKLQDVVNQNAQALNTLVKQLSSNFGAISSVLNDILSRLDPPEAEVQIDRLITGRLQSLQTYVTQQLIRAAEIRASANLAATKMSECVLGQSKRVDFCGKGYHLMSFPQSAPHGVVFLHVTYVPAQEKNFTTAPAICHEGKAHFPREGVFVSNGTHWFITQRNFYEPQIITTDNTFVSGSCDVVIGIVNNTVYDPLQPELDSFKEELDKYFKNHTSPDVDLGDISGINASVVNIQKEIDRLNEVAKNLNESLIDLQELGKYEQYIKGGGGSDIDPYKEFGSSYQLLNFLPLDFFPDLNALVDTATALYEEELTGREHCSPHHTAIRQALVCWDELTKLIAWMSSNITSEQVRTIIVNHVNDTWGLKVRQSLWFHLSCLTFGQHTVQEFLVSFGVWIRTPAPYRPPNAPILSTLPEHTVIC

SEQ ID NO: 6773 - protein, 1365 aa, Artificial Sequence
  SARS-CoV-2/Wuhan/WIV05/2019__EPI_ISL_402128 spike protein (1-1211)(K986P_V987P_T887W_A1020W) WhcAg construct
MFVFLVLLPLVSSQCVNLTTRTQLPPAYTNSFTRGVYYPDKVFRSSVLHSTQDLFLPFFSNVTWFHAIHVSGTNGTKRFDNPVLPFNDGVYFASTEKSNIIRGWIFGTTLDSKTQSLLIVNNATNVVIKVCEFQFCNDPFLGVYYHKNNKSWMESEFRVYSSANNCTFEYVSQPFLMDLEGKQGNFKNLREFVFKNIDGYFKIYSKHTPINLVRDLPQGFSALEPLVDLPIGINITRFQTLLALHRSYLTPGDSSSGWTAGAAAYYVGYLQPRTFLLKYNENGTITDAVDCALDPLSETKCTLKSFTVEKGIYQTSNFRVQPTESIVRFPNITNLCPFGEVFNATRFASVYAWNRKRISNCVADYSVLYNSASFSTFKCYGVSPTKLNDLCFTNVYADSFVIRGDEVRQIAPGQTGKIADYNYKLPDDFTGCVIAWNSNNLDSKVGGNYNYLYRLFRKSNLKPFERDISTEIYQAGSTPCNGVEGFNCYFPLQSYGFQPTNGVGYQPYRVVVLSFELLHAPATVCGPKKSTNLVKNKCVNFNFNGLTGTGVLTESNKKFLPFQQFGRDIADTTDAVRDPQTLEILDITPCSFGGVSVITPGTNTSNQVAVLYQDVNCTEVPVAIHADQLTPTWRVYSTGSNVFQTRAGCLIGAEHVNNSYECDIPIGAGICASYQTQTNSPRRARSVASQSIIAYTMSLGAENSVAYSNNSIAIPTNFTISVTTEILPVSMTKTSVDCTMYICGDSTECSNLLLQYGSFCTQLNRALTGIAVEQDKNTQEVFAQVKQIYKTPPIKDFGGFNFSQILPDPSKPSKRSFIEDLLFNKVTLADAGFIKQYGDCLGDIAARDLICAQKFNGLTVLPPLLTDEMIAQYTSALLAGTITSGWWFGAGAALQIPFAMQMAYRFNGIGVTQNVLYENQKLIANQFNSAIGKIQDSLSSTASALGKLQDVVNQNAQALNTLVKQLSSNFGAISSVLNDILSRLDPPEAEVQIDRLITGRLQSLQTYVTQQLIRAAEIRWSANLAATKMSECVLGQSKRVDFCGKGYHLMSFPQSAPHGVVFLHVTYVPAQEKNFTTAPAICHDGKAHFPREGVFVSNGTHWFVTQRNFYEPQIITTDNTFVSGNCDVVIGIVNNTVYDPLQPELDSFKEELDKYFKNHTSPDVDLGDISGINASVVNIQKEIDRLNEVAKNLNESLIDLQELGKYEQYIKGGGGSDIDPYKEFGSSYQLLNFLPLDFFPDLNALVDTATALYEEELTGREHCSPHHTAIRQALVCWDELTKLIAWMSSNITSEQVRTIIVNHVNDTWGLKVRQSLWFHLSCLTFGQHTVQEFLVSFGVWIRTPAPYRPPNAPILSTLPEHTVIC

SEQ ID NO: 6774 - protein, 1361 aa, Artificial Sequence
  SARS-CoV-2/bat/Yunnan/RaTG13/2013__EPI_ISL_402131 spike protein (1-1207)(K982P_V983P_T883W_A1016W) WhcAg construct
MFVFLVLLPLVSSQCVNLTTRTQLPPAYTNSSTRGVYYPDKVFRSSVLHLTQDLFLPFFSNVTWFHAIHVSGTNGIKRFDNPVLPFNDGVYFASTEKSNIIRGWIFGTTLDSKTQSLLIVNNATNVVIKVCEFQFCNDPFLGVYYHKNNKSWMESEFRVYSSANNCTFEYVSQPFLMDLEGKQGNFKNLREFVFKNIDGYFKIYSKHTPINLVRDLPPGFSALEPLVDLPIGINITRFQTLLALHRSYLTPGDSSSGWTAGAAAYYVGYLQPRTFLLKYNENGTITDAVDCALDPLSETKCTLKSFTVEKGIYQTSNFRVQPTDSIVRFPNITNLCPFGEVFNATTFASVYAWNRKRISNCVADYSVLYNSTSFSTFKCYGVSPTKLNDLCFTNVYADSFVITGDEVRQIAPGQTGKIADYNYKLPDDFTGCVIAWNSKHIDAKEGGNFNYLYRLFRKANLKPFERDISTEIYQAGSKPCNGQTGLNCYYPLYRYGFYPTDGVGHQPYRVVVLSFELLNAPATVCGPKKSTNLVKNKCVNFNFNGLTGTGVLTESNKKFLPFQQFGRDIADTTDAVRDPQTLEILDITPCSFGGVSVITPGTNASNQVAVLYQDVNCTEVPVAIHADQLTPTWRVYSTGSNVFQTRAGCLIGAEHVNNSYECDIPIGAGICASYQTQTNSRSVASQSIIAYTMSLGAENSVAYSNNSIAIPTNFTISVTTEILPVSMTKTSVDCTMYICGDSTECSNLLLQYGSFCTQLNRALTGIAVEQDKNTQEVFAQVKQIYKTPPIKDFGGFNFSQILPDPSKPSKRSFIEDLLFNKVTLADAGFIKQYGDCLGDIAARDLICAQKFNGLTVLPPLLTDEMIAQYTSALLAGTITSGWWFGAGAALQIPFAMQMAYRFNGIGVTQNVLYENQKLIANQFNSAIGKIQDSLSSTASALGKLQDVVNQNAQALNTLVKQLSSNFGAISSVLNDILSRLDPPEAEVQIDRLITGRLQSLQTYVTQQLIRAAEIRWSANLAATKMSECVLGQSKRVDFCGKGYHLMSFPQSAPHGVVFLHVTYVPAQEKNFTTAPAICHDGKAHFPREGVFVSNGTHWFVTQRNFYEPQIITTDNTFVSGSCDVVIGIVNNTVYDPLQPELDSFKEELDKYFKNHTSPDVDLGDISGINASVVNIQKEIDRLNEVAKNLNESLIDLQELGKYEQYIKGGGGSDIDPYKEFGSSYQLLNFLPLDFFPDLNALVDTATALYEEELTGREHCSPHHTAIRQALVCWDELTKLIAWMSSNITSEQVRTIIVNHVNDTWGLKVRQSLWFHLSCLTFGQHTVQEFLVSFGVWIRTPAPYRPPNAPILSTLPEHTVIC

SEQ ID NO: 6775 - protein, 1365 aa, Artificial Sequence
  SARS-CoV-2/Wuhan/HBCDC-HB-01/2019__EPI_ISL_402132 spike protein (1-1211)(K986P_V987P_T887W_A1020W) WhcAg construct
MFVFLVLLPLVSSQCVNLTTRTQLPPAYTNSITRGVYYPDKVFRSSVLHSTQDLFLPFFSNVTWFHAIHVSGTNGTKRFDNPVLPFNDGVYFASTEKSNIIRGWIFGTTLDSKTQSLLIVNNATNVVIKVCEFQFCNDPFLGVYYHKNNKSWMESEFRVYSSANNCTFEYVSQPFLMDLEGKQGNFKNLREFVFKNIDGYFKIYSKHTPINLVRDLPQGFSALEPLVDLPIGINITRFQTLLALHRSYLTPGDSSSGWTAGAAAYYVGYLQPRTFLLKYNENGTITDAVDCALDPLSETKCTLKSFTVEKGIYQTSNFRVQPTESIVRFPNITNLCPFGEVFNATRFASVYAWNRKRISNCVADYSVLYNSASFSTFKCYGVSPTKLNDLCFTNVYADSFVIRGDEVRQIAPGQTGKIADYNYKLPDDFTGCVIAWNSNNLDSKVGGNYNYLYRLFRKSNLKPFERDISTEIYQAGSTPCNGVEGFNCYFPLQSYGFQPTNGVGYQPYRVVVLSFELLHAPATVCGPKKSTNLVKNKCVNFNFNGLTGTGVLTESNKKFLPFQQFGRDIADTTDAVRDPQTLEILDITPCSFGGVSVITPGTNTSNQVAVLYQDVNCTEVPVAIHADQLTPTWRVYSTGSNVFQTRAGCLIGAEHVNNSYECDIPIGAGICASYQTQTNSPRRARSVASQSIIAYTMSLGAENSVAYSNNSIAIPTNFTISVTTEILPVSMTKTSVDCTMYICGDSTECSNLLLQYGSFCTQLNRALTGIAVEQDKNTQEVFAQVKQIYKTPPIKDFGGFNFSQILPDPSKPSKRSFIEDLLFNKVTLADAGFIKQYGDCLGDIAARDLICAQKFNGLTVLPPLLTDEMIAQYTSALLAGTITSGWWFGAGAALQIPFAMQMAYRFNGIGVTQNVLYENQKLIANQFNSAIGKIQDSLSSTASALGKLQDVVNQNAQALNTLVKQLSSNFGAISSVLNDILSRLDPPEAEVQIDRLITGRLQSLQTYVTQQLIRAAEIRWSANLAATKMSECVLGQSKRVDFCGKGYHLMSFPQSAPHGVVFLHVTYVPAQEKNFTTAPAICHDGKAHFPREGVFVSNGTHWFVTQRNFYEPQIITTDNTFVSGNCDVVIGIVNNTVYDPLQPELDSFKEELDKYFKNHTSPDVDLGDISGINASVVNIQKEIDRLNEVAKNLNESLIDLQELGKYEQYIKGGGGSDIDPYKEFGSSYQLLNFLPLDFFPDLNALVDTATALYEEELTGREHCSPHHTAIRQALVCWDELTKLIAWMSSNITSEQVRTIIVNHVNDTWGLKVRQSLWFHLSCLTFGQHTVQEFLVSFGVWIRTPAPYRPPNAPILSTLPEHTVIC

SEQ ID NO: 6776 - protein, 1365 aa, Artificial Sequence
  SARS-CoV-2/Guangdong/20SF028/2020__EPI_ISL_403936 spike protein (1-1211)(K986P_V987P_T887W_A1020W) WhcAg construct
MFVFLVLLPLVSSQCVNLTTRTQLPPAYTNSFTRGVYYPDKVFRSSVLYSTQDLFLPFFSNVTWFHAIHVSGTNGTKRFDNPVLPFNDGVYFASTEKSNIIRGWIFGTTLDSKTQSLLIVNNATNVVIKVCEFQFCNDPFLGVYYHKNNKSWMESEFRVYSSANNCTFEYVSQPFLMDLEGKQGNFKNLREFVFKNIDGYFKIYSKHTPINLVRDLPQGFSALEPLVDLPIGINITRFQTLLALHRSYLTPGDSSSGWTAGAAAYYVGYLQPRTFLLKYNENGTITDAVDCALDPLSETKCTLKSFTVEKGIYQTSNFRVQPTESIVRFPNITNLCPFGEVFNATRFASVYAWNRKRISNCVADYSVLYNSASFSTFKCYGVSPTKLNDLCFTNVYADSFVIRGDEVRQIAPGQTGKIADYNYKLPDDFTGCVIAWNSNNLDSKVGGNYNYLYRLFRKSNLKPFERDISTEIYQAGSTPCNGVEGFNCYFPLQSYGFQPTNGVGYQPYRVVVLSFELLHAPATVCGPKKSTNLVKNKCVNFNFNGLTGTGVLTESNKKFLPFQQFGRDIADTTDAVRDPQTLEILDITPCSFGGVSVITPGTNTSNQVAVLYQDVNCTEVPVAIHADQLTPTWRVYSTGSNVFQTRAGCLIGAEHVNNSYECDIPIGAGICASYQTQTNSPRRARSVASQSIIAYTMSLGAENSVAYSNNSIAIPTNFTISVTTEILPVSMTKTSVDCTMYICGDSTECSNLLLQYGSFCTQLNRALTGIAVEQDKNTQEVFAQVKQIYKTPPIKDFGGFNFSQILPDPSKPSKRSFIEDLLFNKVTLADAGFIKQYGDCLGDIAARDLICAQKFNGLTVLPPLLTDEMIAQYTSALLAGTITSGWWFGAGAALQIPFAMQMAYRFNGIGVTQNVLYENQKLIANQFNSAIGKIQDSLSSTASALGKLQDVVNQNAQALNTLVKQLSSNFGAISSVLNDILSRLDPPEAEVQIDRLITGRLQSLQTYVTQQLIRAAEIRWSANLAATKMSECVLGQSKRVDFCGKGYHLMSFPQSAPHGVVFLHVTYVPAQEKNFTTAPAICHDGKAHFPREGVFVSNGTHWFVTQRNFYEPQIITTDNTFVSGNCDVVIGIVNNTVYDPLQPELDSFKEELDKYFKNHTSPDVDLGDISGINASVVNIQKEIDRLNEVAKNLNESLIDLQELGKYEQYIKGGGGSDIDPYKEFGSSYQLLNFLPLDFFPDLNALVDTATALYEEELTGREHCSPHHTAIRQALVCWDELTKLIAWMSSNITSEQVRTIIVNHVNDTWGLKVRQSLWFHLSCLTFGQHTVQEFLVSFGVWIRTPAPYRPPNAPILSTLPEHTVIC

SEQ ID NO: 6777 - protein, 1365 aa, Artificial Sequence
  SARS-CoV-2/Shenzhen/SZTH-001/2020__EPI_ISL_406592 spike protein (1-1211)(K986P_V987P_T887W_A1020W) WhcAg construct
MFVFLVLLPLVSSQCVNLTTRTQLPPAYTNSFTRGVYYPDKVFRSSVLHSTQDLFLPFFSNVTWFHAIHVSGTNGTKRFDNPVLPFNDGVYFASTEKSNIIRGWIFGTTLDSKTQSLLIVNNATNVVIKVCEFQFCNDPFLGVYYHKNNKSWMESEFRVYSSANNCTFEYVSQPFLMDLEGKQGNFKNLREFVFKNIDGYFKIYSKHTPINLVRDLPQGFSALEPLVDLPIGINITRFQTLLALHRSYLTPGDSSSGWTAGAAAYYVGYLQPRTFLLKYNENGTITDAVDCALDPLSETKCTLKSFTVEKGIYQTSNFRVQPTESIVRFPNITNLCPFGEVFNATRFASVYAWNRKRISNCVADYSVLYNSASFSTFKCYGVSPTKLNDLCFTNVYADSFVIRGDEVRQIAPGQTGKIADYNYKLPDDFTGCVIAWNSNNLDSKVGGNYNYLYRLFRKSNLKPFERDISTEIYQAGSTPCNGVEGFNCYFPLQSYGFQPTNGVGYQPYRVVVLSFELLHAPATVCGPKKSTNLVKNKCVNFNFNGLTGTGVLTESNKKFLPFQQFGRDIADTTDAVRDPQTLEILDITPCSFGGVSVITPGTNTSNQVAVLYQDVNCTEVPVAIHADQLTPTWRVYSTGSNVFQTRAGCLIGAEHVNNSYECDIPIGAGICASYQTQTNSPRRARSVASQSIIAYTMSLGAENSVAYSNNSIAIPTNFTISVTTEILPVSMTKTSVDCTMYICGDSTECSNLLLQYGSFCTQLNRALTGIAVEQDKNTQEVFAQVKQIYKTPPIKDFGGFNFSQILPDPSKPSKRSFIEDLLFNKVTLADAGFIKQYGDCLGDIAARDLICAQKFNGLTVLPPLLTDEMIAQYTSALLAGTITSGWWFGAGAALQIPFAMQMAYRFNGIGVTQNVLYENQKLIANQFNSAIGKIQDSLSSTASALGKLQDVVNQNAQALNTLVKQLSSNFGAISSVLNDILSRLDPPEAEVQIDRLITGRLQSLQTYVTQQLIRAAEIRWSANLAATKMSECVLGQSKRVDFCGKGYHLMSFPQSAPHGVVFLHVTYVPAQEKNFTTAPAICHDGKAHFPREGVFVSNGTHWFVTQRNFYEPQIITTDNTFVSGNCDVLIGIVNNTVYDPLQPELDSFKEELDKYFKNHTSPDVDLGDISGINASVVNIQKEIDRLNEVAKNLNESLIDLQELGKYEQYIKGGGGSDIDPYKEFGSSYQLLNFLPLDFFPDLNALVDTATALYEEELTGREHCSPHHTAIRQALVCWDELTKLIAWMSSNITSEQVRTIIVNHVNDTWGLKVRQSLWFHLSCLTFGQHTVQEFLVSFGVWIRTPAPYRPPNAPILSTLPEHTVIC

SEQ ID NO: 6778 - protein, 1365 aa, Artificial Sequence
  SARS-CoV-2/Shenzhen/SZTH-004/2020__EPI_ISL_406595 spike protein (1-1211)(K986P_V987P_T887W_A1020W) WhcAg construct
MFVFLVLLPLVSSQCVNLTTRTQLPPAYTNSFTRGVYYPDKVFRSSVLHSTQDLFLPFFSNVTWFHAIHVSGTNGTKRFDNPVLPFNDGVYFASTEKSNIIRGWIFGTTLDSKTQSLLIVNNATNVVIKVCEFQFCNDPFLGVYYHKNNKSWMESEFRVYSSANNCTFEYVSQPFLMDLEGKQGNFKNLREFVFKNIDGYFKIYSKHTPINLVRDLPQGFSALEPLVDLPIGINITRFQTLLALHRSYLTPGDSSSGWTAGAAAYYVGYLQPRTFLLKYNENGTITDAVDCALDPLSETKCTLKSFTVEKGIYQTSNFRVQPTESIVRFPNITNLCPFGEVFNATRFASVYAWDRKRISNCVAYYSVLYNSASFSTFKCYGVSPTKLNDLCFTNVYADSFVIRGDEVRQIAPGQTGKIADYNYKLPDDFTGCVIAWNSNNLDSKVGGNYNYLYRLFRKSNLKPFERDISTEIYQAGSTPCNGVEGFNCYFPLQSYGFQPTNGVGYQPYRVVVLSFELLHAPATVCGPKKSTNLVKNKCVNFNFNGLTGTGVLTESNKKFLPFQQFGRDIADTTDAVRDPQTLEILDITPCSFGGVSVITPGTNTSNQVAVLYQDVNCTEVPVAIHADQLTPTWRVYSTGSNVFQTRAGCLIGAEHVNNSYECDIPIGAGICASYQTQTNSPRRARSVASQSIIAYTMSLGAENSVAYSNNSIAIPTNFTISVTTEILPVSMTKTSVDCTMYICGDSTECSNLLLQYGSFCTQLNRALTGIAVEQDKNTQEVFAQVKQIYKTPPIKDFGGFNFSQILPDPSKPSKRSFIEDLLFNKVTLADAGFIKQYGDCLGDIAARDLICAQKFNGLTVLPPLLTDEMIAQYTSALLAGTITSGWWFGAGAALQIPFAMQMAYRFNGIGVTQNVLYENQKLIANQFNSAIGKIQDSLSSTASALGKLQDVVNQNAQALNTLVKQLSSNFGAISSVLNDILSRLDPPEAEVQIDRLITGRLQSLQTYVTQQLIRAAEIRWSANLAATKMSECVLGQSKRVDFCGKGYHLMSFPQSAPHGVVFLHVTYVPAQEKNFTTAPAICHDGKAHFPREGVFVSNGTHWFVTQRNFYEPQIITTDNTFVSGNCDVVIGIVNNTVYDPLQPELDSFKEELDKYFKNHTSPDVDLGDISGINASVVNIQKEIDRLNEVAKNLNESLIDLQELGKYEQYIKGGGGSDIDPYKEFGSSYQLLNFLPLDFFPDLNALVDTATALYEEELTGREHCSPHHTAIRQALVCWDELTKLIAWMSSNITSEQVRTIIVNHVNDTWGLKVRQSLWFHLSCLTFGQHTVQEFLVSFGVWIRTPAPYRPPNAPILSTLPEHTVIC

SEQ ID NO: 6779 - protein, 1365 aa, Artificial Sequence
  SARS-CoV-2/France/IDF0372/2020__EPI_ISL_406596 spike protein (1-1211)(K986P_V987P_T887W_A1020W) WhcAg construct
MFVFLVLLPLVSSQCVNLTTRTQLPPAYTNSFTRGVYYPDKVFRSSVLHSTQDLFLPFFSNVTWFHAIHVSGTNGTKRFDNPVLPFNDGVYFASTEKSNIIRGWIFGTTLDSKTQSLLIVNNATNVVIKVCEFQFCNDPFLGVYYHKNNKSWMESEFRVYSSANNCTFEYVSQPFLMDLEGKQGNFKNLREFVFKNIDGYFKIYSKHTPINLVRDLPQGFSALEPLVDLPIGINITRFQTLLALHRSYLTPGDSSSGWTAGAAAYYVGYLQPRTFLLKYNENGTITDAVDCALDPLSETKCTLKSFTVEKGIYQTSNFRVQPTESIVRFPNITNLCPFGEVFNATRFASVYAWNRKRISNCVADYSFLYNSASFSTFKCYGVSPTKLNDLCFTNVYADSFVIRGDEVRQIAPGQTGKIADYNYKLPDDFTGCVIAWNSNNLDSKVGGNYNYLYRLFRKSNLKPFERDISTEIYQAGSTPCNGVEGFNCYFPLQSYGFQPTNGVGYQPYRVVVLSFELLHAPATVCGPKKSTNLVKNKCVNFNFNGLTGTGVLTESNKKFLPFQQFGRDIADTTDAVRDPQTLEILDITPCSFGGVSVITPGTNTSNQVAVLYQDVNCTEVPVAIHADQLTPTWRVYSTGSNVFQTRAGCLIGAEHVNNSYECDIPIGAGICASYQTQTNSPRRARSVASQSIIAYTMSLGAENSVAYSNNSIAIPTNFTISVTTEILPVSMTKTSVDCTMYICGDSTECSNLLLQYGSFCTQLNRALTGIAVEQDKNTQEVFAQVKQIYKTPPIKDFGGFNFSQILPDPSKPSKRSFIEDLLFNKVTLADAGFIKQYGDCLGDIAARDLICAQKFNGLTVLPPLLTDEMIAQYTSALLAGTITSGWWFGAGAALQIPFAMQMAYRFNGIGVTQNVLYENQKLIANQFNSAIGKIQDSLSSTASALGKLQDVVNQNAQALNTLVKQLSSNFGAISSVLNDILSRLDPPEAEVQIDRLITGRLQSLQTYVTQQLIRAAEIRWSANLAATKMSECVLGQSKRVDFCGKGYHLMSFPQSAPHGVVFLHVTYVPAQEKNFTTAPAICHDGKAHFPREGVFVSNGTHWFVTQRNFYEPQIITTDNTFVSGNCDVVIGIVNNTVYDPLQPELDSFKEELDKYFKNHTSPDVDLGDISGINASVVNIQKEIDRLNEVAKNLNESLIDLQELGKYEQYIKGGGGSDIDPYKEFGSSYQLLNFLPLDFFPDLNALVDTATALYEEELTGREHCSPHHTAIRQALVCWDELTKLIAWMSSNITSEQVRTIIVNHVNDTWGLKVRQSLWFHLSCLTFGQHTVQEFLVSFGVWIRTPAPYRPPNAPILSTLPEHTVIC

SEQ ID NO: 6780 - protein, 1365 aa, Artificial Sequence
  SARS-CoV-2/Australia/VIC01/2020__EPI_ISL_406844 spike protein (1-1211)(K986P_V987P_T887W_A1020W) WhcAg construct
MFVFLVLLPLVSSQCVNLTTRTQLPPAYTNSFTRGVYYPDKVFRSSVLHSTQDLFLPFFSNVTWFHAIHVSGTNGTKRFDNPVLPFNDGVYFASTEKSNIIRGWIFGTTLDSKTQSLLIVNNATNVVIKVCEFQFCNDPFLGVYYHKNNKSWMESEFRVYSSANNCTFEYVSQPFLMDLEGKQGNFKNLREFVFKNIDGYFKIYSKHTPINLVRDLPQGFSALEPLVDLPIGINITRFQTLLALHRRYLTPGDSSSGWTAGAAAYYVGYLQPRTFLLKYNENGTITDAVDCALDPLSETKCTLKSFTVEKGIYQTSNFRVQPTESIVRFPNITNLCPFGEVFNATRFASVYAWNRKRISNCVADYSVLYNSASFSTFKCYGVSPTKLNDLCFTNVYADSFVIRGDEVRQIAPGQTGKIADYNYKLPDDFTGCVIAWNSNNLDSKVGGNYNYLYRLFRKSNLKPFERDISTEIYQAGSTPCNGVEGFNCYFPLQSYGFQPTNGVGYQPYRVVVLSFELLHAPATVCGPKKSTNLVKNKCVNFNFNGLTGTGVLTESNKKFLPFQQFGRDIADTTDAVRDPQTLEILDITPCSFGGVSVITPGTNTSNQVAVLYQDVNCTEVPVAIHADQLTPTWRVYSTGSNVFQTRAGCLIGAEHVNNSYECDIPIGAGICASYQTQTNSPRRARSVASQSIIAYTMSLGAENSVAYSNNSIAIPTNFTISVTTEILPVSMTKTSVDCTMYICGDSTECSNLLLQYGSFCTQLNRALTGIAVEQDKNTQEVFAQVKQIYKTPPIKDFGGFNFSQILPDPSKPSKRSFIEDLLFNKVTLADAGFIKQYGDCLGDIAARDLICAQKFNGLTVLPPLLTDEMIAQYTSALLAGTITSGWWFGAGAALQIPFAMQMAYRFNGIGVTQNVLYENQKLIANQFNSAIGKIQDSLSSTASALGKLQDVVNQNAQALNTLVKQLSSNFGAISSVLNDILSRLDPPEAEVQIDRLITGRLQSLQTYVTQQLIRAAEIRWSANLAATKMSECVLGQSKRVDFCGKGYHLMSFPQSAPHGVVFLHVTYVPAQEKNFTTAPAICHDGKAHFPREGVFVSNGTHWFVTQRNFYEPQIITTDNTFVSGNCDVVIGIVNNTVYDPLQPELDSFKEELDKYFKNHTSPDVDLGDISGINASVVNIQKEIDRLNEVAKNLNESLIDLQELGKYEQYIKGGGGSDIDPYKEFGSSYQLLNFLPLDFFPDLNALVDTATALYEEELTGREHCSPHHTAIRQALVCWDELTKLIAWMSSNITSEQVRTIIVNHVNDTWGLKVRQSLWFHLSCLTFGQHTVQEFLVSFGVWIRTPAPYRPPNAPILSTLPEHTVIC

SEQ ID NO: 6781 - protein, 1365 aa, Artificial Sequence
  SARS-CoV-2/Germany/BavPat1/2020__EPI_ISL_406862 spike protein (1-1211)(K986P_V987P_T887W_A1020W) WhcAg construct
MFVFLVLLPLVSSQCVNLTTRTQLPPAYTNSFTRGVYYPDKVFRSSVLHSTQDLFLPFFSNVTWFHAIHVSGTNGTKRFDNPVLPFNDGVYFASTEKSNIIRGWIFGTTLDSKTQSLLIVNNATNVVIKVCEFQFCNDPFLGVYYHKNNKSWMESEFRVYSSANNCTFEYVSQPFLMDLEGKQGNFKNLREFVFKNIDGYFKIYSKHTPINLVRDLPQGFSALEPLVDLPIGINITRFQTLLALHRSYLTPGDSSSGWTAGAAAYYVGYLQPRTFLLKYNENGTITDAVDCALDPLSETKCTLKSFTVEKGIYQTSNFRVQPTESIVRFPNITNLCPFGEVFNATRFASVYAWNRKRISNCVADYSVLYNSASFSTFKCYGVSPTKLNDLCFTNVYADSFVIRGDEVRQIAPGQTGKIADYNYKLPDDFTGCVIAWNSNNLDSKVGGNYNYLYRLFRKSNLKPFERDISTEIYQAGSTPCNGVEGFNCYFPLQSYGFQPTNGVGYQPYRVVVLSFELLHAPATVCGPKKSTNLVKNKCVNFNFNGLTGTGVLTESNKKFLPFQQFGRDIADTTDAVRDPQTLEILDITPCSFGGVSVITPGTNTSNQVAVLYQGVNCTEVPVAIHADQLTPTWRVYSTGSNVFQTRAGCLIGAEHVNNSYECDIPIGAGICASYQTQTNSPRRARSVASQSIIAYTMSLGAENSVAYSNNSIAIPTNFTISVTTEILPVSMTKTSVDCTMYICGDSTECSNLLLQYGSFCTQLNRALTGIAVEQDKNTQEVFAQVKQIYKTPPIKDFGGFNFSQILPDPSKPSKRSFIEDLLFNKVTLADAGFIKQYGDCLGDIAARDLICAQKFNGLTVLPPLLTDEMIAQYTSALLAGTITSGWWFGAGAALQIPFAMQMAYRFNGIGVTQNVLYENQKLIANQFNSAIGKIQDSLSSTASALGKLQDVVNQNAQALNTLVKQLSSNFGAISSVLNDILSRLDPPEAEVQIDRLITGRLQSLQTYVTQQLIRAAEIRWSANLAATKMSECVLGQSKRVDFCGKGYHLMSFPQSAPHGVVFLHVTYVPAQEKNFTTAPAICHDGKAHFPREGVFVSNGTHWFVTQRNFYEPQIITTDNTFVSGNCDVVIGIVNNTVYDPLQPELDSFKEELDKYFKNHTSPDVDLGDISGINASVVNIQKEIDRLNEVAKNLNESLIDLQELGKYEQYIKGGGGSDIDPYKEFGSSYQLLNFLPLDFFPDLNALVDTATALYEEELTGREHCSPHHTAIRQALVCWDELTKLIAWMSSNITSEQVRTIIVNHVNDTWGLKVRQSLWFHLSCLTFGQHTVQEFLVSFGVWIRTPAPYRPPNAPILSTLPEHTVIC

SEQ ID NO: 6782 - protein, 1365 aa, Artificial Sequence
  SARS-CoV-2/Wuhan/HBCDC-HB-02/2020__EPI_ISL_412978 spike protein (1-1211)(K986P_V987P_T887W_A1020W) WhcAg construct
MFVFLVLLPLVSSQCVNLTTRTQLPPAYTNSFTRGVYYPDKVFRSSVLHSTQDLFLPFFSNVTWFHAIHVSGTNGTKRFDNPVLPFNDGVYFASTEKSNIIRGWIFGTTLDSKTQSLLIVNNATNVVIKVCEFQFCNDPFLGVYYHKNNKSWMESEFRVYSSANNCTFEYVSQPFLMDLEGKQGNFKNLREFVFKNIDGYFKIYSKHTPINLVRDLPQGFSALEPLVDLPIGINITRFQTLLALHRSYLTPGDSSSGWTAGAAAYYVGYLQPRTFLLKYNENGTITDAVDCALDPLSETKCTLKSFTVEKGIYQTSNFRVQPTESIVRFPNITNLCPFGEVFNATRFASVYAWNRKRISNCVADYSVLYNSASFSTFKCYGVSPTKLNDLCFTNVYADSFVIRGDEVRQIAPGQTGKIADYNYKLPDDFTGCVIAWNSNNLDSKVGGNYNYLYRLFRKSNLKPFERDISTEIYQAGSTPCNGVEGFNCYFPLQSYGFQPTNGVGYQPYRVVVLSFELLHAPATVCGPKKSTNLVKNKCVNFNFNGLTGTGVLTESNKKFLPFQQFGRDIADTTDAVRDPQTLEILDITPCSFGGVSVITPGTNTSNQVAVLYQDVNCTEVPVAIHADQLTPTWRVYSTGSNVFQTRAGCLIGAEHVNNSYECDIPIGAGICASYQTQTNSPRRARSVASQSIIAYTMSLGAENSVAYSNNSIAIPTNFTISVTTEILPVSMTKTSVDCTMYICGDSTECSNFLLQYGSFCTQLNRALTGIAVEQDKNTQEVFAQVKQIYKTPPIKDFGGFNFSQILPDPSKPSKRSFIEDLLFNKVTLADAGFIKQYGDCLGDIAARDLICAQKFNGLTVLPPLLTDEMIAQYTSALLAGTITSGWWFGAGAALQIPFAMQMAYRFNGIGVTQNVLYENQKLIANQFNSAIGKIQDSLSSTASALGKLQDVVNQNAQALNTLVKQLSSNFGAISSVLNDILSRLDPPEAEVQIDRLITGRLQSLQTYVTQQLIRAAEIRWSANLAATKMSECVLGQSKRVDFCGKGYHLMSFPQSAPHGVVFLHVTYVPAQEKNFTTAPAICHDGKAHFPREGVFVSNGTHWFVTQRNFYEPQIITTDNTFVSGNCDVVIGIVNNTVYDPLQPELDSFKEELDKYFKNHTSPDVDLGDISGINASVVNIQKEIDRLNEVAKNLNESLIDLQELGKYEQYIKGGGGSDIDPYKEFGSSYQLLNFLPLDFFPDLNALVDTATALYEEELTGREHCSPHHTAIRQALVCWDELTKLIAWMSSNITSEQVRTIIVNHVNDTWGLKVRQSLWFHLSCLTFGQHTVQEFLVSFGVWIRTPAPYRPPNAPILSTLPEHTVIC

SEQ ID NO: 6783 - protein, 1365 aa, Artificial Sequence
  SARS-CoV-2/Australia/QLD02/2020__EPI_ISL_407896 spike protein (1-1211)(K986P_V987P_T887W_A1020W) WhcAg construct
MFVFLVLLPLVSSQCVNLTTRTQLPPAYTNSFTRGVYYPDKVFRSSVLHSTQDLFLPFFSNVTWFHAIHVSGTNGTKRFDNPVLPFNDGVYFASTEKSNIIRGWIFGTTLDSKTQSLLIVNNATNVVIKVCEFQFCNDPFLGVYYHKNNKSWMESEFRVYSSANNCTFEYVSQPFLMDLEGKQGNFKNLREFVFKNIDGYFKIYSKHTPINLVRDLPQGFSALEPLVDLPIGINITRFQTLLALHRSYLTPGDSSSGWTAGAAAYYVGYLQPRTFLLKYNENGTITDAVDCALDPLSETKCTLKSFTVEKGIYQTSNFRVQPTESIVRFPNITNLCPFGEVFNATRFASVYAWNRKRISNCVADYSVLYNSASFSTFKCYGVSPTKLNDLCFTNVYADSFVIRGDEVRQIAPGQTGKIADYNYKLPDDFTGCVIAWNSNNLDSKVGGNYNYLYRLFRKSNLKPFERDISTEIYQAGSTPCNGVEGFNCYFPLQSYGFQPTNGVGYQPYRVVVLSFELLHAPATVCGPKKSTNLVKNKCVNFNFNGLTGTGVLTESNKKFLPFQQFGRDIADTTDAVRDPQTLEILDITPCSFGGVSVITPGTNTSNQVAVLYQDVNCTEVPVAIHADQLTPTWRVYSTGSNVFQTRAGCLIGAEHVNNSYECDIPIGAGICASYQTQTNSPRRARSVASQSIIAYTMSLGAENSVAYSNNSIAIPTNFTISVTTEILPVSMTKTSVDCTMYICGDSTECSNLLLQYGSFCTQLNRALTGIAVEQDKNTQEVFAQVKQIYKTPPIKDFGGFNFSQILPDPSKPSKRSFIEDLLFNKVTLADAGFIKQYGDCLGDIAARDLICAQKFNGLTVLPPLLTDEMIAQYTSALLAGTITSGWWFGAGAALQIPFAMQMAYRFNGIGVTQNVLYENQKLIANQFNSAIGKIQDSLSSTASALGKLQDVVNQNAQALNTLVKQLSSNFGAISSVLNDILSRLDPPEAEVQIDRLITGRLQSLQTYVTQQLIRAAEIRWSANLAATKMSECVLGQSKRVDFCGKGYHLMSFPQSAPHGVVFLHVTYVPAQEKNFTTAPAICHDGKAHFPREGVFVSNGTHWFVTQRNFYEPQIITTDNTFVSGNCDVVIGIVNNTVYDPLQLELDSFKEELDKYFKNHTSPDVDLGDISGINASVVNIQKEIDRLNEVAKNLNESLIDLQELGKYEQYIKGGGGSDIDPYKEFGSSYQLLNFLPLDFFPDLNALVDTATALYEEELTGREHCSPHHTAIRQALVCWDELTKLIAWMSSNITSEQVRTIIVNHVNDTWGLKVRQSLWFHLSCLTFGQHTVQEFLVSFGVWIRTPAPYRPPNAPILSTLPEHTVIC

SEQ ID NO: 6784 - protein, 1365 aa, Artificial Sequence
  SARS-CoV-2/India/1-31/2020__EPI_ISL_413523 spike protein (1-1211)(K986P_V987P_T887W_A1020W) WhcAg construct
MFVFLVLLPLVSSQCVNLTTRTQLPPAYTNSFTRGVYYPDKVFRSSVLHSTQDLFLPFFSNVTWFHAIHVSGTNGTKRFDNPVLPFNDGVYFASTEKSNIIRGWIFGTTLDSKTQSLLIVNNATNVVIKVCEFQFCNDPFLGVYYHKNNKSWMESEFRVYSSANNCTFEYVSQPFLMDLEGKQGNFKNLREFVFKNIDGYFKIYSKHTPINLVRDLPQGFSALEPLVDLPIGINITRFQTLLALHRSYLTPGDSSSGWTAGAAAYYVGYLQPRTFLLKYNENGTITDAVDCALDPLSETKCTLKSFTVEKGIYQTSNFRVQPTESIVRFPNITNLCPFGEVFNATRFASVYAWNRKRISNCVADYSVLYNSASFSTFKCYGVSPTKLNDLCFTNVYADSFVIRGDEVRQIAPGQTGKIADYNYKLPDDFTGCVIAWNSNNLDSKVGGNYNYLYRLFRKSNLKPFERDISTEIYQAGSTPCNGVEGFNCYFPLQSYGFQPTNGVGYQPYRVVVLSFELLHAPATVCGPKKSTNLVKNKCVNFNFNGLTGTGVLTESNKKFLPFQQFGRDIADTTDAVRDPQTLEILDITPCSFGGVSVITPGTNTSNQVAVLYQDVNCTEVPVAIHADQLTPTWRVYSTGSNVFQTRAGCLIGAEHVNNSYECDIPIGAGICASYQTQTNSPRRARSVASQSIIAYTMSLGAENSVAYSNNSIAIPTNFTISVTTEILPVSMTKTSVDCTMYICGDSTECSNLLLQYGSFCTQLNRALTGIAVEQDKNTQEVFAQVKQIYKTPPIKDFGGFNFSQILPDPSKPSKRSFIEDLLFNKVTLADAGFIKQYGDCLGDIAARDLICAQKFNGLTVLPPLLTDEMIAQYTSALLAGTITSGWWFGAGAALQIPFAMQMAYRFNGIGVTQNVLYENQKLIANQFNSVIGKIQDSLSSTASALGKLQDVVNQNAQALNTLVKQLSSNFGAISSVLNDILSRLDPPEAEVQIDRLITGRLQSLQTYVTQQLIRAAEIRWSANLAATKMSECVLGQSKRVDFCGKGYHLMSFPQSAPHGVVFLHVTYVPAQEKNFTTAPAICHDGKAHFPREGVFVSNGTHWFVTQRNFYEPQIITTDNTFVSGNCDVVIGIVNNTVYDPLQPELDSFKEELDKYFKNHTSPDVDLGDISGINASVVNIQKEIDRLNEVAKNLNESLIDLQELGKYEQYIKGGGGSDIDPYKEFGSSYQLLNFLPLDFFPDLNALVDTATALYEEELTGREHCSPHHTAIRQALVCWDELTKLIAWMSSNITSEQVRTIIVNHVNDTWGLKVRQSLWFHLSCLTFGQHTVQEFLVSFGVWIRTPAPYRPPNAPILSTLPEHTVIC

SEQ ID NO: 6785 - protein, 1365 aa, Artificial Sequence
  SARS-CoV-2/Guangdong/GD2020087-P0008/2020__EPI_ISL_413863 spike protein (1-1211)(K986P_V987P_T887W_A1020W) WhcAg construct
MFVFLVLLPLVSSQCVNLTTRTQLPPAYTNSFTRGVYYPDKVFRSSVLHSTQDLFLPFFSNVTWFHAIHVSGTNGTKRFDNPVLPFNDGVYFASTEKSNIIRGWIFGTTLDSKTQSLLIVNNATNVVIKVCEFQFCNDPFLGVYYHKNNKSWMESEFRVYSSANNCTFEYVSQPFLMDLEGKQGNFKNLREFVFKNIDGYFKIYSKHTPINLVRDLPQGFSALEPLVDLPIGINITRFQTLLALHRSYLTPGDSSSGWTAGAAAYYVGYLQPRTFLLKYNENGTITDAVDCALDPLSETKCTLKSFTVEKGIYQTSNFRVQPTESIVRFPNITNLCPFGEVFNATRFASVYAWNRKRISNCVADYSVLYNSASFSTFKCYGVSPTKLNDLCFTNVYADSFVIRGDEVREIAPGQTGKIADYNYKLPDDFTGCVIAWNSNNLDSKVGGNYNYLYRLFRKSNLKPFERDISTEIYQAGSTPCNGVEGFNCYFPLQSYGFQPTNGVGYQPYRVVVLSFELLHAPATVCGPKKSTNLVKNKCVNFNFNGLTGTGVLTESNKKFLPFQQFGRDIADTTDAVRDPQTLEILDITPCSFGGVSVITPGTNTSNQVAVLYQDVNCTEVPVAIHADQLTPTWRVYSTGSNVFQTRAGCLIGAEHVNNSYECDIPIGAGICASYQTQTNSPRRARSVASQSIIAYTMSLGAENSVAYSNNSIAIPTNFTISVTTEILPVSMTKTSVDCTMYICGDSTECSNLLLQYGSFCTQLNRALTGIAVEQDKNTQEVFAQVKQIYKTPPIKDFGGFNFSQILPDPSKPSKRSFIEDLLFNKVTLADAGFIKQYGDCLGDIAARDLICAQKFNGLTVLPPLLTDEMIAQYTSALLAGTITSGWWFGAGAALQIPFAMQMAYRFNGIGVTQNVLYENQKLIANQFNSAIGKIQDSLSSTASALGKLQDVVNQNAQALNTLVKQLSSNFGAISSVLNDILSRLDPPEAEVQIDRLITGRLQSLQTYVTQQLIRAAEIRWSANLAATKMSECVLGQSKRVDFCGKGYHLMSFPQSAPHGVVFLHVTYVPAQEKNFTTAPAICHDGKAHFPREGVFVSNGTHWFVTQRNFYEPQIITTDNTFVSGNCDVVIGIVNNTVYDPLQPELDSFKEELDKYFKNHTSPDVDLGDISGINASVVNIQKEIDRLNEVAKNLNESLIDLQELGKYEQYIKGGGGSDIDPYKEFGSSYQLLNFLPLDFFPDLNALVDTATALYEEELTGREHCSPHHTAIRQALVCWDELTKLIAWMSSNITSEQVRTIIVNHVNDTWGLKVRQSLWFHLSCLTFGQHTVQEFLVSFGVWIRTPAPYRPPNAPILSTLPEHTVIC

SEQ ID NO: 6786 - protein, 1365 aa, Artificial Sequence
  SARS-CoV-2/Sweden/01/2020__EPI_ISL_411951 spike protein (1-1211)(K986P_V987P_T887W_A1020W) WhcAg construct
MFVFLVLLPLVSSQCVNLTTRTQLPPAYTNSFTRGVYYPDKVFRSSVLHSTQDLFLPFFSNVTWFHAIHVSGTNGTKRFDNPVLPFNDGVYFASTEKSNIIRGWIFGTTLDSKTQSLLIVNNATNVVIKVCEFQFCNDPFLGVYYHKNNKSWMESEFRVYSSANNCTFEYVSQPFLMDLEGKQGNFKNLREFVFKNIDGYFKIYSKHTPINLVRDLPQGFSALEPLVDLPIGINITRFQTLLALHRSYLTPGDSSSGWTAGAAAYYVGYLQPRTFLLKYNENGTITDAVDCALDPLSETKCTLKSFTVEKGIYQTSNFRVQPTESIVRFPNITNLCPFGEVFNATRFASVYAWNRKRISNCVADYSVLYNSASFSTFKCYGVSPTKLNDLCFTNVYADSFVIRGDEVRQIAPGQTGKIADYNYKLPDDFTGCVIAWNSNNLDSKVGGNYNYLYRLFRKSNLKPFERDISTEIYQAGSTPCNGVEGFNCYFPLQSYGFQPTNGVGYQPYRVVVLSFELLHAPATVCGPKKSTNLVKNKCVNFNFNGLTGTGVLTESNKKFLPFQQFGRDIADTTDAVRDPQTLEILDITPCSFGGVSVITPGTNTSNQVAVLYQDVNCTEVPVAIHADQLTPTWRVYSTGSNVFQTRAGCLIGAEHVNNSYECDIPIGAGICASYQTQTNSPRRARSVASQSIIAYTMSLGAENSVAYSNNSIAIPTNFTISVTTEILPVSMTKTSVDCTMYICGDSTECSNLLLQYGSFCTQLNRALTGIAVEQDKNTQEVFAQVKQIYKTPPIKDCGGFNFSQILPDPSKPSKRSFIEDLLFNKVTLADAGFIKQYGDCLGDIAARDLICAQKFNGLTVLPPLLTDEMIAQYTSALLAGTITSGWWFGAGAALQIPFAMQMAYRFNGIGVTQNVLYENQKLIANQFNSAIGKIQDSLSSTASALGKLQDVVNQNAQALNTLVKQLSSNFGAISSVLNDILSRLDPPEAEVQIDRLITGRLQSLQTYVTQQLIRAAEIRWSANLAATKMSECVLGQSKRVDFCGKGYHLMSFPQSAPHGVVFLHVTYVPAQEKNFTTAPAICHDGKAHFPREGVFVSNGTHWFVTQRNFYEPQIITTDNTFVSGNCDVVIGIVNNTVYDPLQPELDSFKEELDKYFKNHTSPDVDLGDISGINASVVNIQKEIDRLNEVAKNLNESLIDLQELGKYEQYIKGGGGSDIDPYKEFGSSYQLLNFLPLDFFPDLNALVDTATALYEEELTGREHCSPHHTAIRQALVCWDELTKLIAWMSSNITSEQVRTIIVNHVNDTWGLKVRQSLWFHLSCLTFGQHTVQEFLVSFGVWIRTPAPYRPPNAPILSTLPEHTVIC

SEQ ID NO: 6787 - protein, 1365 aa, Artificial Sequence
  SARS-CoV-2/Tianmen/HBCDC-HB-07/2020__EPI_ISL_412983 spike protein (1-1211)(K986P_V987P_T887W_A1020W) WhcAg construct
MFVFLVLLPLVSSQCVNLTTRTQLPPAYTNSFTRGVYYPDKVFRSSVLHSTQDLFLPFFSNVTWFHAIHVSGTNGTKRFDNPVLPFNDGVYFASTEKSNIIRGWIFGTTLDSKTQSLLIVNNATNVVIKVCEFQFCNDPFLGVYYHKNNKSWMESEFRVYSSANNCTFEYVSQPFLMDLEGKQGNFKNLREFVFKNIDGYFKIYSKHTPINLVRDLPQGFSALEPLVDLPIGINITRFQTLLALHRSYLTPGDSSSGWTAGAAAYYVGYLQPRTFLLKYNENGTITDAVDCALDPLSETKCTLKSFTVEKGIYQTSNFRVQPTESIVRFPNITNLCPFGEVFNATRFASVYAWNRKRISNCVADYSVLYNSASFSTFKCYGVSPTKLNDLCFTNVYADSFVIRGDEVRQIAPGQTGKIADYNYKLPDDFTGCVIAWNSNNLDSKVGGNYNYLYRLFRKSNLKPFERDISTEIYQAGSTPCNGVEGFNCYFPLQSYGFQPTNGVGYQPYRVVVLSFELLHAPATVCGPKKSTNLVKNKCVNFNFNGLTGTGVLTESNKKFLPFQQFGRDIADTTDAVRDPQTLEILDITPCSFGGVSVITPGTNTSNQVAVLYQDLNCTEVPVAIHADQLTPTWRVYSTGSNVFQTRAGCLIGAEHVNNSYECDIPIGAGICASYQTQTNSPRRARSVASQSIIAYTMSLGAENSVAYSNNSIAIPTNFTISVTTEILPVSMTKTSVDCTMYICGDSTECSNLLLQYGSFCTQLNRALTGIAVEQDKNTQEVFAQVKQIYKTPPIKDFGGFNFSQILPDPSKPSKRSFIEDLLFNKVTLADAGFIKQYGDCLGDIAARDLICAQKFNGLTVLPPLLTDEMIAQYTSALLAGTITSGWWFGAGAALQIPFAMQMAYRFNGIGVTQNVLYENQKLIANQFNSAIGKIQDSLSSTASALGKLQDVVNQNAQALNTLVKQLSSNFGAISSVLNDILSRLDPPEAEVQIDRLITGRLQSLQTYVTQQLIRAAEIRWSANLAATKMSECVLGQSKRVDFCGKGYHLMSFPQSAPHGVVFLHVTYVPAQEKNFTTAPAICHDGKAHFPREGVFVSNGTHWFVTQRNFYEPQIITTDNTFVSGNCDVVIGIVNNTVYDPLQPELDSFKEELDKYFKNHTSPDVDLGDISGINASVVNIQKEIDRLNEVAKNLNESLIDLQELGKYEQYIKGGGGSDIDPYKEFGSSYQLLNFLPLDFFPDLNALVDTATALYEEELTGREHCSPHHTAIRQALVCWDELTKLIAWMSSNITSEQVRTIIVNHVNDTWGLKVRQSLWFHLSCLTFGQHTVQEFLVSFGVWIRTPAPYRPPNAPILSTLPEHTVIC

SEQ ID NO: 6788 - protein, 1365 aa, Artificial Sequence
  SARS-CoV-2/Hong Kong/case42_VM20002493/2020__EPI_ISL_414527 spike protein (1-1211)(K986P_V987P_T887W_A1020W) WhcAg construct
MFVFLVLLPLVSSQCVNLTTRTQLPPAYTNSFTRGVYYPDKVFRSSVLHSTQDLFLPFFSNVTWFHAIHVSGTNGTKRFDNPVLPFNDGVYFASTEKSNIIRGWIFGTTLDSKTQSLLIVNNATNVVIKVCEFQFCNDPFLGVYYHKNNKSWMESEFRVYSSANNCTFEYVSQPFLMDLEGKQGNFKNLREFVFKNIDGYFKIYSKHTPINLVRDLPQGFSALEPLVDLPIGINITRFQTLLALHRSYLTPGDSSSGWTAGAAAYYVGYLQPRTFLLKYNENGTITDAVDCALDPLSETKCTLKSFTVEKGIYQTSNFRVQPTESIVRFPNITNLCPFGEVFNATRFASVYAWNRKRISNCVADYSVLYNSASFSTFKCYGVSPTKLNDLCFTNVYADSFVIRGDEVRQIAPGQTGKIADYNYKLPDDFTGCVIAWNSNNLDSKVGGNYNYLYRLFRKSNLKPFERDISTEIYQAGSTPCNGVEGFNCYFPLQSYGFQPTNGVGYQPYRVVVLSFELLHAPATVCGPKKSTNLVKNKCVNFNFNGLTGTGVLTESNKKFLPFQQFGRDIADTTDAVRDPQTLEILDITPCSFGGVSVITPGTNTSNQVAVLYQDVNCTEVPVAIHADQLTPTWRVYSTGSNVFQTRAGCLIGAEHVNNSYECDIPIGAGICASYQTQTNSPRRARSVASQSIIAYTMSLGAENSVAYSNNSIAIPTNFAISVTTEILPVSMTKTSVDCTMYICGDSTECSNLLLQYGSFCTQLNRALTGIAVEQDKNTQEVFAQVKQIYKTPPIKDFGGFNFSQILPDPSKPSKRSFIEDLLFNKVTLADAGFIKQYGDCLGDIAARDLICAQKFNGLTVLPPLLTDEMIAQYTSALLAGTITSGWWFGAGAALQIPFAMQMAYRFNGIGVTQNVLYENQKLIANQFNSAIGKIQDSLSSTASALGKLQDVVNQNAQALNTLVKQLSSNFGAISSVLNDILSRLDPPEAEVQIDRLITGRLQSLQTYVTQQLIRAAEIRWSANLAATKMSECVLGQSKRVDFCGKGYHLMSFPQSAPHGVVFLHVTYVPAQEKNFTTAPAICHDGKAHFPREGVFVSNGTHWFVTQRNFYEPQIITTDNTFVSGNCDVVIGIVNNTVYDPLQPELDSFKEELDKYFKNHTSPDVDLGDISGINASVVNIQKEIDRLNEVAKNLNESLIDLQELGKYEQYIKGGGGSDIDPYKEFGSSYQLLNFLPLDFFPDLNALVDTATALYEEELTGREHCSPHHTAIRQALVCWDELTKLIAWMSSNITSEQVRTIIVNHVNDTWGLKVRQSLWFHLSCLTFGQHTVQEFLVSFGVWIRTPAPYRPPNAPILSTLPEHTVIC

SEQ ID NO: 6789 - protein, 1365 aa, Artificial Sequence
  SARS-CoV-2/USA/CruiseA-23/2020__EPI_ISL_414482 spike protein (1-1211)(K986P_V987P_T887W_A1020W) WhcAg construct
MFVFLVLLPLVSSQCVNLTTRTQLPPAYTNSFTRGVYYPDKVFRSSVLHSTQDLFLPFFSNVTWFHAIHVSGTNGTKRFDNPVLPFNDGVYFASTEKSNIIRGWIFGTTLDSKTQSLLIVNNATNVVIKVCEFQFCNDPFLGVYYHKNNKSWMESEFRVYSSANNCTFEYVSQPFLMDLEVKQGNFKNLREFVFKNIDGYFKIYSKHTPINLVRDLPQGFSALEPLVDLPIGINITRFQTLLALHRSYLTPGDSSSGWTAGAAAYYVGYLQPRTFLLKYNENGTITDAVDCALDPLSETKCTLKSFTVEKGIYQTSNFRVQPTESIVRFPNITNLCPFGEVFNATRFASVYAWNRKRISNCVADYSVLYNSASFSTFKCYGVSPTKLNDLCFTNVYADSFVIRGDEVRQIAPGQTGKIADYNYKLPDDFTGCVIAWNSNNLDSKVGGNYNYLYRLFRKSNLKPFERDISTEIYQAGSTPCNGVEGFNCYFPLQSYGFQPTNGVGYQPYRVVVLSFELLHAPATVCGPKKSTNLVKNKCVNFNFNGLTGTGVLTESNKKFLPFQQFGRDIADTTDAVRDPQTLEILDITPCSFGGVSVITPGTNTSNQVAVLYQDVNCTEVPVAIHADQLTPTWRVYSTGSNVFQTRAGCLIGAEHVNNSYECDIPIGAGICASYQTQTNSPRRARSVASQSIIAYTMSLGAENSVAYSNNSIAIPTNFTISVTTEILPVSMTKTSVDCTMYICGDSTECSNLLLQYGSFCTQLNRALTGIAVEQDKNTQEVFAQVKQIYKTPPIKDFGGFNFSQILPDPSKPSKRSFIEDLLFNKVTLADAGFIKQYGDCLGDIAARDLICAQKFNGLTVLPPLLTDEMIAQYTSALLAGTITSGWWFGAGAALQIPFAMQMAYRFNGIGVTQNVLYENQKLIANQFNSAIGKIQDSLSSTASALGKLQDVVNQNAQALNTLVKQLSSNFGAISSVLNDILSRLDPPEAEVQIDRLITGRLQSLQTYVTQQLIRAAEIRWSANLAATKMSECVLGQSKRVDFCGKGYHLMSFPQSAPHGVVFLHVTYVPAQEKNFTTAPAICHDGKAHFPREGVFVSNGTHWFVTQRNFYEPQIITTDNTFVSGNCDVVIGIVNNTVYDPLQPELDSFKEELDKYFKNHTSPDVDLGDISGINASVVNIQKEIDRLNEVAKNLNESLIDLQELGKYEQYIKGGGGSDIDPYKEFGSSYQLLNFLPLDFFPDLNALVDTATALYEEELTGREHCSPHHTAIRQALVCWDELTKLIAWMSSNITSEQVRTIIVNHVNDTWGLKVRQSLWFHLSCLTFGQHTVQEFLVSFGVWIRTPAPYRPPNAPILSTLPEHTVIC

SEQ ID NO: 6790 - protein, 1365 aa, Artificial Sequence
  SARS-CoV-2/Hong Kong/case85_VM20002868/2020__EPI_ISL_414519 spike protein (1-1211)(K986P_V987P_T887W_A1020W) WhcAg construct
MFVFLVLVPLVSSQCVNLTTRTQLPPAYTNSFTRGVYYPDKVFRSSVLHSTQDLFLPFFSNVTWFHAIHVSGTNGTKRFDNPVLPFNDGVYFASTEKSNIIRGWIFGTTLDSKTQSLLIVNNATNVVIKVCEFQFCNDPFLGVYYHKNNKSWMESEFRVYSSANNCTFEYVSQPFLMDLEGKQGNFKNLREFVFKNIDGYFKIYSKHTPINLVRDLPQGFSALEPLVDLPIGINITRFQTLLALHRSYLTPGDSSSGWTAGAAAYYVGYLQPRTFLLKYNENGTITDAVDCALDPLSETKCTLKSFTVEKGIYQTSNFRVQPTESIVRFPNITNLCPFGEVFNATRFASVYAWNRKRISNCVADYSVLYNSASFSTFKCYGVSPTKLNDLCFTNVYADSFVIRGDEVRQIAPGQTGKIADYNYKLPDDFTGCVIAWNSNNLDSKVGGNYNYLYRLFRKSNLKPFERDISTEIYQAGSTPCNGVEGFNCYFPLQSYGFQPTNGVGYQPYRVVVLSFELLHAPATVCGPKKSTNLVKNKCVNFNFNGLTGTGVLTESNKKFLPFQQFGRDIADTTDAVRDPQTLEILDITPCSFGGVSVITPGTNTSNQVAVLYQDVNCTEVPVAIHADQLTPTWRVYSTGSNVFQTRAGCLIGAEHVNNSYECDIPIGAGICASYQTQTNSPRRARSVASQSIIAYTMSLGAENSVAYSNNSIAIPTNFTISVTTEILPVSMTKTSVDCTMYICGDSTECSNLLLQYGSFCTQLNRALTGIAVEQDKNTQEVFAQVKQIYKTPPIKDFGGFNFSQILPDPSKPSKRSFIEDLLFNKVTLADAGFIKQYGDCLGDIAARDLICAQKFNGLTVLPPLLTDEMIAQYTSALLAGTITSGWWFGAGAALQIPFAMQMAYRFNGIGVTQNVLYENQKLIANQFNSAIGKIQDSLSSTASALGKLQDVVNQNAQALNTLVKQLSSNFGAISSVLNDILSRLDPPEAEVQIDRLITGRLQSLQTYVTQQLIRAAEIRWSANLAATKMSECVLGQSKRVDFCGKGYHLMSFPQSAPHGVVFLHVTYVPAQEKNFTTAPAICHDGKAHFPREGVFVSNGTHWFVTQRNFYEPQIITTDNTFVSGNCDVVIGIVNNTVYDPLQPELDSFKEELDKYFKNHTSPDVDLGDISGINASVVNIQKEIDRLNEVAKNLNESLIDLQELGKYEQYIKGGGGSDIDPYKEFGSSYQLLNFLPLDFFPDLNALVDTATALYEEELTGREHCSPHHTAIRQALVCWDELTKLIAWMSSNITSEQVRTIIVNHVNDTWGLKVRQSLWFHLSCLTFGQHTVQEFLVSFGVWIRTPAPYRPPNAPILSTLPEHTVIC

SEQ ID NO: 6791 - protein, 1365 aa, Artificial Sequence; identical to SEQ ID NO: 6781
  SARS-CoV-2/England/200990660/2020__EPI_ISL_414523 spike protein (1-1211)(K986P_V987P_T887W_A1020W) WhcAg construct

SEQ ID NO: 6792 - protein, 1365 aa, Artificial Sequence
  SARS-CoV-2/Australia/NSW09/2020__EPI_ISL_413595 spike protein (1-1211)(K986P_V987P_T887W_A1020W) WhcAg construct
MFVFLVLLPLVSSQCVNLTTRTQLPPAYTNSFTRGVYYPDKVFRSSVLHSTQDLFLPFFSNVTWFHAIHVSGTNGTKRFDNPVLPFNDGVYFASTEKSNIIRGWIFGTTLDSKTQSLLIVNNATNVVIKVCEFQFCNDPFLGVYYHKNNKSWMESEFRVYSSANNCTFEYVSQPFLMDLEGKQGNFKNLREFVFKNIDGYFKIYSKHTPINLVRDLPQGFSALEPLVDLPIGINITRFQTLLALHRSYLTPGDSSSGWTAGAAAYYVGYLQPRTFLLKYNENGTITDAVDCALDPLSETKCTLKSFTVEKGIYQTSNFRVQPTESIVRFPNITNLCPFGEVFNATRFASVYAWNRKRISNCVADYSVLYNSASFSTFKCYGVSPTKLNDLCFTNVYADSFVIRGDEVRQIAPGQTGKIADYNYKLPDDFTGCVIAWNSNNLDSKVGGNYNYLYRLFRKSNLKPFERDISTEIYQAGSTPCNGVEGFNCYFPLQSYGFQPTNGVGYQPYRVVVLSFELLHAPATVCGPKKSTNLVKNKCVNFNFNGLTGTGVLTESNKKFLPFQQFGRDIADTTDAVRDPQTLEILDITPCSFGGVSVITPGTNTSNQVAVLYQDVNCTEVPVAIHADQLTPTWRVYSTGSNVFQTRAGCLIGAEHVNNSYECDIPIGAGICASYQTQTNSPRRARSVASQSIIAYTMSLGAENSVAYSNNSIAIPTNFTISVTTEILPVSMTKTSVDCTMYICGDSTECSNLLLQYGSFCTQLNRALTGIAVEQDKNTQEVFAQVKQIYKTPPIKDFGGFNFSQILPDPSKPSKRSFIEDLLFNKVTLADAGFIKQYGDCLGDIAARDLICAQKFNGLTVLPPLLTDEMIAQYTSALLAGTITSGWWFGAGAALQIPFAMQMAYRFNGIGVTQNVLYENQKLIANQFNSAIGKIQDSLSFTASALGKLQDVVNQNAQALNTLVKQLSSNFGAISSVLNDILSRLDPPEAEVQIDRLITGRLQSLQTYVTQQLIRAAEIRWSANLAATKMSECVLGQSKRVDFCGKGYHLMSFPQSAPHGVVFLHVTYVPAQEKNFTTAPAICHDGKAHFPREGVFVSNGTHWFVTQRNFYEPQIITTDNTFVSGNCDVVIGIVNNTVYDPLQPELDSFKEELDKYFKNHTSPDVDLGDISGINASVVNIQKEIDRLNEVAKNLNESLIDLQELGKYEQYIKGGGGSDIDPYKEFGSSYQLLNFLPLDFFPDLNALVDTATALYEEELTGREHCSPHHTAIRQALVCWDELTKLIAWMSSNITSEQVRTIIVNHVNDTWGLKVRQSLWFHLSCLTFGQHTVQEFLVSFGVWIRTPAPYRPPNAPILSTLPEHTVIC

SEQ ID NO: 6793 - protein, 1365 aa, Artificial Sequence; identical to SEQ ID NO: 6773
  SARS-CoV-2/Australia/NSW10/2020__EPI_ISL_413596 spike protein (1-1211)(K986P_V987P_T887W_A1020W) WhcAg construct

SEQ ID NO: 6794 - protein, 1365 aa, Artificial Sequence
  SARS-CoV-2/Switzerland/1000477797/2020__EPI_ISL_413023 spike protein (1-1211)(K986P_V987P_T887W_A1020W) WhcAg construct
MFVFLVLLPLVSSQCVNLTTRTQLPPAYTNSFTRGVYYPDKVFRSSVLHSTQDLFLPFFSNVTWFHAIHVSGTNGTKRFDNPVLPFNDGVYFASTEKSNIIRGWIFGTTLDSKTQSLLIVNNATNVVIKVCEFQFCNDPFLGVYYHKNNKSWMESEFRVYSSANNCTFEYVSQPFLMDLEGKQGNFKNLREFVFKNIDGYFNIYSKHTPINLVRDLPQGFSALEPLVDLPIGINITRFQTLLALHRSYLTPGDSSSGWTAGAAAYYVGYLQPRTFLLKYNENGTITDAVDCALDPLSETKCTLKSFTVEKGIYQTSNFRVQPTESIVRFPNITNLCPFGEVFNATRFASVYAWNRKRISNCVADYSVLYNSASFSTFKCYGVSPTKLNDLCFTNVYADSFVIRGDEVRQIAPGQTGKIADYNYKLPDDFTGCVIAWNSNNLDSKVGGNYNYLYRLFRKSNLKPFERDISTEIYQAGSTPCNGVEGFNCYFPLQSYGFQPTNGVGYQPYRVVVLSFELLHAPATVCGPKKSTNLVKNKCVNFNFNGLTGTGVLTESNKKFLPFQQFGRDIADTTDAVRDPQTLEILDITPCSFGGVSVITPGTNTSNQVAVLYQGVNCTEVPVAIHADQLTPTWRVYSTGSNVFQTRAGCLIGAEHVNNSYECDIPIGAGICASYQTQTNSPRRARSVASQSIIAYTMSLGAENSVAYSNNSIAIPTNFTISVTTEILPVSMTKTSVDCTMYICGDSTECSNLLLQYGSFCTQLNRALTGIAVEQDKNTQEVFAQVKQIYKTPPIKDFGGFNFSQILPDPSKPSKRSFIEDLLFNKVTLADAGFIKQYGDCLGDIAARDLICAQKFNGLTVLPPLLTDEMIAQYTSALLAGTITSGWWFGAGAALQIPFAMQMAYRFNGIGVTQNVLYENQKLIANQFNSAIGKIQDSLSSTASALGKLQDVVNQNAQALNTLVKQLSSNFGAISSVLNDILSRLDPPEAEVQIDRLITGRLQSLQTYVTQQLIRAAEIRWSANLAATKMSECVLGQSKRVDFCGKGYHLMSFPQSAPHGVVFLHVTYVPAQEKNFTTAPAICHDGKAHFPREGVFVSNGTHWFVTQRNFYEPQIITTDNTFVSGNCDVVIGIVNNTVYDPLQPELDSFKEELDKYFKNHTSPDVDLGDISGINASVVNIQKEIDRLNEVAKNLNESLIDLQELGKYEQYIKGGGGSDIDPYKEFGSSYQLLNFLPLDFFPDLNALVDTATALYEEELTGREHCSPHHTAIRQALVCWDELTKLIAWMSSNITSEQVRTIIVNHVNDTWGLKVRQSLWFHLSCLTFGQHTVQEFLVSFGVWIRTPAPYRPPNAPILSTLPEHTVIC

SEQ ID NO: 6795 - protein, 1365 aa, Artificial Sequence
  SARS-CoV-2/Belgium/BA-02291/2020__EPI_ISL_415159 spike protein (1-1211)(K986P_V987P_T887W_A1020W) WhcAg construct
MFVFLVLLPLVSSQCVNLTTRTQLPPAYTNSFTRGVYYPDKVFRSSVLHSTQDLFLPFFSNVTWFHAIHVSGTNGTKRFDNPVLPFNDGVYFASTEKSNIIRGWIFGTTLDSKTQSLLIVNNATNVVIKVCEFQFCNDPFLGVYYHKNNKSWMESEFRVYSSANNCTFEYVSQPFLMDLEGKQGNFKNLREFVFKNIDGYFKIYSKHTPINLVRDLPQGFSALEPLVDLPIGINITRFQTLLALHRSYLTPGDSSSGWTAGAAAYYVGYLQPRTFLLKYNENGTITDAVDCALDPLSETKCTLKSFTVEKGIYQTSNFRVQPTESIVRFPNITNLCPFGEVFNATRFASVYAWNRKRISNCVADYSVLYNSASFSTFKCYGVSPTKLNDLCFTNVYADSFVIRGDEVRQIAPGQTGKIADYNYKLPDDFTGCVIAWNSNNLDSKVGGNYNYLYRLFRRSNLKPFERDISTEIYQAGSTPCNGVEGFNCYFPLQSYGFQPTNGVGYQPYRVVVLSFELLPAPATVCGPKKSTNLVKNKCVNFNFNGLTGTGVLTESNKKFLPFQQFGRDIADTTDAVRDPQTLEILDITPCSFGGVSVITPGTNTSNQVAVLYQGVNCTEVPVAIHADQLTPTWRVYSTGSNVFQTRAGCLIGAEHVNNSYECDIPIGAGICASYQTQTNSPRRARSVASQSIIAYTMSLGAENSVAYSNNSIAIPTNFTISVTTEILPVSMTKTSVDCTMYICGDSTECSNLLLQYGSFCTQLNRALTGIAVEQDKNTQEVFAQVKQIYKTPPIKDFGGFNFSQILPDPSKPSKRSFIEDLLFNKVTLADAGFIKQYGDCLGDIAARDLICAQKFNGLTVLPPLLTDEMIAQYTSALLAGTITSGWWFGAGAALQIPFAMQMAYRFNGIGVTQNVLYENQKLIANQFNSAIGKIQDSLSSAAPALGKLQDVVNQNAQALNTLVKQLSSNFGAISSVLNDILSRLDPPEAEVQIDRLITGRLQSLQTYVTQQLIRAAEIRWSANLAATKMSECVLGQSKRVDFCGKGYHLMSFPQSAPHGVVFLHVTYVPAQEKNFTTAPAICHDGKAHFPREGVFVSNGTHWFVTQRNFYEPQIITTDNTFVSGNCDVVIGIVNNTVYDPLQPELDSFKEELDKYFKNHTSPDVDLGDISGINASVVNIQKEIDRLNEVAKNLNESLIDLQELGKYEQYIKGGGGSDIDPYKEFGSSYQLLNFLPLDFFPDLNALVDTATALYEEELTGREHCSPHHTAIRQALVCWDELTKLIAWMSSNITSEQVRTIIVNHVNDTWGLKVRQSLWFHLSCLTFGQHTVQEFLVSFGVWIRTPAPYRPPNAPILSTLPEHTVIC

SEQ ID NO: 6796 - protein, 1365 aa, Artificial Sequence
  SARS-CoV-2/USA/WA8-UW5/2020__EPI_ISL_413486 spike protein (1-1211)(K986P_V987P_T887W_A1020W) WhcAg construct
MFVFLVLLPLVSSQCVNLTTRTQLPPAYTNSFTRGVYYPDKVFRSSVLHSTQDLFLPFFSNVTWFHAIHVSGTNGTKRFDNPVLPFNDGVYFASTEKSNIIRGWIFGTTLDSKTQSLLIVNNATNVVIKVCEFQFCNDPFLGVYYHKNNKSWMESEFRVYSSANNCTFEYVSQPFLMDLEGKQGNFKNLREFVFKNIDGYFKIYSKHTPINLVRDLPQGFSALEPLVDLPIGINITRFQTLLALHRSYLTPGDSSSGWTAGAAAYYVGYLQPRTFLLKYNENGTITDAVDCALDPLSETKCTLKSFTVEKGIYQTSNFRVQPTESIVRFPNITNLCPFGEVFNATRFASVYAWNRKRISNCVADYSVLYNSASFSTFKCYGVSPTKLNDLCFTNVYADSFVIRGDEVRQIAPGQTGKIADYNYKLPDDFTGCVIAWNSNNLDSKVGGNYNYLYRLFRKSNLKPFERDISTEIYQAGSTPCNGVEGFNCYFPLQSYGFQPTNGVGYQPYRVVVLSFELLHAPATVCGPKKSTNLVKNKCVNFNFNGLTGTGVLTESNKKFLPFQQFGRDIADTTDAVRDPQTLEILDITPCSFGGVSVITPGTNTSNQVAVLYQDVNCTEVPVAIHADQLTPTWRVYSTGSNVFQTRAGCLIGAEYVNNSYECDIPIGAGICASYQTQTNSPRRARSVASQSIIAYTMSLGAENSVAYSNNSIAIPTNFTISVTTEILPVSMTKTSVDCTMYICGDSTECSNLLLQYGSFCTQLNRALTGIAVEQDKNTQEVFAQVKQIYKTPPIKDFGGFNFSQILPDPSKPSKRSFIEDLLFNKVTLADAGFIKQYGDCLGDIAARDLICAQKFNGLTVLPPLLTDEMIAQYTSALLAGTITSGWWFGAGAALQIPFAMQMAYRFNGIGVTQNVLYENQKLIANQFNSAIGKIQDSLSSTASALGKLQDVVNQNAQALNTLVKQLSSNFGAISSVLNDILSRLDPPEAEVQIDRLITGRLQSLQTYVTQQLIRAAEIRWSANLAATKMSECVLGQSKRVDFCGKGYHLMSFPQSAPHGVVFLHVTYVPAQEKNFTTAPAICHDGKAHFPREGVFVSNGTHWFVTQRNFYEPQIITTDNTFVSGNCDVVIGIVNNTVYDPLQPELDSFKEELDKYFKNHTSPDVDLGDISGINASVVNIQKEIDRLNEVAKNLNESLIDLQELGKYEQYIKGGGGSDIDPYKEFGSSYQLLNFLPLDFFPDLNALVDTATALYEEELTGREHCSPHHTAIRQALVCWDELTKLIAWMSSNITSEQVRTIIVNHVNDTWGLKVRQSLWFHLSCLTFGQHTVQEFLVSFGVWIRTPAPYRPPNAPILSTLPEHTVIC

SEQ ID NO: 6797 - protein, 1365 aa, Artificial Sequence
  SARS-CoV-2/England/20102000506/2020__EPI_ISL_415147 spike protein (1-1211)(K986P_V987P_T887W_A1020W) WhcAg construct
MFVFLVLLPLVSSQCVNLTTRTQLPPAYTNSFTRGVYYPDKVFRSSVLHSTQDLFLPFFSNVTWFHAIHVSGTNGTKRFDNPVLPFNDGVYFASTEKSNIIRGWIFGTTLDSKTQSLLIVNNATNVVIKVCEFQFCNDPFLGVYYHKNNKSWMESEFRVYSSANNCTFEYVSQPFLMDLEGKQGNFKNLREFVFKNIDGYFKIYSKHTPINLVRDLPQGFSALEPLVDLPIGINITRFQTLLALHRSYLTPGDSSSGWTAGAAAYYVGYLQPRTFLLKYNENGTITDAVDCALDPLSETKCTLKSFTVEKGIYQTSNFRVQPTESIVRFPNITNLCPFGEVFNATRFASVYAWNRKRISNCVADYSVLYNSASFSTFKCYGVSPTKLNDLCFTNVYADSFVIRGDEVRQIAPGQTGKIADYNYKLPDDFTGCVIAWNSNNLDSKVGGNYNYLYRLFRKSNLKPFERDISTEIYQAGSTPCNGVEGFNCYFPLQSYGFQPTNGVGYQPYRVVVLSFELLHAPATVCGPKKSTNLVKNKCVNFNFNGLTGTGVLTESNKKFLPFQQFGRDIADTTDAVRDPQTLEILDITPCSFGGVSVITPGTNTSNQVAVLYQGVNCTEVPVAIHADQLTPTWRVYSTGSNVFQTRAGCLIGAEHVNNSYECDIPIGAGICASYQTQTNSPRRARSVASQSIIAYTMSLGAENSVAYSNNSIAIPTNFTISVTTEILPVSMTKTSVDCTMYICGDSTECSNLLLQYGSFCTQLNRALTGIAVEQDKNTQEVFAQVKQIYKTPPIKDFGGFNFSQILPDPSKPSKRSFIEDLLFNKVTLADAGFIKQYGYCLGDIAARDLICAQKFNGLTVLPPLLTDEMIAQYTSALLAGTITSGWWFGAGAALQIPFAMQMAYRFNGIGVTQNVLYENQKLIANQFNSAIGKIQDSLSSTASALGKLQDVVNQNAQALNTLVKQLSSNFGAISSVLNDILSRLDPPEAEVQIDRLITGRLQSLQTYVTQQLIRAAEIRWSANLAATKMSECVLGQSKRVDFCGKGYHLMSFPQSAPHGVVFLHVTYVPAQEKNFTTAPAICHDGKAHFPREGVFVSNGTHWFVTQRNFYEPQIITTDNTFVSGNCDVVIGIVNNTVYDPLQPELDSFKEELDKYFKNHTSPDVDLGDISGINASVVNIQKEIDRLNEVAKNLNESLIDLQELGKYEQYIKGGGGSDIDPYKEFGSSYQLLNFLPLDFFPDLNALVDTATALYEEELTGREHCSPHHTAIRQALVCWDELTKLIAWMSSNITSEQVRTIIVNHVNDTWGLKVRQSLWFHLSCLTFGQHTVQEFLVSFGVWIRTPAPYRPPNAPILSTLPEHTVIC

SEQ ID NO: 6798 - protein, 1365 aa, Artificial Sequence
  SARS-CoV-2/Belgium/VAG-03013/2020__EPI_ISL_415155 spike protein (1-1211)(K986P_V987P_T887W_A1020W) WhcAg construct
MFVFLVLLPLVSSQCVNLTTRTQLPPAYTNSFTRGVYYPDKVFRSSVLHSTQDLFLPFFSNVTWFHAIHVSGTNGTKRFDNPVLPFNDGVYFASTEKSNIIRGWIFGTTLDSKTQSLLIVNNATNVVIKVCEFQFCNDPFLGVYYHKNNKSWMESEFRVYSSANNCTFEYVSQPFLMDLEGKQGNFKNLREFVFKNIDGYFKIYSKHTPINLVRDLPQGFSALEPLVDLPIGINITRFQTLLALHRSYLTPGDSSSGWTAGAAAYYVGYLQPRTFLLKYNENGTITDAVDCALDPLSETKCTLKSFTVEKGIYQTSNFRVQPTESIVRFPNITNLCPFGEVFNATRFASVYAWNRKRISNCVADYSVLYNSASFSTFKCYGVSPTKLNDLCFTNVYADSFVIRGDEVRQIAPGQTGKIADYNYKLPDDFTGCVIAWNSNNLDSKVGGNYNYLYRLFRKSNLKPFERDISTEIYQAGSTPCNGVEGFNCYFPLQSYGFQPTNGVGYQPYRVVVLSFELLHAPATVCGPKKSTNLVKNKCVNFNFNGLTGTGVLTESNKKFLPFQQFGRDIADTTDAVRDPQTLEILDITPCSFGGVSVITPGTNTSNQVAVLYQGVNCTEVPVAIHADQLTPTWRVYSTGSNVFQTRAGCLIGAEHVNNSYECDIPIGAGICASYQTQTNSPRRARSVASQSIIAYTMSLGAENSVAYSNNSIAIPTNFTISVTTEILPVSMTKTSVDCTMYICGDSTECSNLLLQYGSFCTQLNRALTGIAVEQDKNTQEVFAQVKQIYKTPPIKDFGGFNFSQILPDPSKPSKRSFIEDLLFNKVTLADAGFIKQYGDCLGDIAARDLICAQKFNGLTVLPPLLTDEMIAQYTSALLAGTITSGWWFGAGAALQIPFAMQMAYRFNGIGVTQNVLYENQKLIANQFNSAIGKIQDSLSSTATALGKLQDVVNQNAQALNTLVKQLSSNFGAISSVLNDILSRLDPPEAEVQIDRLITGRLQSLQTYVTQQLIRAAEIRWSANLAATKMSECVLGQSKRVDFCGKGYHLMSFPQSAPHGVVFLHVTYVPAQEKNFTTAPAICHDGKAHFPREGVFVSNGTHWFVTQRNFYEPQIITTDNTFVSGNCDVVIGIVNNTVYDPLQPELDSFKEELDKYFKNHTSPDVDLGDISGINASVVNIQKEIDRLNEVAKNLNESLIDLQELGKYEQYIKGGGGSDIDPYKEFGSSYQLLNFLPLDFFPDLNALVDTATALYEEELTGREHCSPHHTAIRQALVCWDELTKLIAWMSSNITSEQVRTIIVNHVNDTWGLKVRQSLWFHLSCLTFGQHTVQEFLVSFGVWIRTPAPYRPPNAPILSTLPEHTVIC

SEQ ID NO: 6799 - protein, 1365 aa, Artificial Sequence
  SARS-CoV-2/Belgium/BC-03016/2020__EPI_ISL_415157 spike protein (1-1211)(K986P_V987P_T887W_A1020W) WhcAg construct
MFVFLVLLPLVSSQCVNLTTRTQLPPAYTNSFTRGVYYPDKVFRSSVLHSTQDLFLPFFSNVTWFHAIHVSGTNGTKRFDNPVLPFNDGVYFASTEKSNIIRGWIFGTTLDSKTQSLLIVNNATNVVIKVCEFQFCNDPFLGVYYHKNNKSWMESEFRVYSSANNCTFEYVSQPFLMDLEGKQGNFKNLREFVFKNIDGYFKIYSKHTPINLVRDLPQGFSALEPLVDLPIGINITRFQTLLALHRSYLTPGDSSSGWTAGAAAYYVGYLQPRTFLLKYNENGTITDAVDCALDPLSETKCTLKSFTVEKGIYQTSNFRVQPTESIVRFPNITNLCPFGEVFNATRFASVYAWNRKRISNCVADYSVLYNSASFSTFKCYGVSPTKLNDLCFTNVYADSFVIRGDEVRQIAPGQTGKIADYNYKLPDDFTGCVIAWNSNNLDSKVGGNYNYLYRLFRKSNLKPFERDISTEIYQAGSTPCNGVEGFNCYFPLQSYGFQPTNGVGYQPYRVVVLSFELLHAPATVCGPKKSTNLVKNKCVNFNFNGLTGTGVLTESNKKFLPFQQFGRDIADTTDAVRDPQTLEILDITPCSFGGVSVITPGTNTSNQVAVLYQGVNCTEVPVAIHADQLTPTWRVYSTGSNVFQTRAGCLIGAEHVNNSYECDIPIGAGICASYQTQTNSPRRARSVASQSIIAYTMSLGAENSVAYSNNSIAIPTNFTISVTTEILPVSMTKTSVDCTMYICGDSTECSNLLLQYGSFCTQLNRALTGIAVEQDKNTQEVFAQVKQIYKTPPIKDFGGFNFSQILPDPSKPSKRSFIEDLLFNKVTLADAGFIKQYGDCLGDIAARDLICAQKFNGLTVLPPLLTDEMIAQYTSALLAGTITSGWWFGAGAALQIPFAMQMAYRFNGIGVTQNVLYENQKLIANQFNSAIGKIQDSLSSTAPALGKLQDVVNQNAQALNTLVKQLSSNFGAISSVLNDILSRLDPPEAEVQIDRLITGRLQSLQTYVTQQLIRAAEIRWSANLAATKMSECVLGQSKRVDFCGKGYHLMSFPQSAPHGVVFLHVTYVPAQEKNFTTAPAICHDGKAHFPREGVFVSNGTHWFVTQRNFYEPQIITTDNTFVSGNCDVVIGIVNNTVYDPLQPELDSFKEELDKYFKNHTSPDVDLGDISGINASVVNIQKEIDRLNEVAKNLNESLIDLQELGKYEQYIKGGGGSDIDPYKEFGSSYQLLNFLPLDFFPDLNALVDTATALYEEELTGREHCSPHHTAIRQALVCWDELTKLIAWMSSNITSEQVRTIIVNHVNDTWGLKVRQSLWFHLSCLTFGQHTVQEFLVSFGVWIRTPAPYRPPNAPILSTLPEHTVIC

SEQ ID NO: 6800 - protein, 1365 aa, Artificial Sequence
  SARS-CoV-2/Germany/BavPat3/2020__EPI_ISL_414521 spike protein (1-1211)(K986P_V987P_T887W_A1020W) WhcAg construct
MFVFLVLLPLVSSQCVNLTTRTQLPPAYTNSFTRGVYYPDKVFRSSVLHSTQDLFLPFFSNVTWFHAIHVSGTNGTKRFDNPVLPFNDGVYFASTEKSNIIRGWIFGTTLDSKTQSLLIVNNATNVVIKVCEFQFCNDPFLGVYYHKNNKSWMESEFRVYSSANNCTFEYVSQPFLMDLEGKQGNFKNLREFVFKNIDGYFKIYSKHTPINLVRDLPQGFSALEPLVDLPIGINITRFQTLLALHRSYLTPGDSSSGWTAGAAAYYVGYLQPRTFLLKYNENGTITDAVDCALDPLSETKCTLKSFTVEKGIYQTSNFRVQPTESIVRFPNITNLCPFGEVFNATRFASVYAWNRKRISNCVADYSVLYNSASFSTFKCYGVSPTKLNDLCFTNVYADSFVIRGDEVRQIAPGQTGKIADYNYKLPDDFTGCVIAWNSNNLDSKVGGNYNYLYRLFRKSNLKPFERDISTEIYQAGSTPCNGVEGFNCYFPLQSYGFQPTNGVGYQPYRVVVLSFELLHAPATVCGPKKSTNLVKNKCVNFNFNGLTGTGVLTESNKKFLPFQQFGRDIADTTDAVRDPQTLEILDITPCSFGGVSVITPGTNTSNQVAVLYQDVNCTEVPVAIHADQLTPTWRVYSTGSNVFQTRAGCLIGAEHVNNSYECDIPIGAGICASYQTQTNSPRRARSVASQSIIAYTMSLGAENSVAYSNNSIAIPTNFTISVTTEILPVSMTKTSVDCTMYICGDSTECSNLLLQYGSFCTQLNRALTGIAVEQDKNTQQVFAQVKQIYKTPPIKDFGGFNFSQILPDPSKPSKRSFIEDLLFNKVTLADAGFIKQYGDCLGDIAARDLICAQKFNGLTVLPPLLTDEMIAQYTSALLAGTITSGWWFGAGAALQIPFAMQMAYRFNGIGVTQNVLYENQKLIANQFNSAIGKIQDSLSSTASALGKLQDVVNQNAQALNTLVKQLSSNFGAISSVLNDILSRLDPPEAEVQIDRLITGRLQSLQTYVTQQLIRAAEIRWSANLAATKMSECVLGQSKRVDFCGKGYHLMSFPQSAPHGVVFLHVTYVPAQEKNFTTAPAICHDGKAHFPREGVFVSNGTHWFVTQRNFYEPQIITTDNTFVSGNCDVVIGIVNNTVYDPLQPELDSFKEELDKYFKNHTSPDVDLGDISGINASVVNIQKEIDRLNEVAKNLNESLIDLQELGKYEQYIKGGGGSDIDPYKEFGSSYQLLNFLPLDFFPDLNALVDTATALYEEELTGREHCSPHHTAIRQALVCWDELTKLIAWMSSNITSEQVRTIIVNHVNDTWGLKVRQSLWFHLSCLTFGQHTVQEFLVSFGVWIRTPAPYRPPNAPILSTLPEHTVIC

SEQ ID NO: 6801 - protein, 1365 aa, Artificial Sequence
  SARS-CoV-2/France/HF1805/2020__EPI_ISL_414628 spike protein (1-1211)(K986P_V987P_T887W_A1020W) WhcAg construct
MFVFLVLLPLVSSQCVNLTTRTQLPPAYTNSFTRGVYYPDKVFRSSVLHSTQDLFLPFFSNVTWFHAIHVSGTNGTKRFDNPVLPFNDGVYFASTEKSNIIRGWIFGTTLDSKTQSLLIVNNATNVVIKVCEFQFCNDPFLGVYYHKNNKSWMESEFRVYSSANNCTFEYVSQPFLMDLEGKQGNFKNLREFVFKNIDGYFKIYSKHTPINLVRDLPQGFSALEPLVDLPIGINITRFQTLLALHRSYLTPGDSSSGWTAGAAAYYVGYLQPRTFLLKYNENGTITDAVDCALDPLSETKCTLKSFTVEKGIYQTSNFRVQPTESIVRFPNITNLCPFGEVFNATRFASVYAWNRKRISNCVADYSVLYNSASFSTFKCYGVSPTKLNDLCFTNVYADSFVIRGDEVRQIAPGQTGKIADYNYKLPDDFTGCVIAWNSNNLDSKVGGNYNYLYRLFRKSNLKPFERDISTEIYQAGSTPCNGVEGFNCYFPLQSYGFQPTNGVGYQPYRVVVLSFELLHAPATVCGPKKSTNLVKNKCVNFNFNGLTGTGVLTESNKKFLPFQQFGRDIADTTDAVRDPQTLEILDITPCSFGGVSVITPGTNTSNQVAVLYQGVNCTEVPVAIHADQLTPTWRVYSTGSNVFQTRAGCLIGAEHVNNSYECDIPIGAGICASYQTQTNSPRRARSVASQSIIAYTMSLGAENSVAYSNNSIAIPTNFTISVTTEILPVSMTKTSVDCTMYICGDSTECSNLLLQYGSFCTQLNRALTGIAVEQDKNTQEVFAQVKQIYKTPPIKDFGGFNFSQILPDPSKPSKRSFIEDLLFNKVTLADAGFIKQYGDCLGDIAARDLICAQKFNGLTVLPPLLTDEMIAQYTSALLAGTITSGWWFGAGAALQIPFAMQMAYRFNGIGVTQNVLYENQKLIANQFNSAIGKIQDSLSSTASALGKLQDVVNQNAQALNTLVKQLSSNFGAISSVLNDILSRLDPPEAEVQIDRLITGRLQSLQTYVTQQLIRAAEIRWSANLAATKMSECVLGQSKRVDFCGKGYHLMSFPQSAPHGVVFLHVTYVPAQEKNFTTAPAICHDGKAHFPREGVFVSNGTHWFVTQRNFYEPQIITTDNTFVSGNCDVVIGVVNNTVYDPLQPELDSFKEELDKYFKNHTSPDVDLGDISGINASVVNIQKEIDRLNEVAKNLNESLIDLQELGKYEQYIKGGGGSDIDPYKEFGSSYQLLNFLPLDFFPDLNALVDTATALYEEELTGREHCSPHHTAIRQALVCWDELTKLIAWMSSNITSEQVRTIIVNHVNDTWGLKVRQSLWFHLSCLTFGQHTVQEFLVSFGVWIRTPAPYRPPNAPILSTLPEHTVIC

SEQ ID NO: 6802 - protein, 1365 aa, Artificial Sequence
  SARS-CoV-2/Netherlands/ZuidHolland_9/2020__EPI_ISL_414445 spike protein (1-1211)(K986P_V987P_T887W_A1020W) WhcAg construct
MFVFLVLLPLVSSQCVNLTTRTQLPPAYTNSFTRGVYYPDKVFRSSVLHSTQDLFLPFFSNVTWFHAIHVSGTNGTKRFDNPVLPFNDGVYFASTEKSNIIRGWIFGTTLDSKTQSLLIVNNATNVVIKVCEFQFCNDPFLGVYYHKNNKSWMESEFRVYSSANNCTFEYVSQPFLMDLEGKQGNFKNLREFVFKNIDGYFKIYSKHTPINLVRDLPQGFSALEPLVDLPIGINITRFQTLLALHRSYLTPGDSSSGWTAGAAAYYVGYLQPRTFLLKYNENGTITDAVDCALDPLSETKCTLKSFTVEKGIYQTSNFRVQPTESIVRFPNITNLCPFGEVFNATRFASVYAWNRKRISNCVADYSVLYNSASFSTFKCYGVSPTKLNDLCFTNVYADSFVIRGDEVRQIAPGQTGKIADYNYKLPDDFTGCVIAWNSNNLDSKVGGNYNYLYRLFRKSNLKPFERDISTEIYQAGSTPCNGVEGFNCYFPLQSYGFQPTNGVGYQPYRVVVLSFELLHAPATVCGPKKSTNLVKNKCVNFNFNGLTGTGVLTESNKKFLPFQQFGRDIADTTDAVRDPQTLEILDITPCSFGGVSVITPGTNTSNQVAVLYQGVNCTEVPVAIHADQLTPTWRVYSTGSNVFQTRAGCLIGAEHVNNSYECDIPIGAGICASYQTQTNSPRRARSVASQSIIAYTMSLGAENSVAYSNNSIAIPTNFTISVTTEILPVSMTKTSVDCTMYICGDSTECSNLLLQYGSFCTQLNRALTGIAVEQDKNTQEVFAQVKQIYKTPPIKDFGGFNFSQILPDPSKPSKRSFIEDLLFNKVTLADAGFIKQYGDCLGDIAARDLICVQKFNGLTVLPPLLTDEMIAQYTSALLAGTITSGWWFGAGAALQIPFAMQMAYRFNGIGVTQNVLYENQKLIANQFNSAIGKIQDSLSSTASALGKLQDVVNQNAQALNTLVKQLSSNFGAISSVLNDILSRLDPPEAEVQIDRLITGRLQSLQTYVTQQLIRAAEIRWSANLAATKMSECVLGQSKRVDFCGKGYHLMSFPQSAPHGVVFLHVTYVPAQEKNFTTAPAICHDGKAHFPREGVFVSNGTHWFVTQRNFYEPQIITTDNTFVSGNCDVVIGIVNNTVYDPLQPELDSFKEELDKYFKNHTSPDVDLGDISGINASVVNIQKEIDRLNEVAKNLNESLIDLQELGKYEQYIKGGGGSDIDPYKEFGSSYQLLNFLPLDFFPDLNALVDTATALYEEELTGREHCSPHHTAIRQALVCWDELTKLIAWMSSNITSEQVRTIIVNHVNDTWGLKVRQSLWFHLSCLTFGQHTVQEFLVSFGVWIRTPAPYRPPNAPILSTLPEHTVIC

SEQ ID NO: 6803 - protein, 1365 aa, Artificial Sequence
  SARS-CoV-2/Finland/FIN03032020A/2020__EPI_ISL_413602 spike protein (1-1211)(K986P_V987P_T887W_A1020W) WhcAg construct
MFVFLVLLPLVSSQCVNLTTRTQLPPAYTNSFTRGVYYPDKVFRSSVLHSTQDLFLPFFSNVTWFHAIHVSGTNGTKRFDNPVLPFNDGVYFASTEKSNIIRGWIFGTTLDSKTQSLLIVNNATNVVIKVCEFQFCNDPFLGVYYHKNNKSWMESEFRVYSSANNCTFEYVSQPFLMDLEGKQGNFKNLREFVFKNIDGYFKIYSKHTPINLVRDLPQGFSALEPLVDLPIGINITRFQTLLALHRSYLTPGDSSSGWTAGAAAYYVGYLQPRTFLLKYNENGTITDAVDCALDPLSETKCTLKSFTVEKGIYQTSNFRVQPTESIVRFPNITNLCPFGEVFNATRFASVYAWNRKRISNCVADYSVLYNSASFSTFKCYGVSPTKLNDLCFTNVYADSFVIRGDEVRQIAPGQTGKIADYNYKLPDDFTGCVISWNSNNLDSKVGGNYNYLYRLFRKSNLKPFERDISTEIYQAGSTPCNGVEGFNCYFPLQSYGFQPTNGVGYQPYRVVVLSFELLHAPATVCGPKKSTNLVKNKCVNFNFNGLTGTGVLTESNKKFLPFQQFGRDIADTTDAVRDPQTLEILDITPCSFGGVSVITPGTNTSNQVAVLYQGVNCTEVPVAIHADQLTPTWRVYSTGSNVFQTRAGCLIGAEHVNNSYECDIPIGAGICASYQTQTNSPRRARSVASQSIIAYTMSLGAENSVAYSNNSIAIPTNFTISVTTEILPVSMTKTSVDCTMYICGDSTECSNLLLQYGSFCTQLNRALTGIAVEQDKNTQEVFAQVKQIYKTPPIKDFGGFNFSQILPDPSKPSKRSFIEDLLFNKVTLADAGFIKQYGDCLGDIAARDLICAQKFNGLTVLPPLLTDEMIAQYTSALLAGTITSGWWFGAGAALQIPFAMQMAYRFNGIGVTQNVLYENQKLIANQFNSAIGKIQDSLSSTASALGKLQDVVNQNAQALNTLVKQLSSNFGAISSVLNDILSRLDPPEAEVQIDRLITGRLQSLQTYVTQQLIRAAEIRWSANLAATKMSECVLGQSKRVDFCGKGYHLMSFPQSAPHGVVFLHVTYVPAQEKNFTTAPAICHDGKAHFPREGVFVSNGTHWFVTQRNFYEPQIITTDNTFVSGNCDVVIGIVNNTVYDPLQPELDSFKEELDKYFKNHTSPDVDLGDISGINASVVNIQKEIDRLNEVAKNLNESLIDLQELGKYEQYIKGGGGSDIDPYKEFGSSYQLLNFLPLDFFPDLNALVDTATALYEEELTGREHCSPHHTAIRQALVCWDELTKLIAWMSSNITSEQVRTIIVNHVNDTWGLKVRQSLWFHLSCLTFGQHTVQEFLVSFGVWIRTPAPYRPPNAPILSTLPEHTVIC

SEQ ID NO: 6804 - protein, 1365 aa, Artificial Sequence
  SARS-CoV-2/France/GE1977/2020__EPI_ISL_414632 spike protein (1-1211)(K986P_V987P_T887W_A1020W) WhcAg construct
MFVFLVLLPLVSSQCVNLTTRTQLPPAYTNSFTRGVYYPDKVFRSSVLHSTQDLFLPFFSNVTWFHAIHVSGTNGTKRFDNPVLPFNDGVYFASTEKSNIIRGWIFGTTLDSKTQSLLIVNNATNVVIKVCEFQFCNDPFLGVYYHKNNKSWMESEFRVYSSANNCTFEYVSQPFLMDLEGKQGNFKNLREFVFKNIDGYFKIYSKHTPINLVRDLPQGFSALEPLVDLPIGINITRFQTLLALHRSYLTPGDSSSGWTAGAAAYYVGYLQPRTFLLKYNENGTITDAVDCALDPLSETKCTLKSFTVEKGIYQTSNFRVQPTESIVRFPNITNLCPFGEVFNATRFASVYAWNRKRISNCVADYSVLYNSASFSTFKCYGVSPTKLNDLCFTNVYADSFVIRGDEVRQIAPGQTGKIADYNYKLPDDFTGCVIAWNSNNLDSKVGGNYNYLYRLFRKSNLKPFERDISTEIYQAGSTPCNGVEGFNCYFPLQSYGFQPTNGVGYQPYRVVVLSFELLHAPATVCGPKKSTNLVKNKCVNFNFNGLTGTGVLTESNKKFLPFQQFGRDIADTTDAVRDPQTLEILDITPCSFGGVSVITPGTNTSNQVAVLYQGVNCTEVPVAIHADQLTPTWRVYSTGSNVFQTRAGCLIGAEHVNNSYECDIPIGAGICASYQTQTNSPRRARSVASQSIIAYTMSLGAENSVAYSNNSIAIPTNFTISVTTEILPVSMTKTSVDCTMYICGDSTECSNLLLQYGSFCTQLNRALTGIAVEQDKNTQEVFAQVKQIYKTPPIKDFGGFNFSQILPDPSKPSKRSFIEDLLFNKVTLADAGFIKQYGDCLGDIAARDLICAQKFNGLTVLPPLLTDEMIAQYTSALLAGTITSGWWFGAGAALQIPFAMQMAYRFNGIGVTQNVLYENQKLIANQFNSAIGKIQDSLFSTASALGKLQDVVNQNAQALNTLVKQLSSNFGAISSVLNDILSRLDPPEAEVQIDRLITGRLQSLQTYVTQQLIRAAEIRWSANLAATKMSECVLGQSKRVDFCGKGYHLMSFPQSAPHGVVFLHVTYVPAQEKNFTTAPAICHDGKAHFPREGVFVSNGTHWFVTQRNFYEPQIITTDNTFVSGNCDVVIGIVNNTVYDPLQPELDSFKEELDKYFKNHTSPDVDLGDISGINASVVNIQKEIDRLNEVAKNLNESLIDLQELGKYEQYIKGGGGSDIDPYKEFGSSYQLLNFLPLDFFPDLNALVDTATALYEEELTGREHCSPHHTAIRQALVCWDELTKLIAWMSSNITSEQVRTIIVNHVNDTWGLKVRQSLWFHLSCLTFGQHTVQEFLVSFGVWIRTPAPYRPPNAPILSTLPEHTVIC

SEQ ID NO: 6805 - protein, 1365 aa, Artificial Sequence
  SARS-CoV-2/Finland/FIN-313/2020__EPI_ISL_414641 spike protein (1-1211)(K986P_V987P_T887W_A1020W) WhcAg construct
MFVFLVLLPLVSSQCVNLTTRTQLPPAYTNSFTRGVYYPDKVFRSSVLHSTQDLFLPFFSNVTWFHAIHVSGTNGTKRFDNPVLPFNDGVYFASTEKSNIIRGWIFGTTLDSKTQSLLIVNNATNVVIKVCEFQFCNDPFLGVYYHKNNKSWMESEFRVYSSANNCTFEYVSQPFLMDLEGKQGNFKNLREFVFKNIDGYFKIYSKHTPINLVRDLPQGFSALEPLVDLPIGINITRFKTLLALHRSYLTPGDSSSGWTAGAAAYYVGYLQPRTFLLKYNENGTITDAVDCALDPLSETKCTLKSFTVEKGIYQTSNFRVQPTESIVRFPNITNLCPFGEVFNATRFASVYAWNRKRISNCVADYSVLYNSASFSTFKCYGVSPTKLNDLCFTNVYADSFVIRGDEVRQIAPGQTGKIADYNYKLPDDFTGCVIAWNSNNLDSKVGGNYNYLYRLFRKSNLKPFERDISTEIYQAGSTPCNGVEGFNCYFPLQSYGFQPTNGVGYQPYRVVVLSFELLHAPATVCGPKKSTNLVKNKCVNFNFNGLTGTGVLTESNKKFLPFQQFGRDIADTTDAVRDPQTLEILDITPCSFGGVSVITPGTNTSNQVAVLYQGVNCTEVPVAIHADQLTPTWRVYSTGSNVFQTRAGCLIGAEHVNNSYECDIPIGAGICASYQTQTNSPRRARSVASQSIIAYTMSLGAENSVAYSNNSIAIPTNFTISVTTEILPVSMTKTSVDCTMYICGDSTECSNLLLQYGSFCTQLNRALTGIAVEQDKNTQEVFAQVKQIYKTPPIKDFGGFNFSQILPDPSKPSKRSFIEDLLFNKVTLADAGFIKQYGDCLGDIAARDLICAQKFNGLTVLPPLLTDEMIAQYTSALLAGTITSGWWFGAGAALQIPFAMQMAYRFNGIGVTQNVLYENQKLIANQFNSAIGKIQDSLSSTASALGKLQDVVNQNAQALNTLVKQLSSNFGAISSVLNDILSRLDPPEAEVQIDRLITGRLQSLQTYVTQQLIRAAEIRWSANLAATKMSECVLGQSKRVDFCGKGYHLMSFPQSAPHGVVFLHVTYVPAQEKNFTTAPAICHDGKAHFPREGVFVSNGTHWFVTQRNFYEPQIITTDNTFVSGNCDVVIGIVNNTVYDPLQPELDSFKEELDKYFKNHTSPDVDLGDISGINASVVNIQKEIDRLNEVAKNLNESLIDLQELGKYEQYIKGGGGSDIDPYKEFGSSYQLLNFLPLDFFPDLNALVDTATALYEEELTGREHCSPHHTAIRQALVCWDELTKLIAWMSSNITSEQVRTIIVNHVNDTWGLKVRQSLWFHLSCLTFGQHTVQEFLVSFGVWIRTPAPYRPPNAPILSTLPEHTVIC

SEQ ID NO: 6806 - protein, 1365 aa, Artificial Sequence
  SARS-CoV-2/Netherlands/ZuidHolland_2/2020__EPI_ISL_414556 spike protein (1-1211)(K986P_V987P_T887W_A1020W) WhcAg construct
MFVFLVLLPLVSSQCVNLTTRTQLPPAYTNSFTRGVYYPDKVFRSSVLHSTQDLFLPFFSNVTWFHAIHVSGTNGTKRFDNPVLPFNDGVYFASTEKSNIIRGWIFGTTLDSKTQSLLIVNNATNVVIKVCEFQFCNDPFLGVYYHKNNKSWMESEFRVYSSANNCTFEYVSQPFLMDLEGKQGNFKNLREFVFKNIDGYFKIYSKHTPINLVRDLPQGFSALEPLVDLPIGINITRFQTLLALHRSYLTPGDSSSGWTAGAAAYYVGYLQPRTFLLKYNENGTITDAVDCALDPLSETKCTLKSFTVEKGIYQTSNFRVQPTESIVRFPNITNLCPFGEVFNATRFASVYAWNRKRISNCVADYSVLYNSASFSTFKCYGVSPTKLNDLCFTNVYADSFVIRGDEVRQIAPGQTGKIADYNYKLPDDFTGCVIAWNSNNLDSKVGGNYNYLYRLFRKSNLKPFERDISTEIYQAGSTPCNGVEGFNCYFPLQSYGFQPTNGVGYQPYRVVVLSFELLHAPATVCGPKKSTNLVKNKCVNFNFNGLTGTGVLTESNKKFLPFQQFGRDIADTTDAVRDPQTLEILDITPCSFGGVSVITPGTNTSNQVAVLYQGVNCTEVPVAIHADQLTPTWRVYSTGSNVFQTRAGCLIGAEHVNNSYECDIPIGAGICASYQTQTNSPRRARSVASQSIIAYTMSLGAENSVAYSNNSIAIPTNFTISVTTEILPVSMTKTSVDCTMYICGDSTECSNLLLQYGSFCTQLNRALTGIALEQDKNTQEVFAQVKQIYKTPPIKDFGGFNFSQILPDPSKPSKRSFIEDLLFNKVTLADAGFIKQYGDCLGDIAARDLICAQKFNGLTVLPPLLTDEMIAQYTSALLAGTITSGWWFGAGAALQIPFAMQMAYRFNGIGVTQNVLYENQKLIANQFNSAIGKIQDSLSSTASALGKLQDVVNQNAQALNTLVKQLSSNFGAISSVLNDILSRLDPPEAEVQIDRLITGRLQSLQTYVTQQLIRAAEIRWSANLAATKMSECVLGQSKRVDFCGKGYHLMSFPQSAPHGVVFLHVTYVPAQEKNFTTAPAICHDGKAHFPREGVFVSNGTHWFVTQRNFYEPQIITTDNTFVSGNCDVVIGIVNNTVYDPLQPELDSFKEELDKYFKNHTSPDVDLGDISGINASVVNIQKEIDRLNEVAKNLNESLIDLQELGKYEQYIKGGGGSDIDPYKEFGSSYQLLNFLPLDFFPDLNALVDTATALYEEELTGREHCSPHHTAIRQALVCWDELTKLIAWMSSNITSEQVRTIIVNHVNDTWGLKVRQSLWFHLSCLTFGQHTVQEFLVSFGVWIRTPAPYRPPNAPILSTLPEHTVIC

SEQ ID NO: 6807 - protein, 1365 aa, Artificial Sequence
  SARS-CoV-2/USA/WA-UW31/2020__EPI_ISL_414618 spike protein (1-1211)(K986P_V987P_T887W_A1020W) WhcAg construct
MFVFLVLLPLVSSQCVNLTTRTQLPPAYTNSFTRGVYYPDKVFRSSVLHSTQDLFLPFFSNVTWFHAIHVSGTNGTKRFDNPVLPFNDGVYFASTEKSNIIRGWIFGTTLDSKTQSLLIVNNATNVVIKVCEFQFCNDPFLGVYYHKNNKSWMESEFRVYSSANNCTFEYVSQPFLMDLEGKQGNFKNLREFVFKNIDGYFKIYSKHTPINLVRDLPQGFSALEPLVDLPIGINITRFQTLLALHRSYLTPGDSSSGWTAGAAAYYVGYLQPRTFLLKYNENGTITDAVDCALDPLSETKCTLKSFTVEKGIYQTSNFRVQPTESIVRFPNITNLCPFGEVFNATRFASVYAWNRKRISNCVADYSVLYNSASFSTFKCYGVSPTKLNDLCFTNVYADSFVIRGDEVRQIAPGQTGKIADYNYKLPDDFTGCVIAWNSNNLDSKVGGNYNYLYRLFRKSNLKPFERDISTEIYQAGSTPCNGAEGFNCYFPLQSYGFQPTNGVGYQPYRVVVLSFELLHAPATVCGPKKSTNLVKNKCVNFNFNGLTGTGVLTESNKKFLPFQQFGRDIADTTDAVRDPQTLEILDITPCSFGGVSVITPGTNTSNQVAVLYQDVNCTEVPVAIHADQLTPTWRVYSTGSNVFQTRAGCLIGAEHVNNSYECDIPIGAGICASYQTQTNSPRRARSVASQSIIAYTMSLGAENSVAYSNNSIAIPTNFTISVTTEILPVSMTKTSVDCTMYICGDSTECSNLLLQYGSFCTQLNRALTGIAVEQDKNTQEVFAQVKQIYKTPPIKDFGGFNFSQILPDPSKPSKRSFIEDLLFNKVTLADAGFIKQYGDCLGDIAARDLICAQKFNGLTVLPPLLTDEMIAQYTSALLAGTITSGWWFGAGAALQIPFAMQMAYRFNGIGVTQNVLYENQKLIANQFNSAIGKIQDSLSSTASALGKLQDVVNQNAQALNTLVKQLSSNFGAISSVLNDILSRLDPPEAEVQIDRLITGRLQSLQTYVTQQLIRAAEIRWSANLAATKMSECVLGQSKRVDFCGKGYHLMSFPQSAPHGVVFLHVTYVPAQEKNFTTAPAICHDGKAHFPREGVFVSNGTHWFVTQRNFYEPQIITTDNTFVSGNCDVVIGIVNNTVYDPLQPELDSFKEELDKYFKNHTSPDVDLGDISGINASVVNIQKEIDRLNEVAKNLNESLIDLQELGKYEQYIKGGGGSDIDPYKEFGSSYQLLNFLPLDFFPDLNALVDTATALYEEELTGREHCSPHHTAIRQALVCWDELTKLIAWMSSNITSEQVRTIIVNHVNDTWGLKVRQSLWFHLSCLTFGQHTVQEFLVSFGVWIRTPAPYRPPNAPILSTLPEHTVIC

SEQ ID NO: 6808 - protein, 1365 aa, Artificial Sequence
  SARS-CoV-2/South Korea/SNU01/2020__EPI_ISL_411929 spike protein (1-1211)(K986P_V987P_T887W_A1020W) WhcAg construct
MFVFLVLLPLVSSQCVNLTTRTQLPPAYTNSFTRGVYYPDKVFRSSVLHSTQDLFLPFFSNVTWFHAIHVSGTNGTKRFDNPVLPFNDGVYFASTEKSNIIRGWIFGTTLDSKTQSLLIVNNATNVVIKVCEFQFCNDPFLGVYYHKNNKSWMESEFRVYSSANNCTFEYVSQPFLMDLEGKQGNFKNLREFVFKNIDGYFKIYSKHTPINLVRDLPQGFWALEPLVDLPIGINITRFQTLLALHRSYLTPGDSSSGWTAGAAAYYVGYLQPRTFLLKYNENGTITDAVDCALDPLSETKCTLKSFTVEKGIYQTSNFRVQPTESIVRFPNITNLCPFGEVFNATRFASVYAWNRKRISNCVADYSVLYNSASFSTFKCYGVSPTKLNDLCFTNVYADSFVIRGDEVRQIAPGQTGKIADYNYKLPDDFTGCVIAWNSNNLDSKVGGNYNYLYRLFRKSNLKPFERDISTEIYQAGSTPCNGVEGFNCYFPLQSYGFQPTNGVGYQPYRVVVLSFELLHAPATVCGPKKSTNLVKNKCVNFNFNGLTGTGVLTESNKKFLPFQQFGRDIADTTDAVRDPQTLEILDITPCSFGGVSVITPGTNTSNQVAVLYQDVNCTEVPVAIHADQLTPTWRVYSTGSNVFQTRAGCLIGAEHVNNSYECDIPIGAGICASYQTQTNSPRRARSVASQSIIAYTMSLGAENSVAYSNNSIAIPTNFTISVTTEILPVSMTKTSVDCTMYICGDSTECSNLLLQYGSFCTQLNRALTGIAVEQDKNTQEVFAQVKQIYKTPPIKDFGGFNFSQILPDPSKPSKRSFIEDLLFNKVTLADAGFIKQYGDCLGDIAARDLICAQKFNGLTVLPPLLTDEMIAQYTSALLAGTITSGWWFGAGAALQIPFAMQMAYRFNGIGVTQNVLYENQKLIANQFNSAIGKIQDSLSSTASALGKLQDVVNQNAQALNTLVKQLSSNFGAISSVLNDILSRLDPPEAEVQIDRLITGRLQSLQTYVTQQLIRAAEIRWSANLAATKMSECVLGQSKRVDFCGKGYHLMSFPQSAPHGVVFLHVTYVPAQEKNFTTAPAICHDGKAHFPREGVFVSNGTHWFVTQRNFYEPQIITTDNTFVSGNCDVVIGIVNNTVYDPLQPELDSFKEELDKYFKNHTSPDVDLGDISGINASVVNIQKEIDRLNEVAKNLNESLIDLQELGKYEQYIKGGGGSDIDPYKEFGSSYQLLNFLPLDFFPDLNALVDTATALYEEELTGREHCSPHHTAIRQALVCWDELTKLIAWMSSNITSEQVRTIIVNHVNDTWGLKVRQSLWFHLSCLTFGQHTVQEFLVSFGVWIRTPAPYRPPNAPILSTLPEHTVIC

SEQ ID NO: 6809 - protein, 1365 aa, Artificial Sequence
  SARS-CoV-2/China/WF0004/2020__EPI_ISL_413694 spike protein (1-1211)(K986P_V987P_T887W_A1020W) WhcAg construct
MFVFLVLLPLVSSQCVNLTTRTQLPPAYTNSFTRGVYYPDKVFRSSVLHSTQDLFLPFFSNVTWFHAIHVSGTNGTKRFDNPVLPFNDGVYFASTEKSNIIRGWIFGTTLDSKTQSLLIVNNATNVVIKVCEFQFCNDPFLGVYYHKNNKSWTESEFRVYSSANNCTFEYVSQPFLMDLEGKQGNFKNLREFVFKNIDGYFKIYSKHTPINLVRDLPQGFSALEPLVDLPIGINITRFQTLLALHRSYLTPGDSSSGWTAGAAAYYVGYLQPRTFLLKYNENGTITDAVDCALDPLSETKCTLKSFTVEKGIYQTSNFRVQPTESIVRFPNITNLCPFGEVFNATRFASVYAWNRKRISNCVADYSVLYNSASFSTFKCYGVSPTKLNDLCFTNVYADSFVIRGDEVRQIAPGQTGKIADYNYKLPDDFTGCVIAWNSNNLDSKVGGNYNYLYRLFRKSNLKPFERDISTEIYQAGSTPCNGVEGFNCYFPLQSYGFQPTNGVGYQPYRVVVLSFELLHAPATVCGPKKSTNLVKNKCVNFNFNGLTGTGVLTESNKKFLPFQQFGRDIADTTDAVRDPQTLEILDITPCSFGGVSVITPGTNTSNQVAVLYQDVNCTEVPVAIHADQLTPTWRVYSTGSNVFQTRAGCLIGAEHVNNSYECDIPIGAGICASYQTQTNSPRRARSVASQSIIAYTMSLGAENSVAYSNNSIAIPTNFTISVTTEILPVSMTKTSVDCTMYICGDSTECSNLLLQYGSFCTQLNRALTGIAVEQDKNTQEVFAQVKQIYKTPPIKDFGGFNFSQILPDPSKPSKRSFIEDLLFNKVTLADAGFIKQYGDCLGDIAARDLICAQKFNGLTVLPPLLTDEMIAQYTSALLAGTITSGWWFGAGAALQIPFAMQMAYRFNGIGVTQNVLYENQKLIANQFNSAIGKIQDSLSSTASALGKLQDVVNQNAQALNTLVKQLSSNFGAISSVLNDILSRLDPPEAEVQIDRLITGRLQSLQTYVTQQLIRAAEIRWSANLAATKMSECVLGQSKRFDFCGKGYHLMSFPQSAPHGVVFLHVTYVPAQEKNFTTAPAICHDGKAHFPREGVFVSNGTHWFVTQRNFYEPQIITTDNTFVSGNCDVVIGIVNNTVYDPLQPELDSFKEELDKYFKNHTSPDVDLGDISGINASVVNIQKEIDRLNEVAKNLNESLIDLQELGKYEQYIKGGGGSDIDPYKEFGSSYQLLNFLPLDFFPDLNALVDTATALYEEELTGREHCSPHHTAIRQALVCWDELTKLIAWMSSNITSEQVRTIIVNHVNDTWGLKVRQSLWFHLSCLTFGQHTVQEFLVSFGVWIRTPAPYRPPNAPILSTLPEHTVIC

SEQ ID NO: 6810 - protein, 1365 aa, Artificial Sequence
  SARS-CoV-2/China/WF0028/2020__EPI_ISL_413791 spike protein (1-1211)(K986P_V987P_T887W_A1020W) WhcAg construct
MFVFLVLLPLVSSQCVNLTTRTQLPPAYTNSFTRGVYYPDKVFRSSVLHSTQDLFLPFFSNVTWFHAIHVSGTNGTKRFDNPVLPFNDGVYFASTEKSNIIRGWIFGTTLDSKTQSLLIVNNATNVVIKVCEFQFCNDPFLGVYYHKNNKSWMESEFRVYSSANNCTFEYVSQPFLMDLEGKQGNFKNLREFVFKNIDGYFKIYSKHTPINLVRDLPQGFSALEPLVDLPIGINITRFQTLLALHRSYLTPGDSSSGWTAGAAAYYVGYLQPRTFLLKYNENGTITDAVDCALDPLSETKCTLKSFTVEKGIYQTSNFRVQPTESIVRFPNITNLCPFGEVFNATRFASVYAWNRKRISNCVADYSVLYNSASFSTFKCYGVSPTKLNDLCFTNVYADSFVIRGDEVRQIAPGQTGKIADYNYKLPDDFTGCVIAWNSNNLDSKVGGNYNYLYRLFRKSNLKPFERDISTEIYQAGSTPCNGVEGFNCYFPLQSYGFQPTNGVGYQPYRVVVLSFELLHAPATVCGPKKSTNLVKNKCVNFNFNGLTGTGVLTESNKKFLPFQQFGRDIADTTDAVRDPQTLEILDITPCSFGGVSVITPGTNTSNQVAVLYQDVNCTEVPVAIHADQLTPTWRVYSTGSNVFQTRAGCLIGAEHVNNSYECDIPIGAGICASYQTQTNSPRRARSVASQSIIAYTMSLGAENSVAYSNNSIAIPTNFTISVTTEILPVSMTKTSVDCTMYICGDSTECSNLLLQYGSFCTQLNRALTGIAVEQDKNTQEVFAQVKQIYKTPPIKDFGGFNFSQILPDPSKPSKRSFIEDLLFNKVTLADAGFIKQYGDCLGDIAARDLICAQKFNGLTVLPPLLTDEMIAQYTSALLAGTITSGWWFGAGAALQIPFAMQMAYRFNGIGVTQNVLYENQKLIANQFNSAIGKIQDSLSSTASALGKLQDVVNQNAQALNTLVKQLSSNFGAISSVLNDILSRLDPPEAEVQIDRLITGRLQSLQTYVTQQLIRAAEIRWSANLAATKMSECVLGQSKRVDFCGKGYHLMSFPQSAPHGVVFLHVTYVPAQEKNFTTAPAICHDGKAHFPREGVFVSNGTHWFVTQRNFYEPQIITTDNTFVSGNCDVVIGIVNNTVYDPLQPELESFKEELDKYFKNHTSPDVDLGDISGINASVVNIQKEIDRLNEVAKNLNESLIDLQELGKYEQYIKGGGGSDIDPYKEFGSSYQLLNFLPLDFFPDLNALVDTATALYEEELTGREHCSPHHTAIRQALVCWDELTKLIAWMSSNITSEQVRTIIVNHVNDTWGLKVRQSLWFHLSCLTFGQHTVQEFLVSFGVWIRTPAPYRPPNAPILSTLPEHTVIC

SEQ ID NO: 6811 - protein, 1365 aa, Artificial Sequence
  SARS-CoV-2/2019-nCoV/USA-CruiseA-18/2020__MT159716.1 spike protein (1-1211)(K986P_V987P_T887W_A1020W) WhcAg construct
MFVFLVLLPLVSSQCVNLTTRTQLPPAYTNSFTRGVYYPDKVFRSSVLHSTQDLFLPFFSNVTWFHAIHVSGTNGTKRFDNPVLPFNDGVYFASTEKSNIIRGWIFGTTLDSKTQSLLIVNNATNVVIKVCEFQFCNDPFLGVYYHKNNKSWMESELRVYSSANNCTFEYVSQPFLMDLEGKQGNFKNLREFVFKNIDGYFKIYSKHTPINLVRDLPQGFSALEPLVDLPIGINITRFQTLLALHRSYLTPGDSSSGWTAGAAAYYVGYLQPRTFLLKYNENGTITDAVDCALDPLSETKCTLKSFTVEKGIYQTSNFRVQPTESIVRFPNITNLCPFGEVFNATRFASVYAWNRKRISNCVADYSVLYNSASFSTFKCYGVSPTKLNDLCFTNVYADSFVIRGDEVRQIAPGQTGKIADYNYKLPDDFTGCVIAWNSNNLDSKVGGNYNYLYRLFRKSNLKPFERDISTEIYQAGSTPCNGVEGFNCYFPLQSYGFQPTNGVGYQPYRVVVLSFELLHAPATVCGPKKSTNLVKNKCVNFNFNGLTGTGVLTESNKKFLPFQQFGRDIADTTDAVRDPQTLEILDITPCSFGGVSVITPGTNTSNQVAVLYQDVNCTEVPVAIHADQLTPTWRVYSTGSNVFQTRAGCLIGAEHVNNSYECDIPIGAGICASYQTQTNSPRRARSVASQSIIAYTMSLGAENSVAYSNNSIAIPTNFTISVTTEILPVSMTKTSVDCTMYICGDSTECSNLLLQYGSFCTQLNRALTGIAVEQDKNTQEVFAQVKQIYKTPPIKDFGGFNFSQILPDPSKPSKRSFIEDLLFNKVTLADAGFIKQYGDCLGDIAARDLICAQKFNGLTVLPPLLTDEMIAQYTSALLAGTITSGWWFGAGAALQIPFAMQMAYRFNGIGVTQNVLYENQKLIANQFNSAIGKIQDSLSSTASALGKLQDVVNQNAQALNTLVKQLSSNFGAISSVLNDILSRLDPPEAEVQIDRLITGRLQSLQTYVTQQLIRAAEIRWSANLAATKMSECVLGQSKRVDFCGKGYHLMSFPQSAPHGVVFLHVTYVPAQEKNFTTAPAICHDGKAHFPREGVFVSNGTHWFVTQRNFYEPQIITTDNTFVSGNCDVVIGIVNNTVYDPLQPELDSFKEELDKYFKNHTSPDVDLGDISGINASVVNIQKEIDRLNEVAKNLNESLIDLQELGKYEQYIKGGGGSDIDPYKEFGSSYQLLNFLPLDFFPDLNALVDTATALYEEELTGREHCSPHHTAIRQALVCWDELTKLIAWMSSNITSEQVRTIIVNHVNDTWGLKVRQSLWFHLSCLTFGQHTVQEFLVSFGVWIRTPAPYRPPNAPILSTLPEHTVIC

SEQ ID NO: 6812 - protein, 1365 aa, Artificial Sequence
  SARS-CoV-2/SARS-CoV-2/Yunnan-01/human/2020/CHN__MT049951.1 spike protein (1-1211)(K986P_V987P_T887W_A1020W) WhcAg construct
MFVFLVLLPLVSSQCVNLTTRTQLPPANTNSFTRGVYYPDKVFRSSVLHSTQDLFLPFFSNVTWFHAIHVSGTNGTKRFDNPVLPFNDGVYFASTEKSNIIRGWIFGTTLDSKTQSLLIVNNATNVVIKVCEFQFCNDPFLGVYYHKNNKSWMESEFRVYSSANNCTFEYVSQPFLMDLEGKQGNFKNLREFVFKNIDGYFKIYSKHTPINLVRDLPQGFSALEPLVDLPIGINITRFQTLLALHRSYLTPGDSSSGWTAGAAAYYVGYLQPRTFLLKYNENGTITDAVDCALDPLSETKCTLKSFTVEKGIYQTSNFRVQPTESIVRFPNITNLCPFGEVFNATRFASVYAWNRKRISNCVADYSVLYNSASFSTFKCYGVSPTKLNDLCFTNVYADSFVIRGDEVRQIAPGQTGKIADYNYKLPDDFTGCVIAWNSNNLDSKVGGNYNYLYRLFRKSNLKPFERDISTEIYQAGSTPCNGVEGFNCYFPLQSYGFQPTNGVGYQPYRVVVLSFELLHAPATVCGPKKSTNLVKNKCVNFNFNGLTGTGVLTESNKKFLPFQQFGRDIADTTDAVRDPQTLEILDITPCSFGGVSVITPGTNTSNQVAVLYQDVNCTEVPVAIHADQLTPTWRVYSTGSNVFQTRAGCLIGAEHVNNSYECDIPIGAGICASYQTQTNSPRRARSVASQSIIAYTMSLGAENSVAYSNNSIAIPTNFTISVTTEILPVSMTKTSVDCTMYICGDSTECSNLLLQYGSFCTQLNRALTGIAVEQDKNTQEVFAQVKQIYKTPPIKDFGGFNFSQILPDPSKPSKRSFIEDLLFNKVTLADAGFIKQYGDCLGDIAARDLICAQKFNGLTVLPPLLTDEMIAQYTSALLAGTITSGWWFGAGAALQIPFAMQMAYRFNGIGVTQNVLYENQKLIANQFNSAIGKIQDSLSSTASALGKLQDVVNQNAQALNTLVKQLSSNFGAISSVLNDILSRLDPPEAEVQIDRLITGRLQSLQTYVTQQLIRAAEIRWSANLAATKMSECVLGQSKRVDFCGKGYHLMSFPQSAPHGVVFLHVTYVPAQEKNFTTAPAICHDGKAHFPREGVFVSNGTHWFVTQRNFYEPQIITTDNTFVSGNCDVVIGIVNNTVYDPLQPELDSFKEELDKYFKNHTSPDVDLGDISGINASVVNIQKEIDRLNEVAKNLNESLIDLQELGKYEQYIKGGGGSDIDPYKEFGSSYQLLNFLPLDFFPDLNALVDTATALYEEELTGREHCSPHHTAIRQALVCWDELTKLIAWMSSNITSEQVRTIIVNHVNDTWGLKVRQSLWFHLSCLTFGQHTVQEFLVSFGVWIRTPAPYRPPNAPILSTLPEHTVIC

SEQ ID NO: 6813 - protein, 1365 aa, Artificial Sequence
  SARS-CoV-2/USA/WA-UW292/2020__EPI_ISL_418077 spike protein (1-1211)(K986P_V987P_T887W_A1020W) WhcAg construct
MFVFLVLLPLVSSQCVNLTTRTQLPPAYTNSFTRGVYYPDKVFRSSVLHSTQDLFLPFFSNVTWFHAIHVSGTNGTKRFDNPVLPFNDGVYFASTEKSNIIRGWIFGTTLDSKTQSLLIVNNATNVVIKVCEFQFCNDPFLGVYYHKNNKSWMESEFRVYSSANNCTFEYVSQPFLMDLEGKQGNFKNLREFVFKNIDGYFKIYSKHTPINLVRDLPQGFSALEPLVDLPIGINITRFQTLLALHRSYLTPGDSSSGWTAGAAAYYVGYLQPRTFLLKYNENGTITDAVDCALDPLSETKCTLKSFTVEKGIYQTSNFRVQPTESIVRFPNITNLCPFGEVFNATRFASVYAWNRKRISNCVADYSVLYNSASFSTFKCYGVSPTKLNDLCFTNVYADSFVIRGDEVRQIAPGQTGKIADYNYKLPDDFTGCVIAWNSNNLDSKVGGNYNYLYRLFRKSNLKPFERDISTEIYQASSTPCNGVEGFNCYFPLQSYGFQPTNGVGYQPYRVVVLSFELLHAPATVCGPKKSTNLVKNKCVNFNFNGLTGTGVLTESNKKFLPFQQFGRDIADTTDAVRDPQTLEILDITPCSFGGVSVITPGTNTSNQVAVLYQDVNCTEVPVAIHADQLTPTWRVYSTGSNVFQTRAGCLIGAEHVNNSYECDIPIGAGICASYQTQTNSPRRARSVASQSIIAYTMSLGAENSVAYSNNSIAIPTNFTISVTTEILPVSMTKTSVDCTMYICGDSTECSNLLLQYGSFCTQLNRALTGIAVEQDKNTQEVFAQVKQIYKTPPIKDFGGFNFSQILPDPSKPSKRSFIEDLLFNKVTLADAGFIKQYGDCLGDIAARDLICAQKFNGLTVLPPLLTDEMIAQYTSALLAGTITSGWWFGAGAALQIPFAMQMAYRFNGIGVTQNVLYENQKLIANQFNSAIGKIQDSLSSTASALGKLQDVVNQNAQALNTLVKQLSSNFGAISSVLNDILSRLDPPEAEVQIDRLITGRLQSLQTYVTQQLIRAAEIRWSANLAATKMSECVLGQSKRVDFCGKGYHLMSFPQSAPHGVVFLHVTYVPAQEKNFTTAPAICHDGKAHFPREGVFVSNGTHWFVTQRNFYEPQIITTDNTFVSGNCDVVIGIVNNTVYDPLQPELDSFKEELDKYFKNHTSPDVDLGDISGINASVVNIQKEIDRLNEVAKNLNESLIDLQELGKYEQYIKGGGGSDIDPYKEFGSSYQLLNFLPLDFFPDLNALVDTATALYEEELTGREHCSPHHTAIRQALVCWDELTKLIAWMSSNITSEQVRTIIVNHVNDTWGLKVRQSLWFHLSCLTFGQHTVQEFLVSFGVWIRTPAPYRPPNAPILSTLPEHTVIC

SEQ ID NO: 6814 - protein, 1365 aa, Artificial Sequence
  SARS-CoV-2/Iceland/192/2020__EPI_ISL_417819 spike protein (1-1211)(K986P_V987P_T887W_A1020W) WhcAg construct
MFVFFVLLPLVSSQCVNLTTRTQLPPAYTNSFTRGVYYPDKVFRSSVLHSTQDLFLPFFSNVTWFHAIHVSGTNGTKRFDNPVLPFNDGVYFASTEKSNIIRGWIFGTTLDSKTQSLLIVNNATNVVIKVCEFQFCNDPFLGVYYHKNNKSWMESEFRVYSSANNCTFEYVSQPFLMDLEGKQGNFKNLREFVFKNIDGYFKIYSKHTPINLVRDLPQGFSALEPLVDLPIGINITRFQTLLALHRSYLTPGDSSSGWTAGAAAYYVGYLQPRTFLLKYNENGTITDAVDCALDPLSETKCTLKSFTVEKGIYQTSNFRVQPTESIVRFPNITNLCPFGEVFNATRFASVYAWNRKRISNCVADYSVLYNSASFSTFKCYGVSPTKLNDLCFTNVYADSFVIRGDEVRQIAPGQTGKIADYNYKLPDDFTGCVIAWNSNNLDSKVGGNYNYLYRLFRKSNLKPFERDISTEIYQAGSTPCNGVEGFNCYFPLQSYGFQPTNGVGYQPYRVVVLSFELLHAPATVCGPKKSTNLVKNKCVNFNFNGLTGTGVLTESNKKFLPFQQFGRDIADTTDAVRDPQTLEILDITPCSFGGVSVITPGTNTSNQVAVLYQGVNCTEVPVAIHADQLTPTWRVYSTGSNVFQTRAGCLIGAEHVNNSYECDIPIGAGICASYQTQTNSPRRARSVASQSIIAYTMSLGAENSVAYSNNSIAIPTNFTISVTTEILPVSMTKTSVDCTMYICGDSTECSNLLLQYGSFCTQLNRALTGIAVEQDKNTQEVFAQVKQIYKTPPIKDFGGFNFSQILPDPSKPSKRSFIEDLLFNKVTLADAGFIKQYGDCLGDIAARDLICAQKFNGLTVLPPLLTDEMIAQYTSALLAGTITSGWWFGAGAALQIPFAMQMAYRFNGIGVTQNVLYENQKLIANQFNSAIGKIQDSLSSTASALGKLQDVVNQNAQALNTLVKQLSSNFGAISSVLNDILSRLDPPEAEVQIDRLITGRLQSLQTYVTQQLIRAAEIRWSANLAATKMSECVLGQSKRVDFCGKGYHLMSFPQSAPHGVVFLHVTYVPAQEKNFTTAPAICHDGKAHFPREGVFVSNGTHWFVTQRNFYEPQIITTDNTFVSGNCDVVIGIVNNTVYDPLQPELDSFKEELDKYFKNHTSPDVDLGDISGINASVVNIQKEIDRLNEVAKNLNESLIDLQELGKYEQYIKGGGGSDIDPYKEFGSSYQLLNFLPLDFFPDLNALVDTATALYEEELTGREHCSPHHTAIRQALVCWDELTKLIAWMSSNITSEQVRTIIVNHVNDTWGLKVRQSLWFHLSCLTFGQHTVQEFLVSFGVWIRTPAPYRPPNAPILSTLPEHTVIC

SEQ ID NO: 6815 - protein, 1365 aa, Artificial Sequence
  SARS-CoV-2/Belgium/ULG-6939/2020__EPI_ISL_417020 spike protein (1-1211)(K986P_V987P_T887W_A1020W) WhcAg construct
MFVFLVLLPLVSSQCVNLTTRTQLPPAYTNSFTRGVYYPDKVFRSSVLHSTQDLFLPFFSNVTWFHAIHVSGTNGTKRFDNPVLPFNDGVYFASTEKSNIIRGWIFGTTLDSKTQSLLIVNNATNVVIKVCEFQFCNDPFLGVYYHKNNKSWMESEFRVYSSANNCTFEYVSQPFLMDLEGKQGNFKNLREFVFKNIDGYFKIYSKHTPINLVRDLPQGFSALEPLVDLPIGINITRFQTLLALHRSYLTPGDSSSGWTAGAAAYYVGYLQPRTFLLKYNENGTITDAVDCALDPLSETKCTLKSFTVEKGIYQTSNFRVQPTESIVRFPNITNLCPFGEVFNATRFASVYAWNRKRISNCVADYSVLYNSASFSTFKCYGVSPTKLNDLCFTNVYADSFVIRGDEVRQIAPGQTGKIADYNYKLPDDFTGCVIAWNSNNLDSKVGGNYNYLYRLFRKSNLKPFERDISTEIYQAGSTPCNGVEGFNCYFPLQSYGFQPTNGVGYQPYRVVVLSFELLHAPATVCGPKKSTNLVKNKCVNFNFNGLTGTGVLTESNKKFLPFQQFGRDIADTTDAVRDPQTLEILDITPCSFGGVSVITPGTNTSNQVAVLYQGVNCTEVPVAIHADQLTPTWRVYSTGSNVFQTRAGCLIGAEHVNNSYECDIPIGAGICASYQTQTNSPRRARSVASQSIIAYTMSLGAENSVVYSNNSIAIPTNFTISVTTEILPVSMTKTSVDCTMYICGDSTECSNLLLQYGSFCTQLNRALTGIAVEQDKNTQEVFAQVKQIYKTPPIKDFGGFNFSQILPDPSKPSKRSFIEDLLFNKVTLADAGFIKQYGDCLGDIAARDLICAQKFNGLTVLPPLLTDEMIAQYTSALLAGTITSGWWFGAGAALQIPFAMQMAYRFNGIGVTQNVLYENQKLIANQFNSAIGKIQDSLSSTASALGKLQDVVNQNAQALNTLVKQLSSNFGAISSVLNDILSRLDPPEAEVQIDRLITGRLQSLQTYVTQQLIRAAEIRWSANLAATKMSECVLGQSKRVDFCGKGYHLMSFPQSAPHGVVFLHVTYVPAQEKNFTTAPAICHDGKAHFPREGVFVSNGTHWFVTQRNFYEPQIITTDNTFVSGNCDVVIGIVNNTVYDPLQPELDSFKEELDKYFKNHTSPDVDLGDISGINASVVNIQKEIDRLNEVAKNLNESLIDLQELGKYEQYIKGGGGSDIDPYKEFGSSYQLLNFLPLDFFPDLNALVDTATALYEEELTGREHCSPHHTAIRQALVCWDELTKLIAWMSSNITSEQVRTIIVNHVNDTWGLKVRQSLWFHLSCLTFGQHTVQEFLVSFGVWIRTPAPYRPPNAPILSTLPEHTVIC

SEQ ID NO: 6816 - protein, 1365 aa, Artificial Sequence
  SARS-CoV-2/France/HF2496/2020__EPI_ISL_418231 spike protein (1-1211)(K986P_V987P_T887W_A1020W) WhcAg construct
MFVFLVLLPLVSSQCVNLTTRTQLPPAYTNSFTRGVYYPDKVFRSSVLHSTQDLFLPFFSNVTWFHAIHVSGTNGTKRFDNPVLPFNDGVYFASTEKSNIIRGWIFGTTLDSKTQSLLIVNNATNVVIKVCEFQFCNDPFLGVYYHKNNKSWMESEFRVYSSANNCTFEYVSQPFLMDLEGKQGNFKNLREFVFKNIDGYFKIYSKHTPINLVRDLPQGFSALEPLVDLPIGINITRFQTLLALHRSYLTPGDSSSGWTAGAAAYYVGYLQPRTFLLKYNENGTITDAVDCALDPLSETKCTLKSFTVEKGIYQTSNFRVQPTESIVRFPNITNLCPFGEVFNATRFASVYAWNRKRISNCVADYSVLYNSASFSTFKCYGVSPTKLNDLCFTNVYADSFVIRGDEVRQIAPGQTGKIADYNYKLPDDFTGCVIAWNSNNLDSKVGGNYNYLYRLFRKSNLKPFERDISTEIYQAGSTPCNGVEGFNCYFPLQSYGFQPTNGVGYQPYRVVVLSFELLHAPATVCGPKKSTNLVKNKCVNFNFNGLTGTGVLTESNKKFLPFQQFGRDIADTTDAVRDPQTLEILDITPCSFGGVSVITPGTNTSNQVAVLYQGVNCTEVPVAIHADQLTPTWRVYSTGSNVFQTRAGCLIGAEHVNNSYECDIPIGAGICASYQTQTNSPRRARSVASQSIIAYTMSLGAENSVAYSNNSIAIPTNFTISVTTEILPVSMTKTSVDCTMYICGDSTECSNLLLQYGSFCTQLNRALTGIAVEQDKNTQEVFAQVKQIYKTPPIKDFGGFNFSQILPDPSKPSKRSFIEDLLFNKVTLADAGFIKQYGDCLGDIVARDLICAQKFNGLTVLPPLLTDEMIAQYTSALLAGTITSGWWFGAGAALQIPFAMQMAYRFNGIGVTQNVLYENQKLIANQFNSAIGKIQDSLSSTASALGKLQDVVNQNAQALNTLVKQLSSNFGAISSVLNDILSRLDPPEAEVQIDRLITGRLQSLQTYVTQQLIRAAEIRWSANLAATKMSECVLGQSKRVDFCGKGYHLMSFPQSAPHGVVFLHVTYVPAQEKNFTTAPAICHDGKAHFPREGVFVSNGTHWFVTQRNFYEPQIITTDNTFVSGNCDVVIGIVNNTVYDPLQPELDSFKEELDKYFKNHTSPDVDLGDISGINASVVNIQKEIDRLNEVAKNLNESLIDLQELGKYEQYIKGGGGSDIDPYKEFGSSYQLLNFLPLDFFPDLNALVDTATALYEEELTGREHCSPHHTAIRQALVCWDELTKLIAWMSSNITSEQVRTIIVNHVNDTWGLKVRQSLWFHLSCLTFGQHTVQEFLVSFGVWIRTPAPYRPPNAPILSTLPEHTVIC

SEQ ID NO: 6817 - protein, 1365 aa, Artificial Sequence
  SARS-CoV-2/USA/WA-UW291/2020__EPI_ISL_418076 spike protein (1-1211)(K986P_V987P_T887W_A1020W) WhcAg construct
MFVFLVLLPLVSSQCVNLTTRTQLPPAYTNSFTRGVYYPDKVFRSSVLHSTQDLFLPFFSNVTWFHAIHVSGTNGTKRFDNPVLPFNDGVYFASTEKSNIIRGWIFGTTLDSKTQSLLIVNNATNVVIKVCEFQFCNDPFLGVYYHKNNKSWMESEFRVYSSANNCTFEYVSQPFLMDLEGKQGNFKNLREFVFKNIDGYFKIYSKHTPINLVRDLPQGFSALEPLVDLPIGINITRFQTLLALHRSYLTPGDSSSGWTAGAAAYYVGYLQPRTFLLKYNENGTITDAVDCALDPLSETKCTLKSFTVEKGIYQTSNFRVQPTESIVRFPNITNLCPFGEVFNATRFASVYAWNRKRISNCVADYSVLYNSASFSTFKCYGVSPTKLNDLCFTNVYADSFVIRGDEVRQIAPGQTGKIADYNYKLPDDFTGCVIAWNSNNLDSKVGGNYNYLYRLFRKSNLKPFERDISTEIYQAGSTPCNGVEGFNCYFPLQSYGFQPTNGVGYQPYRVVVLSFELLHAPATVCGPKKSTNLVKNKCVNFNFNGLTGTGVLTESNKKFLPFQQFGRDIADTTDAVRDPQTLEILDITPCSFGGVSVITPGTNTSNQVAVLYQGVNCTEVPVAIHADQLTPTWRVYSTGSNVFQTRAGCLIGAEHVNNSYECDIPIGAGICASYQTQTNSPRRARSVASQSIIAYTMSLGAENSVAYSNNSIAIPTNFTISVTTEILPVSMTKTSVDCTMYICGDSTECSNLLLQYGSFCTQLNRALTGIAVEQDKNTQEVFAQVKQIYKTPPIKDFGGFNFSQILPDPSKPSKRSFIEDLLFNKVTLADAGFIKQYGDCLGDIAARDLICAQKFNGLTVLPPLLTDEMIAQYTSALLAGTITSGWWFGAGAALQIPFAMQMAYRFNGIGVTQNVLYENQKLIANQFNSAIGKIQYSLSSTASALGKLQDVVNQNAQALNTLVKQLSSNFGAISSVLNDILSRLDPPEAEVQIDRLITGRLQSLQTYVTQQLIRAAEIRWSANLAATKMSECVLGQSKRVDFCGKGYHLMSFPQSAPHGVVFLHVTYVPAQEKNFTTAPAICHDGKAHFPREGVFVSNGTHWFVTQRNFYEPQIITTDNTFVSGNCDVVIGIVNNTVYDPLQPELDSFKEELDKYFKNHTSPDVDLGDISGINASVVNIQKEIDRLNEVAKNLNESLIDLQELGKYEQYIKGGGGSDIDPYKEFGSSYQLLNFLPLDFFPDLNALVDTATALYEEELTGREHCSPHHTAIRQALVCWDELTKLIAWMSSNITSEQVRTIIVNHVNDTWGLKVRQSLWFHLSCLTFGQHTVQEFLVSFGVWIRTPAPYRPPNAPILSTLPEHTVIC

SEQ ID NO: 6818 - protein, 1365 aa, Artificial Sequence; identical to SEQ ID NO: 6781
  SARS-CoV-2/Portugal/PT0034/2020__EPI_ISL_418019 spike protein (1-1211)(K986P_V987P_T887W_A1020W) WhcAg construct

SEQ ID NO: 6819 - protein, 1365 aa, Artificial Sequence
  SARS-CoV-2/Iceland/202/2020__EPI_ISL_417750 spike protein (1-1211)(K986P_V987P_T887W_A1020W) WhcAg construct
MFVFLVLLPLVSSQCVNLTTRTQLPPAYTNSFTRGVYYPDKVFRSSVLHSTQDLFLPFFSNVTWFHAIHVSGTNGTKRFDNPVLPFNDGVYFASTEKSNIIRGWIFGTTLDSKTQSLLIVNNATNVVIKVCEFQFCNDPFLGVYYHKNNKSWMESEFRVYSSANNCTFEYVSQPFLMDLEGKQGNFKNLREFVFKNIDGYFKIYSKHTPINLVRDLPQGFSALEPLVDLPIGINITRFQTLLALHRSYLTPGDSSSGWTAGAAAYYVGYLQPRTFLLKYNENGTITDAVDCALDPLSETKCTLKSFTVEKGIYQTSNFRVQPTESIVRFPNITNLCPFGEVFNATRFASVYAWNRKRISNCVADYSVLYNSASFSTFKCYGVSPTKLNDLCFTNVYADSFVIRGDEVRQIAPGQTGKIADYNYKLPDDFTGCVIAWNSNNLDSKVGGNYNYLYRLFRKSNLKPFERDISTEIYQAGSTPCNGVEGFNCYFPLQSYGFQPTNGVGYQPYRVVVLSFELLHAPATVCGPKKSTNLVKNKCVNFNFNGLTGTGVLTESNKKFLPFQQFGRDIADTTDAVRDPQTLEILDITPCSFGGVSVITPGTNTSNQVAVLYQDVNCTEVPVAIHADQLTPTWRVYSTGSNVFQTRAGCLIGAEHVNNSYECDIPIGAGICASYQTQTNSPRRARSVASQSIIAYTMSLGAENSVAYSNNSIAIPTNFTISVTTEILPVSMTKTSVDCTMYICGDSTECSNLLLQYGSFCTQLNRALTGIAVEQDKNTQEVFAQVKQIYKTPPIKDFGGFNFSQILPDPSKPSKRSFIEDLLFNKVTLADAGFIKQYGDCLGDIAARDLICAQKFNGLTVLPPLLTDEMIAQYTSALLAGTITSGWWFGAGAALQIPFAMQMAYRFNGIGVTQNVLYENQKLIANQFNSAIGKIQDSLSSTASALGKLQDVVNQNAQALNTLVKQLSSNFGAISSVLNDILSRLDPPEAEVQIDRLITGRLQSLQTYVTQQLIRAAEIRWSANLAATKMSECVLGQSKRVDFCGKGYHLMSFPQSAPHGVVFLHVTYVPAQEKNFTTAPAICHDGKAHFPREGVFVSNGTHWFVTQRNFYEPQIITTDNTFVSGNCDVVIGIVNNTVYDPLQPELDSFKEELDKYFKNHTSPDVDLGDIPGINASVVNIQKEIDRLNEVAKNLNESLIDLQELGKYEQYIKGGGGSDIDPYKEFGSSYQLLNFLPLDFFPDLNALVDTATALYEEELTGREHCSPHHTAIRQALVCWDELTKLIAWMSSNITSEQVRTIIVNHVNDTWGLKVRQSLWFHLSCLTFGQHTVQEFLVSFGVWIRTPAPYRPPNAPILSTLPEHTVIC

SEQ ID NO: 6820 - protein, 1365 aa, Artificial Sequence
  SARS-CoV-2/USA/WA-UW261/2020__EPI_ISL_418046 spike protein (1-1211)(K986P_V987P_T887W_A1020W) WhcAg construct
MFVFLVLLPLVSSQCVNLTTRTQLPPAYTNSFTRGVYYPDKVFRSSVLHSTQDLFLPFFSNVTWFHAIHVSGTNGTKRFDNPVLPFNDGVYFASTEKSNIIRGWIFGTTLDSKTQSLLIVNNATNVVIKVCEFQFCNDPFLGVYYHKNNKSWMESEFRVYSSANNCTFEYVSQPFLMDLEGKQGNFKNLREFVFKNIDGYFKIYSKHTPINLVRDLPQGFSALEPLVDLPIGINITRFQTLLALHRSYLTPGDSSSGWTAGAAAYYVGYLQPRTFLLKYNENGTITDAVDCALDPLSETKCTLKSFTVEKGIYQTSNFRVQPTESIVRFPNITNLCPFGEVFNATRFTSVYAWNRKRISNCVADYSVLYNSASFSTFKCYGVSPTKLNDLCFTNVYADSFVIRGDEVRQIAPGQTGKIADYNYKLPDDFTGCVIAWNSNNLDSKVGGNYNYLYRLFRKSNLKPFERDISTEIYQAGSTPCNGVEGFNCYFPLQSYGFQPTNGVGYQPYRVVVLSFELLHAPATVCGPKKSTNLVKNKCVNFNFNGLTGTGVLTESNKKFLPFQQFGRDIADTTDAVRDPQTLEILDITPCSFGGVSVITPGTNTSNQVAVLYQDVNCTEVPVAIHADQLTPTWRVYSTGSNVFQTRAGCLIGAEHVNNSYECDIPIGAGICASYQTQTNSPRRARSVASQSIIAYTMSLGAENSVAYSNNSIAIPTNFTISVTTEILPVSMTKTSVDCTMYICGDSTECSNLLLQYGSFCTQLNRALTGIAVEQDKNTQEVFAQVKQIYKTPPIKDFGGFNFSQILPDPSKPSKRSFIEDLLFNKVTLADAGFIKQYGDCLGDIAARDLICAQKFNGLTVLPPLLTDEMIAQYTSALLAGTITSGWWFGAGAALQIPFAMQMAYRFNGIGVTQNVLYENQKLIANQFNSAIGKIQDSLSSTASALGKLQDVVNQNAQALNTLVKQLSSNFGAISSVLNDILSRLDPPEAEVQIDRLITGRLQSLQTYVTQQLIRAAEIRWSANLAATKMSECVLGQSKRVDFCGKGYHLMSFPQSAPHGVVFLHVTYVPAQEKNFTTAPAICHDGKAHFPREGVFVSNGTHWFVTQRNFYEPQIITTDNTFVSGNCDVVIGIVNNTVYDPLQPELDSFKEELDKYFKNHTSPDVDLGDISGINASVVNIQKEIDRLNEVAKNLNESLIDLQELGKYEQYIKGGGGSDIDPYKEFGSSYQLLNFLPLDFFPDLNALVDTATALYEEELTGREHCSPHHTAIRQALVCWDELTKLIAWMSSNITSEQVRTIIVNHVNDTWGLKVRQSLWFHLSCLTFGQHTVQEFLVSFGVWIRTPAPYRPPNAPILSTLPEHTVIC

SEQ ID NO: 6821 - protein, 1365 aa, Artificial Sequence
  SARS-CoV-2/Portugal/PT0035/2020__EPI_ISL_418020 spike protein (1-1211)(K986P_V987P_T887W_A1020W) WhcAg construct
MFVFLVLLPLVSSQCVNLTTRTQLPPAYTNSFTRGVYYPDKVFRSSVLHSTQDLFLPFFSNVTWFHAIHVSGTNGTKRFDNPVLPFNDGVYFASTEKSNIIRGWIFGTTLDSKTQSLLIVNNATNVVIKVCEFQFCNDPFLGVYYHKNNKSWMESEFRVYSSANNCTFEYVSQPFLMDLEGKQGNFKNLREFVFKNIDGYFKIYSKHTPINLVRDLPQGFSALEPLVDLPIGINITRFQTLLALHRSYLTPGDSSSGWTAGAAAYYVGYLQPRTFLLKYNENGTITDAVDCALDPLSETKCTLKSFTVEKGIYQTSNFRVQPTESIVRFPNITNLCPFGEVFNATRFASVYAWNRKRISNCVADYSVLYNSASFSTFKCYGVSPTKLNDLCFTNVYADSFVIRGDEVRQIAPGQTGKIADYNYKLPDDFTGCVIAWNSNNLDSKVGGNYNYLYRLFRKSNLKPFERDISTEIYQAGSTPCNGVEGFNCYFPLQSYGFQPTNGVGYQPYRVVVLSFELLHAPATVCGPKKSTNLVKNKCVNFNFNGLTGTGVLTESNKKFLPFQQFGRDIADTTDAVRDPQTLEILDITPCSFGGVSVITPGTNTSNQVAVLYQDVNCTEVPVAIHADQLTPTWRVYSTGSNVFQTRAGCLIGAEHVNNSYECDIPIGAGICASYQTQTNSPRRARSVASQSIIAYTMSLGAENSVAYSNNSIAIPTNFTISVTTEILPVSMTKTSVDCTMYICGDSTECSNLLLQYGSFCTQLNRALTGIAVEQDKNTQEVFAQVKQIYKTPPIKDFGGFNFSQILPDPSKPSKRSFIEDLLFNKVTLADAGFIKQYGDCLGDISARDLICAQKFNGLTVLPPLLTDEMIAQYTSALLAGTITSGWWFGAGAALQIPFAMQMAYRFNGIGVTQNVLYENQKLIANQFNSAIGKIQDSLSSTASALGKLQDVVNQNAQALNTLVKQLSSNFGAISSVLNDILSRLDPPEAEVQIDRLITGRLQSLQTYVTQQLIRAAEIRWSANLAATKMSECVLGQSKRVDFCGKGYHLMSFPQSAPHGVVFLHVTYVPAQEKNFTTAPAICHDGKAHFPREGVFVSNGTHWFVTQRNFYEPQIITTDNTFVSGNCDVVIGIVNNTVYDPLQPELDSFKEELDKYFKNHTSPDVDLGDISGINASVVNIQKEIDRLNEVAKNLNESLIDLQELGKYEQYIKGGGGSDIDPYKEFGSSYQLLNFLPLDFFPDLNALVDTATALYEEELTGREHCSPHHTAIRQALVCWDELTKLIAWMSSNITSEQVRTIIVNHVNDTWGLKVRQSLWFHLSCLTFGQHTVQEFLVSFGVWIRTPAPYRPPNAPILSTLPEHTVIC

SEQ ID NO: 6822 - protein, 1365 aa, Artificial Sequence
  SARS-CoV-2/USA/NY-NYUMC7/2020__EPI_ISL_418192 spike protein (1-1211)(K986P_V987P_T887W_A1020W) WhcAg construct
MFVFLVLLPLVSSQCVNLTTRTQLPPAYTNSFTRGVYYPDKVFRSSVLHSTQDLFLPFFSNVTWFHAIHVSGTNGTKRFDNPVLPFNDGVYFASTEKSNIIRGWIFGTTLDSKTQSLLIVNNATNVVIKVCEFQFCNDPFLGVYHHKNNKSWMESEFRVYSSANNCTFEYVSQPFLMDLEGKQGNFKNLREFVFKNIDGYFKIYSKHTPINLVRDLPQGFSALEPLVDLPIGINITRFQTLLALHRSYLTPGDSSSGWTAGAAAYYVGYLQPRTFLLKYNENGTITDAVDCALDPLSETKCTLKSFTVEKGIYQTSNFRVQPTESIVRFPNITNLCPFGEVFNATRFASVYAWNRKRISNCVADYSVLYNSASFSTFKCYGVSPTKLNDLCFTNVYADSFVIRGDEVRQIAPGQTGKIADYNYKLPDDFTGCVIAWNSNNLDSKVGGNYNYLYRLFRKSNLKPFERDISTEIYQAGSTPCNGVEGFNCYFPLQSYGFQPTNGVGYQPYRVVVLSFELLHAPATVCGPKKSTNLVKNKCVNFNFNGLTGTGVLTESNKKFLPFQQFGRDIADTTDAVRDPQTLEILDITPCSFGGVSVITPGTNTSNQVAVLYQGVNCTEVPVAIHADQLTPTWRVYSTGSNVFQTRAGCLIGAEHVNNSYECDIPIGAGICASYQTQTNSPRRARSVASQSIIAYTMSLGAENSVAYSNNSIAIPTNFTISVTTEILPVSMTKTSVDCTMYICGDSTECSNLLLQYGSFCTQLNRALTGIAVEQDKNTQEVFAQVKQIYKTPPIKDFGGFNFSQILPDPSKPSKRSFIEDLLFNKVTLADAGFIKQYGDCLGDIAARDLICAQKFNGLTVLPPLLTDEMIAQYTSALLAGTITSGWWFGAGAALQIPFAMQMAYRFNGIGVTQNVLYENQKLIANQFNSAIGKIQDSLSSTASALGKLQDVVNQNAQALNTLVKQLSSNFGAISSVLNDILSRLDPPEAEVQIDRLITGRLQSLQTYVTQQLIRAAEIRWSANLAATKMSECVLGQSKRVDFCGKGYHLMSFPQSAPHGVVFLHVTYVPAQEKNFTTAPAICHDGKAHFPREGVFVSNGTHWFVTQRNFYEPQIITTDNTFVSGNCDVVIGIVNNTVYDPLQPELDSFKEELDKYFKNHTSPDVDLGDISGINASVVNIQKEIDRLNEVAKNLNESLIDLQELGKYEQYIKGGGGSDIDPYKEFGSSYQLLNFLPLDFFPDLNALVDTATALYEEELTGREHCSPHHTAIRQALVCWDELTKLIAWMSSNITSEQVRTIIVNHVNDTWGLKVRQSLWFHLSCLTFGQHTVQEFLVSFGVWIRTPAPYRPPNAPILSTLPEHTVIC

SEQ ID NO: 6823 - protein, 1365 aa, Artificial Sequence
  SARS-CoV-2/Iceland/189/2020__EPI_ISL_417709 spike protein (1-1211)(K986P_V987P_T887W_A1020W) WhcAg construct
MFVFLVLLPLVSSQCVNLTTRTQLPPAYTNSFTRGVYYPDKVFRSSVLHSTQDLFLPFFSNVTWFHAIHVSGTNGTKRFDNPVLPFNDGVYFASTEKSNIIRGWIFGTTLDSKTQSLLIVNNATNVVIKVCEFQFCNDPFLGVYYHKNNKSWMESEFRVYSSANNCTFEYVSQPFLMDLEGKQGNFKNLREFVFKNIDGYFKIYSKHTPINLVRDLPQGFSALEPLVDLPIGINITRFQTLLALHRSYLTPGDSSSGWTAGAAAYYVGYLQPRTFLLKYNENGTITDAVDCALDPLSETKCTLKSFTVEKGIYQTSNFRVQPTESIVRFPNITNLCPFGEVFNATRFASVYAWNRKRISNCVADYSVLYNSASFSTFKCYGVSPTKLNDLCFTNVYADSFVIRGDEVRQIAPGQTGKIADYNYKLPDDFTGCVIAWNSNNLDSKVGGNYNYLYRLFRKSNLKPFERDISTEIYQAGSTPCNGVEGFNCYFPLQSYGFQPTNGVGYQPYRVVVLSFELLHAPATVCGPKKSTNLVKNKCVNFNFNGLTGTGVLTESNKKFLPFQQFGRDIADTTDAVRDPQTLEILDITPCSFGGVSVITPGTNTSNQVAVLYQGVNCTEVPVAIHADQLTPTWRVYSTGSNVFQTRAGCLIGAEHVNNSYECDIPIGAGICASYQTQTNSPRRARSVASQSIIAYTMSLGAENSVAYSNNSIAIPTNFTISVTTEILPVSMTKTSVDCTMYICGDSTECSNLLLQYGSFCTQLNRALTGIAVEQDKNTQEVFAQVKQIYKTPPIKDFGGFNFSQILPDPSKPSKRSFIEDLLFNKVTLADAGFTKQYGDCLGDIAARDLICAQKFNGLTVLPPLLTDEMIAQYTSALLAGTITSGWWFGAGAALQIPFAMQMAYRFNGIGVTQNVLYENQKLIANQFNSAIGKIQDSLSSTASALGKLQDVVNQNAQALNTLVKQLSSNFGAISSVLNDILSRLDPPEAEVQIDRLITGRLQSLQTYVTQQLIRAAEIRWSANLAATKMSECVLGQSKRVDFCGKGYHLMSFPQSAPHGVVFLHVTYVPAQEKNFTTAPAICHDGKAHFPREGVFVSNGTHWFVTQRNFYEPQIITTDNTFVSGNCDVVIGIVNNTVYDPLQPELDSFKEELDKYFKNHTSPDVDLGDISGINASVVNIQKEIDRLNEVAKNLNESLIDLQELGKYEQYIKGGGGSDIDPYKEFGSSYQLLNFLPLDFFPDLNALVDTATALYEEELTGREHCSPHHTAIRQALVCWDELTKLIAWMSSNITSEQVRTIIVNHVNDTWGLKVRQSLWFHLSCLTFGQHTVQEFLVSFGVWIRTPAPYRPPNAPILSTLPEHTVIC

SEQ ID NO: 6824 - protein, 1365 aa, Artificial Sequence
  SARS-CoV-2/Australia/NSW56/2020__EPI_ISL_417408 spike protein (1-1211)(K986P_V987P_T887W_A1020W) WhcAg construct
MFVFLVLLPLVSSQCVNLTTRTQLPPAYTNSFTRGVYYPDKVFRSSVLHSTQDLFLPFFSNVTWFHAIHVSGTNGTKRFDNPVLPFNDGVYFASTEKSNIIRGWIFGTTLDSKTQSLLIVNNATNVVIKVCEFQFCNDPFLGVYYHKNNKSWMESEFRVYSSANNCTFEYVSQPFLMDLEGKQGNFKNLREFVFKNIDGYFKIYSKHTPINLVRDLPQGFSALEPLVDLPIGINITRFQTLLALHRSYLTPGDSSSGWTAGAAAYYVGYLQPRTFLLKYNENGTITDAVDCALDPLSETKCTLKSFTVEKGIYQTSNFRVQPTESIVRFPNITNLCPFGEVFNATRFASVYAWNRKRISNCVADYSVLYNSASFSTFKCYGVSPTKLNDLCFTNVYADSFVIRGDEVRQIAPGQTGKIADYNYKLPDDFTGCVIAWNSNNLDSKVGGNYNYLYRLFRKSNLKPFERDISTEIYQAGSTPCNGVEGFNCYFPLQSYGFQPTNGVGYQPYRVVVLSFELLHAPATVCGPKKSTNLVKNKCVNFNFNGLTGTGVLTESNKKFLPFQQFGRDIADTTDAVRDPQTLEILDITPCSFGGVSVITPGTNTSNQVAVLYQDVNCTEVPVAIHADQLTPTWRVYSTGSNVFQTRAGCLIGAEHVNNSYECDIPIGAGICASYQTQTNSPRRARSVASQSIIAYTMSLGAENSVAYSNNSIAIPTNFTISVTTEILPVSMTKTSVDCTMYICGDSTECSNLLLQYGSFCTQLNRALTGIAVEQDKNTQEVFAQVKQIYKTPPIKDFGGFNFSQILPDSSKPSKRSFIEDLLFNKVTLADAGFIKQYGDCLGDIAARDLICAQKFNGLTVLPPLLTDEMIAQYTSALLAGTITSGWWFGAGAALQIPFAMQMAYRFNGIGVTQNVLYENQKLIANQFNSAIGKIQDSLSSTASALGKLQDVVNQNAQALNTLVKQLSSNFGAISSVLNDILSRLDPPEAEVQIDRLITGRLQSLQTYVTQQLIRAAEIRWSANLAATKMSECVLGQSKRVDFCGKGYHLMSFPQSAPHGVVFLHVTYVPAQEKNFTTAPAICHDGKAHFPREGVFVSNGTHWFVTQRNFYEPQIITTDNTFVSGNCDVVIGIVNNTVYDPLQPELDSFKEELDKYFKNHTSPDVDLGDISGINASVVNIQKEIDRLNEVAKNLNESLIDLQELGKYEQYIKGGGGSDIDPYKEFGSSYQLLNFLPLDFFPDLNALVDTATALYEEELTGREHCSPHHTAIRQALVCWDELTKLIAWMSSNITSEQVRTIIVNHVNDTWGLKVRQSLWFHLSCLTFGQHTVQEFLVSFGVWIRTPAPYRPPNAPILSTLPEHTVIC

SEQ ID NO: 6825 - protein, 1365 aa, Artificial Sequence
  SARS-CoV-2/Iceland/280/2020__EPI_ISL_417608 spike protein (1-1211)(K986P_V987P_T887W_A1020W) WhcAg construct
MFVFLVLLPLVSSQCVNLTTRTQLPPAYTNSFTRGVYYPDKVFRSSVLHSTQDLFLPFFSNVTWFHAIHVSGTNGTKRFDNPVLPFNDGVYFASTEKSNIIRGWIFGTTLDSKTQSLLIVNNATNVVIKVCEFQFCNDPFLGVYYHKNNKSWMESEFRVYSSANNCTFEYVSQPFLMDLEGKQGNFKNLREFVFKNIDGYFKIYSKHTPINLVRDLPQGFSALEPLVDLPIGINITRFQTLLALHRSYLTPGDSSSGWTAGAAAYYVGYLQPRTFLLKYNENGTITDAVDCALDPLSETKCTLKSFTVEKGIYQTSNFRVQPTESIVRFPNITNLCPFGEVFNATRFASVYAWNRKRISNCVADYSVLYNSASFSTFKCYGVSPTKLNDLCFTNVYADSFVIRGDEVRQIAPGQTGKIADYNYKLPDDFTGCVIAWNSNNLDSKVGGNYNYLYRLFRKSNLKPFERDISTEIYQAGSTPCNGVEGFNCYFPLQSYGFQPTNGVGYQPYRVVVLSFELLHAPATVCGPKKSTNLVKNKCVNFNFNGLTGTGVLTESNKKFLPFQQFGRDIADTTDAVRDPQTLEILDITPCSFGGVSVITPGTNTSNQVAVLYQGVNCTEVPVAIHADQLTPTWRVYSTGSNVFQTRAGCLIGAEHVNNSYECDIPIGAGICASYHTQTNSPRRARSVASQSIIAYTMSLGAENSVAYSNNSIAIPTNFTISVTTEILPVSMTKTSVDCTMYICGDSTECSNLLLQYGSFCTQLNRALTGIAVEQDKNTQEVFAQVKQIYKTPPIKDFGGFNFSQILPDPSKPSKRSFIEDLLFNKVTLADAGFIKQYGDCLGDIAARDLICAQKFNGLTVLPPLLTDEMIAQYTSALLAGTITSGWWFGAGAALQIPFAMQMAYRFNGIGVTQNVLYENQKLIANQFNSAIGKIQDSLSSTASALGKLQDVVNQNAQALNTLVKQLSSNFGAISSVLNDILSRLDPPEAEVQIDRLITGRLQSLQTYVTQQLIRAAEIRWSANLAATKMSECVLGQSKRVDFCGKGYHLMSFPQSAPHGVVFLHVTYVPAQEKNFTTAPAICHDGKAHFPREGVFVSNGTHWFVTQRNFYEPQIITTDNTFVSGNCDVVIGIVNNTVYDPLQPELDSFKEELDKYFKNHTSPDVDLGDISGINASVVNIQKEIDRLNEVAKNLNESLIDLQELGKYEQYIKGGGGSDIDPYKEFGSSYQLLNFLPLDFFPDLNALVDTATALYEEELTGREHCSPHHTAIRQALVCWDELTKLIAWMSSNITSEQVRTIIVNHVNDTWGLKVRQSLWFHLSCLTFGQHTVQEFLVSFGVWIRTPAPYRPPNAPILSTLPEHTVIC

SEQ ID NO: 6826 - protein, 1365 aa, Artificial Sequence; identical to SEQ ID NO: 6781
  SARS-CoV-2/Iceland/247/2020__EPI_ISL_417575 spike protein (1-1211)(K986P_V987P_T887W_A1020W) WhcAg construct

SEQ ID NO: 6827 - protein, 1365 aa, Artificial Sequence
  SARS-CoV-2/Iceland/238/2020__EPI_ISL_417566 spike protein (1-1211)(K986P_V987P_T887W_A1020W) WhcAg construct
MFVFLVLLPLVSSQCVNLTTRTQLPPAYTNSFTRGVYYPDKVFRSSVLHSTQDLFLPFFSNVTWFHAIHVSGTNGTKRFDNPVLPFNDGVYFASTEKSNIIRGWIFGTTLDSKTQSLLIVNNATNVVIKVCEFQFCNDPFLGVYYHKNNKSWMESEFRVYSSANNCTFEYVSQPFLMDLEGKQGNFKNLREFVFKNIDGYFKIYSKHTPINLVRDLPQGFSALEPLVDLPIGINITRFQTLLALHRSYLTPGDSSSGWTAGAAAYYVGYLQPRTFLLKYNENGTITDAVDCALDPLSETKCTLKSFTVEKGIYQTSNFRVQPTESIVRFPNITNLCPFGEVFNATRFASVYAWNRKRISNCVADYSVLYNSASFSTFKCYGVSPTKLNDLCFTNVYADSFVIRGDEVRQIAPGQTGKIADYNYKLPDDFTGCVIAWNSNNLDSKVGGNYNYLYRLFRKSNLKPFERDISTEIYQAGSTPCNGVEGFNCYFPLQSYGFQPTNGVGYQPYRVVVLSFELLHAPATVCGPKKSTNLVKNKCVNFNFNGLTGTGVLTESNKKFLPFQQFGRDIADTTDAVRDPQTLEILDITPCSFGGVSVITPGTNTSNQVAVLYQGVNCTEVPVAIHADQLTPTWRVYSTGSNVFQTRAGCLIGAEHVNNSYECDIPIGAGICASYQTQTNSPRRARSVASQSIIAYTMSLGAENSVAYSNNSIAIPTNFTISVTTEILPVSMTKTSVDCTMYICGDSTECSNLLLQYGSFCTQLNRALTGIAVEQDKNTQEVFAQVKQIYKTPPIKDFGGFNFSQILPDPSKPSKRSFIEDLLFNKVTLADVGFIKQYGDCLGDIAARDLICAQKFNGLTVLPPLLTDEMIAQYTSALLAGTITSGWWFGAGAALQIPFAMQMAYRFNGIGVTQNVLYENQKLIANQFNSAIGKIQDSLSSTASALGKLQDVVNQNAQALNTLVKQLSSNFGAISSVLNDILSRLDPPEAEVQIDRLITGRLQSLQTYVTQQLIRAAEIRWSANLAATKMSECVLGQSKRVDFCGKGYHLMSFPQSAPHGVVFLHVTYVPAQEKNFTTAPAICHDGKAHFPREGVFVSNGTHWFVTQRNFYEPQIITTDNTFVSGNCDVVIGIVNNTVYDPLQPELDSFKEELDKYFKNHTSPDVDLGDISGINASVVNIQKEIDRLNEVAKNLNESLIDLQELGKYEQYIKGGGGSDIDPYKEFGSSYQLLNFLPLDFFPDLNALVDTATALYEEELTGREHCSPHHTAIRQALVCWDELTKLIAWMSSNITSEQVRTIIVNHVNDTWGLKVRQSLWFHLSCLTFGQHTVQEFLVSFGVWIRTPAPYRPPNAPILSTLPEHTVIC

SEQ ID NO: 6828 - protein, 1365 aa, Artificial Sequence
  SARS-CoV-2/Greece/16/2020__EPI_ISL_418265 spike protein (1-1211)(K986P_V987P_T887W_A1020W) WhcAg construct
MFVFLVLLPLVSSQCVNLTTRTQLPPAYTNSFTRGVYYPDKVFRSSVLHSTQDLFLPFFSNVTWFHAIHVSGTNGTKRFDNPVLPFNDGVYFASTEKSNIIRGWIFGTTLDSKTQSLLIVNNATNVVIKVCEFQFCNDPFLGVYYHKNNKSWMESEFRVYSSANNCTFEYVSQPFLMDLEGKQGNFKNLREFVFKNVDGYFKIYSKHTPINLVRDLPQGFSALEPLVDLPIGINITRFQTLLALHRSYLTPGDSSSGWTAGAAAYYVGYLQPRTFLLKYNENGTITDAVDCALDPLSETKCTLKSFTVEKGIYQTSNFRVQPTESIVRFPNITNLCPFGEVFNATRFASVYAWNRKRISNCVADYSVLYNSASFSTFKCYGVSPTKLNDLCFTNVYADSFVIRGDEVRQIAPGQTGKIADYNYKLPDDFTGCVIAWNSNNLDSKVGGNYNYLYRLFRKSNLKPFERDISTEIYQAGSTPCNGVEGFNCYFPLQSYGFQPTNGVGYQPYRVVVLSFELLHAPATVCGPKKSTNLVKNKCVNFNFNGLTGTGVLTESNKKFLPFQQFGRDIADTTDAVRDPQTLEILDITPCSFGGVSVITPGTNTSNQVAVLYQDVNCTEVPVAIHADQLTPTWRVYSTGSNVFQTRAGCLIGAEHVNNSYECDIPIGAGICASYQTQTNSPRRARSVASQSIIAYTMSLGAENSVAYSNNSIAIPTNFTISVTTEILPVSMTKTSVDCTMYICGDSTECSNLLLQYGSFCTQLNRALTGIAVEQDKNTQEVFAQVKQIYKTPPIKDFGGFNFSQILPDPSKPSKRSFIEDLLFNKVTLADAGFIKQYGDCLGDIAARDLICAQKFNGLTVLPPLLTDEMIAQYTSALLAGTITSGWWFGAGAALQIPFAMQMAYRFNGIGVTQNVLYENQKLIANQFNSAIGKIQDSLSSTASALGKLQDVVNQNAQALNTLVKQLSSNFGAISSVLNDILSRLDPPEAEVQIDRLITGRLQSLQTYVTQQLIRAAEIRWSANLAATKMSECVLGQSKRVDFCGKGYHLMSFPQSAPHGVVFLHVTYVPAQEKNFTTAPAICHDGKAHFPREGVFVSNGTHWFVTQRNFYEPQIITTDNTFVSGNCDVVIGIVNNTVYDPLQPELDSFKEELDKYFKNHTSPDVDLGDISGINASVVNIQKEIDRLNEVAKNLNESLIDLQELGKYEQYIKGGGGSDIDPYKEFGSSYQLLNFLPLDFFPDLNALVDTATALYEEELTGREHCSPHHTAIRQALVCWDELTKLIAWMSSNITSEQVRTIIVNHVNDTWGLKVRQSLWFHLSCLTFGQHTVQEFLVSFGVWIRTPAPYRPPNAPILSTLPEHTVIC

SEQ ID NO: 6829 - protein, 1365 aa, Artificial Sequence
  SARS-CoV-2/Iceland/319/2020__EPI_ISL_417648 spike protein (1-1211)(K986P_V987P_T887W_A1020W) WhcAg construct
MFVFLVLLPLVSSQCVNLTTRTQLPPAYTNSFTRGVYYPDKVFRSSVLHSTQDLFLPFFSNVTWFHAIHVSGTNGTKRFDNPVLPFNDGVYFASTEKSNIIRGWIFGTTLDSKTQSLLIVNNATNVVIKVCEFQFCNDPFLGVYYHKNNKSWMESEFRVYSSANNCTFEYVSQPFLIDLEGKQGNFKNLREFVFKNIDGYFKIYSKHTPINLVRDLPQGFSALEPLVDLPIGINITRFQTLLALHRSYLTPGDSSSGWTAGAAAYYVGYLQPRTFLLKYNENGTITDAVDCALDPLSETKCTLKSFTVEKGIYQTSNFRVQPTESIVRFPNITNLCPFGEVFNATRFASVYAWNRKRISNCVADYSVLYNSASFSTFKCYGVSPTKLNDLCFTNVYADSFVIRGDEVRQIAPGQTGKIADYNYKLPDDFTGCVIAWNSNNLDSKVGGNYNYLYRLFRKSNLKPFERDISTEIYQAGSTPCNGVEGFNCYFPLQSYGFQPTNGVGYQPYRVVVLSFELLHAPATVCGPKKSTNLVKNKCVNFNFNGLTGTGVLTESNKKFLPFQQFGRDIADTTDAVRDPQTLEILDITPCSFGGVSVITPGTNTSNQVAVLYQGVNCTEVPVAIHADQLTPTWRVYSTGSNVFQTRAGCLIGAEHVNNSYECDIPIGAGICASYQTQTNSPRRARSVASQSIIAYTMSLGAENSVAYSNNSIAIPTNFTISVTTEILPVSMTKTSVDCTMYICGDSTECSNLLLQYGSFCTQLNRALTGIAVEQDKNTQEVFAQVKQIYKTPPIKDFGGFNFSQILPDPSKPSKRSFIEDLLFNKVTLADAGFIKQYGDCLGDIAARDLICAQKFNGLTVLPPLLTDEMIAQYTSALLAGTITSGWWFGAGAALQIPFAMQMAYRFNGIGVTQNVLYENQKLIANQFNSAIGKIQDSLSSTASALGKLQDVVNQNAQALNTLVKQLSSNFGAISSVLNDILSRLDPPEAEVQIDRLITGRLQSLQTYVTQQLIRAAEIRWSANLAATKMSECVLGQSKRVDFCGKGYHLMSFPQSAPHGVVFLHVTYVPAQEKNFTTAPAICHDGKAHFPREGVFVSNGTHWFVTQRNFYEPQIITTDNTFVSGNCDVVIGIVNNTVYDPLQPELDSFKEELDKYFKNHTSPDVDLGDISGINASVVNIQKEIDRLNEVAKNLNESLIDLQELGKYEQYIKGGGGSDIDPYKEFGSSYQLLNFLPLDFFPDLNALVDTATALYEEELTGREHCSPHHTAIRQALVCWDELTKLIAWMSSNITSEQVRTIIVNHVNDTWGLKVRQSLWFHLSCLTFGQHTVQEFLVSFGVWIRTPAPYRPPNAPILSTLPEHTVIC

SEQ ID NO: 6830 - protein, 1365 aa, Artificial Sequence
  SARS-CoV-2/Congo/94/2020__EPI_ISL_417947 spike protein (1-1211)(K986P_V987P_T887W_A1020W) WhcAg construct
MFVFLVLLPLVSSQCVNLTTRTQLPPAYTNSFTRGVYYPDKVFRSSVLHSTQDLFLPFFSNVTWFHAIHVSGTNGTKRFDNPVLPFNDGVYFASTEKSNIIRGWIFGTTLDSKTQSLLIVNNATNVVIKVCEFQFCNDPFLGVYYHKNNKSWMESEFRVYSSANNCTFEYVSQPFLMDLEGKQGNFKNLREFVFKNIDGYFKIYSKHTPINLVRDLPQGFSALEPLVDLPIGINITRFQTLLALHRSYLTPGDSSSGWTAGAAAYYVGYLQPRTFLLKYNENGTITDAVDCALDPLSETKCTLKSFTVEKGIYQTSNFRVQPTESIVRFPNITNLCPFGEVFNATRFASVYAWNRKRISNCVADYSVLYNSASFSTFKCYGVSPTKLNDLCFTNVYADSFVIRGDEVRQIAPGQTGKIADYNYKLPDDFTGCVIAWNSNNLDSKVGGNYNYLYRLFRKSNLKPFERDISTEIYQAGSTPCNGVEGFNCYFPLQSYGFQPTNGVGYQPYRVVVLSFELLHAPATVCGPKKSTNLVKNKCVNFNFNGLTGTGVLTESNKKFLPFQQFGRDIADTTDAVRDPQTLEILDITPCSFGGVSVITPGTNTSNQVAVLYQGVNCTEVPVAIHADQLTPTWRVYSTGSNVFQTRAGCLIGAEHVNNSYECDIPIGAGICASYQTQTNSPRRARSVASQSIIAYTMSLGAENSVAYSNNSIAIPTNFTISVTTEILPVSMTKTSVDCTMYICGDSTECSNLLLQYGSFCTQLNRALTGIAVEQDKNTQEVFAQVKQIYKTPPIKDFGGFNFSQILPDPSKPSKRSFIEDILFNKVTLADAGFIKQYGDCLGDIAARDLICAQKFNGLTVLPPLLTDEMIAQYTSALLAGTITSGWWFGAGAALQIPFAMQMAYRFNGIGVTQNVLYENQKLIANQFNSAIGKIQDSLSSTASALGKLQDVVNQNAQALNTLVKQLSSNFGAISSVLNDILSRLDPPEAEVQIDRLITGRLQSLQTYVTQQLIRAAEIRWSANLAATKMSECVLGQSKRVDFCGKGYHLMSFPQSAPHGVVFLHVTYVPAQEKNFTTAPAICHDGKAHFPREGVFVSNGTHWFVTQRNFYEPQIITTDNTFVSGNCDVVIGIVNNTVYDPLQPELDSFKEELDKYFKNHTSPDVDLGDISGINASVVNIQKEIDRLNEVAKNLNESLIDLQELGKYEQYIKGGGGSDIDPYKEFGSSYQLLNFLPLDFFPDLNALVDTATALYEEELTGREHCSPHHTAIRQALVCWDELTKLIAWMSSNITSEQVRTIIVNHVNDTWGLKVRQSLWFHLSCLTFGQHTVQEFLVSFGVWIRTPAPYRPPNAPILSTLPEHTVIC

SEQ ID NO: 6831 - protein, 1365 aa, Artificial Sequence
  SARS-CoV-2/Congo/158/2020__EPI_ISL_417950 spike protein (1-1211)(K986P_V987P_T887W_A1020W) WhcAg construct
MFVFLVLLPLVSSQCVNLTTRTQLPPAYTNSFTRGVYYPDKVFRSSVLHSTQDLFLPFFSNVTWFHAIHVSGTNGTKRFDNPVLPFNDGVYFASTEKSNIIRGWIFGTTLDSKTQSLLIVNNATNVVIKVCEFQFCNDPFLGVYYHKNNKSWMESEFRVYSSANNCTFEYVSQPFLMDLEGKQGNFKNLREFVFKNIDGYFKIYSKHTPINLVRDLPQGFSALEPLVDLPIGINITRFQTLLALHRSYLTPGDSSSGWTAGAAAYYVGYLQPRTFLLKYNENGTITDAVDCALDPLSETKCTLKSFTVEKGIYQTSNFRVQPTESIVRFPNITNLCPFGEVFNATRFASVYAWNRKRISNCVADYSVLYNSASFSTFKCYGVSPTKLNDLCFTNVYADSFVIRGDEVRQIAPGQTGKIADYNYKLPDDFTGCVIAWNSNNLDSKVGGNYNYLYRLFRKSNLKPFERDISTEIYQAGSTPCNGVEGFNCYFPLQSYGFQPTNGVGYQPYRVVVLSFELLHAPATVCGPKKSTNLVKNKCVNFNFNGLTGTGVLTESNKKFLPFQQFGRDIADTTDAVRDPQTLEILDITPCSFGGVSVITPGTNTSNQVAVLYQDVNCTEVPVAIHADQLTPTWRVYSTGSNVFQTRAGCLIGAEHVNNSYECDIPIGAGICASYQTQTNSPRRARSVASQSIIAYTMSLGAENSVAYSNNSIAIPTNFTISVTTEILPVSMTKTSVDCTMYICGDSTECSNLLLQYGSFCTQLNRALTGIAVEQDKNTQEVFAQVKQIYKTPPIKDFGGFNFSQILPDPSKPSKRSFIEDLLFNKVTLADAGFIKQYGDCLGDIAARDLICAQKFNGLTVLPPLLTDEMIAQYTSALLAGTITSGWWFGAGAALQIPFAMQMAYRFNGIGVTQNVLYENQKLIANQFNSAIGKIQDSLSSTASALGKLQDVVNQNAQALNTLVKQLSSNFGAISSVLNDILSRLDPPEAEVQIDRLITGRLQSLQTYVTQQLIRAAEIRWSANLAATKMSECVLGQSKRVDFCGKGYHLMSFPQSAPHGVVFLHVTYVPAQEKNFTTAPAICHDGKAHFPREGVFVSNGTHWFVTQRNFYEPQIITTDNTFLSGNCDVVIGIVNNTVYDPLQPELDSFKEELDKYFKNHTSPDVDLGDISGINASVVNIQKEIDRLNEVAKNLNESLIDLQELGKYEQYIKGGGGSDIDPYKEFGSSYQLLNFLPLDFFPDLNALVDTATALYEEELTGREHCSPHHTAIRQALVCWDELTKLIAWMSSNITSEQVRTIIVNHVNDTWGLKVRQSLWFHLSCLTFGQHTVQEFLVSFGVWIRTPAPYRPPNAPILSTLPEHTVIC

SEQ ID NO: 6832 - protein, 1365 aa, Artificial Sequence
  SARS-CoV-2/USA/UT-00034/2020__EPI_ISL_417977 spike protein (1-1211)(K986P_V987P_T887W_A1020W) WhcAg construct
MFVFLVLLPLVSSQCVNLTTRTQLPPAYTNSFTRGVYYPDKVFRSSVLHSTQDLFLPFFSNVTWFHAIHVSGTNGTKRFDNPVLPFNDGVYFASTEKSNIIRGWIFGTTLDSKTQSLLIVNNATNVVIKVCEFQFCNDPFLGVYYYKNNKSWMESEFRVYSSANNCTFEYVSQPFLMDLEGKQGNFKNLREFVFKNIDGYFKIYSKHTPINLVRDLPQGFSALEPLVDLPIGINITRFQTLLALHRSYLTPGDSSSGWTAGAAAYYVGYLQPRTFLLKYNENGTITDAVDCALDPLSETKCTLKSFTVEKGIYQTSNFRVQPTESIVRFPNITNLCPFGEVFNATRFASVYAWNRKRISNCVADYSVLYNSASFSTFKCYGVSPTKLNDLCFTNVYADSFVIRGDEVRQIAPGQTGKIADYNYKLPDDFTGCVIAWNSNNLDSKVGGNYNYLYRLFRKSNLKPFERDISTEIYQAGSTPCNGVEGFNCYFPLQSYGFQPTNGVGYQPYRVVVLSFELLHAPATVCGPKKSTNLVKNKCVNFNFNGLTGTGVLTESNKKFLPFQQFGRDIADTTDAVRDPQTLEILDITPCSFGGVSVITPGTNTSNQVAVLYQGVNCTEVPVAIHADQLTPTWRVYSTGSNVFQTRAGCLIGAEHVNNSYECDIPIGAGICASYQTQTNSPRRARSVASQSIIAYTMSLGAENSVAYSNNSIAIPTNFTISVTTEILPVSMTKTSVDCTMYICGDSTECSNLLLQYGSFCTQLNRALTGIAVEQDKNTQEVFAQVKQIYKTPPIKDFGGFNFSQILPDPSKPSKRSFIEDLLFNKVTLADAGFIKQYGDCLGDIAARDLICAQKFNGLTVLPPLLTDEMIAQYTSALLAGTITSGWWFGAGAALQIPFAMQMAYRFNGIGVTQNVLYENQKLIANQFNSAIGKIQDSLSSTASALGKLQDVVNQNAQALNTLVKQLSSNFGAISSVLNDILSRLDPPEAEVQIDRLITGRLQSLQTYVTQQLIRAAEIRWSANLAATKMSECVLGQSKRVDFCGKGYHLMSFPQSAPHGVVFLHVTYVPAQEKNFTTAPAICHDGKAHFPREGVFVSNGTHWFVTQRNFYEPQIITTDNTFVSGNCDVVIGIVNNTVYDPLQPELDSFKEELDKYFKNHTSPDVDLGDISGINASVVNIQKEIDRLNEVAKNLNESLIDLQELGKYEQYIKGGGGSDIDPYKEFGSSYQLLNFLPLDFFPDLNALVDTATALYEEELTGREHCSPHHTAIRQALVCWDELTKLIAWMSSNITSEQVRTIIVNHVNDTWGLKVRQSLWFHLSCLTFGQHTVQEFLVSFGVWIRTPAPYRPPNAPILSTLPEHTVIC

SEQ ID NO: 6833 - protein, 1365 aa, Artificial Sequence
  SARS-CoV-2/USA/UT-00033/2020__EPI_ISL_417976 spike protein (1-1211)(K986P_V987P_T887W_A1020W) WhcAg construct
MFVFLVLLPLVSSQCVNLTTRTQLPPAYTNSFTRGVYYPDKVFRSSVLHSTQDLFLPFFSNVTWFHAIHVSGTNGTKRFDNPVLPFNDGVYFASTEKSNIIRGWIFGTTLDSKTQSLLIVNNATNVVIKVCEFQFCNDPFLGVYYHKNNKSWMESEFRVYSSANNCTFEYVSQPFLMDLEGKQGNFKNLREFVFKNIDGYFKIYSKHTPINLVRDLPQGFSALEPLVDLPIGINITRFQTLLALHRSYLTPGDSSSGLTAGAAAYYVGYLQPRTFLLKYNENGTITDAVDCALDPLSETKCTLKSFTVEKGIYQTSNFRVQPTESIVRFPNITNLCPFGEVFNATRFASVYAWNRKRISNCVADYSVLYNSASFSTFKCYGVSPTKLNDLCFTNVYADSFVIRGDEVRQIAPGQTGKIADYNYKLPDDFTGCVIAWNSNNLDSKVGGNYNYLYRLFRKSNLKPFERDISTEIYQAGSTPCNGVEGFNCYFPLQSYGFQPTNGVGYQPYRVVVLSFELLHAPATVCGPKKSTNLVKNKCVNFNFNGLTGTGVLTESNKKFLPFQQFGRDIADTTDAVRDPQTLEILDITPCSFGGVSVITPGTNTSNQVAVLYQGVNCTEVPVAIHADQLTPTWRVYSTGSNVFQTRAGCLIGAEHVNNSYECDIPIGAGICASYQTQTNSPRRARSVASQSIIAYTMSLGAENSVAYSNNSIAIPTNFTISVTTEILPVSMTKTSVDCTMYICGDSTECSNLLLQYGSFCTQLNRALTGIAVEQDKNTQEVFAQVKQIYKTPPIKDFGGFNFSQILPDPSKPSKRSFIEDLLFNKVTLADAGFIKQYGDCLGDIAARDLICAQKFNGLTVLPPLLTDEMIAQYTSALLAGTITSGWWFGAGAALQIPFAMQMAYRFNGIGVTQNVLYENQKLIANQFNSAIGKIQDSLSSTASALGKLQDVVNQNAQALNTLVKQLSSNFGAISSVLNDILSRLDPPEAEVQIDRLITGRLQSLQTYVTQQLIRAAEIRWSANLAATKMSECVLGQSKRVDFCGKGYHLMSFPQSAPHGVVFLHVTYVPAQEKNFTTAPAICHDGKAHFPREGVFVSNGTHWFVTQRNFYEPQIITTDNTFVSGNCDVVIGIVNNTVYDPLQPELDSFKEELDKYFKNHTSPDVDLGDISGINASVVNIQKEIDRLNEVAKNLNESLIDLQELGKYEQYIKGGGGSDIDPYKEFGSSYQLLNFLPLDFFPDLNALVDTATALYEEELTGREHCSPHHTAIRQALVCWDELTKLIAWMSSNITSEQVRTIIVNHVNDTWGLKVRQSLWFHLSCLTFGQHTVQEFLVSFGVWIRTPAPYRPPNAPILSTLPEHTVIC

SEQ ID NO: 6834 - protein, 1365 aa, Artificial Sequence
  SARS-CoV-2/USA/WI-13/2020__EPI_ISL_417516 spike protein (1-1211)(K986P_V987P_T887W_A1020W) WhcAg construct
MFVFLVLLPLVSSQCVNLTTRTQLPPAYTNSFTRGVYYPDKVFRSSVLHSTQDLFLPFFSNVTWFHAIHVSGTNGTKRFDNPVLPFNDGVYFASTEKSNIIRGWIFGTTLDSKTQSLLIVNNATNVVIKVCEFQFCNDPFLGVYYHKNNKSWMESEFRVYSSANNCTFEYVSQPFLMDLEGKQGNFKNLREFVFKNIDGYFKIYSKHTPINLVRDLPQGFSALEPLVDLPIGINITRFQTLLALHRSYLTPGDSSSGWTAGAAAYYVGYLQPRTFLLKYNENGTITDAVDCALDPLSETKCTLKSFTVEKGIYQTSNFRVLPTESIVRFPNITNLCPFGEVFNATRFASVYAWNRKRISNCVADYSVLYNSASFSTFKCYGVSPTKLNDLCFTNVYADSFVIRGDEVRQIAPGQTGKIADYNYKLPDDFTGCVIAWNSNNLDSKVGGNYNYLYRLFRKSNLKPFERDISTEIYQAGSTPCNGVEGFNCYFPLQSYGFQPTNGVGYQPYRVVVLSFELLHAPATVCGPKKSTNLVKNKCVNFNFNGLTGTGVLTESNKKFLPFQQFGRDIADTTDAVRDPQTLEILDITPCSFGGVSVITPGTNTSNQVAVLYQGVNCTEVPVAIHADQLTPTWRVYSTGSNVFQTRAGCLIGAEHVNNSYECDIPIGAGICASYQTQTNSPRRARSVASQSIIAYTMSLGAENSVAYSNNSIAIPTNFTISVTTEILPVSMTKTSVDCTMYICGDSTECSNLLLQYGSFCTQLNRALTGIAVEQDKNTQEVFAQVKQIYKTPPIKDFGGFNFSQILPDPSKPSKRSFIEDLLFNKVTLADAGFIKQYGDCLGDIAARDLICAQKFNGLTVLPPLLTDEMIAQYTSALLAGTITSGWWFGAGAALQIPFAMQMAYRFNGIGVTQNVLYENQKLIANQFNSAIGKIQDSLSSTASALGKLQDVVNQNAQALNTLVKQLSSNFGAISSVLNDILSRLDPPEAEVQIDRLITGRLQSLQTYVTQQLIRAAEIRWSANLAATKMSECVLGQSKRVDFCGKGYHLMSFPQSAPHGVVFLHVTYVPAQEKNFTTAPAICHDGKAHFPREGVFVSNGTHWFVTQRNFYEPQIITTDNTFVSGNCDVVIGIVNNTVYDPLQPELDSFKEELDKYFKNHTSPDVDLGDISGINASVVNIQKEIDRLNEVAKNLNESLIDLQELGKYEQYIKGGGGSDIDPYKEFGSSYQLLNFLPLDFFPDLNALVDTATALYEEELTGREHCSPHHTAIRQALVCWDELTKLIAWMSSNITSEQVRTIIVNHVNDTWGLKVRQSLWFHLSCLTFGQHTVQEFLVSFGVWIRTPAPYRPPNAPILSTLPEHTVIC

SEQ ID NO: 6835 - protein, 1364 aa, Artificial Sequence
  SARS-CoV-2/India/1-27/2020__EPI_ISL_413522 spike protein (1-1210)(K985P_V986P_T886W_A1019W) WhcAg construct
MFVFLVLLPLVSSQCVNLTTRTQLPPAYTNSFTRGVYYPDKVFRSSVLHSTQDLFLPFFSNVTWFHAIHVSGTNGTKRFDNPVLPFNDGVYFASTEKSNIIRGWIFGTTLDSKTQSLLIVNNATNVVIKVCEFQFCNDPFLGVYHKNNKSWMESEFRVYSSANNCTFEYVSQPFLMDLEGKQGNFKNLREFVFKNIDGYFKIYSKHTPINLVRDLPQGFSALEPLVDLPIGINITRFQTLLALHRSYLTPGDSSSGWTAGAAAYYVGYLQPRTFLLKYNENGTITDAVDCALDPLSETKCTLKSFTVEKGIYQTSNFRVQPTESIVRFPNITNLCPFGEVFNATRFASVYAWNRKRISNCVADYSVLYNSASFSTFKCYGVSPTKLNDLCFTNVYADSFVIRGDEVIQIAPGQTGKIADYNYKLPDDFTGCVIAWNSNNLDSKVGGNYNYLYRLFRKSNLKPFERDISTEIYQAGSTPCNGVEGFNCYFPLQSYGFQPTNGVGYQPYRVVVLSFELLHAPATVCGPKKSTNLVKNKCVNFNFNGLTGTGVLTESNKKFLPFQQFGRDIADTTDAVRDPQTLEILDITPCSFGGVSVITPGTNTSNQVAVLYQDVNCTEVPVAIHADQLTPTWRVYSTGSNVFQTRAGCLIGAEHVNNSYECDIPIGAGICASYQTQTNSPRRARSVASQSIIAYTMSLGAENSVAYSNNSIAIPTNFTISVTTEILPVSMTKTSVDCTMYICGDSTECSNLLLQYGSFCTQLNRALTGIAVEQDKNTQEVFAQVKQIYKTPPIKDFGGFNFSQILPDPSKPSKRSFIEDLLFNKVTLADAGFIKQYGDCLGDIAARDLICAQKFNGLTVLPPLLTDEMIAQYTSALLAGTITSGWWFGAGAALQIPFAMQMAYRFNGIGVTQNVLYENQKLIANQFNSAIGKIQDSLSSTASALGKLQDVVNQNAQALNTLVKQLSSNFGAISSVLNDILSRLDPPEAEVQIDRLITGRLQSLQTYVTQQLIRAAEIRWSANLAATKMSECVLGQSKRVDFCGKGYHLMSFPQSAPHGVVFLHVTYVPAQEKNFTTAPAICHDGKAHFPREGVFVSNGTHWFVTQRNFYEPQIITTDNTFVSGNCDVVIGIVNNTVYDPLQPELDSFKEELDKYFKNHTSPDVDLGDISGINASVVNIQKEIDRLNEVAKNLNESLIDLQELGKYEQYIKGGGGSDIDPYKEFGSSYQLLNFLPLDFFPDLNALVDTATALYEEELTGREHCSPHHTAIRQALVCWDELTKLIAWMSSNITSEQVRTIIVNHVNDTWGLKVRQSLWFHLSCLTFGQHTVQEFLVSFGVWIRTPAPYRPPNAPILSTLPEHTVIC

SEQ ID NO: 6836 - protein, 1359 aa, Artificial Sequence
  SARS-CoV-2/pangolin/Guangxi/P4L/2017__EPI_ISL_410538 spike protein (1-1205)(K980P_V981P_T881W_A1014W) WhcAg construct
MFVFLFVLPLVSSQCVNLTTRTGIPPGYTNSSTRGVYYPDKVFRSSILHLTQDLFLPFFSNVTWFNTINYQGGFKKFDNPVLPFNDGVYFASTEKSNIIRGWIFGTTLDARTQSLLIVNNATNVVIKVCEFQFCTDPFLGVYYHNNNKTWVENEFRVYSSANNCTFEYISQPFLMDLEGKQGNFKNLREFVFKNVDGYFKIYSKHTPIDLVRDLPRGFAALEPLVDLPIGINITRFQTLLALHRSYLTPGNLESGWTTGAAAYYVGYLQQRTFLLSYNQNGTITDAVDCSLDPLSETKCTLKSLTVEKGIYQTSNFRVQPTISIVRFPNITNLCPFGEVFNASKFASVYAWNRKRISNCVADYSVLYNSTSFSTFKCYGVSPTKLNDLCFTNVYADSFVVKGDEVRQIAPGQTGVIADYNYKLPDDFTGCVIAWNSVKQDALTGGNYGYLYRLFRKSKLKPFERDISTEIYQAGSTPCNGQVGLNCYYPLERYGFHPTTGVNYQPFRVVVLSFELLNGPATVCGPKLSTTLVKDKCVNFNFNGLTGTGVLTTSKKQFLPFQQFGRDISDTTDAVRDPQTLEILDITPCSFGGVSVITPGTNTSNQVAVLYQDVNCTEVPMAIHAEQLTPAWRVYSAGANVFQTRAGCLVGAEHVNNSYECDIPVGAGICASYHSMSSLRSVNQRSIIAYTMSLGAENSVAYSNNSIAIPTNFTISVTTEILPVSMTKTSVDCTMYICGDSIECSNLLLQYGSFCTQLNRALTGIAVEQDKNTQEVFAQVKQIYKTPPIKDFGGFNFSQILPDPSKPSKRSFIEDLLFNKVTLADAGFIKQYGDCLGDIAARDLICAQKFNGLTVLPPLLTDEMIAQYTSALLAGTITSGWWFGAGAALQIPFAMQMAYRFNGIGVTQNVLYENQKLIANQFNSAIGKIQDSLSSTASALGKLQDVVNQNAQALNTLVKQLSSNFGAISSVLNDILSRLDPPEAEVQIDRLITGRLQSLQTYVTQQLIRAAEIRWSANLAATKMSECVLGQSKRVDFCGKGYHLMSFPQSAPHGVVFLHVTYVPAQEKNFTTAPAICHEGKAHFPREGVFVSNGTHWFITQRNFYEPQIITTDNTFVSGSCDVVIGIVNNTVYDPLQPELDSFKEELDKYFKNHTSPDVDLGDISGINASVVNIQKEIDRLNEVAKNLNESPIDLQELGKYEQYIKGGGGSDIDPYKEFGSSYQLLNFLPLDFFPDLNALVDTATALYEEELTGREHCSPHHTAIRQALVCWDELTKLIAWMSSNITSEQVRTIIVNHVNDTWGLKVRQSLWFHLSCLTFGQHTVQEFLVSFGVWIRTPAPYRPPNAPILSTLPEHTVIC

SEQ ID NO: 6837 - protein, 1359 aa, Artificial Sequence
  SARS-CoV-2/pangolin/Guangxi/P5L/2017__EPI_ISL_410540 spike protein (1-1205)(K980P_V981P_T881W_A1014W) WhcAg construct
MFVFLFVLPLVSSQCVNLTTRTGIPPGYTNSSTRGVYYPDKVFRSSILHLTQDLFLPFFSNVTWFNTINYQGGFKKFDNPVLPFNDGVYFASTEKSNIIRGWIFGTTLDARTQSLLIVNNATNVVIKVCEFQFCTDPFLGVYYHNNNKTWVENEFRVYSSANNCTFEYISQPFLMDLEGKQGNFKNLREFVFKNVDGYFKIYSKHTPIDLVRDLPRGFAALEPLVDLPIGINITRFQTLLALHRSYLTPGKLESGWTTGAAAYYVGYLQQRTFLLSYNQNGTITDAVDCSLDPLSETKCTLKSLTVEKGIYQTSNFRVQPTISIVRFPNITNLCPFGEVFNASKFASVYAWNRKRISNCVADYSVLYNSTSFSTFKCYGVSPTKLNDLCFTNVYADSFVVKGDEVRQIAPGQTGVIADYNYKLPDDFTGCVIAWNSVKQDALTGGNYGYLYRLFRKSKLKPFERDISTEIYQAGSTPCNGQVGLNCYYPLERYGFHPTTGVNYQPFRVVVLSFELLNGPATVCGPKLSTTLVKDKCVNFNFNGLTGTGVLTTSKKQFLPFQQFGRDISDTTDAVRDPQTLEILDITPCSFGGVSVITPGTNTSNQVAVLYQDVNCTEVPMAIHAEQLTPAWRVYSAGANVFQTRAGCLVGAEHVNNSYECDIPVGAGICASYHSMSSFRSVNQRSIIAYTMSLGAENSVAYSNNSIAIPTNFTISVTTEILPVSMTKTSVDCTMYICGDSIECSNLLLQYGSFCTQLNRALTGIAVEQDKNTQEVFAQVKQIYKTPPIKDFGGFNFSQILPDPSKPSKRSFIEDLLFNKVTLADAGFIKQYGDCLGDIAARDLICAQKFNGLTVLPPLLTDEMIAQYTSALLAGTITSGWWFGAGAALQIPFAMQMAYRFNGIGVTQNVLYENQKLIANQFNSAIGKIQDSLSSTASALGKLQDVVNQNAQALNTLVKQLSSNFGAISSVLNDILSRLDPPEAEVQIDRLITGRLQSLQTYVTQQLIRAAEIRWSANLAATKMSECVLGQSKRVDFCGKGYHLMSFPQSAPHGVVFLHVTYVPAQEKNFTTAPAICHEGKAHFPREGVFVSNGTHWFITQRNFYEPQIITTDNTFVSGSCDVVIGIVNNTVYDPLQPELDSFKEELDKYFKNHTSPDVDLGDISGINASVVNIQKEIDRLNEVAKNLNESLIDLQELGKYEQYIKGGGGSDIDPYKEFGSSYQLLNFLPLDFFPDLNALVDTATALYEEELTGREHCSPHHTAIRQALVCWDELTKLIAWMSSNITSEQVRTIIVNHVNDTWGLKVRQSLWFHLSCLTFGQHTVQEFLVSFGVWIRTPAPYRPPNAPILSTLPEHTVIC

SEQ ID NO: 6838 - protein, 1359 aa, Artificial Sequence
  SARS-CoV-2/pangolin/Guangxi/P5E/2017__EPI_ISL_410541 spike protein (1-1205)(K980P_V981P_T881W_A1014W) WhcAg construct
MFVFLFVLPLVSSQCVNLTTRTGIPPGYTNSSTRGVYYPDKVFRSSILHLTQDLFLPFFSNVTWFNTITYQGGSKKFDNPVLPFNDGVYFASTEKSNIIRGWIFGTTLDARTQSLLIVNNATNVVIKVCEFQFCTDPFLGVYYHNNNKTWVENEFRVYSSANNCTFEYISQPFLMDLEGKQGNFKNLREFVFKNVDGYFKIYSKHTPIDLVRDLPRGFAALEPLVDLPIGINITRFQTLLALHRSYLTPGKLESGWTTGAAAYYVGYLQQRTFLLSYNQNGTITDAVDCSLDPLSETKCTLKSLTVEKGIYQTSNFRVQPTISIVRFPNITNLCPFGEVFNASKFASVYAWNRKRISNCVADYSVLYNSTSFSTFKCYGVSPTKLNDLCFTNVYADSFVVKGDEVRQIAPGQTGVIADYNYKLPDDFTGCVIAWNSVKQDALTGDNYGYLYRLFRKSKLKPFERDISTEIYQAGSTPCNGQVGLNCYYPLERYGFHPTTGVNYQPFRVVVLSFELLNGPATVCGPKLSTTLVKDKCVNFNFNGLTGTGVLTTSKKQFLPFQQFGRDISDTTDAVRDPQTLEILDITPCSFGGVSVITPGTNTSNQVAVLYQDVNCTEVPMAIHAEQLTPAWRVYSAGANVFQTRAGCLVGAEHVNNSYECDIPVGAGICASYHSMSSFRSVNQRSIIAYTMSLGAENSVAYSNNSIAIPTNFTISVTTEILPVSMTKTSVDCTMYICGDSIECSNLLLQYGSFCTQLNRALTGIAVEQDKNTQEVFAQVKQIYKTPPIKDFGGFNFSQILPDPSKPSKRSFIEDLLFNKVTLADAGFIKQYGDCLGDIAARDLICAQKFNGLTVLPPLLTDEMIAQYTSALLAGTITSGWWFGAGAALQIPFAMQMAYRFNGIGVTQNVLYENQKLIANQFNSAIGKIQDSLSSTASALGKLQDVVNQNAQALNTLVKQLSSNFGAISSVLNDILSRLDPPEAEVQIDRLITGRLQSLQTYVTQQLIRAAEIRWSANLAATKMSECVLGQSKRVDFCGKGYHLMSFPQSAPHGVVFLHVTYVPAQEKNFTTAPAICHEGKAHFPREGVFVSNGTHWFITQRNFYEPQIITTDNTFVSGSCDVVIGIVNNTVYDPLQPELDSFKEELDKYFKNHTSPDVDLGDISGINASVVNIQKEIDRLNEVAKNLNESLIDLQELGKYEQYIKGGGGSDIDPYKEFGSSYQLLNFLPLDFFPDLNALVDTATALYEEELTGREHCSPHHTAIRQALVCWDELTKLIAWMSSNITSEQVRTIIVNHVNDTWGLKVRQSLWFHLSCLTFGQHTVQEFLVSFGVWIRTPAPYRPPNAPILSTLPEHTVIC

SEQ ID NO: 6839 - protein, 1357 aa, Artificial Sequence
  SARS-CoV-2/pangolin/Guangxi/P1E/2017__EPI_ISL_410539 spike protein (1-1203)(K978P_V979P_T879W_A1012W) WhcAg construct
MFVFLFVLPLVSSQCVNLTTRTGIQPGYTNSSTRGVYYPDKVFRSSILHLTQDLFLPFFSNVTWFNTINYQGGFKKFDNPVLPFNDGVYFASTEKSNIIRGWIFGTTLDARTQSLLIVNNATNVVIKVCEFQFCTDPFLGVYYHNNNKTWVENEFRVYSSANNCTFEYISQPFLMDLEGKQGNFKNLREFVFKNVDGYFKIYSKHTPIDLVRDLPRGFAALEPLVDLPIGINITRFQTLLALHRSYLTPGKLESGWTTGAAAYYVGYLQQRTFLLSYNQNGTITDAVDCSLDPLSETKCTLKSLTVEKGIYQTSNFRVQPTISIVRFPNITNLCPFGEVFNASKFASVYAWNRKRISNCVADYSVLYNSTSFSTFKCYGVSPTKLNDLCFTNVYADSFVVKGDEVRQIAPGQTGVIADYNYKLPDDFTGCVIAWNSVKQDALTGGNYLYRLFRKSKLKPFERDISTEIYQAGSTPCNGQVGLNCYYPLERYGFHPTTGVNYQPFRVVVLSFELLNGPATVCGPKLSTTLVKDKCVNFNFNGLTGTGVLTTSKKQFLPFQQFGRDISDTTDAVRDPQTLEILDITPCSFGGVSVITPGTNTSNQVAVLYQDVNCTEVPMAIHAEQLTPAWRVYSAGANVFQTRAGCLVGAEHVNNSYECDIPVGAGICASYHSMSSLRSVNQRSIIAYTMSLGAENSVAYSNNSIAIPTNFTISVTTEILPVSMTKTSVDCTMYICGDSIECSNLLLQYGSFCTQLNRALTGIAVEQDKNTQEVFAQVKQIYKTPPIKDFGGFNFSQILPDPSKPSKRSFIEDLLFNKVTLADAGFIKQYGDCLGDIAARDLICAQKFNGLTVLPPLLTDEMIAQYTSALLAGTITSGWWFGAGAALQIPFAMQMAYRFNGIGVTQNVLYENQKLIANQFNSAIGKIQDSLSSTASALGKLQDVVNQNAQALNTLVKQLSSNFGAISSVLNDILSRLDPPEAEVQIDRLITGRLQSLQTYVTQQLIRAAEIRWSANLAATKMSECVLGQSKRVDFCGKGYHLMSFPQSAPHGVVFLHVTYVPAQEKNFTTAPAICHEGKAHFPREGVFVSNGTHWFITQRNFYEPQIITTDNTFVSGSCDVVIGIVNNTVYDPLQPELDSFKEELDKYFKNHTSPDVDLGDISGINASVVNIQKEIDRLNEVAKNLNESLIDLQELGKYEQYIKGGGGSDIDPYKEFGSSYQLLNFLPLDFFPDLNALVDTATALYEEELTGREHCSPHHTAIRQALVCWDELTKLIAWMSSNITSEQVRTIIVNHVNDTWGLKVRQSLWFHLSCLTFGQHTVQEFLVSFGVWIRTPAPYRPPNAPILSTLPEHTVIC

SEQ ID NO: 6840 - protein, 1365 aa, Artificial Sequence
  SARS-CoV-2/Wuhan/WIV05/2019__EPI_ISL_402128 spike protein (1-1211)(K986P_V987P_P1069F) WhcAg construct
MFVFLVLLPLVSSQCVNLTTRTQLPPAYTNSFTRGVYYPDKVFRSSVLHSTQDLFLPFFSNVTWFHAIHVSGTNGTKRFDNPVLPFNDGVYFASTEKSNIIRGWIFGTTLDSKTQSLLIVNNATNVVIKVCEFQFCNDPFLGVYYHKNNKSWMESEFRVYSSANNCTFEYVSQPFLMDLEGKQGNFKNLREFVFKNIDGYFKIYSKHTPINLVRDLPQGFSALEPLVDLPIGINITRFQTLLALHRSYLTPGDSSSGWTAGAAAYYVGYLQPRTFLLKYNENGTITDAVDCALDPLSETKCTLKSFTVEKGIYQTSNFRVQPTESIVRFPNITNLCPFGEVFNATRFASVYAWNRKRISNCVADYSVLYNSASFSTFKCYGVSPTKLNDLCFTNVYADSFVIRGDEVRQIAPGQTGKIADYNYKLPDDFTGCVIAWNSNNLDSKVGGNYNYLYRLFRKSNLKPFERDISTEIYQAGSTPCNGVEGFNCYFPLQSYGFQPTNGVGYQPYRVVVLSFELLHAPATVCGPKKSTNLVKNKCVNFNFNGLTGTGVLTESNKKFLPFQQFGRDIADTTDAVRDPQTLEILDITPCSFGGVSVITPGTNTSNQVAVLYQDVNCTEVPVAIHADQLTPTWRVYSTGSNVFQTRAGCLIGAEHVNNSYECDIPIGAGICASYQTQTNSPRRARSVASQSIIAYTMSLGAENSVAYSNNSIAIPTNFTISVTTEILPVSMTKTSVDCTMYICGDSTECSNLLLQYGSFCTQLNRALTGIAVEQDKNTQEVFAQVKQIYKTPPIKDFGGFNFSQILPDPSKPSKRSFIEDLLFNKVTLADAGFIKQYGDCLGDIAARDLICAQKFNGLTVLPPLLTDEMIAQYTSALLAGTITSGWTFGAGAALQIPFAMQMAYRFNGIGVTQNVLYENQKLIANQFNSAIGKIQDSLSSTASALGKLQDVVNQNAQALNTLVKQLSSNFGAISSVLNDILSRLDPPEAEVQIDRLITGRLQSLQTYVTQQLIRAAEIRASANLAATKMSECVLGQSKRVDFCGKGYHLMSFPQSAPHGVVFLHVTYVFAQEKNFTTAPAICHDGKAHFPREGVFVSNGTHWFVTQRNFYEPQIITTDNTFVSGNCDVVIGIVNNTVYDPLQPELDSFKEELDKYFKNHTSPDVDLGDISGINASVVNIQKEIDRLNEVAKNLNESLIDLQELGKYEQYIKGGGGSDIDPYKEFGSSYQLLNFLPLDFFPDLNALVDTATALYEEELTGREHCSPHHTAIRQALVCWDELTKLIAWMSSNITSEQVRTIIVNHVNDTWGLKVRQSLWFHLSCLTFGQHTVQEFLVSFGVWIRTPAPYRPPNAPILSTLPEHTVIC

SEQ ID NO: 6841 - protein, 1361 aa, Artificial Sequence
  SARS-CoV-2/bat/Yunnan/RaTG13/2013__EPI_ISL_402131 spike protein (1-1207)(K982P_V983P_P1065F) WhcAg construct
MFVFLVLLPLVSSQCVNLTTRTQLPPAYTNSSTRGVYYPDKVFRSSVLHLTQDLFLPFFSNVTWFHAIHVSGTNGIKRFDNPVLPFNDGVYFASTEKSNIIRGWIFGTTLDSKTQSLLIVNNATNVVIKVCEFQFCNDPFLGVYYHKNNKSWMESEFRVYSSANNCTFEYVSQPFLMDLEGKQGNFKNLREFVFKNIDGYFKIYSKHTPINLVRDLPPGFSALEPLVDLPIGINITRFQTLLALHRSYLTPGDSSSGWTAGAAAYYVGYLQPRTFLLKYNENGTITDAVDCALDPLSETKCTLKSFTVEKGIYQTSNFRVQPTDSIVRFPNITNLCPFGEVFNATTFASVYAWNRKRISNCVADYSVLYNSTSFSTFKCYGVSPTKLNDLCFTNVYADSFVITGDEVRQIAPGQTGKIADYNYKLPDDFTGCVIAWNSKHIDAKEGGNFNYLYRLFRKANLKPFERDISTEIYQAGSKPCNGQTGLNCYYPLYRYGFYPTDGVGHQPYRVVVLSFELLNAPATVCGPKKSTNLVKNKCVNFNFNGLTGTGVLTESNKKFLPFQQFGRDIADTTDAVRDPQTLEILDITPCSFGGVSVITPGTNASNQVAVLYQDVNCTEVPVAIHADQLTPTWRVYSTGSNVFQTRAGCLIGAEHVNNSYECDIPIGAGICASYQTQTNSRSVASQSIIAYTMSLGAENSVAYSNNSIAIPTNFTISVTTEILPVSMTKTSVDCTMYICGDSTECSNLLLQYGSFCTQLNRALTGIAVEQDKNTQEVFAQVKQIYKTPPIKDFGGFNFSQILPDPSKPSKRSFIEDLLFNKVTLADAGFIKQYGDCLGDIAARDLICAQKFNGLTVLPPLLTDEMIAQYTSALLAGTITSGWTFGAGAALQIPFAMQMAYRFNGIGVTQNVLYENQKLIANQFNSAIGKIQDSLSSTASALGKLQDVVNQNAQALNTLVKQLSSNFGAISSVLNDILSRLDPPEAEVQIDRLITGRLQSLQTYVTQQLIRAAEIRASANLAATKMSECVLGQSKRVDFCGKGYHLMSFPQSAPHGVVFLHVTYVFAQEKNFTTAPAICHDGKAHFPREGVFVSNGTHWFVTQRNFYEPQIITTDNTFVSGSCDVVIGIVNNTVYDPLQPELDSFKEELDKYFKNHTSPDVDLGDISGINASVVNIQKEIDRLNEVAKNLNESLIDLQELGKYEQYIKGGGGSDIDPYKEFGSSYQLLNFLPLDFFPDLNALVDTATALYEEELTGREHCSPHHTAIRQALVCWDELTKLIAWMSSNITSEQVRTIIVNHVNDTWGLKVRQSLWFHLSCLTFGQHTVQEFLVSFGVWIRTPAPYRPPNAPILSTLPEHTVIC

SEQ ID NO: 6842 - protein, 1365 aa, Artificial Sequence
  SARS-CoV-2/Wuhan/HBCDC-HB-01/2019__EPI_ISL_402132 spike protein (1-1211)(K986P_V987P_P1069F) WhcAg construct
MFVFLVLLPLVSSQCVNLTTRTQLPPAYTNSITRGVYYPDKVFRSSVLHSTQDLFLPFFSNVTWFHAIHVSGTNGTKRFDNPVLPFNDGVYFASTEKSNIIRGWIFGTTLDSKTQSLLIVNNATNVVIKVCEFQFCNDPFLGVYYHKNNKSWMESEFRVYSSANNCTFEYVSQPFLMDLEGKQGNFKNLREFVFKNIDGYFKIYSKHTPINLVRDLPQGFSALEPLVDLPIGINITRFQTLLALHRSYLTPGDSSSGWTAGAAAYYVGYLQPRTFLLKYNENGTITDAVDCALDPLSETKCTLKSFTVEKGIYQTSNFRVQPTESIVRFPNITNLCPFGEVFNATRFASVYAWNRKRISNCVADYSVLYNSASFSTFKCYGVSPTKLNDLCFTNVYADSFVIRGDEVRQIAPGQTGKIADYNYKLPDDFTGCVIAWNSNNLDSKVGGNYNYLYRLFRKSNLKPFERDISTEIYQAGSTPCNGVEGFNCYFPLQSYGFQPTNGVGYQPYRVVVLSFELLHAPATVCGPKKSTNLVKNKCVNFNFNGLTGTGVLTESNKKFLPFQQFGRDIADTTDAVRDPQTLEILDITPCSFGGVSVITPGTNTSNQVAVLYQDVNCTEVPVAIHADQLTPTWRVYSTGSNVFQTRAGCLIGAEHVNNSYECDIPIGAGICASYQTQTNSPRRARSVASQSIIAYTMSLGAENSVAYSNNSIAIPTNFTISVTTEILPVSMTKTSVDCTMYICGDSTECSNLLLQYGSFCTQLNRALTGIAVEQDKNTQEVFAQVKQIYKTPPIKDFGGFNFSQILPDPSKPSKRSFIEDLLFNKVTLADAGFIKQYGDCLGDIAARDLICAQKFNGLTVLPPLLTDEMIAQYTSALLAGTITSGWTFGAGAALQIPFAMQMAYRFNGIGVTQNVLYENQKLIANQFNSAIGKIQDSLSSTASALGKLQDVVNQNAQALNTLVKQLSSNFGAISSVLNDILSRLDPPEAEVQIDRLITGRLQSLQTYVTQQLIRAAEIRASANLAATKMSECVLGQSKRVDFCGKGYHLMSFPQSAPHGVVFLHVTYVFAQEKNFTTAPAICHDGKAHFPREGVFVSNGTHWFVTQRNFYEPQIITTDNTFVSGNCDVVIGIVNNTVYDPLQPELDSFKEELDKYFKNHTSPDVDLGDISGINASVVNIQKEIDRLNEVAKNLNESLIDLQELGKYEQYIKGGGGSDIDPYKEFGSSYQLLNFLPLDFFPDLNALVDTATALYEEELTGREHCSPHHTAIRQALVCWDELTKLIAWMSSNITSEQVRTIIVNHVNDTWGLKVRQSLWFHLSCLTFGQHTVQEFLVSFGVWIRTPAPYRPPNAPILSTLPEHTVIC

SEQ ID NO: 6843 - protein, 1365 aa, Artificial Sequence
  SARS-CoV-2/Guangdong/20SF028/2020__EPI_ISL_403936 spike protein (1-1211)(K986P_V987P_P1069F) WhcAg construct
MFVFLVLLPLVSSQCVNLTTRTQLPPAYTNSFTRGVYYPDKVFRSSVLYSTQDLFLPFFSNVTWFHAIHVSGTNGTKRFDNPVLPFNDGVYFASTEKSNIIRGWIFGTTLDSKTQSLLIVNNATNVVIKVCEFQFCNDPFLGVYYHKNNKSWMESEFRVYSSANNCTFEYVSQPFLMDLEGKQGNFKNLREFVFKNIDGYFKIYSKHTPINLVRDLPQGFSALEPLVDLPIGINITRFQTLLALHRSYLTPGDSSSGWTAGAAAYYVGYLQPRTFLLKYNENGTITDAVDCALDPLSETKCTLKSFTVEKGIYQTSNFRVQPTESIVRFPNITNLCPFGEVFNATRFASVYAWNRKRISNCVADYSVLYNSASFSTFKCYGVSPTKLNDLCFTNVYADSFVIRGDEVRQIAPGQTGKIADYNYKLPDDFTGCVIAWNSNNLDSKVGGNYNYLYRLFRKSNLKPFERDISTEIYQAGSTPCNGVEGFNCYFPLQSYGFQPTNGVGYQPYRVVVLSFELLHAPATVCGPKKSTNLVKNKCVNFNFNGLTGTGVLTESNKKFLPFQQFGRDIADTTDAVRDPQTLEILDITPCSFGGVSVITPGTNTSNQVAVLYQDVNCTEVPVAIHADQLTPTWRVYSTGSNVFQTRAGCLIGAEHVNNSYECDIPIGAGICASYQTQTNSPRRARSVASQSIIAYTMSLGAENSVAYSNNSIAIPTNFTISVTTEILPVSMTKTSVDCTMYICGDSTECSNLLLQYGSFCTQLNRALTGIAVEQDKNTQEVFAQVKQIYKTPPIKDFGGFNFSQILPDPSKPSKRSFIEDLLFNKVTLADAGFIKQYGDCLGDIAARDLICAQKFNGLTVLPPLLTDEMIAQYTSALLAGTITSGWTFGAGAALQIPFAMQMAYRFNGIGVTQNVLYENQKLIANQFNSAIGKIQDSLSSTASALGKLQDVVNQNAQALNTLVKQLSSNFGAISSVLNDILSRLDPPEAEVQIDRLITGRLQSLQTYVTQQLIRAAEIRASANLAATKMSECVLGQSKRVDFCGKGYHLMSFPQSAPHGVVFLHVTYVFAQEKNFTTAPAICHDGKAHFPREGVFVSNGTHWFVTQRNFYEPQIITTDNTFVSGNCDVVIGIVNNTVYDPLQPELDSFKEELDKYFKNHTSPDVDLGDISGINASVVNIQKEIDRLNEVAKNLNESLIDLQELGKYEQYIKGGGGSDIDPYKEFGSSYQLLNFLPLDFFPDLNALVDTATALYEEELTGREHCSPHHTAIRQALVCWDELTKLIAWMSSNITSEQVRTIIVNHVNDTWGLKVRQSLWFHLSCLTFGQHTVQEFLVSFGVWIRTPAPYRPPNAPILSTLPEHTVIC

SEQ ID NO: 6844 - protein, 1365 aa, Artificial Sequence
  SARS-CoV-2/Shenzhen/SZTH-001/2020__EPI_ISL_406592 spike protein (1-1211)(K986P_V987P_P1069F) WhcAg construct
MFVFLVLLPLVSSQCVNLTTRTQLPPAYTNSFTRGVYYPDKVFRSSVLHSTQDLFLPFFSNVTWFHAIHVSGTNGTKRFDNPVLPFNDGVYFASTEKSNIIRGWIFGTTLDSKTQSLLIVNNATNVVIKVCEFQFCNDPFLGVYYHKNNKSWMESEFRVYSSANNCTFEYVSQPFLMDLEGKQGNFKNLREFVFKNIDGYFKIYSKHTPINLVRDLPQGFSALEPLVDLPIGINITRFQTLLALHRSYLTPGDSSSGWTAGAAAYYVGYLQPRTFLLKYNENGTITDAVDCALDPLSETKCTLKSFTVEKGIYQTSNFRVQPTESIVRFPNITNLCPFGEVFNATRFASVYAWNRKRISNCVADYSVLYNSASFSTFKCYGVSPTKLNDLCFTNVYADSFVIRGDEVRQIAPGQTGKIADYNYKLPDDFTGCVIAWNSNNLDSKVGGNYNYLYRLFRKSNLKPFERDISTEIYQAGSTPCNGVEGFNCYFPLQSYGFQPTNGVGYQPYRVVVLSFELLHAPATVCGPKKSTNLVKNKCVNFNFNGLTGTGVLTESNKKFLPFQQFGRDIADTTDAVRDPQTLEILDITPCSFGGVSVITPGTNTSNQVAVLYQDVNCTEVPVAIHADQLTPTWRVYSTGSNVFQTRAGCLIGAEHVNNSYECDIPIGAGICASYQTQTNSPRRARSVASQSIIAYTMSLGAENSVAYSNNSIAIPTNFTISVTTEILPVSMTKTSVDCTMYICGDSTECSNLLLQYGSFCTQLNRALTGIAVEQDKNTQEVFAQVKQIYKTPPIKDFGGFNFSQILPDPSKPSKRSFIEDLLFNKVTLADAGFIKQYGDCLGDIAARDLICAQKFNGLTVLPPLLTDEMIAQYTSALLAGTITSGWTFGAGAALQIPFAMQMAYRFNGIGVTQNVLYENQKLIANQFNSAIGKIQDSLSSTASALGKLQDVVNQNAQALNTLVKQLSSNFGAISSVLNDILSRLDPPEAEVQIDRLITGRLQSLQTYVTQQLIRAAEIRASANLAATKMSECVLGQSKRVDFCGKGYHLMSFPQSAPHGVVFLHVTYVFAQEKNFTTAPAICHDGKAHFPREGVFVSNGTHWFVTQRNFYEPQIITTDNTFVSGNCDVLIGIVNNTVYDPLQPELDSFKEELDKYFKNHTSPDVDLGDISGINASVVNIQKEIDRLNEVAKNLNESLIDLQELGKYEQYIKGGGGSDIDPYKEFGSSYQLLNFLPLDFFPDLNALVDTATALYEEELTGREHCSPHHTAIRQALVCWDELTKLIAWMSSNITSEQVRTIIVNHVNDTWGLKVRQSLWFHLSCLTFGQHTVQEFLVSFGVWIRTPAPYRPPNAPILSTLPEHTVIC

SEQ ID NO: 6845 - protein, 1365 aa, Artificial Sequence
  SARS-CoV-2/Shenzhen/SZTH-004/2020__EPI_ISL_406595 spike protein (1-1211)(K986P_V987P_P1069F) WhcAg construct
MFVFLVLLPLVSSQCVNLTTRTQLPPAYTNSFTRGVYYPDKVFRSSVLHSTQDLFLPFFSNVTWFHAIHVSGTNGTKRFDNPVLPFNDGVYFASTEKSNIIRGWIFGTTLDSKTQSLLIVNNATNVVIKVCEFQFCNDPFLGVYYHKNNKSWMESEFRVYSSANNCTFEYVSQPFLMDLEGKQGNFKNLREFVFKNIDGYFKIYSKHTPINLVRDLPQGFSALEPLVDLPIGINITRFQTLLALHRSYLTPGDSSSGWTAGAAAYYVGYLQPRTFLLKYNENGTITDAVDCALDPLSETKCTLKSFTVEKGIYQTSNFRVQPTESIVRFPNITNLCPFGEVFNATRFASVYAWDRKRISNCVAYYSVLYNSASFSTFKCYGVSPTKLNDLCFTNVYADSFVIRGDEVRQIAPGQTGKIADYNYKLPDDFTGCVIAWNSNNLDSKVGGNYNYLYRLFRKSNLKPFERDISTEIYQAGSTPCNGVEGFNCYFPLQSYGFQPTNGVGYQPYRVVVLSFELLHAPATVCGPKKSTNLVKNKCVNFNFNGLTGTGVLTESNKKFLPFQQFGRDIADTTDAVRDPQTLEILDITPCSFGGVSVITPGTNTSNQVAVLYQDVNCTEVPVAIHADQLTPTWRVYSTGSNVFQTRAGCLIGAEHVNNSYECDIPIGAGICASYQTQTNSPRRARSVASQSIIAYTMSLGAENSVAYSNNSIAIPTNFTISVTTEILPVSMTKTSVDCTMYICGDSTECSNLLLQYGSFCTQLNRALTGIAVEQDKNTQEVFAQVKQIYKTPPIKDFGGFNFSQILPDPSKPSKRSFIEDLLFNKVTLADAGFIKQYGDCLGDIAARDLICAQKFNGLTVLPPLLTDEMIAQYTSALLAGTITSGWTFGAGAALQIPFAMQMAYRFNGIGVTQNVLYENQKLIANQFNSAIGKIQDSLSSTASALGKLQDVVNQNAQALNTLVKQLSSNFGAISSVLNDILSRLDPPEAEVQIDRLITGRLQSLQTYVTQQLIRAAEIRASANLAATKMSECVLGQSKRVDFCGKGYHLMSFPQSAPHGVVFLHVTYVFAQEKNFTTAPAICHDGKAHFPREGVFVSNGTHWFVTQRNFYEPQIITTDNTFVSGNCDVVIGIVNNTVYDPLQPELDSFKEELDKYFKNHTSPDVDLGDISGINASVVNIQKEIDRLNEVAKNLNESLIDLQELGKYEQYIKGGGGSDIDPYKEFGSSYQLLNFLPLDFFPDLNALVDTATALYEEELTGREHCSPHHTAIRQALVCWDELTKLIAWMSSNITSEQVRTIIVNHVNDTWGLKVRQSLWFHLSCLTFGQHTVQEFLVSFGVWIRTPAPYRPPNAPILSTLPEHTVIC

SEQ ID NO: 6846 - protein, 1365 aa, Artificial Sequence
  SARS-CoV-2/France/IDF0372/2020__EPI_ISL_406596 spike protein (1-1211)(K986P_V987P_P1069F) WhcAg construct
MFVFLVLLPLVSSQCVNLTTRTQLPPAYTNSFTRGVYYPDKVFRSSVLHSTQDLFLPFFSNVTWFHAIHVSGTNGTKRFDNPVLPFNDGVYFASTEKSNIIRGWIFGTTLDSKTQSLLIVNNATNVVIKVCEFQFCNDPFLGVYYHKNNKSWMESEFRVYSSANNCTFEYVSQPFLMDLEGKQGNFKNLREFVFKNIDGYFKIYSKHTPINLVRDLPQGFSALEPLVDLPIGINITRFQTLLALHRSYLTPGDSSSGWTAGAAAYYVGYLQPRTFLLKYNENGTITDAVDCALDPLSETKCTLKSFTVEKGIYQTSNFRVQPTESIVRFPNITNLCPFGEVFNATRFASVYAWNRKRISNCVADYSFLYNSASFSTFKCYGVSPTKLNDLCFTNVYADSFVIRGDEVRQIAPGQTGKIADYNYKLPDDFTGCVIAWNSNNLDSKVGGNYNYLYRLFRKSNLKPFERDISTEIYQAGSTPCNGVEGFNCYFPLQSYGFQPTNGVGYQPYRVVVLSFELLHAPATVCGPKKSTNLVKNKCVNFNFNGLTGTGVLTESNKKFLPFQQFGRDIADTTDAVRDPQTLEILDITPCSFGGVSVITPGTNTSNQVAVLYQDVNCTEVPVAIHADQLTPTWRVYSTGSNVFQTRAGCLIGAEHVNNSYECDIPIGAGICASYQTQTNSPRRARSVASQSIIAYTMSLGAENSVAYSNNSIAIPTNFTISVTTEILPVSMTKTSVDCTMYICGDSTECSNLLLQYGSFCTQLNRALTGIAVEQDKNTQEVFAQVKQIYKTPPIKDFGGFNFSQILPDPSKPSKRSFIEDLLFNKVTLADAGFIKQYGDCLGDIAARDLICAQKFNGLTVLPPLLTDEMIAQYTSALLAGTITSGWTFGAGAALQIPFAMQMAYRFNGIGVTQNVLYENQKLIANQFNSAIGKIQDSLSSTASALGKLQDVVNQNAQALNTLVKQLSSNFGAISSVLNDILSRLDPPEAEVQIDRLITGRLQSLQTYVTQQLIRAAEIRASANLAATKMSECVLGQSKRVDFCGKGYHLMSFPQSAPHGVVFLHVTYVFAQEKNFTTAPAICHDGKAHFPREGVFVSNGTHWFVTQRNFYEPQIITTDNTFVSGNCDVVIGIVNNTVYDPLQPELDSFKEELDKYFKNHTSPDVDLGDISGINASVVNIQKEIDRLNEVAKNLNESLIDLQELGKYEQYIKGGGGSDIDPYKEFGSSYQLLNFLPLDFFPDLNALVDTATALYEEELTGREHCSPHHTAIRQALVCWDELTKLIAWMSSNITSEQVRTIIVNHVNDTWGLKVRQSLWFHLSCLTFGQHTVQEFLVSFGVWIRTPAPYRPPNAPILSTLPEHTVIC

SEQ ID NO: 6847 - protein, 1365 aa, Artificial Sequence
  SARS-CoV-2/Australia/VIC01/2020__EPI_ISL_406844 spike protein (1-1211)(K986P_V987P_P1069F) WhcAg construct
MFVFLVLLPLVSSQCVNLTTRTQLPPAYTNSFTRGVYYPDKVFRSSVLHSTQDLFLPFFSNVTWFHAIHVSGTNGTKRFDNPVLPFNDGVYFASTEKSNIIRGWIFGTTLDSKTQSLLIVNNATNVVIKVCEFQFCNDPFLGVYYHKNNKSWMESEFRVYSSANNCTFEYVSQPFLMDLEGKQGNFKNLREFVFKNIDGYFKIYSKHTPINLVRDLPQGFSALEPLVDLPIGINITRFQTLLALHRRYLTPGDSSSGWTAGAAAYYVGYLQPRTFLLKYNENGTITDAVDCALDPLSETKCTLKSFTVEKGIYQTSNFRVQPTESIVRFPNITNLCPFGEVFNATRFASVYAWNRKRISNCVADYSVLYNSASFSTFKCYGVSPTKLNDLCFTNVYADSFVIRGDEVRQIAPGQTGKIADYNYKLPDDFTGCVIAWNSNNLDSKVGGNYNYLYRLFRKSNLKPFERDISTEIYQAGSTPCNGVEGFNCYFPLQSYGFQPTNGVGYQPYRVVVLSFELLHAPATVCGPKKSTNLVKNKCVNFNFNGLTGTGVLTESNKKFLPFQQFGRDIADTTDAVRDPQTLEILDITPCSFGGVSVITPGTNTSNQVAVLYQDVNCTEVPVAIHADQLTPTWRVYSTGSNVFQTRAGCLIGAEHVNNSYECDIPIGAGICASYQTQTNSPRRARSVASQSIIAYTMSLGAENSVAYSNNSIAIPTNFTISVTTEILPVSMTKTSVDCTMYICGDSTECSNLLLQYGSFCTQLNRALTGIAVEQDKNTQEVFAQVKQIYKTPPIKDFGGFNFSQILPDPSKPSKRSFIEDLLFNKVTLADAGFIKQYGDCLGDIAARDLICAQKFNGLTVLPPLLTDEMIAQYTSALLAGTITSGWTFGAGAALQIPFAMQMAYRFNGIGVTQNVLYENQKLIANQFNSAIGKIQDSLSSTASALGKLQDVVNQNAQALNTLVKQLSSNFGAISSVLNDILSRLDPPEAEVQIDRLITGRLQSLQTYVTQQLIRAAEIRASANLAATKMSECVLGQSKRVDFCGKGYHLMSFPQSAPHGVVFLHVTYVFAQEKNFTTAPAICHDGKAHFPREGVFVSNGTHWFVTQRNFYEPQIITTDNTFVSGNCDVVIGIVNNTVYDPLQPELDSFKEELDKYFKNHTSPDVDLGDISGINASVVNIQKEIDRLNEVAKNLNESLIDLQELGKYEQYIKGGGGSDIDPYKEFGSSYQLLNFLPLDFFPDLNALVDTATALYEEELTGREHCSPHHTAIRQALVCWDELTKLIAWMSSNITSEQVRTIIVNHVNDTWGLKVRQSLWFHLSCLTFGQHTVQEFLVSFGVWIRTPAPYRPPNAPILSTLPEHTVIC

SEQ ID NO: 6848 - protein, 1365 aa, Artificial Sequence
  SARS-CoV-2/Germany/BavPat1/2020__EPI_ISL_406862 spike protein (1-1211)(K986P_V987P_P1069F) WhcAg construct
MFVFLVLLPLVSSQCVNLTTRTQLPPAYTNSFTRGVYYPDKVFRSSVLHSTQDLFLPFFSNVTWFHAIHVSGTNGTKRFDNPVLPFNDGVYFASTEKSNIIRGWIFGTTLDSKTQSLLIVNNATNVVIKVCEFQFCNDPFLGVYYHKNNKSWMESEFRVYSSANNCTFEYVSQPFLMDLEGKQGNFKNLREFVFKNIDGYFKIYSKHTPINLVRDLPQGFSALEPLVDLPIGINITRFQTLLALHRSYLTPGDSSSGWTAGAAAYYVGYLQPRTFLLKYNENGTITDAVDCALDPLSETKCTLKSFTVEKGIYQTSNFRVQPTESIVRFPNITNLCPFGEVFNATRFASVYAWNRKRISNCVADYSVLYNSASFSTFKCYGVSPTKLNDLCFTNVYADSFVIRGDEVRQIAPGQTGKIADYNYKLPDDFTGCVIAWNSNNLDSKVGGNYNYLYRLFRKSNLKPFERDISTEIYQAGSTPCNGVEGFNCYFPLQSYGFQPTNGVGYQPYRVVVLSFELLHAPATVCGPKKSTNLVKNKCVNFNFNGLTGTGVLTESNKKFLPFQQFGRDIADTTDAVRDPQTLEILDITPCSFGGVSVITPGTNTSNQVAVLYQGVNCTEVPVAIHADQLTPTWRVYSTGSNVFQTRAGCLIGAEHVNNSYECDIPIGAGICASYQTQTNSPRRARSVASQSIIAYTMSLGAENSVAYSNNSIAIPTNFTISVTTEILPVSMTKTSVDCTMYICGDSTECSNLLLQYGSFCTQLNRALTGIAVEQDKNTQEVFAQVKQIYKTPPIKDFGGFNFSQILPDPSKPSKRSFIEDLLFNKVTLADAGFIKQYGDCLGDIAARDLICAQKFNGLTVLPPLLTDEMIAQYTSALLAGTITSGWTFGAGAALQIPFAMQMAYRFNGIGVTQNVLYENQKLIANQFNSAIGKIQDSLSSTASALGKLQDVVNQNAQALNTLVKQLSSNFGAISSVLNDILSRLDPPEAEVQIDRLITGRLQSLQTYVTQQLIRAAEIRASANLAATKMSECVLGQSKRVDFCGKGYHLMSFPQSAPHGVVFLHVTYVFAQEKNFTTAPAICHDGKAHFPREGVFVSNGTHWFVTQRNFYEPQIITTDNTFVSGNCDVVIGIVNNTVYDPLQPELDSFKEELDKYFKNHTSPDVDLGDISGINASVVNIQKEIDRLNEVAKNLNESLIDLQELGKYEQYIKGGGGSDIDPYKEFGSSYQLLNFLPLDFFPDLNALVDTATALYEEELTGREHCSPHHTAIRQALVCWDELTKLIAWMSSNITSEQVRTIIVNHVNDTWGLKVRQSLWFHLSCLTFGQHTVQEFLVSFGVWIRTPAPYRPPNAPILSTLPEHTVIC

SEQ ID NO: 6849 - protein, 1365 aa, Artificial Sequence
  SARS-CoV-2/Wuhan/HBCDC-HB-02/2020__EPI_ISL_412978 spike protein (1-1211)(K986P_V987P_P1069F) WhcAg construct
MFVFLVLLPLVSSQCVNLTTRTQLPPAYTNSFTRGVYYPDKVFRSSVLHSTQDLFLPFFSNVTWFHAIHVSGTNGTKRFDNPVLPFNDGVYFASTEKSNIIRGWIFGTTLDSKTQSLLIVNNATNVVIKVCEFQFCNDPFLGVYYHKNNKSWMESEFRVYSSANNCTFEYVSQPFLMDLEGKQGNFKNLREFVFKNIDGYFKIYSKHTPINLVRDLPQGFSALEPLVDLPIGINITRFQTLLALHRSYLTPGDSSSGWTAGAAAYYVGYLQPRTFLLKYNENGTITDAVDCALDPLSETKCTLKSFTVEKGIYQTSNFRVQPTESIVRFPNITNLCPFGEVFNATRFASVYAWNRKRISNCVADYSVLYNSASFSTFKCYGVSPTKLNDLCFTNVYADSFVIRGDEVRQIAPGQTGKIADYNYKLPDDFTGCVIAWNSNNLDSKVGGNYNYLYRLFRKSNLKPFERDISTEIYQAGSTPCNGVEGFNCYFPLQSYGFQPTNGVGYQPYRVVVLSFELLHAPATVCGPKKSTNLVKNKCVNFNFNGLTGTGVLTESNKKFLPFQQFGRDIADTTDAVRDPQTLEILDITPCSFGGVSVITPGTNTSNQVAVLYQDVNCTEVPVAIHADQLTPTWRVYSTGSNVFQTRAGCLIGAEHVNNSYECDIPIGAGICASYQTQTNSPRRARSVASQSIIAYTMSLGAENSVAYSNNSIAIPTNFTISVTTEILPVSMTKTSVDCTMYICGDSTECSNFLLQYGSFCTQLNRALTGIAVEQDKNTQEVFAQVKQIYKTPPIKDFGGFNFSQILPDPSKPSKRSFIEDLLFNKVTLADAGFIKQYGDCLGDIAARDLICAQKFNGLTVLPPLLTDEMIAQYTSALLAGTITSGWTFGAGAALQIPFAMQMAYRFNGIGVTQNVLYENQKLIANQFNSAIGKIQDSLSSTASALGKLQDVVNQNAQALNTLVKQLSSNFGAISSVLNDILSRLDPPEAEVQIDRLITGRLQSLQTYVTQQLIRAAEIRASANLAATKMSECVLGQSKRVDFCGKGYHLMSFPQSAPHGVVFLHVTYVFAQEKNFTTAPAICHDGKAHFPREGVFVSNGTHWFVTQRNFYEPQIITTDNTFVSGNCDVVIGIVNNTVYDPLQPELDSFKEELDKYFKNHTSPDVDLGDISGINASVVNIQKEIDRLNEVAKNLNESLIDLQELGKYEQYIKGGGGSDIDPYKEFGSSYQLLNFLPLDFFPDLNALVDTATALYEEELTGREHCSPHHTAIRQALVCWDELTKLIAWMSSNITSEQVRTIIVNHVNDTWGLKVRQSLWFHLSCLTFGQHTVQEFLVSFGVWIRTPAPYRPPNAPILSTLPEHTVIC

SEQ ID NO: 6850 - protein, 1365 aa, Artificial Sequence
  SARS-CoV-2/Australia/QLD02/2020__EPI_ISL_407896 spike protein (1-1211)(K986P_V987P_P1069F) WhcAg construct
MFVFLVLLPLVSSQCVNLTTRTQLPPAYTNSFTRGVYYPDKVFRSSVLHSTQDLFLPFFSNVTWFHAIHVSGTNGTKRFDNPVLPFNDGVYFASTEKSNIIRGWIFGTTLDSKTQSLLIVNNATNVVIKVCEFQFCNDPFLGVYYHKNNKSWMESEFRVYSSANNCTFEYVSQPFLMDLEGKQGNFKNLREFVFKNIDGYFKIYSKHTPINLVRDLPQGFSALEPLVDLPIGINITRFQTLLALHRSYLTPGDSSSGWTAGAAAYYVGYLQPRTFLLKYNENGTITDAVDCALDPLSETKCTLKSFTVEKGIYQTSNFRVQPTESIVRFPNITNLCPFGEVFNATRFASVYAWNRKRISNCVADYSVLYNSASFSTFKCYGVSPTKLNDLCFTNVYADSFVIRGDEVRQIAPGQTGKIADYNYKLPDDFTGCVIAWNSNNLDSKVGGNYNYLYRLFRKSNLKPFERDISTEIYQAGSTPCNGVEGFNCYFPLQSYGFQPTNGVGYQPYRVVVLSFELLHAPATVCGPKKSTNLVKNKCVNFNFNGLTGTGVLTESNKKFLPFQQFGRDIADTTDAVRDPQTLEILDITPCSFGGVSVITPGTNTSNQVAVLYQDVNCTEVPVAIHADQLTPTWRVYSTGSNVFQTRAGCLIGAEHVNNSYECDIPIGAGICASYQTQTNSPRRARSVASQSIIAYTMSLGAENSVAYSNNSIAIPTNFTISVTTEILPVSMTKTSVDCTMYICGDSTECSNLLLQYGSFCTQLNRALTGIAVEQDKNTQEVFAQVKQIYKTPPIKDFGGFNFSQILPDPSKPSKRSFIEDLLFNKVTLADAGFIKQYGDCLGDIAARDLICAQKFNGLTVLPPLLTDEMIAQYTSALLAGTITSGWTFGAGAALQIPFAMQMAYRFNGIGVTQNVLYENQKLIANQFNSAIGKIQDSLSSTASALGKLQDVVNQNAQALNTLVKQLSSNFGAISSVLNDILSRLDPPEAEVQIDRLITGRLQSLQTYVTQQLIRAAEIRASANLAATKMSECVLGQSKRVDFCGKGYHLMSFPQSAPHGVVFLHVTYVFAQEKNFTTAPAICHDGKAHFPREGVFVSNGTHWFVTQRNFYEPQIITTDNTFVSGNCDVVIGIVNNTVYDPLQLELDSFKEELDKYFKNHTSPDVDLGDISGINASVVNIQKEIDRLNEVAKNLNESLIDLQELGKYEQYIKGGGGSDIDPYKEFGSSYQLLNFLPLDFFPDLNALVDTATALYEEELTGREHCSPHHTAIRQALVCWDELTKLIAWMSSNITSEQVRTIIVNHVNDTWGLKVRQSLWFHLSCLTFGQHTVQEFLVSFGVWIRTPAPYRPPNAPILSTLPEHTVIC

SEQ ID NO: 6851 - protein, 1365 aa, Artificial Sequence
  SARS-CoV-2/India/1-31/2020__EPI_ISL_413523 spike protein (1-1211)(K986P_V987P_P1069F) WhcAg construct
MFVFLVLLPLVSSQCVNLTTRTQLPPAYTNSFTRGVYYPDKVFRSSVLHSTQDLFLPFFSNVTWFHAIHVSGTNGTKRFDNPVLPFNDGVYFASTEKSNIIRGWIFGTTLDSKTQSLLIVNNATNVVIKVCEFQFCNDPFLGVYYHKNNKSWMESEFRVYSSANNCTFEYVSQPFLMDLEGKQGNFKNLREFVFKNIDGYFKIYSKHTPINLVRDLPQGFSALEPLVDLPIGINITRFQTLLALHRSYLTPGDSSSGWTAGAAAYYVGYLQPRTFLLKYNENGTITDAVDCALDPLSETKCTLKSFTVEKGIYQTSNFRVQPTESIVRFPNITNLCPFGEVFNATRFASVYAWNRKRISNCVADYSVLYNSASFSTFKCYGVSPTKLNDLCFTNVYADSFVIRGDEVRQIAPGQTGKIADYNYKLPDDFTGCVIAWNSNNLDSKVGGNYNYLYRLFRKSNLKPFERDISTEIYQAGSTPCNGVEGFNCYFPLQSYGFQPTNGVGYQPYRVVVLSFELLHAPATVCGPKKSTNLVKNKCVNFNFNGLTGTGVLTESNKKFLPFQQFGRDIADTTDAVRDPQTLEILDITPCSFGGVSVITPGTNTSNQVAVLYQDVNCTEVPVAIHADQLTPTWRVYSTGSNVFQTRAGCLIGAEHVNNSYECDIPIGAGICASYQTQTNSPRRARSVASQSIIAYTMSLGAENSVAYSNNSIAIPTNFTISVTTEILPVSMTKTSVDCTMYICGDSTECSNLLLQYGSFCTQLNRALTGIAVEQDKNTQEVFAQVKQIYKTPPIKDFGGFNFSQILPDPSKPSKRSFIEDLLFNKVTLADAGFIKQYGDCLGDIAARDLICAQKFNGLTVLPPLLTDEMIAQYTSALLAGTITSGWTFGAGAALQIPFAMQMAYRFNGIGVTQNVLYENQKLIANQFNSVIGKIQDSLSSTASALGKLQDVVNQNAQALNTLVKQLSSNFGAISSVLNDILSRLDPPEAEVQIDRLITGRLQSLQTYVTQQLIRAAEIRASANLAATKMSECVLGQSKRVDFCGKGYHLMSFPQSAPHGVVFLHVTYVFAQEKNFTTAPAICHDGKAHFPREGVFVSNGTHWFVTQRNFYEPQIITTDNTFVSGNCDVVIGIVNNTVYDPLQPELDSFKEELDKYFKNHTSPDVDLGDISGINASVVNIQKEIDRLNEVAKNLNESLIDLQELGKYEQYIKGGGGSDIDPYKEFGSSYQLLNFLPLDFFPDLNALVDTATALYEEELTGREHCSPHHTAIRQALVCWDELTKLIAWMSSNITSEQVRTIIVNHVNDTWGLKVRQSLWFHLSCLTFGQHTVQEFLVSFGVWIRTPAPYRPPNAPILSTLPEHTVIC

SEQ ID NO: 6852 - protein, 1365 aa, Artificial Sequence
  SARS-CoV-2/Guangdong/GD2020087-P0008/2020__EPI_ISL_413863 spike protein (1-1211)(K986P_V987P_P1069F) WhcAg construct
MFVFLVLLPLVSSQCVNLTTRTQLPPAYTNSFTRGVYYPDKVFRSSVLHSTQDLFLPFFSNVTWFHAIHVSGTNGTKRFDNPVLPFNDGVYFASTEKSNIIRGWIFGTTLDSKTQSLLIVNNATNVVIKVCEFQFCNDPFLGVYYHKNNKSWMESEFRVYSSANNCTFEYVSQPFLMDLEGKQGNFKNLREFVFKNIDGYFKIYSKHTPINLVRDLPQGFSALEPLVDLPIGINITRFQTLLALHRSYLTPGDSSSGWTAGAAAYYVGYLQPRTFLLKYNENGTITDAVDCALDPLSETKCTLKSFTVEKGIYQTSNFRVQPTESIVRFPNITNLCPFGEVFNATRFASVYAWNRKRISNCVADYSVLYNSASFSTFKCYGVSPTKLNDLCFTNVYADSFVIRGDEVREIAPGQTGKIADYNYKLPDDFTGCVIAWNSNNLDSKVGGNYNYLYRLFRKSNLKPFERDISTEIYQAGSTPCNGVEGFNCYFPLQSYGFQPTNGVGYQPYRVVVLSFELLHAPATVCGPKKSTNLVKNKCVNFNFNGLTGTGVLTESNKKFLPFQQFGRDIADTTDAVRDPQTLEILDITPCSFGGVSVITPGTNTSNQVAVLYQDVNCTEVPVAIHADQLTPTWRVYSTGSNVFQTRAGCLIGAEHVNNSYECDIPIGAGICASYQTQTNSPRRARSVASQSIIAYTMSLGAENSVAYSNNSIAIPTNFTISVTTEILPVSMTKTSVDCTMYICGDSTECSNLLLQYGSFCTQLNRALTGIAVEQDKNTQEVFAQVKQIYKTPPIKDFGGFNFSQILPDPSKPSKRSFIEDLLFNKVTLADAGFIKQYGDCLGDIAARDLICAQKFNGLTVLPPLLTDEMIAQYTSALLAGTITSGWTFGAGAALQIPFAMQMAYRFNGIGVTQNVLYENQKLIANQFNSAIGKIQDSLSSTASALGKLQDVVNQNAQALNTLVKQLSSNFGAISSVLNDILSRLDPPEAEVQIDRLITGRLQSLQTYVTQQLIRAAEIRASANLAATKMSECVLGQSKRVDFCGKGYHLMSFPQSAPHGVVFLHVTYVFAQEKNFTTAPAICHDGKAHFPREGVFVSNGTHWFVTQRNFYEPQIITTDNTFVSGNCDVVIGIVNNTVYDPLQPELDSFKEELDKYFKNHTSPDVDLGDISGINASVVNIQKEIDRLNEVAKNLNESLIDLQELGKYEQYIKGGGGSDIDPYKEFGSSYQLLNFLPLDFFPDLNALVDTATALYEEELTGREHCSPHHTAIRQALVCWDELTKLIAWMSSNITSEQVRTIIVNHVNDTWGLKVRQSLWFHLSCLTFGQHTVQEFLVSFGVWIRTPAPYRPPNAPILSTLPEHTVIC

SEQ ID NO: 6853 - protein, 1365 aa, Artificial Sequence
  SARS-CoV-2/Sweden/01/2020__EPI_ISL_411951 spike protein (1-1211)(K986P_V987P_P1069F) WhcAg construct
MFVFLVLLPLVSSQCVNLTTRTQLPPAYTNSFTRGVYYPDKVFRSSVLHSTQDLFLPFFSNVTWFHAIHVSGTNGTKRFDNPVLPFNDGVYFASTEKSNIIRGWIFGTTLDSKTQSLLIVNNATNVVIKVCEFQFCNDPFLGVYYHKNNKSWMESEFRVYSSANNCTFEYVSQPFLMDLEGKQGNFKNLREFVFKNIDGYFKIYSKHTPINLVRDLPQGFSALEPLVDLPIGINITRFQTLLALHRSYLTPGDSSSGWTAGAAAYYVGYLQPRTFLLKYNENGTITDAVDCALDPLSETKCTLKSFTVEKGIYQTSNFRVQPTESIVRFPNITNLCPFGEVFNATRFASVYAWNRKRISNCVADYSVLYNSASFSTFKCYGVSPTKLNDLCFTNVYADSFVIRGDEVRQIAPGQTGKIADYNYKLPDDFTGCVIAWNSNNLDSKVGGNYNYLYRLFRKSNLKPFERDISTEIYQAGSTPCNGVEGFNCYFPLQSYGFQPTNGVGYQPYRVVVLSFELLHAPATVCGPKKSTNLVKNKCVNFNFNGLTGTGVLTESNKKFLPFQQFGRDIADTTDAVRDPQTLEILDITPCSFGGVSVITPGTNTSNQVAVLYQDVNCTEVPVAIHADQLTPTWRVYSTGSNVFQTRAGCLIGAEHVNNSYECDIPIGAGICASYQTQTNSPRRARSVASQSIIAYTMSLGAENSVAYSNNSIAIPTNFTISVTTEILPVSMTKTSVDCTMYICGDSTECSNLLLQYGSFCTQLNRALTGIAVEQDKNTQEVFAQVKQIYKTPPIKDCGGFNFSQILPDPSKPSKRSFIEDLLFNKVTLADAGFIKQYGDCLGDIAARDLICAQKFNGLTVLPPLLTDEMIAQYTSALLAGTITSGWTFGAGAALQIPFAMQMAYRFNGIGVTQNVLYENQKLIANQFNSAIGKIQDSLSSTASALGKLQDVVNQNAQALNTLVKQLSSNFGAISSVLNDILSRLDPPEAEVQIDRLITGRLQSLQTYVTQQLIRAAEIRASANLAATKMSECVLGQSKRVDFCGKGYHLMSFPQSAPHGVVFLHVTYVFAQEKNFTTAPAICHDGKAHFPREGVFVSNGTHWFVTQRNFYEPQIITTDNTFVSGNCDVVIGIVNNTVYDPLQPELDSFKEELDKYFKNHTSPDVDLGDISGINASVVNIQKEIDRLNEVAKNLNESLIDLQELGKYEQYIKGGGGSDIDPYKEFGSSYQLLNFLPLDFFPDLNALVDTATALYEEELTGREHCSPHHTAIRQALVCWDELTKLIAWMSSNITSEQVRTIIVNHVNDTWGLKVRQSLWFHLSCLTFGQHTVQEFLVSFGVWIRTPAPYRPPNAPILSTLPEHTVIC

SEQ ID NO: 6854 - protein, 1365 aa, Artificial Sequence
  SARS-CoV-2/Tianmen/HBCDC-HB-07/2020__EPI_ISL_412983 spike protein (1-1211)(K986P_V987P_P1069F) WhcAg construct
MFVFLVLLPLVSSQCVNLTTRTQLPPAYTNSFTRGVYYPDKVFRSSVLHSTQDLFLPFFSNVTWFHAIHVSGTNGTKRFDNPVLPFNDGVYFASTEKSNIIRGWIFGTTLDSKTQSLLIVNNATNVVIKVCEFQFCNDPFLGVYYHKNNKSWMESEFRVYSSANNCTFEYVSQPFLMDLEGKQGNFKNLREFVFKNIDGYFKIYSKHTPINLVRDLPQGFSALEPLVDLPIGINITRFQTLLALHRSYLTPGDSSSGWTAGAAAYYVGYLQPRTFLLKYNENGTITDAVDCALDPLSETKCTLKSFTVEKGIYQTSNFRVQPTESIVRFPNITNLCPFGEVFNATRFASVYAWNRKRISNCVADYSVLYNSASFSTFKCYGVSPTKLNDLCFTNVYADSFVIRGDEVRQIAPGQTGKIADYNYKLPDDFTGCVIAWNSNNLDSKVGGNYNYLYRLFRKSNLKPFERDISTEIYQAGSTPCNGVEGFNCYFPLQSYGFQPTNGVGYQPYRVVVLSFELLHAPATVCGPKKSTNLVKNKCVNFNFNGLTGTGVLTESNKKFLPFQQFGRDIADTTDAVRDPQTLEILDITPCSFGGVSVITPGTNTSNQVAVLYQDLNCTEVPVAIHADQLTPTWRVYSTGSNVFQTRAGCLIGAEHVNNSYECDIPIGAGICASYQTQTNSPRRARSVASQSIIAYTMSLGAENSVAYSNNSIAIPTNFTISVTTEILPVSMTKTSVDCTMYICGDSTECSNLLLQYGSFCTQLNRALTGIAVEQDKNTQEVFAQVKQIYKTPPIKDFGGFNFSQILPDPSKPSKRSFIEDLLFNKVTLADAGFIKQYGDCLGDIAARDLICAQKFNGLTVLPPLLTDEMIAQYTSALLAGTITSGWTFGAGAALQIPFAMQMAYRFNGIGVTQNVLYENQKLIANQFNSAIGKIQDSLSSTASALGKLQDVVNQNAQALNTLVKQLSSNFGAISSVLNDILSRLDPPEAEVQIDRLITGRLQSLQTYVTQQLIRAAEIRASANLAATKMSECVLGQSKRVDFCGKGYHLMSFPQSAPHGVVFLHVTYVFAQEKNFTTAPAICHDGKAHFPREGVFVSNGTHWFVTQRNFYEPQIITTDNTFVSGNCDVVIGIVNNTVYDPLQPELDSFKEELDKYFKNHTSPDVDLGDISGINASVVNIQKEIDRLNEVAKNLNESLIDLQELGKYEQYIKGGGGSDIDPYKEFGSSYQLLNFLPLDFFPDLNALVDTATALYEEELTGREHCSPHHTAIRQALVCWDELTKLIAWMSSNITSEQVRTIIVNHVNDTWGLKVRQSLWFHLSCLTFGQHTVQEFLVSFGVWIRTPAPYRPPNAPILSTLPEHTVIC

SEQ ID NO: 6855 - protein, 1365 aa, Artificial Sequence
  SARS-CoV-2/Hong Kong/case42_VM20002493/2020__EPI_ISL_414527 spike protein (1-1211)(K986P_V987P_P1069F) WhcAg construct
MFVFLVLLPLVSSQCVNLTTRTQLPPAYTNSFTRGVYYPDKVFRSSVLHSTQDLFLPFFSNVTWFHAIHVSGTNGTKRFDNPVLPFNDGVYFASTEKSNIIRGWIFGTTLDSKTQSLLIVNNATNVVIKVCEFQFCNDPFLGVYYHKNNKSWMESEFRVYSSANNCTFEYVSQPFLMDLEGKQGNFKNLREFVFKNIDGYFKIYSKHTPINLVRDLPQGFSALEPLVDLPIGINITRFQTLLALHRSYLTPGDSSSGWTAGAAAYYVGYLQPRTFLLKYNENGTITDAVDCALDPLSETKCTLKSFTVEKGIYQTSNFRVQPTESIVRFPNITNLCPFGEVFNATRFASVYAWNRKRISNCVADYSVLYNSASFSTFKCYGVSPTKLNDLCFTNVYADSFVIRGDEVRQIAPGQTGKIADYNYKLPDDFTGCVIAWNSNNLDSKVGGNYNYLYRLFRKSNLKPFERDISTEIYQAGSTPCNGVEGFNCYFPLQSYGFQPTNGVGYQPYRVVVLSFELLHAPATVCGPKKSTNLVKNKCVNFNFNGLTGTGVLTESNKKFLPFQQFGRDIADTTDAVRDPQTLEILDITPCSFGGVSVITPGTNTSNQVAVLYQDVNCTEVPVAIHADQLTPTWRVYSTGSNVFQTRAGCLIGAEHVNNSYECDIPIGAGICASYQTQTNSPRRARSVASQSIIAYTMSLGAENSVAYSNNSIAIPTNFAISVTTEILPVSMTKTSVDCTMYICGDSTECSNLLLQYGSFCTQLNRALTGIAVEQDKNTQEVFAQVKQIYKTPPIKDFGGFNFSQILPDPSKPSKRSFIEDLLFNKVTLADAGFIKQYGDCLGDIAARDLICAQKFNGLTVLPPLLTDEMIAQYTSALLAGTITSGWTFGAGAALQIPFAMQMAYRFNGIGVTQNVLYENQKLIANQFNSAIGKIQDSLSSTASALGKLQDVVNQNAQALNTLVKQLSSNFGAISSVLNDILSRLDPPEAEVQIDRLITGRLQSLQTYVTQQLIRAAEIRASANLAATKMSECVLGQSKRVDFCGKGYHLMSFPQSAPHGVVFLHVTYVFAQEKNFTTAPAICHDGKAHFPREGVFVSNGTHWFVTQRNFYEPQIITTDNTFVSGNCDVVIGIVNNTVYDPLQPELDSFKEELDKYFKNHTSPDVDLGDISGINASVVNIQKEIDRLNEVAKNLNESLIDLQELGKYEQYIKGGGGSDIDPYKEFGSSYQLLNFLPLDFFPDLNALVDTATALYEEELTGREHCSPHHTAIRQALVCWDELTKLIAWMSSNITSEQVRTIIVNHVNDTWGLKVRQSLWFHLSCLTFGQHTVQEFLVSFGVWIRTPAPYRPPNAPILSTLPEHTVIC

SEQ ID NO: 6856 - protein, 1365 aa, Artificial Sequence
  SARS-CoV-2/USA/CruiseA-23/2020__EPI_ISL_414482 spike protein (1-1211)(K986P_V987P_P1069F) WhcAg construct
MFVFLVLLPLVSSQCVNLTTRTQLPPAYTNSFTRGVYYPDKVFRSSVLHSTQDLFLPFFSNVTWFHAIHVSGTNGTKRFDNPVLPFNDGVYFASTEKSNIIRGWIFGTTLDSKTQSLLIVNNATNVVIKVCEFQFCNDPFLGVYYHKNNKSWMESEFRVYSSANNCTFEYVSQPFLMDLEVKQGNFKNLREFVFKNIDGYFKIYSKHTPINLVRDLPQGFSALEPLVDLPIGINITRFQTLLALHRSYLTPGDSSSGWTAGAAAYYVGYLQPRTFLLKYNENGTITDAVDCALDPLSETKCTLKSFTVEKGIYQTSNFRVQPTESIVRFPNITNLCPFGEVFNATRFASVYAWNRKRISNCVADYSVLYNSASFSTFKCYGVSPTKLNDLCFTNVYADSFVIRGDEVRQIAPGQTGKIADYNYKLPDDFTGCVIAWNSNNLDSKVGGNYNYLYRLFRKSNLKPFERDISTEIYQAGSTPCNGVEGFNCYFPLQSYGFQPTNGVGYQPYRVVVLSFELLHAPATVCGPKKSTNLVKNKCVNFNFNGLTGTGVLTESNKKFLPFQQFGRDIADTTDAVRDPQTLEILDITPCSFGGVSVITPGTNTSNQVAVLYQDVNCTEVPVAIHADQLTPTWRVYSTGSNVFQTRAGCLIGAEHVNNSYECDIPIGAGICASYQTQTNSPRRARSVASQSIIAYTMSLGAENSVAYSNNSIAIPTNFTISVTTEILPVSMTKTSVDCTMYICGDSTECSNLLLQYGSFCTQLNRALTGIAVEQDKNTQEVFAQVKQIYKTPPIKDFGGFNFSQILPDPSKPSKRSFIEDLLFNKVTLADAGFIKQYGDCLGDIAARDLICAQKFNGLTVLPPLLTDEMIAQYTSALLAGTITSGWTFGAGAALQIPFAMQMAYRFNGIGVTQNVLYENQKLIANQFNSAIGKIQDSLSSTASALGKLQDVVNQNAQALNTLVKQLSSNFGAISSVLNDILSRLDPPEAEVQIDRLITGRLQSLQTYVTQQLIRAAEIRASANLAATKMSECVLGQSKRVDFCGKGYHLMSFPQSAPHGVVFLHVTYVFAQEKNFTTAPAICHDGKAHFPREGVFVSNGTHWFVTQRNFYEPQIITTDNTFVSGNCDVVIGIVNNTVYDPLQPELDSFKEELDKYFKNHTSPDVDLGDISGINASVVNIQKEIDRLNEVAKNLNESLIDLQELGKYEQYIKGGGGSDIDPYKEFGSSYQLLNFLPLDFFPDLNALVDTATALYEEELTGREHCSPHHTAIRQALVCWDELTKLIAWMSSNITSEQVRTIIVNHVNDTWGLKVRQSLWFHLSCLTFGQHTVQEFLVSFGVWIRTPAPYRPPNAPILSTLPEHTVIC

SEQ ID NO: 6857 - protein, 1365 aa, Artificial Sequence
  SARS-CoV-2/Hong Kong/case85_VM20002868/2020__EPI_ISL_414519 spike protein (1-1211)(K986P_V987P_P1069F) WhcAg construct
MFVFLVLVPLVSSQCVNLTTRTQLPPAYTNSFTRGVYYPDKVFRSSVLHSTQDLFLPFFSNVTWFHAIHVSGTNGTKRFDNPVLPFNDGVYFASTEKSNIIRGWIFGTTLDSKTQSLLIVNNATNVVIKVCEFQFCNDPFLGVYYHKNNKSWMESEFRVYSSANNCTFEYVSQPFLMDLEGKQGNFKNLREFVFKNIDGYFKIYSKHTPINLVRDLPQGFSALEPLVDLPIGINITRFQTLLALHRSYLTPGDSSSGWTAGAAAYYVGYLQPRTFLLKYNENGTITDAVDCALDPLSETKCTLKSFTVEKGIYQTSNFRVQPTESIVRFPNITNLCPFGEVFNATRFASVYAWNRKRISNCVADYSVLYNSASFSTFKCYGVSPTKLNDLCFTNVYADSFVIRGDEVRQIAPGQTGKIADYNYKLPDDFTGCVIAWNSNNLDSKVGGNYNYLYRLFRKSNLKPFERDISTEIYQAGSTPCNGVEGFNCYFPLQSYGFQPTNGVGYQPYRVVVLSFELLHAPATVCGPKKSTNLVKNKCVNFNFNGLTGTGVLTESNKKFLPFQQFGRDIADTTDAVRDPQTLEILDITPCSFGGVSVITPGTNTSNQVAVLYQDVNCTEVPVAIHADQLTPTWRVYSTGSNVFQTRAGCLIGAEHVNNSYECDIPIGAGICASYQTQTNSPRRARSVASQSIIAYTMSLGAENSVAYSNNSIAIPTNFTISVTTEILPVSMTKTSVDCTMYICGDSTECSNLLLQYGSFCTQLNRALTGIAVEQDKNTQEVFAQVKQIYKTPPIKDFGGFNFSQILPDPSKPSKRSFIEDLLFNKVTLADAGFIKQYGDCLGDIAARDLICAQKFNGLTVLPPLLTDEMIAQYTSALLAGTITSGWTFGAGAALQIPFAMQMAYRFNGIGVTQNVLYENQKLIANQFNSAIGKIQDSLSSTASALGKLQDVVNQNAQALNTLVKQLSSNFGAISSVLNDILSRLDPPEAEVQIDRLITGRLQSLQTYVTQQLIRAAEIRASANLAATKMSECVLGQSKRVDFCGKGYHLMSFPQSAPHGVVFLHVTYVFAQEKNFTTAPAICHDGKAHFPREGVFVSNGTHWFVTQRNFYEPQIITTDNTFVSGNCDVVIGIVNNTVYDPLQPELDSFKEELDKYFKNHTSPDVDLGDISGINASVVNIQKEIDRLNEVAKNLNESLIDLQELGKYEQYIKGGGGSDIDPYKEFGSSYQLLNFLPLDFFPDLNALVDTATALYEEELTGREHCSPHHTAIRQALVCWDELTKLIAWMSSNITSEQVRTIIVNHVNDTWGLKVRQSLWFHLSCLTFGQHTVQEFLVSFGVWIRTPAPYRPPNAPILSTLPEHTVIC

SEQ ID NO: 6858 - protein, 1365 aa, Artificial Sequence; identical to SEQ ID NO: 6848
  SARS-CoV-2/England/200990660/2020__EPI_ISL_414523 spike protein (1-1211)(K986P_V987P_P1069F) WhcAg construct

SEQ ID NO: 6859 - protein, 1365 aa, Artificial Sequence
  SARS-CoV-2/Australia/NSW09/2020__EPI_ISL_413595 spike protein (1-1211)(K986P_V987P_P1069F) WhcAg construct
MFVFLVLLPLVSSQCVNLTTRTQLPPAYTNSFTRGVYYPDKVFRSSVLHSTQDLFLPFFSNVTWFHAIHVSGTNGTKRFDNPVLPFNDGVYFASTEKSNIIRGWIFGTTLDSKTQSLLIVNNATNVVIKVCEFQFCNDPFLGVYYHKNNKSWMESEFRVYSSANNCTFEYVSQPFLMDLEGKQGNFKNLREFVFKNIDGYFKIYSKHTPINLVRDLPQGFSALEPLVDLPIGINITRFQTLLALHRSYLTPGDSSSGWTAGAAAYYVGYLQPRTFLLKYNENGTITDAVDCALDPLSETKCTLKSFTVEKGIYQTSNFRVQPTESIVRFPNITNLCPFGEVFNATRFASVYAWNRKRISNCVADYSVLYNSASFSTFKCYGVSPTKLNDLCFTNVYADSFVIRGDEVRQIAPGQTGKIADYNYKLPDDFTGCVIAWNSNNLDSKVGGNYNYLYRLFRKSNLKPFERDISTEIYQAGSTPCNGVEGFNCYFPLQSYGFQPTNGVGYQPYRVVVLSFELLHAPATVCGPKKSTNLVKNKCVNFNFNGLTGTGVLTESNKKFLPFQQFGRDIADTTDAVRDPQTLEILDITPCSFGGVSVITPGTNTSNQVAVLYQDVNCTEVPVAIHADQLTPTWRVYSTGSNVFQTRAGCLIGAEHVNNSYECDIPIGAGICASYQTQTNSPRRARSVASQSIIAYTMSLGAENSVAYSNNSIAIPTNFTISVTTEILPVSMTKTSVDCTMYICGDSTECSNLLLQYGSFCTQLNRALTGIAVEQDKNTQEVFAQVKQIYKTPPIKDFGGFNFSQILPDPSKPSKRSFIEDLLFNKVTLADAGFIKQYGDCLGDIAARDLICAQKFNGLTVLPPLLTDEMIAQYTSALLAGTITSGWTFGAGAALQIPFAMQMAYRFNGIGVTQNVLYENQKLIANQFNSAIGKIQDSLSFTASALGKLQDVVNQNAQALNTLVKQLSSNFGAISSVLNDILSRLDPPEAEVQIDRLITGRLQSLQTYVTQQLIRAAEIRASANLAATKMSECVLGQSKRVDFCGKGYHLMSFPQSAPHGVVFLHVTYVFAQEKNFTTAPAICHDGKAHFPREGVFVSNGTHWFVTQRNFYEPQIITTDNTFVSGNCDVVIGIVNNTVYDPLQPELDSFKEELDKYFKNHTSPDVDLGDISGINASVVNIQKEIDRLNEVAKNLNESLIDLQELGKYEQYIKGGGGSDIDPYKEFGSSYQLLNFLPLDFFPDLNALVDTATALYEEELTGREHCSPHHTAIRQALVCWDELTKLIAWMSSNITSEQVRTIIVNHVNDTWGLKVRQSLWFHLSCLTFGQHTVQEFLVSFGVWIRTPAPYRPPNAPILSTLPEHTVIC

SEQ ID NO: 6860 - protein, 1365 aa, Artificial Sequence; identical to SEQ ID NO: 6840
  SARS-CoV-2/Australia/NSW10/2020__EPI_ISL_413596 spike protein (1-1211)(K986P_V987P_P1069F) WhcAg construct

SEQ ID NO: 6861 - protein, 1365 aa, Artificial Sequence
  SARS-CoV-2/Switzerland/1000477797/2020__EPI_ISL_413023 spike protein (1-1211)(K986P_V987P_P1069F) WhcAg construct
MFVFLVLLPLVSSQCVNLTTRTQLPPAYTNSFTRGVYYPDKVFRSSVLHSTQDLFLPFFSNVTWFHAIHVSGTNGTKRFDNPVLPFNDGVYFASTEKSNIIRGWIFGTTLDSKTQSLLIVNNATNVVIKVCEFQFCNDPFLGVYYHKNNKSWMESEFRVYSSANNCTFEYVSQPFLMDLEGKQGNFKNLREFVFKNIDGYFNIYSKHTPINLVRDLPQGFSALEPLVDLPIGINITRFQTLLALHRSYLTPGDSSSGWTAGAAAYYVGYLQPRTFLLKYNENGTITDAVDCALDPLSETKCTLKSFTVEKGIYQTSNFRVQPTESIVRFPNITNLCPFGEVFNATRFASVYAWNRKRISNCVADYSVLYNSASFSTFKCYGVSPTKLNDLCFTNVYADSFVIRGDEVRQIAPGQTGKIADYNYKLPDDFTGCVIAWNSNNLDSKVGGNYNYLYRLFRKSNLKPFERDISTEIYQAGSTPCNGVEGFNCYFPLQSYGFQPTNGVGYQPYRVVVLSFELLHAPATVCGPKKSTNLVKNKCVNFNFNGLTGTGVLTESNKKFLPFQQFGRDIADTTDAVRDPQTLEILDITPCSFGGVSVITPGTNTSNQVAVLYQGVNCTEVPVAIHADQLTPTWRVYSTGSNVFQTRAGCLIGAEHVNNSYECDIPIGAGICASYQTQTNSPRRARSVASQSIIAYTMSLGAENSVAYSNNSIAIPTNFTISVTTEILPVSMTKTSVDCTMYICGDSTECSNLLLQYGSFCTQLNRALTGIAVEQDKNTQEVFAQVKQIYKTPPIKDFGGFNFSQILPDPSKPSKRSFIEDLLFNKVTLADAGFIKQYGDCLGDIAARDLICAQKFNGLTVLPPLLTDEMIAQYTSALLAGTITSGWTFGAGAALQIPFAMQMAYRFNGIGVTQNVLYENQKLIANQFNSAIGKIQDSLSSTASALGKLQDVVNQNAQALNTLVKQLSSNFGAISSVLNDILSRLDPPEAEVQIDRLITGRLQSLQTYVTQQLIRAAEIRASANLAATKMSECVLGQSKRVDFCGKGYHLMSFPQSAPHGVVFLHVTYVFAQEKNFTTAPAICHDGKAHFPREGVFVSNGTHWFVTQRNFYEPQIITTDNTFVSGNCDVVIGIVNNTVYDPLQPELDSFKEELDKYFKNHTSPDVDLGDISGINASVVNIQKEIDRLNEVAKNLNESLIDLQELGKYEQYIKGGGGSDIDPYKEFGSSYQLLNFLPLDFFPDLNALVDTATALYEEELTGREHCSPHHTAIRQALVCWDELTKLIAWMSSNITSEQVRTIIVNHVNDTWGLKVRQSLWFHLSCLTFGQHTVQEFLVSFGVWIRTPAPYRPPNAPILSTLPEHTVIC

SEQ ID NO: 6862 - protein, 1365 aa, Artificial Sequence
  SARS-CoV-2/Belgium/BA-02291/2020__EPI_ISL_415159 spike protein (1-1211)(K986P_V987P_P1069F) WhcAg construct
MFVFLVLLPLVSSQCVNLTTRTQLPPAYTNSFTRGVYYPDKVFRSSVLHSTQDLFLPFFSNVTWFHAIHVSGTNGTKRFDNPVLPFNDGVYFASTEKSNIIRGWIFGTTLDSKTQSLLIVNNATNVVIKVCEFQFCNDPFLGVYYHKNNKSWMESEFRVYSSANNCTFEYVSQPFLMDLEGKQGNFKNLREFVFKNIDGYFKIYSKHTPINLVRDLPQGFSALEPLVDLPIGINITRFQTLLALHRSYLTPGDSSSGWTAGAAAYYVGYLQPRTFLLKYNENGTITDAVDCALDPLSETKCTLKSFTVEKGIYQTSNFRVQPTESIVRFPNITNLCPFGEVFNATRFASVYAWNRKRISNCVADYSVLYNSASFSTFKCYGVSPTKLNDLCFTNVYADSFVIRGDEVRQIAPGQTGKIADYNYKLPDDFTGCVIAWNSNNLDSKVGGNYNYLYRLFRRSNLKPFERDISTEIYQAGSTPCNGVEGFNCYFPLQSYGFQPTNGVGYQPYRVVVLSFELLPAPATVCGPKKSTNLVKNKCVNFNFNGLTGTGVLTESNKKFLPFQQFGRDIADTTDAVRDPQTLEILDITPCSFGGVSVITPGTNTSNQVAVLYQGVNCTEVPVAIHADQLTPTWRVYSTGSNVFQTRAGCLIGAEHVNNSYECDIPIGAGICASYQTQTNSPRRARSVASQSIIAYTMSLGAENSVAYSNNSIAIPTNFTISVTTEILPVSMTKTSVDCTMYICGDSTECSNLLLQYGSFCTQLNRALTGIAVEQDKNTQEVFAQVKQIYKTPPIKDFGGFNFSQILPDPSKPSKRSFIEDLLFNKVTLADAGFIKQYGDCLGDIAARDLICAQKFNGLTVLPPLLTDEMIAQYTSALLAGTITSGWTFGAGAALQIPFAMQMAYRFNGIGVTQNVLYENQKLIANQFNSAIGKIQDSLSSAAPALGKLQDVVNQNAQALNTLVKQLSSNFGAISSVLNDILSRLDPPEAEVQIDRLITGRLQSLQTYVTQQLIRAAEIRASANLAATKMSECVLGQSKRVDFCGKGYHLMSFPQSAPHGVVFLHVTYVFAQEKNFTTAPAICHDGKAHFPREGVFVSNGTHWFVTQRNFYEPQIITTDNTFVSGNCDVVIGIVNNTVYDPLQPELDSFKEELDKYFKNHTSPDVDLGDISGINASVVNIQKEIDRLNEVAKNLNESLIDLQELGKYEQYIKGGGGSDIDPYKEFGSSYQLLNFLPLDFFPDLNALVDTATALYEEELTGREHCSPHHTAIRQALVCWDELTKLIAWMSSNITSEQVRTIIVNHVNDTWGLKVRQSLWFHLSCLTFGQHTVQEFLVSFGVWIRTPAPYRPPNAPILSTLPEHTVIC

SEQ ID NO: 6863 - protein, 1365 aa, Artificial Sequence
  SARS-CoV-2/USA/WA8-UW5/2020__EPI_ISL_413486 spike protein (1-1211)(K986P_V987P_P1069F) WhcAg construct
MFVFLVLLPLVSSQCVNLTTRTQLPPAYTNSFTRGVYYPDKVFRSSVLHSTQDLFLPFFSNVTWFHAIHVSGTNGTKRFDNPVLPFNDGVYFASTEKSNIIRGWIFGTTLDSKTQSLLIVNNATNVVIKVCEFQFCNDPFLGVYYHKNNKSWMESEFRVYSSANNCTFEYVSQPFLMDLEGKQGNFKNLREFVFKNIDGYFKIYSKHTPINLVRDLPQGFSALEPLVDLPIGINITRFQTLLALHRSYLTPGDSSSGWTAGAAAYYVGYLQPRTFLLKYNENGTITDAVDCALDPLSETKCTLKSFTVEKGIYQTSNFRVQPTESIVRFPNITNLCPFGEVFNATRFASVYAWNRKRISNCVADYSVLYNSASFSTFKCYGVSPTKLNDLCFTNVYADSFVIRGDEVRQIAPGQTGKIADYNYKLPDDFTGCVIAWNSNNLDSKVGGNYNYLYRLFRKSNLKPFERDISTEIYQAGSTPCNGVEGFNCYFPLQSYGFQPTNGVGYQPYRVVVLSFELLHAPATVCGPKKSTNLVKNKCVNFNFNGLTGTGVLTESNKKFLPFQQFGRDIADTTDAVRDPQTLEILDITPCSFGGVSVITPGTNTSNQVAVLYQDVNCTEVPVAIHADQLTPTWRVYSTGSNVFQTRAGCLIGAEYVNNSYECDIPIGAGICASYQTQTNSPRRARSVASQSIIAYTMSLGAENSVAYSNNSIAIPTNFTISVTTEILPVSMTKTSVDCTMYICGDSTECSNLLLQYGSFCTQLNRALTGIAVEQDKNTQEVFAQVKQIYKTPPIKDFGGFNFSQILPDPSKPSKRSFIEDLLFNKVTLADAGFIKQYGDCLGDIAARDLICAQKFNGLTVLPPLLTDEMIAQYTSALLAGTITSGWTFGAGAALQIPFAMQMAYRFNGIGVTQNVLYENQKLIANQFNSAIGKIQDSLSSTASALGKLQDVVNQNAQALNTLVKQLSSNFGAISSVLNDILSRLDPPEAEVQIDRLITGRLQSLQTYVTQQLIRAAEIRASANLAATKMSECVLGQSKRVDFCGKGYHLMSFPQSAPHGVVFLHVTYVFAQEKNFTTAPAICHDGKAHFPREGVFVSNGTHWFVTQRNFYEPQIITTDNTFVSGNCDVVIGIVNNTVYDPLQPELDSFKEELDKYFKNHTSPDVDLGDISGINASVVNIQKEIDRLNEVAKNLNESLIDLQELGKYEQYIKGGGGSDIDPYKEFGSSYQLLNFLPLDFFPDLNALVDTATALYEEELTGREHCSPHHTAIRQALVCWDELTKLIAWMSSNITSEQVRTIIVNHVNDTWGLKVRQSLWFHLSCLTFGQHTVQEFLVSFGVWIRTPAPYRPPNAPILSTLPEHTVIC

SEQ ID NO: 6864 - protein, 1365 aa, Artificial Sequence
  SARS-CoV-2/England/20102000506/2020__EPI_ISL_415147 spike protein (1-1211)(K986P_V987P_P1069F) WhcAg construct
MFVFLVLLPLVSSQCVNLTTRTQLPPAYTNSFTRGVYYPDKVFRSSVLHSTQDLFLPFFSNVTWFHAIHVSGTNGTKRFDNPVLPFNDGVYFASTEKSNIIRGWIFGTTLDSKTQSLLIVNNATNVVIKVCEFQFCNDPFLGVYYHKNNKSWMESEFRVYSSANNCTFEYVSQPFLMDLEGKQGNFKNLREFVFKNIDGYFKIYSKHTPINLVRDLPQGFSALEPLVDLPIGINITRFQTLLALHRSYLTPGDSSSGWTAGAAAYYVGYLQPRTFLLKYNENGTITDAVDCALDPLSETKCTLKSFTVEKGIYQTSNFRVQPTESIVRFPNITNLCPFGEVFNATRFASVYAWNRKRISNCVADYSVLYNSASFSTFKCYGVSPTKLNDLCFTNVYADSFVIRGDEVRQIAPGQTGKIADYNYKLPDDFTGCVIAWNSNNLDSKVGGNYNYLYRLFRKSNLKPFERDISTEIYQAGSTPCNGVEGFNCYFPLQSYGFQPTNGVGYQPYRVVVLSFELLHAPATVCGPKKSTNLVKNKCVNFNFNGLTGTGVLTESNKKFLPFQQFGRDIADTTDAVRDPQTLEILDITPCSFGGVSVITPGTNTSNQVAVLYQGVNCTEVPVAIHADQLTPTWRVYSTGSNVFQTRAGCLIGAEHVNNSYECDIPIGAGICASYQTQTNSPRRARSVASQSIIAYTMSLGAENSVAYSNNSIAIPTNFTISVTTEILPVSMTKTSVDCTMYICGDSTECSNLLLQYGSFCTQLNRALTGIAVEQDKNTQEVFAQVKQIYKTPPIKDFGGFNFSQILPDPSKPSKRSFIEDLLFNKVTLADAGFIKQYGYCLGDIAARDLICAQKFNGLTVLPPLLTDEMIAQYTSALLAGTITSGWTFGAGAALQIPFAMQMAYRFNGIGVTQNVLYENQKLIANQFNSAIGKIQDSLSSTASALGKLQDVVNQNAQALNTLVKQLSSNFGAISSVLNDILSRLDPPEAEVQIDRLITGRLQSLQTYVTQQLIRAAEIRASANLAATKMSECVLGQSKRVDFCGKGYHLMSFPQSAPHGVVFLHVTYVFAQEKNFTTAPAICHDGKAHFPREGVFVSNGTHWFVTQRNFYEPQIITTDNTFVSGNCDVVIGIVNNTVYDPLQPELDSFKEELDKYFKNHTSPDVDLGDISGINASVVNIQKEIDRLNEVAKNLNESLIDLQELGKYEQYIKGGGGSDIDPYKEFGSSYQLLNFLPLDFFPDLNALVDTATALYEEELTGREHCSPHHTAIRQALVCWDELTKLIAWMSSNITSEQVRTIIVNHVNDTWGLKVRQSLWFHLSCLTFGQHTVQEFLVSFGVWIRTPAPYRPPNAPILSTLPEHTVIC

SEQ ID NO: 6865 - protein, 1365 aa, Artificial Sequence
  SARS-CoV-2/Belgium/VAG-03013/2020__EPI_ISL_415155 spike protein (1-1211)(K986P_V987P_P1069F) WhcAg construct
MFVFLVLLPLVSSQCVNLTTRTQLPPAYTNSFTRGVYYPDKVFRSSVLHSTQDLFLPFFSNVTWFHAIHVSGTNGTKRFDNPVLPFNDGVYFASTEKSNIIRGWIFGTTLDSKTQSLLIVNNATNVVIKVCEFQFCNDPFLGVYYHKNNKSWMESEFRVYSSANNCTFEYVSQPFLMDLEGKQGNFKNLREFVFKNIDGYFKIYSKHTPINLVRDLPQGFSALEPLVDLPIGINITRFQTLLALHRSYLTPGDSSSGWTAGAAAYYVGYLQPRTFLLKYNENGTITDAVDCALDPLSETKCTLKSFTVEKGIYQTSNFRVQPTESIVRFPNITNLCPFGEVFNATRFASVYAWNRKRISNCVADYSVLYNSASFSTFKCYGVSPTKLNDLCFTNVYADSFVIRGDEVRQIAPGQTGKIADYNYKLPDDFTGCVIAWNSNNLDSKVGGNYNYLYRLFRKSNLKPFERDISTEIYQAGSTPCNGVEGFNCYFPLQSYGFQPTNGVGYQPYRVVVLSFELLHAPATVCGPKKSTNLVKNKCVNFNFNGLTGTGVLTESNKKFLPFQQFGRDIADTTDAVRDPQTLEILDITPCSFGGVSVITPGTNTSNQVAVLYQGVNCTEVPVAIHADQLTPTWRVYSTGSNVFQTRAGCLIGAEHVNNSYECDIPIGAGICASYQTQTNSPRRARSVASQSIIAYTMSLGAENSVAYSNNSIAIPTNFTISVTTEILPVSMTKTSVDCTMYICGDSTECSNLLLQYGSFCTQLNRALTGIAVEQDKNTQEVFAQVKQIYKTPPIKDFGGFNFSQILPDPSKPSKRSFIEDLLFNKVTLADAGFIKQYGDCLGDIAARDLICAQKFNGLTVLPPLLTDEMIAQYTSALLAGTITSGWTFGAGAALQIPFAMQMAYRFNGIGVTQNVLYENQKLIANQFNSAIGKIQDSLSSTATALGKLQDVVNQNAQALNTLVKQLSSNFGAISSVLNDILSRLDPPEAEVQIDRLITGRLQSLQTYVTQQLIRAAEIRASANLAATKMSECVLGQSKRVDFCGKGYHLMSFPQSAPHGVVFLHVTYVFAQEKNFTTAPAICHDGKAHFPREGVFVSNGTHWFVTQRNFYEPQIITTDNTFVSGNCDVVIGIVNNTVYDPLQPELDSFKEELDKYFKNHTSPDVDLGDISGINASVVNIQKEIDRLNEVAKNLNESLIDLQELGKYEQYIKGGGGSDIDPYKEFGSSYQLLNFLPLDFFPDLNALVDTATALYEEELTGREHCSPHHTAIRQALVCWDELTKLIAWMSSNITSEQVRTIIVNHVNDTWGLKVRQSLWFHLSCLTFGQHTVQEFLVSFGVWIRTPAPYRPPNAPILSTLPEHTVIC

SEQ ID NO: 6866 - protein, 1365 aa, Artificial Sequence
  SARS-CoV-2/Belgium/BC-03016/2020__EPI_ISL_415157 spike protein (1-1211)(K986P_V987P_P1069F) WhcAg construct
MFVFLVLLPLVSSQCVNLTTRTQLPPAYTNSFTRGVYYPDKVFRSSVLHSTQDLFLPFFSNVTWFHAIHVSGTNGTKRFDNPVLPFNDGVYFASTEKSNIIRGWIFGTTLDSKTQSLLIVNNATNVVIKVCEFQFCNDPFLGVYYHKNNKSWMESEFRVYSSANNCTFEYVSQPFLMDLEGKQGNFKNLREFVFKNIDGYFKIYSKHTPINLVRDLPQGFSALEPLVDLPIGINITRFQTLLALHRSYLTPGDSSSGWTAGAAAYYVGYLQPRTFLLKYNENGTITDAVDCALDPLSETKCTLKSFTVEKGIYQTSNFRVQPTESIVRFPNITNLCPFGEVFNATRFASVYAWNRKRISNCVADYSVLYNSASFSTFKCYGVSPTKLNDLCFTNVYADSFVIRGDEVRQIAPGQTGKIADYNYKLPDDFTGCVIAWNSNNLDSKVGGNYNYLYRLFRKSNLKPFERDISTEIYQAGSTPCNGVEGFNCYFPLQSYGFQPTNGVGYQPYRVVVLSFELLHAPATVCGPKKSTNLVKNKCVNFNFNGLTGTGVLTESNKKFLPFQQFGRDIADTTDAVRDPQTLEILDITPCSFGGVSVITPGTNTSNQVAVLYQGVNCTEVPVAIHADQLTPTWRVYSTGSNVFQTRAGCLIGAEHVNNSYECDIPIGAGICASYQTQTNSPRRARSVASQSIIAYTMSLGAENSVAYSNNSIAIPTNFTISVTTEILPVSMTKTSVDCTMYICGDSTECSNLLLQYGSFCTQLNRALTGIAVEQDKNTQEVFAQVKQIYKTPPIKDFGGFNFSQILPDPSKPSKRSFIEDLLFNKVTLADAGFIKQYGDCLGDIAARDLICAQKFNGLTVLPPLLTDEMIAQYTSALLAGTITSGWTFGAGAALQIPFAMQMAYRFNGIGVTQNVLYENQKLIANQFNSAIGKIQDSLSSTAPALGKLQDVVNQNAQALNTLVKQLSSNFGAISSVLNDILSRLDPPEAEVQIDRLITGRLQSLQTYVTQQLIRAAEIRASANLAATKMSECVLGQSKRVDFCGKGYHLMSFPQSAPHGVVFLHVTYVFAQEKNFTTAPAICHDGKAHFPREGVFVSNGTHWFVTQRNFYEPQIITTDNTFVSGNCDVVIGIVNNTVYDPLQPELDSFKEELDKYFKNHTSPDVDLGDISGINASVVNIQKEIDRLNEVAKNLNESLIDLQELGKYEQYIKGGGGSDIDPYKEFGSSYQLLNFLPLDFFPDLNALVDTATALYEEELTGREHCSPHHTAIRQALVCWDELTKLIAWMSSNITSEQVRTIIVNHVNDTWGLKVRQSLWFHLSCLTFGQHTVQEFLVSFGVWIRTPAPYRPPNAPILSTLPEHTVIC

SEQ ID NO: 6867 - protein, 1365 aa, Artificial Sequence
  SARS-CoV-2/Germany/BavPat3/2020__EPI_ISL_414521 spike protein (1-1211)(K986P_V987P_P1069F) WhcAg construct
MFVFLVLLPLVSSQCVNLTTRTQLPPAYTNSFTRGVYYPDKVFRSSVLHSTQDLFLPFFSNVTWFHAIHVSGTNGTKRFDNPVLPFNDGVYFASTEKSNIIRGWIFGTTLDSKTQSLLIVNNATNVVIKVCEFQFCNDPFLGVYYHKNNKSWMESEFRVYSSANNCTFEYVSQPFLMDLEGKQGNFKNLREFVFKNIDGYFKIYSKHTPINLVRDLPQGFSALEPLVDLPIGINITRFQTLLALHRSYLTPGDSSSGWTAGAAAYYVGYLQPRTFLLKYNENGTITDAVDCALDPLSETKCTLKSFTVEKGIYQTSNFRVQPTESIVRFPNITNLCPFGEVFNATRFASVYAWNRKRISNCVADYSVLYNSASFSTFKCYGVSPTKLNDLCFTNVYADSFVIRGDEVRQIAPGQTGKIADYNYKLPDDFTGCVIAWNSNNLDSKVGGNYNYLYRLFRKSNLKPFERDISTEIYQAGSTPCNGVEGFNCYFPLQSYGFQPTNGVGYQPYRVVVLSFELLHAPATVCGPKKSTNLVKNKCVNFNFNGLTGTGVLTESNKKFLPFQQFGRDIADTTDAVRDPQTLEILDITPCSFGGVSVITPGTNTSNQVAVLYQDVNCTEVPVAIHADQLTPTWRVYSTGSNVFQTRAGCLIGAEHVNNSYECDIPIGAGICASYQTQTNSPRRARSVASQSIIAYTMSLGAENSVAYSNNSIAIPTNFTISVTTEILPVSMTKTSVDCTMYICGDSTECSNLLLQYGSFCTQLNRALTGIAVEQDKNTQQVFAQVKQIYKTPPIKDFGGFNFSQILPDPSKPSKRSFIEDLLFNKVTLADAGFIKQYGDCLGDIAARDLICAQKFNGLTVLPPLLTDEMIAQYTSALLAGTITSGWTFGAGAALQIPFAMQMAYRFNGIGVTQNVLYENQKLIANQFNSAIGKIQDSLSSTASALGKLQDVVNQNAQALNTLVKQLSSNFGAISSVLNDILSRLDPPEAEVQIDRLITGRLQSLQTYVTQQLIRAAEIRASANLAATKMSECVLGQSKRVDFCGKGYHLMSFPQSAPHGVVFLHVTYVFAQEKNFTTAPAICHDGKAHFPREGVFVSNGTHWFVTQRNFYEPQIITTDNTFVSGNCDVVIGIVNNTVYDPLQPELDSFKEELDKYFKNHTSPDVDLGDISGINASVVNIQKEIDRLNEVAKNLNESLIDLQELGKYEQYIKGGGGSDIDPYKEFGSSYQLLNFLPLDFFPDLNALVDTATALYEEELTGREHCSPHHTAIRQALVCWDELTKLIAWMSSNITSEQVRTIIVNHVNDTWGLKVRQSLWFHLSCLTFGQHTVQEFLVSFGVWIRTPAPYRPPNAPILSTLPEHTVIC

SEQ ID NO: 6868 - protein, 1365 aa, Artificial Sequence
  SARS-CoV-2/France/HF1805/2020__EPI_ISL_414628 spike protein (1-1211)(K986P_V987P_P1069F) WhcAg construct
MFVFLVLLPLVSSQCVNLTTRTQLPPAYTNSFTRGVYYPDKVFRSSVLHSTQDLFLPFFSNVTWFHAIHVSGTNGTKRFDNPVLPFNDGVYFASTEKSNIIRGWIFGTTLDSKTQSLLIVNNATNVVIKVCEFQFCNDPFLGVYYHKNNKSWMESEFRVYSSANNCTFEYVSQPFLMDLEGKQGNFKNLREFVFKNIDGYFKIYSKHTPINLVRDLPQGFSALEPLVDLPIGINITRFQTLLALHRSYLTPGDSSSGWTAGAAAYYVGYLQPRTFLLKYNENGTITDAVDCALDPLSETKCTLKSFTVEKGIYQTSNFRVQPTESIVRFPNITNLCPFGEVFNATRFASVYAWNRKRISNCVADYSVLYNSASFSTFKCYGVSPTKLNDLCFTNVYADSFVIRGDEVRQIAPGQTGKIADYNYKLPDDFTGCVIAWNSNNLDSKVGGNYNYLYRLFRKSNLKPFERDISTEIYQAGSTPCNGVEGFNCYFPLQSYGFQPTNGVGYQPYRVVVLSFELLHAPATVCGPKKSTNLVKNKCVNFNFNGLTGTGVLTESNKKFLPFQQFGRDIADTTDAVRDPQTLEILDITPCSFGGVSVITPGTNTSNQVAVLYQGVNCTEVPVAIHADQLTPTWRVYSTGSNVFQTRAGCLIGAEHVNNSYECDIPIGAGICASYQTQTNSPRRARSVASQSIIAYTMSLGAENSVAYSNNSIAIPTNFTISVTTEILPVSMTKTSVDCTMYICGDSTECSNLLLQYGSFCTQLNRALTGIAVEQDKNTQEVFAQVKQIYKTPPIKDFGGFNFSQILPDPSKPSKRSFIEDLLFNKVTLADAGFIKQYGDCLGDIAARDLICAQKFNGLTVLPPLLTDEMIAQYTSALLAGTITSGWTFGAGAALQIPFAMQMAYRFNGIGVTQNVLYENQKLIANQFNSAIGKIQDSLSSTASALGKLQDVVNQNAQALNTLVKQLSSNFGAISSVLNDILSRLDPPEAEVQIDRLITGRLQSLQTYVTQQLIRAAEIRASANLAATKMSECVLGQSKRVDFCGKGYHLMSFPQSAPHGVVFLHVTYVFAQEKNFTTAPAICHDGKAHFPREGVFVSNGTHWFVTQRNFYEPQIITTDNTFVSGNCDVVIGVVNNTVYDPLQPELDSFKEELDKYFKNHTSPDVDLGDISGINASVVNIQKEIDRLNEVAKNLNESLIDLQELGKYEQYIKGGGGSDIDPYKEFGSSYQLLNFLPLDFFPDLNALVDTATALYEEELTGREHCSPHHTAIRQALVCWDELTKLIAWMSSNITSEQVRTIIVNHVNDTWGLKVRQSLWFHLSCLTFGQHTVQEFLVSFGVWIRTPAPYRPPNAPILSTLPEHTVIC

SEQ ID NO: 6869 - protein, 1365 aa, Artificial Sequence
  SARS-CoV-2/Netherlands/ZuidHolland_9/2020__EPI_ISL_414445 spike protein (1-1211)(K986P_V987P_P1069F) WhcAg construct
MFVFLVLLPLVSSQCVNLTTRTQLPPAYTNSFTRGVYYPDKVFRSSVLHSTQDLFLPFFSNVTWFHAIHVSGTNGTKRFDNPVLPFNDGVYFASTEKSNIIRGWIFGTTLDSKTQSLLIVNNATNVVIKVCEFQFCNDPFLGVYYHKNNKSWMESEFRVYSSANNCTFEYVSQPFLMDLEGKQGNFKNLREFVFKNIDGYFKIYSKHTPINLVRDLPQGFSALEPLVDLPIGINITRFQTLLALHRSYLTPGDSSSGWTAGAAAYYVGYLQPRTFLLKYNENGTITDAVDCALDPLSETKCTLKSFTVEKGIYQTSNFRVQPTESIVRFPNITNLCPFGEVFNATRFASVYAWNRKRISNCVADYSVLYNSASFSTFKCYGVSPTKLNDLCFTNVYADSFVIRGDEVRQIAPGQTGKIADYNYKLPDDFTGCVIAWNSNNLDSKVGGNYNYLYRLFRKSNLKPFERDISTEIYQAGSTPCNGVEGFNCYFPLQSYGFQPTNGVGYQPYRVVVLSFELLHAPATVCGPKKSTNLVKNKCVNFNFNGLTGTGVLTESNKKFLPFQQFGRDIADTTDAVRDPQTLEILDITPCSFGGVSVITPGTNTSNQVAVLYQGVNCTEVPVAIHADQLTPTWRVYSTGSNVFQTRAGCLIGAEHVNNSYECDIPIGAGICASYQTQTNSPRRARSVASQSIIAYTMSLGAENSVAYSNNSIAIPTNFTISVTTEILPVSMTKTSVDCTMYICGDSTECSNLLLQYGSFCTQLNRALTGIAVEQDKNTQEVFAQVKQIYKTPPIKDFGGFNFSQILPDPSKPSKRSFIEDLLFNKVTLADAGFIKQYGDCLGDIAARDLICVQKFNGLTVLPPLLTDEMIAQYTSALLAGTITSGWTFGAGAALQIPFAMQMAYRFNGIGVTQNVLYENQKLIANQFNSAIGKIQDSLSSTASALGKLQDVVNQNAQALNTLVKQLSSNFGAISSVLNDILSRLDPPEAEVQIDRLITGRLQSLQTYVTQQLIRAAEIRASANLAATKMSECVLGQSKRVDFCGKGYHLMSFPQSAPHGVVFLHVTYVFAQEKNFTTAPAICHDGKAHFPREGVFVSNGTHWFVTQRNFYEPQIITTDNTFVSGNCDVVIGIVNNTVYDPLQPELDSFKEELDKYFKNHTSPDVDLGDISGINASVVNIQKEIDRLNEVAKNLNESLIDLQELGKYEQYIKGGGGSDIDPYKEFGSSYQLLNFLPLDFFPDLNALVDTATALYEEELTGREHCSPHHTAIRQALVCWDELTKLIAWMSSNITSEQVRTIIVNHVNDTWGLKVRQSLWFHLSCLTFGQHTVQEFLVSFGVWIRTPAPYRPPNAPILSTLPEHTVIC

SEQ ID NO: 6870 - protein, 1365 aa, Artificial Sequence
  SARS-CoV-2/Finland/FIN03032020A/2020__EPI_ISL_413602 spike protein (1-1211)(K986P_V987P_P1069F) WhcAg construct
MFVFLVLLPLVSSQCVNLTTRTQLPPAYTNSFTRGVYYPDKVFRSSVLHSTQDLFLPFFSNVTWFHAIHVSGTNGTKRFDNPVLPFNDGVYFASTEKSNIIRGWIFGTTLDSKTQSLLIVNNATNVVIKVCEFQFCNDPFLGVYYHKNNKSWMESEFRVYSSANNCTFEYVSQPFLMDLEGKQGNFKNLREFVFKNIDGYFKIYSKHTPINLVRDLPQGFSALEPLVDLPIGINITRFQTLLALHRSYLTPGDSSSGWTAGAAAYYVGYLQPRTFLLKYNENGTITDAVDCALDPLSETKCTLKSFTVEKGIYQTSNFRVQPTESIVRFPNITNLCPFGEVFNATRFASVYAWNRKRISNCVADYSVLYNSASFSTFKCYGVSPTKLNDLCFTNVYADSFVIRGDEVRQIAPGQTGKIADYNYKLPDDFTGCVISWNSNNLDSKVGGNYNYLYRLFRKSNLKPFERDISTEIYQAGSTPCNGVEGFNCYFPLQSYGFQPTNGVGYQPYRVVVLSFELLHAPATVCGPKKSTNLVKNKCVNFNFNGLTGTGVLTESNKKFLPFQQFGRDIADTTDAVRDPQTLEILDITPCSFGGVSVITPGTNTSNQVAVLYQGVNCTEVPVAIHADQLTPTWRVYSTGSNVFQTRAGCLIGAEHVNNSYECDIPIGAGICASYQTQTNSPRRARSVASQSIIAYTMSLGAENSVAYSNNSIAIPTNFTISVTTEILPVSMTKTSVDCTMYICGDSTECSNLLLQYGSFCTQLNRALTGIAVEQDKNTQEVFAQVKQIYKTPPIKDFGGFNFSQILPDPSKPSKRSFIEDLLFNKVTLADAGFIKQYGDCLGDIAARDLICAQKFNGLTVLPPLLTDEMIAQYTSALLAGTITSGWTFGAGAALQIPFAMQMAYRFNGIGVTQNVLYENQKLIANQFNSAIGKIQDSLSSTASALGKLQDVVNQNAQALNTLVKQLSSNFGAISSVLNDILSRLDPPEAEVQIDRLITGRLQSLQTYVTQQLIRAAEIRASANLAATKMSECVLGQSKRVDFCGKGYHLMSFPQSAPHGVVFLHVTYVFAQEKNFTTAPAICHDGKAHFPREGVFVSNGTHWFVTQRNFYEPQIITTDNTFVSGNCDVVIGIVNNTVYDPLQPELDSFKEELDKYFKNHTSPDVDLGDISGINASVVNIQKEIDRLNEVAKNLNESLIDLQELGKYEQYIKGGGGSDIDPYKEFGSSYQLLNFLPLDFFPDLNALVDTATALYEEELTGREHCSPHHTAIRQALVCWDELTKLIAWMSSNITSEQVRTIIVNHVNDTWGLKVRQSLWFHLSCLTFGQHTVQEFLVSFGVWIRTPAPYRPPNAPILSTLPEHTVIC

SEQ ID NO: 6871 - protein, 1365 aa, Artificial Sequence
  SARS-CoV-2/France/GE1977/2020__EPI_ISL_414632 spike protein (1-1211)(K986P_V987P_P1069F) WhcAg construct
MFVFLVLLPLVSSQCVNLTTRTQLPPAYTNSFTRGVYYPDKVFRSSVLHSTQDLFLPFFSNVTWFHAIHVSGTNGTKRFDNPVLPFNDGVYFASTEKSNIIRGWIFGTTLDSKTQSLLIVNNATNVVIKVCEFQFCNDPFLGVYYHKNNKSWMESEFRVYSSANNCTFEYVSQPFLMDLEGKQGNFKNLREFVFKNIDGYFKIYSKHTPINLVRDLPQGFSALEPLVDLPIGINITRFQTLLALHRSYLTPGDSSSGWTAGAAAYYVGYLQPRTFLLKYNENGTITDAVDCALDPLSETKCTLKSFTVEKGIYQTSNFRVQPTESIVRFPNITNLCPFGEVFNATRFASVYAWNRKRISNCVADYSVLYNSASFSTFKCYGVSPTKLNDLCFTNVYADSFVIRGDEVRQIAPGQTGKIADYNYKLPDDFTGCVIAWNSNNLDSKVGGNYNYLYRLFRKSNLKPFERDISTEIYQAGSTPCNGVEGFNCYFPLQSYGFQPTNGVGYQPYRVVVLSFELLHAPATVCGPKKSTNLVKNKCVNFNFNGLTGTGVLTESNKKFLPFQQFGRDIADTTDAVRDPQTLEILDITPCSFGGVSVITPGTNTSNQVAVLYQGVNCTEVPVAIHADQLTPTWRVYSTGSNVFQTRAGCLIGAEHVNNSYECDIPIGAGICASYQTQTNSPRRARSVASQSIIAYTMSLGAENSVAYSNNSIAIPTNFTISVTTEILPVSMTKTSVDCTMYICGDSTECSNLLLQYGSFCTQLNRALTGIAVEQDKNTQEVFAQVKQIYKTPPIKDFGGFNFSQILPDPSKPSKRSFIEDLLFNKVTLADAGFIKQYGDCLGDIAARDLICAQKFNGLTVLPPLLTDEMIAQYTSALLAGTITSGWTFGAGAALQIPFAMQMAYRFNGIGVTQNVLYENQKLIANQFNSAIGKIQDSLFSTASALGKLQDVVNQNAQALNTLVKQLSSNFGAISSVLNDILSRLDPPEAEVQIDRLITGRLQSLQTYVTQQLIRAAEIRASANLAATKMSECVLGQSKRVDFCGKGYHLMSFPQSAPHGVVFLHVTYVFAQEKNFTTAPAICHDGKAHFPREGVFVSNGTHWFVTQRNFYEPQIITTDNTFVSGNCDVVIGIVNNTVYDPLQPELDSFKEELDKYFKNHTSPDVDLGDISGINASVVNIQKEIDRLNEVAKNLNESLIDLQELGKYEQYIKGGGGSDIDPYKEFGSSYQLLNFLPLDFFPDLNALVDTATALYEEELTGREHCSPHHTAIRQALVCWDELTKLIAWMSSNITSEQVRTIIVNHVNDTWGLKVRQSLWFHLSCLTFGQHTVQEFLVSFGVWIRTPAPYRPPNAPILSTLPEHTVIC

SEQ ID NO: 6872 - protein, 1365 aa, Artificial Sequence
  SARS-CoV-2/Finland/FIN-313/2020__EPI_ISL_414641 spike protein (1-1211)(K986P_V987P_P1069F) WhcAg construct
MFVFLVLLPLVSSQCVNLTTRTQLPPAYTNSFTRGVYYPDKVFRSSVLHSTQDLFLPFFSNVTWFHAIHVSGTNGTKRFDNPVLPFNDGVYFASTEKSNIIRGWIFGTTLDSKTQSLLIVNNATNVVIKVCEFQFCNDPFLGVYYHKNNKSWMESEFRVYSSANNCTFEYVSQPFLMDLEGKQGNFKNLREFVFKNIDGYFKIYSKHTPINLVRDLPQGFSALEPLVDLPIGINITRFKTLLALHRSYLTPGDSSSGWTAGAAAYYVGYLQPRTFLLKYNENGTITDAVDCALDPLSETKCTLKSFTVEKGIYQTSNFRVQPTESIVRFPNITNLCPFGEVFNATRFASVYAWNRKRISNCVADYSVLYNSASFSTFKCYGVSPTKLNDLCFTNVYADSFVIRGDEVRQIAPGQTGKIADYNYKLPDDFTGCVIAWNSNNLDSKVGGNYNYLYRLFRKSNLKPFERDISTEIYQAGSTPCNGVEGFNCYFPLQSYGFQPTNGVGYQPYRVVVLSFELLHAPATVCGPKKSTNLVKNKCVNFNFNGLTGTGVLTESNKKFLPFQQFGRDIADTTDAVRDPQTLEILDITPCSFGGVSVITPGTNTSNQVAVLYQGVNCTEVPVAIHADQLTPTWRVYSTGSNVFQTRAGCLIGAEHVNNSYECDIPIGAGICASYQTQTNSPRRARSVASQSIIAYTMSLGAENSVAYSNNSIAIPTNFTISVTTEILPVSMTKTSVDCTMYICGDSTECSNLLLQYGSFCTQLNRALTGIAVEQDKNTQEVFAQVKQIYKTPPIKDFGGFNFSQILPDPSKPSKRSFIEDLLFNKVTLADAGFIKQYGDCLGDIAARDLICAQKFNGLTVLPPLLTDEMIAQYTSALLAGTITSGWTFGAGAALQIPFAMQMAYRFNGIGVTQNVLYENQKLIANQFNSAIGKIQDSLSSTASALGKLQDVVNQNAQALNTLVKQLSSNFGAISSVLNDILSRLDPPEAEVQIDRLITGRLQSLQTYVTQQLIRAAEIRASANLAATKMSECVLGQSKRVDFCGKGYHLMSFPQSAPHGVVFLHVTYVFAQEKNFTTAPAICHDGKAHFPREGVFVSNGTHWFVTQRNFYEPQIITTDNTFVSGNCDVVIGIVNNTVYDPLQPELDSFKEELDKYFKNHTSPDVDLGDISGINASVVNIQKEIDRLNEVAKNLNESLIDLQELGKYEQYIKGGGGSDIDPYKEFGSSYQLLNFLPLDFFPDLNALVDTATALYEEELTGREHCSPHHTAIRQALVCWDELTKLIAWMSSNITSEQVRTIIVNHVNDTWGLKVRQSLWFHLSCLTFGQHTVQEFLVSFGVWIRTPAPYRPPNAPILSTLPEHTVIC

SEQ ID NO: 6873 - protein, 1365 aa, Artificial Sequence
  SARS-CoV-2/Netherlands/ZuidHolland_2/2020__EPI_ISL_414556 spike protein (1-1211)(K986P_V987P_P1069F) WhcAg construct
MFVFLVLLPLVSSQCVNLTTRTQLPPAYTNSFTRGVYYPDKVFRSSVLHSTQDLFLPFFSNVTWFHAIHVSGTNGTKRFDNPVLPFNDGVYFASTEKSNIIRGWIFGTTLDSKTQSLLIVNNATNVVIKVCEFQFCNDPFLGVYYHKNNKSWMESEFRVYSSANNCTFEYVSQPFLMDLEGKQGNFKNLREFVFKNIDGYFKIYSKHTPINLVRDLPQGFSALEPLVDLPIGINITRFQTLLALHRSYLTPGDSSSGWTAGAAAYYVGYLQPRTFLLKYNENGTITDAVDCALDPLSETKCTLKSFTVEKGIYQTSNFRVQPTESIVRFPNITNLCPFGEVFNATRFASVYAWNRKRISNCVADYSVLYNSASFSTFKCYGVSPTKLNDLCFTNVYADSFVIRGDEVRQIAPGQTGKIADYNYKLPDDFTGCVIAWNSNNLDSKVGGNYNYLYRLFRKSNLKPFERDISTEIYQAGSTPCNGVEGFNCYFPLQSYGFQPTNGVGYQPYRVVVLSFELLHAPATVCGPKKSTNLVKNKCVNFNFNGLTGTGVLTESNKKFLPFQQFGRDIADTTDAVRDPQTLEILDITPCSFGGVSVITPGTNTSNQVAVLYQGVNCTEVPVAIHADQLTPTWRVYSTGSNVFQTRAGCLIGAEHVNNSYECDIPIGAGICASYQTQTNSPRRARSVASQSIIAYTMSLGAENSVAYSNNSIAIPTNFTISVTTEILPVSMTKTSVDCTMYICGDSTECSNLLLQYGSFCTQLNRALTGIALEQDKNTQEVFAQVKQIYKTPPIKDFGGFNFSQILPDPSKPSKRSFIEDLLFNKVTLADAGFIKQYGDCLGDIAARDLICAQKFNGLTVLPPLLTDEMIAQYTSALLAGTITSGWTFGAGAALQIPFAMQMAYRFNGIGVTQNVLYENQKLIANQFNSAIGKIQDSLSSTASALGKLQDVVNQNAQALNTLVKQLSSNFGAISSVLNDILSRLDPPEAEVQIDRLITGRLQSLQTYVTQQLIRAAEIRASANLAATKMSECVLGQSKRVDFCGKGYHLMSFPQSAPHGVVFLHVTYVFAQEKNFTTAPAICHDGKAHFPREGVFVSNGTHWFVTQRNFYEPQIITTDNTFVSGNCDVVIGIVNNTVYDPLQPELDSFKEELDKYFKNHTSPDVDLGDISGINASVVNIQKEIDRLNEVAKNLNESLIDLQELGKYEQYIKGGGGSDIDPYKEFGSSYQLLNFLPLDFFPDLNALVDTATALYEEELTGREHCSPHHTAIRQALVCWDELTKLIAWMSSNITSEQVRTIIVNHVNDTWGLKVRQSLWFHLSCLTFGQHTVQEFLVSFGVWIRTPAPYRPPNAPILSTLPEHTVIC

SEQ ID NO: 6874 - protein, 1365 aa, Artificial Sequence
  SARS-CoV-2/USA/WA-UW31/2020__EPI_ISL_414618 spike protein (1-1211)(K986P_V987P_P1069F) WhcAg construct
MFVFLVLLPLVSSQCVNLTTRTQLPPAYTNSFTRGVYYPDKVFRSSVLHSTQDLFLPFFSNVTWFHAIHVSGTNGTKRFDNPVLPFNDGVYFASTEKSNIIRGWIFGTTLDSKTQSLLIVNNATNVVIKVCEFQFCNDPFLGVYYHKNNKSWMESEFRVYSSANNCTFEYVSQPFLMDLEGKQGNFKNLREFVFKNIDGYFKIYSKHTPINLVRDLPQGFSALEPLVDLPIGINITRFQTLLALHRSYLTPGDSSSGWTAGAAAYYVGYLQPRTFLLKYNENGTITDAVDCALDPLSETKCTLKSFTVEKGIYQTSNFRVQPTESIVRFPNITNLCPFGEVFNATRFASVYAWNRKRISNCVADYSVLYNSASFSTFKCYGVSPTKLNDLCFTNVYADSFVIRGDEVRQIAPGQTGKIADYNYKLPDDFTGCVIAWNSNNLDSKVGGNYNYLYRLFRKSNLKPFERDISTEIYQAGSTPCNGAEGFNCYFPLQSYGFQPTNGVGYQPYRVVVLSFELLHAPATVCGPKKSTNLVKNKCVNFNFNGLTGTGVLTESNKKFLPFQQFGRDIADTTDAVRDPQTLEILDITPCSFGGVSVITPGTNTSNQVAVLYQDVNCTEVPVAIHADQLTPTWRVYSTGSNVFQTRAGCLIGAEHVNNSYECDIPIGAGICASYQTQTNSPRRARSVASQSIIAYTMSLGAENSVAYSNNSIAIPTNFTISVTTEILPVSMTKTSVDCTMYICGDSTECSNLLLQYGSFCTQLNRALTGIAVEQDKNTQEVFAQVKQIYKTPPIKDFGGFNFSQILPDPSKPSKRSFIEDLLFNKVTLADAGFIKQYGDCLGDIAARDLICAQKFNGLTVLPPLLTDEMIAQYTSALLAGTITSGWTFGAGAALQIPFAMQMAYRFNGIGVTQNVLYENQKLIANQFNSAIGKIQDSLSSTASALGKLQDVVNQNAQALNTLVKQLSSNFGAISSVLNDILSRLDPPEAEVQIDRLITGRLQSLQTYVTQQLIRAAEIRASANLAATKMSECVLGQSKRVDFCGKGYHLMSFPQSAPHGVVFLHVTYVFAQEKNFTTAPAICHDGKAHFPREGVFVSNGTHWFVTQRNFYEPQIITTDNTFVSGNCDVVIGIVNNTVYDPLQPELDSFKEELDKYFKNHTSPDVDLGDISGINASVVNIQKEIDRLNEVAKNLNESLIDLQELGKYEQYIKGGGGSDIDPYKEFGSSYQLLNFLPLDFFPDLNALVDTATALYEEELTGREHCSPHHTAIRQALVCWDELTKLIAWMSSNITSEQVRTIIVNHVNDTWGLKVRQSLWFHLSCLTFGQHTVQEFLVSFGVWIRTPAPYRPPNAPILSTLPEHTVIC

SEQ ID NO: 6875 - protein, 1365 aa, Artificial Sequence
  SARS-CoV-2/South Korea/SNU01/2020__EPI_ISL_411929 spike protein (1-1211)(K986P_V987P_P1069F) WhcAg construct
MFVFLVLLPLVSSQCVNLTTRTQLPPAYTNSFTRGVYYPDKVFRSSVLHSTQDLFLPFFSNVTWFHAIHVSGTNGTKRFDNPVLPFNDGVYFASTEKSNIIRGWIFGTTLDSKTQSLLIVNNATNVVIKVCEFQFCNDPFLGVYYHKNNKSWMESEFRVYSSANNCTFEYVSQPFLMDLEGKQGNFKNLREFVFKNIDGYFKIYSKHTPINLVRDLPQGFWALEPLVDLPIGINITRFQTLLALHRSYLTPGDSSSGWTAGAAAYYVGYLQPRTFLLKYNENGTITDAVDCALDPLSETKCTLKSFTVEKGIYQTSNFRVQPTESIVRFPNITNLCPFGEVFNATRFASVYAWNRKRISNCVADYSVLYNSASFSTFKCYGVSPTKLNDLCFTNVYADSFVIRGDEVRQIAPGQTGKIADYNYKLPDDFTGCVIAWNSNNLDSKVGGNYNYLYRLFRKSNLKPFERDISTEIYQAGSTPCNGVEGFNCYFPLQSYGFQPTNGVGYQPYRVVVLSFELLHAPATVCGPKKSTNLVKNKCVNFNFNGLTGTGVLTESNKKFLPFQQFGRDIADTTDAVRDPQTLEILDITPCSFGGVSVITPGTNTSNQVAVLYQDVNCTEVPVAIHADQLTPTWRVYSTGSNVFQTRAGCLIGAEHVNNSYECDIPIGAGICASYQTQTNSPRRARSVASQSIIAYTMSLGAENSVAYSNNSIAIPTNFTISVTTEILPVSMTKTSVDCTMYICGDSTECSNLLLQYGSFCTQLNRALTGIAVEQDKNTQEVFAQVKQIYKTPPIKDFGGFNFSQILPDPSKPSKRSFIEDLLFNKVTLADAGFIKQYGDCLGDIAARDLICAQKFNGLTVLPPLLTDEMIAQYTSALLAGTITSGWTFGAGAALQIPFAMQMAYRFNGIGVTQNVLYENQKLIANQFNSAIGKIQDSLSSTASALGKLQDVVNQNAQALNTLVKQLSSNFGAISSVLNDILSRLDPPEAEVQIDRLITGRLQSLQTYVTQQLIRAAEIRASANLAATKMSECVLGQSKRVDFCGKGYHLMSFPQSAPHGVVFLHVTYVFAQEKNFTTAPAICHDGKAHFPREGVFVSNGTHWFVTQRNFYEPQIITTDNTFVSGNCDVVIGIVNNTVYDPLQPELDSFKEELDKYFKNHTSPDVDLGDISGINASVVNIQKEIDRLNEVAKNLNESLIDLQELGKYEQYIKGGGGSDIDPYKEFGSSYQLLNFLPLDFFPDLNALVDTATALYEEELTGREHCSPHHTAIRQALVCWDELTKLIAWMSSNITSEQVRTIIVNHVNDTWGLKVRQSLWFHLSCLTFGQHTVQEFLVSFGVWIRTPAPYRPPNAPILSTLPEHTVIC

SEQ ID NO: 6876 - protein, 1365 aa, Artificial Sequence
  SARS-CoV-2/China/WF0004/2020__EPI_ISL_413694 spike protein (1-1211)(K986P_V987P_P1069F) WhcAg construct
MFVFLVLLPLVSSQCVNLTTRTQLPPAYTNSFTRGVYYPDKVFRSSVLHSTQDLFLPFFSNVTWFHAIHVSGTNGTKRFDNPVLPFNDGVYFASTEKSNIIRGWIFGTTLDSKTQSLLIVNNATNVVIKVCEFQFCNDPFLGVYYHKNNKSWTESEFRVYSSANNCTFEYVSQPFLMDLEGKQGNFKNLREFVFKNIDGYFKIYSKHTPINLVRDLPQGFSALEPLVDLPIGINITRFQTLLALHRSYLTPGDSSSGWTAGAAAYYVGYLQPRTFLLKYNENGTITDAVDCALDPLSETKCTLKSFTVEKGIYQTSNFRVQPTESIVRFPNITNLCPFGEVFNATRFASVYAWNRKRISNCVADYSVLYNSASFSTFKCYGVSPTKLNDLCFTNVYADSFVIRGDEVRQIAPGQTGKIADYNYKLPDDFTGCVIAWNSNNLDSKVGGNYNYLYRLFRKSNLKPFERDISTEIYQAGSTPCNGVEGFNCYFPLQSYGFQPTNGVGYQPYRVVVLSFELLHAPATVCGPKKSTNLVKNKCVNFNFNGLTGTGVLTESNKKFLPFQQFGRDIADTTDAVRDPQTLEILDITPCSFGGVSVITPGTNTSNQVAVLYQDVNCTEVPVAIHADQLTPTWRVYSTGSNVFQTRAGCLIGAEHVNNSYECDIPIGAGICASYQTQTNSPRRARSVASQSIIAYTMSLGAENSVAYSNNSIAIPTNFTISVTTEILPVSMTKTSVDCTMYICGDSTECSNLLLQYGSFCTQLNRALTGIAVEQDKNTQEVFAQVKQIYKTPPIKDFGGFNFSQILPDPSKPSKRSFIEDLLFNKVTLADAGFIKQYGDCLGDIAARDLICAQKFNGLTVLPPLLTDEMIAQYTSALLAGTITSGWTFGAGAALQIPFAMQMAYRFNGIGVTQNVLYENQKLIANQFNSAIGKIQDSLSSTASALGKLQDVVNQNAQALNTLVKQLSSNFGAISSVLNDILSRLDPPEAEVQIDRLITGRLQSLQTYVTQQLIRAAEIRASANLAATKMSECVLGQSKRFDFCGKGYHLMSFPQSAPHGVVFLHVTYVFAQEKNFTTAPAICHDGKAHFPREGVFVSNGTHWFVTQRNFYEPQIITTDNTFVSGNCDVVIGIVNNTVYDPLQPELDSFKEELDKYFKNHTSPDVDLGDISGINASVVNIQKEIDRLNEVAKNLNESLIDLQELGKYEQYIKGGGGSDIDPYKEFGSSYQLLNFLPLDFFPDLNALVDTATALYEEELTGREHCSPHHTAIRQALVCWDELTKLIAWMSSNITSEQVRTIIVNHVNDTWGLKVRQSLWFHLSCLTFGQHTVQEFLVSFGVWIRTPAPYRPPNAPILSTLPEHTVIC

SEQ ID NO: 6877 - protein, 1365 aa, Artificial Sequence
  SARS-CoV-2/China/WF0028/2020__EPI_ISL_413791 spike protein (1-1211)(K986P_V987P_P1069F) WhcAg construct
MFVFLVLLPLVSSQCVNLTTRTQLPPAYTNSFTRGVYYPDKVFRSSVLHSTQDLFLPFFSNVTWFHAIHVSGTNGTKRFDNPVLPFNDGVYFASTEKSNIIRGWIFGTTLDSKTQSLLIVNNATNVVIKVCEFQFCNDPFLGVYYHKNNKSWMESEFRVYSSANNCTFEYVSQPFLMDLEGKQGNFKNLREFVFKNIDGYFKIYSKHTPINLVRDLPQGFSALEPLVDLPIGINITRFQTLLALHRSYLTPGDSSSGWTAGAAAYYVGYLQPRTFLLKYNENGTITDAVDCALDPLSETKCTLKSFTVEKGIYQTSNFRVQPTESIVRFPNITNLCPFGEVFNATRFASVYAWNRKRISNCVADYSVLYNSASFSTFKCYGVSPTKLNDLCFTNVYADSFVIRGDEVRQIAPGQTGKIADYNYKLPDDFTGCVIAWNSNNLDSKVGGNYNYLYRLFRKSNLKPFERDISTEIYQAGSTPCNGVEGFNCYFPLQSYGFQPTNGVGYQPYRVVVLSFELLHAPATVCGPKKSTNLVKNKCVNFNFNGLTGTGVLTESNKKFLPFQQFGRDIADTTDAVRDPQTLEILDITPCSFGGVSVITPGTNTSNQVAVLYQDVNCTEVPVAIHADQLTPTWRVYSTGSNVFQTRAGCLIGAEHVNNSYECDIPIGAGICASYQTQTNSPRRARSVASQSIIAYTMSLGAENSVAYSNNSIAIPTNFTISVTTEILPVSMTKTSVDCTMYICGDSTECSNLLLQYGSFCTQLNRALTGIAVEQDKNTQEVFAQVKQIYKTPPIKDFGGFNFSQILPDPSKPSKRSFIEDLLFNKVTLADAGFIKQYGDCLGDIAARDLICAQKFNGLTVLPPLLTDEMIAQYTSALLAGTITSGWTFGAGAALQIPFAMQMAYRFNGIGVTQNVLYENQKLIANQFNSAIGKIQDSLSSTASALGKLQDVVNQNAQALNTLVKQLSSNFGAISSVLNDILSRLDPPEAEVQIDRLITGRLQSLQTYVTQQLIRAAEIRASANLAATKMSECVLGQSKRVDFCGKGYHLMSFPQSAPHGVVFLHVTYVFAQEKNFTTAPAICHDGKAHFPREGVFVSNGTHWFVTQRNFYEPQIITTDNTFVSGNCDVVIGIVNNTVYDPLQPELESFKEELDKYFKNHTSPDVDLGDISGINASVVNIQKEIDRLNEVAKNLNESLIDLQELGKYEQYIKGGGGSDIDPYKEFGSSYQLLNFLPLDFFPDLNALVDTATALYEEELTGREHCSPHHTAIRQALVCWDELTKLIAWMSSNITSEQVRTIIVNHVNDTWGLKVRQSLWFHLSCLTFGQHTVQEFLVSFGVWIRTPAPYRPPNAPILSTLPEHTVIC

SEQ ID NO: 6878 - protein, 1365 aa, Artificial Sequence
  SARS-CoV-2/2019-nCoV/USA-CruiseA-18/2020__MT159716.1 spike protein (1-1211)(K986P_V987P_P1069F) WhcAg construct
MFVFLVLLPLVSSQCVNLTTRTQLPPAYTNSFTRGVYYPDKVFRSSVLHSTQDLFLPFFSNVTWFHAIHVSGTNGTKRFDNPVLPFNDGVYFASTEKSNIIRGWIFGTTLDSKTQSLLIVNNATNVVIKVCEFQFCNDPFLGVYYHKNNKSWMESELRVYSSANNCTFEYVSQPFLMDLEGKQGNFKNLREFVFKNIDGYFKIYSKHTPINLVRDLPQGFSALEPLVDLPIGINITRFQTLLALHRSYLTPGDSSSGWTAGAAAYYVGYLQPRTFLLKYNENGTITDAVDCALDPLSETKCTLKSFTVEKGIYQTSNFRVQPTESIVRFPNITNLCPFGEVFNATRFASVYAWNRKRISNCVADYSVLYNSASFSTFKCYGVSPTKLNDLCFTNVYADSFVIRGDEVRQIAPGQTGKIADYNYKLPDDFTGCVIAWNSNNLDSKVGGNYNYLYRLFRKSNLKPFERDISTEIYQAGSTPCNGVEGFNCYFPLQSYGFQPTNGVGYQPYRVVVLSFELLHAPATVCGPKKSTNLVKNKCVNFNFNGLTGTGVLTESNKKFLPFQQFGRDIADTTDAVRDPQTLEILDITPCSFGGVSVITPGTNTSNQVAVLYQDVNCTEVPVAIHADQLTPTWRVYSTGSNVFQTRAGCLIGAEHVNNSYECDIPIGAGICASYQTQTNSPRRARSVASQSIIAYTMSLGAENSVAYSNNSIAIPTNFTISVTTEILPVSMTKTSVDCTMYICGDSTECSNLLLQYGSFCTQLNRALTGIAVEQDKNTQEVFAQVKQIYKTPPIKDFGGFNFSQILPDPSKPSKRSFIEDLLFNKVTLADAGFIKQYGDCLGDIAARDLICAQKFNGLTVLPPLLTDEMIAQYTSALLAGTITSGWTFGAGAALQIPFAMQMAYRFNGIGVTQNVLYENQKLIANQFNSAIGKIQDSLSSTASALGKLQDVVNQNAQALNTLVKQLSSNFGAISSVLNDILSRLDPPEAEVQIDRLITGRLQSLQTYVTQQLIRAAEIRASANLAATKMSECVLGQSKRVDFCGKGYHLMSFPQSAPHGVVFLHVTYVFAQEKNFTTAPAICHDGKAHFPREGVFVSNGTHWFVTQRNFYEPQIITTDNTFVSGNCDVVIGIVNNTVYDPLQPELDSFKEELDKYFKNHTSPDVDLGDISGINASVVNIQKEIDRLNEVAKNLNESLIDLQELGKYEQYIKGGGGSDIDPYKEFGSSYQLLNFLPLDFFPDLNALVDTATALYEEELTGREHCSPHHTAIRQALVCWDELTKLIAWMSSNITSEQVRTIIVNHVNDTWGLKVRQSLWFHLSCLTFGQHTVQEFLVSFGVWIRTPAPYRPPNAPILSTLPEHTVIC

SEQ ID NO: 6879 - protein, 1365 aa, Artificial Sequence
  SARS-CoV-2/SARS-CoV-2/Yunnan-01/human/2020/CHN__MT049951.1 spike protein (1-1211)(K986P_V987P_P1069F) WhcAg construct
MFVFLVLLPLVSSQCVNLTTRTQLPPANTNSFTRGVYYPDKVFRSSVLHSTQDLFLPFFSNVTWFHAIHVSGTNGTKRFDNPVLPFNDGVYFASTEKSNIIRGWIFGTTLDSKTQSLLIVNNATNVVIKVCEFQFCNDPFLGVYYHKNNKSWMESEFRVYSSANNCTFEYVSQPFLMDLEGKQGNFKNLREFVFKNIDGYFKIYSKHTPINLVRDLPQGFSALEPLVDLPIGINITRFQTLLALHRSYLTPGDSSSGWTAGAAAYYVGYLQPRTFLLKYNENGTITDAVDCALDPLSETKCTLKSFTVEKGIYQTSNFRVQPTESIVRFPNITNLCPFGEVFNATRFASVYAWNRKRISNCVADYSVLYNSASFSTFKCYGVSPTKLNDLCFTNVYADSFVIRGDEVRQIAPGQTGKIADYNYKLPDDFTGCVIAWNSNNLDSKVGGNYNYLYRLFRKSNLKPFERDISTEIYQAGSTPCNGVEGFNCYFPLQSYGFQPTNGVGYQPYRVVVLSFELLHAPATVCGPKKSTNLVKNKCVNFNFNGLTGTGVLTESNKKFLPFQQFGRDIADTTDAVRDPQTLEILDITPCSFGGVSVITPGTNTSNQVAVLYQDVNCTEVPVAIHADQLTPTWRVYSTGSNVFQTRAGCLIGAEHVNNSYECDIPIGAGICASYQTQTNSPRRARSVASQSIIAYTMSLGAENSVAYSNNSIAIPTNFTISVTTEILPVSMTKTSVDCTMYICGDSTECSNLLLQYGSFCTQLNRALTGIAVEQDKNTQEVFAQVKQIYKTPPIKDFGGFNFSQILPDPSKPSKRSFIEDLLFNKVTLADAGFIKQYGDCLGDIAARDLICAQKFNGLTVLPPLLTDEMIAQYTSALLAGTITSGWTFGAGAALQIPFAMQMAYRFNGIGVTQNVLYENQKLIANQFNSAIGKIQDSLSSTASALGKLQDVVNQNAQALNTLVKQLSSNFGAISSVLNDILSRLDPPEAEVQIDRLITGRLQSLQTYVTQQLIRAAEIRASANLAATKMSECVLGQSKRVDFCGKGYHLMSFPQSAPHGVVFLHVTYVFAQEKNFTTAPAICHDGKAHFPREGVFVSNGTHWFVTQRNFYEPQIITTDNTFVSGNCDVVIGIVNNTVYDPLQPELDSFKEELDKYFKNHTSPDVDLGDISGINASVVNIQKEIDRLNEVAKNLNESLIDLQELGKYEQYIKGGGGSDIDPYKEFGSSYQLLNFLPLDFFPDLNALVDTATALYEEELTGREHCSPHHTAIRQALVCWDELTKLIAWMSSNITSEQVRTIIVNHVNDTWGLKVRQSLWFHLSCLTFGQHTVQEFLVSFGVWIRTPAPYRPPNAPILSTLPEHTVIC

SEQ ID NO: 6880 - protein, 1365 aa, Artificial Sequence
  SARS-CoV-2/USA/WA-UW292/2020__EPI_ISL_418077 spike protein (1-1211)(K986P_V987P_P1069F) WhcAg construct
MFVFLVLLPLVSSQCVNLTTRTQLPPAYTNSFTRGVYYPDKVFRSSVLHSTQDLFLPFFSNVTWFHAIHVSGTNGTKRFDNPVLPFNDGVYFASTEKSNIIRGWIFGTTLDSKTQSLLIVNNATNVVIKVCEFQFCNDPFLGVYYHKNNKSWMESEFRVYSSANNCTFEYVSQPFLMDLEGKQGNFKNLREFVFKNIDGYFKIYSKHTPINLVRDLPQGFSALEPLVDLPIGINITRFQTLLALHRSYLTPGDSSSGWTAGAAAYYVGYLQPRTFLLKYNENGTITDAVDCALDPLSETKCTLKSFTVEKGIYQTSNFRVQPTESIVRFPNITNLCPFGEVFNATRFASVYAWNRKRISNCVADYSVLYNSASFSTFKCYGVSPTKLNDLCFTNVYADSFVIRGDEVRQIAPGQTGKIADYNYKLPDDFTGCVIAWNSNNLDSKVGGNYNYLYRLFRKSNLKPFERDISTEIYQASSTPCNGVEGFNCYFPLQSYGFQPTNGVGYQPYRVVVLSFELLHAPATVCGPKKSTNLVKNKCVNFNFNGLTGTGVLTESNKKFLPFQQFGRDIADTTDAVRDPQTLEILDITPCSFGGVSVITPGTNTSNQVAVLYQDVNCTEVPVAIHADQLTPTWRVYSTGSNVFQTRAGCLIGAEHVNNSYECDIPIGAGICASYQTQTNSPRRARSVASQSIIAYTMSLGAENSVAYSNNSIAIPTNFTISVTTEILPVSMTKTSVDCTMYICGDSTECSNLLLQYGSFCTQLNRALTGIAVEQDKNTQEVFAQVKQIYKTPPIKDFGGFNFSQILPDPSKPSKRSFIEDLLFNKVTLADAGFIKQYGDCLGDIAARDLICAQKFNGLTVLPPLLTDEMIAQYTSALLAGTITSGWTFGAGAALQIPFAMQMAYRFNGIGVTQNVLYENQKLIANQFNSAIGKIQDSLSSTASALGKLQDVVNQNAQALNTLVKQLSSNFGAISSVLNDILSRLDPPEAEVQIDRLITGRLQSLQTYVTQQLIRAAEIRASANLAATKMSECVLGQSKRVDFCGKGYHLMSFPQSAPHGVVFLHVTYVFAQEKNFTTAPAICHDGKAHFPREGVFVSNGTHWFVTQRNFYEPQIITTDNTFVSGNCDVVIGIVNNTVYDPLQPELDSFKEELDKYFKNHTSPDVDLGDISGINASVVNIQKEIDRLNEVAKNLNESLIDLQELGKYEQYIKGGGGSDIDPYKEFGSSYQLLNFLPLDFFPDLNALVDTATALYEEELTGREHCSPHHTAIRQALVCWDELTKLIAWMSSNITSEQVRTIIVNHVNDTWGLKVRQSLWFHLSCLTFGQHTVQEFLVSFGVWIRTPAPYRPPNAPILSTLPEHTVIC

SEQ ID NO: 6881 - protein, 1365 aa, Artificial Sequence
  SARS-CoV-2/Iceland/192/2020__EPI_ISL_417819 spike protein (1-1211)(K986P_V987P_P1069F) WhcAg construct
MFVFFVLLPLVSSQCVNLTTRTQLPPAYTNSFTRGVYYPDKVFRSSVLHSTQDLFLPFFSNVTWFHAIHVSGTNGTKRFDNPVLPFNDGVYFASTEKSNIIRGWIFGTTLDSKTQSLLIVNNATNVVIKVCEFQFCNDPFLGVYYHKNNKSWMESEFRVYSSANNCTFEYVSQPFLMDLEGKQGNFKNLREFVFKNIDGYFKIYSKHTPINLVRDLPQGFSALEPLVDLPIGINITRFQTLLALHRSYLTPGDSSSGWTAGAAAYYVGYLQPRTFLLKYNENGTITDAVDCALDPLSETKCTLKSFTVEKGIYQTSNFRVQPTESIVRFPNITNLCPFGEVFNATRFASVYAWNRKRISNCVADYSVLYNSASFSTFKCYGVSPTKLNDLCFTNVYADSFVIRGDEVRQIAPGQTGKIADYNYKLPDDFTGCVIAWNSNNLDSKVGGNYNYLYRLFRKSNLKPFERDISTEIYQAGSTPCNGVEGFNCYFPLQSYGFQPTNGVGYQPYRVVVLSFELLHAPATVCGPKKSTNLVKNKCVNFNFNGLTGTGVLTESNKKFLPFQQFGRDIADTTDAVRDPQTLEILDITPCSFGGVSVITPGTNTSNQVAVLYQGVNCTEVPVAIHADQLTPTWRVYSTGSNVFQTRAGCLIGAEHVNNSYECDIPIGAGICASYQTQTNSPRRARSVASQSIIAYTMSLGAENSVAYSNNSIAIPTNFTISVTTEILPVSMTKTSVDCTMYICGDSTECSNLLLQYGSFCTQLNRALTGIAVEQDKNTQEVFAQVKQIYKTPPIKDFGGFNFSQILPDPSKPSKRSFIEDLLFNKVTLADAGFIKQYGDCLGDIAARDLICAQKFNGLTVLPPLLTDEMIAQYTSALLAGTITSGWTFGAGAALQIPFAMQMAYRFNGIGVTQNVLYENQKLIANQFNSAIGKIQDSLSSTASALGKLQDVVNQNAQALNTLVKQLSSNFGAISSVLNDILSRLDPPEAEVQIDRLITGRLQSLQTYVTQQLIRAAEIRASANLAATKMSECVLGQSKRVDFCGKGYHLMSFPQSAPHGVVFLHVTYVFAQEKNFTTAPAICHDGKAHFPREGVFVSNGTHWFVTQRNFYEPQIITTDNTFVSGNCDVVIGIVNNTVYDPLQPELDSFKEELDKYFKNHTSPDVDLGDISGINASVVNIQKEIDRLNEVAKNLNESLIDLQELGKYEQYIKGGGGSDIDPYKEFGSSYQLLNFLPLDFFPDLNALVDTATALYEEELTGREHCSPHHTAIRQALVCWDELTKLIAWMSSNITSEQVRTIIVNHVNDTWGLKVRQSLWFHLSCLTFGQHTVQEFLVSFGVWIRTPAPYRPPNAPILSTLPEHTVIC

SEQ ID NO: 6882 - protein, 1365 aa, Artificial Sequence
  SARS-CoV-2/Belgium/ULG-6939/2020__EPI_ISL_417020 spike protein (1-1211)(K986P_V987P_P1069F) WhcAg construct
MFVFLVLLPLVSSQCVNLTTRTQLPPAYTNSFTRGVYYPDKVFRSSVLHSTQDLFLPFFSNVTWFHAIHVSGTNGTKRFDNPVLPFNDGVYFASTEKSNIIRGWIFGTTLDSKTQSLLIVNNATNVVIKVCEFQFCNDPFLGVYYHKNNKSWMESEFRVYSSANNCTFEYVSQPFLMDLEGKQGNFKNLREFVFKNIDGYFKIYSKHTPINLVRDLPQGFSALEPLVDLPIGINITRFQTLLALHRSYLTPGDSSSGWTAGAAAYYVGYLQPRTFLLKYNENGTITDAVDCALDPLSETKCTLKSFTVEKGIYQTSNFRVQPTESIVRFPNITNLCPFGEVFNATRFASVYAWNRKRISNCVADYSVLYNSASFSTFKCYGVSPTKLNDLCFTNVYADSFVIRGDEVRQIAPGQTGKIADYNYKLPDDFTGCVIAWNSNNLDSKVGGNYNYLYRLFRKSNLKPFERDISTEIYQAGSTPCNGVEGFNCYFPLQSYGFQPTNGVGYQPYRVVVLSFELLHAPATVCGPKKSTNLVKNKCVNFNFNGLTGTGVLTESNKKFLPFQQFGRDIADTTDAVRDPQTLEILDITPCSFGGVSVITPGTNTSNQVAVLYQGVNCTEVPVAIHADQLTPTWRVYSTGSNVFQTRAGCLIGAEHVNNSYECDIPIGAGICASYQTQTNSPRRARSVASQSIIAYTMSLGAENSVVYSNNSIAIPTNFTISVTTEILPVSMTKTSVDCTMYICGDSTECSNLLLQYGSFCTQLNRALTGIAVEQDKNTQEVFAQVKQIYKTPPIKDFGGFNFSQILPDPSKPSKRSFIEDLLFNKVTLADAGFIKQYGDCLGDIAARDLICAQKFNGLTVLPPLLTDEMIAQYTSALLAGTITSGWTFGAGAALQIPFAMQMAYRFNGIGVTQNVLYENQKLIANQFNSAIGKIQDSLSSTASALGKLQDVVNQNAQALNTLVKQLSSNFGAISSVLNDILSRLDPPEAEVQIDRLITGRLQSLQTYVTQQLIRAAEIRASANLAATKMSECVLGQSKRVDFCGKGYHLMSFPQSAPHGVVFLHVTYVFAQEKNFTTAPAICHDGKAHFPREGVFVSNGTHWFVTQRNFYEPQIITTDNTFVSGNCDVVIGIVNNTVYDPLQPELDSFKEELDKYFKNHTSPDVDLGDISGINASVVNIQKEIDRLNEVAKNLNESLIDLQELGKYEQYIKGGGGSDIDPYKEFGSSYQLLNFLPLDFFPDLNALVDTATALYEEELTGREHCSPHHTAIRQALVCWDELTKLIAWMSSNITSEQVRTIIVNHVNDTWGLKVRQSLWFHLSCLTFGQHTVQEFLVSFGVWIRTPAPYRPPNAPILSTLPEHTVIC

SEQ ID NO: 6883 - protein, 1365 aa, Artificial Sequence
  SARS-CoV-2/France/HF2496/2020__EPI_ISL_418231 spike protein (1-1211)(K986P_V987P_P1069F) WhcAg construct
MFVFLVLLPLVSSQCVNLTTRTQLPPAYTNSFTRGVYYPDKVFRSSVLHSTQDLFLPFFSNVTWFHAIHVSGTNGTKRFDNPVLPFNDGVYFASTEKSNIIRGWIFGTTLDSKTQSLLIVNNATNVVIKVCEFQFCNDPFLGVYYHKNNKSWMESEFRVYSSANNCTFEYVSQPFLMDLEGKQGNFKNLREFVFKNIDGYFKIYSKHTPINLVRDLPQGFSALEPLVDLPIGINITRFQTLLALHRSYLTPGDSSSGWTAGAAAYYVGYLQPRTFLLKYNENGTITDAVDCALDPLSETKCTLKSFTVEKGIYQTSNFRVQPTESIVRFPNITNLCPFGEVFNATRFASVYAWNRKRISNCVADYSVLYNSASFSTFKCYGVSPTKLNDLCFTNVYADSFVIRGDEVRQIAPGQTGKIADYNYKLPDDFTGCVIAWNSNNLDSKVGGNYNYLYRLFRKSNLKPFERDISTEIYQAGSTPCNGVEGFNCYFPLQSYGFQPTNGVGYQPYRVVVLSFELLHAPATVCGPKKSTNLVKNKCVNFNFNGLTGTGVLTESNKKFLPFQQFGRDIADTTDAVRDPQTLEILDITPCSFGGVSVITPGTNTSNQVAVLYQGVNCTEVPVAIHADQLTPTWRVYSTGSNVFQTRAGCLIGAEHVNNSYECDIPIGAGICASYQTQTNSPRRARSVASQSIIAYTMSLGAENSVAYSNNSIAIPTNFTISVTTEILPVSMTKTSVDCTMYICGDSTECSNLLLQYGSFCTQLNRALTGIAVEQDKNTQEVFAQVKQIYKTPPIKDFGGFNFSQILPDPSKPSKRSFIEDLLFNKVTLADAGFIKQYGDCLGDIVARDLICAQKFNGLTVLPPLLTDEMIAQYTSALLAGTITSGWTFGAGAALQIPFAMQMAYRFNGIGVTQNVLYENQKLIANQFNSAIGKIQDSLSSTASALGKLQDVVNQNAQALNTLVKQLSSNFGAISSVLNDILSRLDPPEAEVQIDRLITGRLQSLQTYVTQQLIRAAEIRASANLAATKMSECVLGQSKRVDFCGKGYHLMSFPQSAPHGVVFLHVTYVFAQEKNFTTAPAICHDGKAHFPREGVFVSNGTHWFVTQRNFYEPQIITTDNTFVSGNCDVVIGIVNNTVYDPLQPELDSFKEELDKYFKNHTSPDVDLGDISGINASVVNIQKEIDRLNEVAKNLNESLIDLQELGKYEQYIKGGGGSDIDPYKEFGSSYQLLNFLPLDFFPDLNALVDTATALYEEELTGREHCSPHHTAIRQALVCWDELTKLIAWMSSNITSEQVRTIIVNHVNDTWGLKVRQSLWFHLSCLTFGQHTVQEFLVSFGVWIRTPAPYRPPNAPILSTLPEHTVIC

SEQ ID NO: 6884 - protein, 1365 aa, Artificial Sequence
  SARS-CoV-2/USA/WA-UW291/2020__EPI_ISL_418076 spike protein (1-1211)(K986P_V987P_P1069F) WhcAg construct
MFVFLVLLPLVSSQCVNLTTRTQLPPAYTNSFTRGVYYPDKVFRSSVLHSTQDLFLPFFSNVTWFHAIHVSGTNGTKRFDNPVLPFNDGVYFASTEKSNIIRGWIFGTTLDSKTQSLLIVNNATNVVIKVCEFQFCNDPFLGVYYHKNNKSWMESEFRVYSSANNCTFEYVSQPFLMDLEGKQGNFKNLREFVFKNIDGYFKIYSKHTPINLVRDLPQGFSALEPLVDLPIGINITRFQTLLALHRSYLTPGDSSSGWTAGAAAYYVGYLQPRTFLLKYNENGTITDAVDCALDPLSETKCTLKSFTVEKGIYQTSNFRVQPTESIVRFPNITNLCPFGEVFNATRFASVYAWNRKRISNCVADYSVLYNSASFSTFKCYGVSPTKLNDLCFTNVYADSFVIRGDEVRQIAPGQTGKIADYNYKLPDDFTGCVIAWNSNNLDSKVGGNYNYLYRLFRKSNLKPFERDISTEIYQAGSTPCNGVEGFNCYFPLQSYGFQPTNGVGYQPYRVVVLSFELLHAPATVCGPKKSTNLVKNKCVNFNFNGLTGTGVLTESNKKFLPFQQFGRDIADTTDAVRDPQTLEILDITPCSFGGVSVITPGTNTSNQVAVLYQGVNCTEVPVAIHADQLTPTWRVYSTGSNVFQTRAGCLIGAEHVNNSYECDIPIGAGICASYQTQTNSPRRARSVASQSIIAYTMSLGAENSVAYSNNSIAIPTNFTISVTTEILPVSMTKTSVDCTMYICGDSTECSNLLLQYGSFCTQLNRALTGIAVEQDKNTQEVFAQVKQIYKTPPIKDFGGFNFSQILPDPSKPSKRSFIEDLLFNKVTLADAGFIKQYGDCLGDIAARDLICAQKFNGLTVLPPLLTDEMIAQYTSALLAGTITSGWTFGAGAALQIPFAMQMAYRFNGIGVTQNVLYENQKLIANQFNSAIGKIQYSLSSTASALGKLQDVVNQNAQALNTLVKQLSSNFGAISSVLNDILSRLDPPEAEVQIDRLITGRLQSLQTYVTQQLIRAAEIRASANLAATKMSECVLGQSKRVDFCGKGYHLMSFPQSAPHGVVFLHVTYVFAQEKNFTTAPAICHDGKAHFPREGVFVSNGTHWFVTQRNFYEPQIITTDNTFVSGNCDVVIGIVNNTVYDPLQPELDSFKEELDKYFKNHTSPDVDLGDISGINASVVNIQKEIDRLNEVAKNLNESLIDLQELGKYEQYIKGGGGSDIDPYKEFGSSYQLLNFLPLDFFPDLNALVDTATALYEEELTGREHCSPHHTAIRQALVCWDELTKLIAWMSSNITSEQVRTIIVNHVNDTWGLKVRQSLWFHLSCLTFGQHTVQEFLVSFGVWIRTPAPYRPPNAPILSTLPEHTVIC

SEQ ID NO: 6885 - protein, 1365 aa, Artificial Sequence; identical to SEQ ID NO: 6848
  SARS-CoV-2/Portugal/PT0034/2020__EPI_ISL_418019 spike protein (1-1211)(K986P_V987P_P1069F) WhcAg construct

SEQ ID NO: 6886 - protein, 1365 aa, Artificial Sequence
  SARS-CoV-2/Iceland/202/2020__EPI_ISL_417750 spike protein (1-1211)(K986P_V987P_P1069F) WhcAg construct
MFVFLVLLPLVSSQCVNLTTRTQLPPAYTNSFTRGVYYPDKVFRSSVLHSTQDLFLPFFSNVTWFHAIHVSGTNGTKRFDNPVLPFNDGVYFASTEKSNIIRGWIFGTTLDSKTQSLLIVNNATNVVIKVCEFQFCNDPFLGVYYHKNNKSWMESEFRVYSSANNCTFEYVSQPFLMDLEGKQGNFKNLREFVFKNIDGYFKIYSKHTPINLVRDLPQGFSALEPLVDLPIGINITRFQTLLALHRSYLTPGDSSSGWTAGAAAYYVGYLQPRTFLLKYNENGTITDAVDCALDPLSETKCTLKSFTVEKGIYQTSNFRVQPTESIVRFPNITNLCPFGEVFNATRFASVYAWNRKRISNCVADYSVLYNSASFSTFKCYGVSPTKLNDLCFTNVYADSFVIRGDEVRQIAPGQTGKIADYNYKLPDDFTGCVIAWNSNNLDSKVGGNYNYLYRLFRKSNLKPFERDISTEIYQAGSTPCNGVEGFNCYFPLQSYGFQPTNGVGYQPYRVVVLSFELLHAPATVCGPKKSTNLVKNKCVNFNFNGLTGTGVLTESNKKFLPFQQFGRDIADTTDAVRDPQTLEILDITPCSFGGVSVITPGTNTSNQVAVLYQDVNCTEVPVAIHADQLTPTWRVYSTGSNVFQTRAGCLIGAEHVNNSYECDIPIGAGICASYQTQTNSPRRARSVASQSIIAYTMSLGAENSVAYSNNSIAIPTNFTISVTTEILPVSMTKTSVDCTMYICGDSTECSNLLLQYGSFCTQLNRALTGIAVEQDKNTQEVFAQVKQIYKTPPIKDFGGFNFSQILPDPSKPSKRSFIEDLLFNKVTLADAGFIKQYGDCLGDIAARDLICAQKFNGLTVLPPLLTDEMIAQYTSALLAGTITSGWTFGAGAALQIPFAMQMAYRFNGIGVTQNVLYENQKLIANQFNSAIGKIQDSLSSTASALGKLQDVVNQNAQALNTLVKQLSSNFGAISSVLNDILSRLDPPEAEVQIDRLITGRLQSLQTYVTQQLIRAAEIRASANLAATKMSECVLGQSKRVDFCGKGYHLMSFPQSAPHGVVFLHVTYVFAQEKNFTTAPAICHDGKAHFPREGVFVSNGTHWFVTQRNFYEPQIITTDNTFVSGNCDVVIGIVNNTVYDPLQPELDSFKEELDKYFKNHTSPDVDLGDIPGINASVVNIQKEIDRLNEVAKNLNESLIDLQELGKYEQYIKGGGGSDIDPYKEFGSSYQLLNFLPLDFFPDLNALVDTATALYEEELTGREHCSPHHTAIRQALVCWDELTKLIAWMSSNITSEQVRTIIVNHVNDTWGLKVRQSLWFHLSCLTFGQHTVQEFLVSFGVWIRTPAPYRPPNAPILSTLPEHTVIC

SEQ ID NO: 6887 - protein, 1365 aa, Artificial Sequence
  SARS-CoV-2/USA/WA-UW261/2020__EPI_ISL_418046 spike protein (1-1211)(K986P_V987P_P1069F) WhcAg construct
MFVFLVLLPLVSSQCVNLTTRTQLPPAYTNSFTRGVYYPDKVFRSSVLHSTQDLFLPFFSNVTWFHAIHVSGTNGTKRFDNPVLPFNDGVYFASTEKSNIIRGWIFGTTLDSKTQSLLIVNNATNVVIKVCEFQFCNDPFLGVYYHKNNKSWMESEFRVYSSANNCTFEYVSQPFLMDLEGKQGNFKNLREFVFKNIDGYFKIYSKHTPINLVRDLPQGFSALEPLVDLPIGINITRFQTLLALHRSYLTPGDSSSGWTAGAAAYYVGYLQPRTFLLKYNENGTITDAVDCALDPLSETKCTLKSFTVEKGIYQTSNFRVQPTESIVRFPNITNLCPFGEVFNATRFTSVYAWNRKRISNCVADYSVLYNSASFSTFKCYGVSPTKLNDLCFTNVYADSFVIRGDEVRQIAPGQTGKIADYNYKLPDDFTGCVIAWNSNNLDSKVGGNYNYLYRLFRKSNLKPFERDISTEIYQAGSTPCNGVEGFNCYFPLQSYGFQPTNGVGYQPYRVVVLSFELLHAPATVCGPKKSTNLVKNKCVNFNFNGLTGTGVLTESNKKFLPFQQFGRDIADTTDAVRDPQTLEILDITPCSFGGVSVITPGTNTSNQVAVLYQDVNCTEVPVAIHADQLTPTWRVYSTGSNVFQTRAGCLIGAEHVNNSYECDIPIGAGICASYQTQTNSPRRARSVASQSIIAYTMSLGAENSVAYSNNSIAIPTNFTISVTTEILPVSMTKTSVDCTMYICGDSTECSNLLLQYGSFCTQLNRALTGIAVEQDKNTQEVFAQVKQIYKTPPIKDFGGFNFSQILPDPSKPSKRSFIEDLLFNKVTLADAGFIKQYGDCLGDIAARDLICAQKFNGLTVLPPLLTDEMIAQYTSALLAGTITSGWTFGAGAALQIPFAMQMAYRFNGIGVTQNVLYENQKLIANQFNSAIGKIQDSLSSTASALGKLQDVVNQNAQALNTLVKQLSSNFGAISSVLNDILSRLDPPEAEVQIDRLITGRLQSLQTYVTQQLIRAAEIRASANLAATKMSECVLGQSKRVDFCGKGYHLMSFPQSAPHGVVFLHVTYVFAQEKNFTTAPAICHDGKAHFPREGVFVSNGTHWFVTQRNFYEPQIITTDNTFVSGNCDVVIGIVNNTVYDPLQPELDSFKEELDKYFKNHTSPDVDLGDISGINASVVNIQKEIDRLNEVAKNLNESLIDLQELGKYEQYIKGGGGSDIDPYKEFGSSYQLLNFLPLDFFPDLNALVDTATALYEEELTGREHCSPHHTAIRQALVCWDELTKLIAWMSSNITSEQVRTIIVNHVNDTWGLKVRQSLWFHLSCLTFGQHTVQEFLVSFGVWIRTPAPYRPPNAPILSTLPEHTVIC

SEQ ID NO: 6888 - protein, 1365 aa, Artificial Sequence
  SARS-CoV-2/Portugal/PT0035/2020__EPI_ISL_418020 spike protein (1-1211)(K986P_V987P_P1069F) WhcAg construct
MFVFLVLLPLVSSQCVNLTTRTQLPPAYTNSFTRGVYYPDKVFRSSVLHSTQDLFLPFFSNVTWFHAIHVSGTNGTKRFDNPVLPFNDGVYFASTEKSNIIRGWIFGTTLDSKTQSLLIVNNATNVVIKVCEFQFCNDPFLGVYYHKNNKSWMESEFRVYSSANNCTFEYVSQPFLMDLEGKQGNFKNLREFVFKNIDGYFKIYSKHTPINLVRDLPQGFSALEPLVDLPIGINITRFQTLLALHRSYLTPGDSSSGWTAGAAAYYVGYLQPRTFLLKYNENGTITDAVDCALDPLSETKCTLKSFTVEKGIYQTSNFRVQPTESIVRFPNITNLCPFGEVFNATRFASVYAWNRKRISNCVADYSVLYNSASFSTFKCYGVSPTKLNDLCFTNVYADSFVIRGDEVRQIAPGQTGKIADYNYKLPDDFTGCVIAWNSNNLDSKVGGNYNYLYRLFRKSNLKPFERDISTEIYQAGSTPCNGVEGFNCYFPLQSYGFQPTNGVGYQPYRVVVLSFELLHAPATVCGPKKSTNLVKNKCVNFNFNGLTGTGVLTESNKKFLPFQQFGRDIADTTDAVRDPQTLEILDITPCSFGGVSVITPGTNTSNQVAVLYQDVNCTEVPVAIHADQLTPTWRVYSTGSNVFQTRAGCLIGAEHVNNSYECDIPIGAGICASYQTQTNSPRRARSVASQSIIAYTMSLGAENSVAYSNNSIAIPTNFTISVTTEILPVSMTKTSVDCTMYICGDSTECSNLLLQYGSFCTQLNRALTGIAVEQDKNTQEVFAQVKQIYKTPPIKDFGGFNFSQILPDPSKPSKRSFIEDLLFNKVTLADAGFIKQYGDCLGDISARDLICAQKFNGLTVLPPLLTDEMIAQYTSALLAGTITSGWTFGAGAALQIPFAMQMAYRFNGIGVTQNVLYENQKLIANQFNSAIGKIQDSLSSTASALGKLQDVVNQNAQALNTLVKQLSSNFGAISSVLNDILSRLDPPEAEVQIDRLITGRLQSLQTYVTQQLIRAAEIRASANLAATKMSECVLGQSKRVDFCGKGYHLMSFPQSAPHGVVFLHVTYVFAQEKNFTTAPAICHDGKAHFPREGVFVSNGTHWFVTQRNFYEPQIITTDNTFVSGNCDVVIGIVNNTVYDPLQPELDSFKEELDKYFKNHTSPDVDLGDISGINASVVNIQKEIDRLNEVAKNLNESLIDLQELGKYEQYIKGGGGSDIDPYKEFGSSYQLLNFLPLDFFPDLNALVDTATALYEEELTGREHCSPHHTAIRQALVCWDELTKLIAWMSSNITSEQVRTIIVNHVNDTWGLKVRQSLWFHLSCLTFGQHTVQEFLVSFGVWIRTPAPYRPPNAPILSTLPEHTVIC

SEQ ID NO: 6889 - protein, 1365 aa, Artificial Sequence
  SARS-CoV-2/USA/NY-NYUMC7/2020__EPI_ISL_418192 spike protein (1-1211)(K986P_V987P_P1069F) WhcAg construct
MFVFLVLLPLVSSQCVNLTTRTQLPPAYTNSFTRGVYYPDKVFRSSVLHSTQDLFLPFFSNVTWFHAIHVSGTNGTKRFDNPVLPFNDGVYFASTEKSNIIRGWIFGTTLDSKTQSLLIVNNATNVVIKVCEFQFCNDPFLGVYHHKNNKSWMESEFRVYSSANNCTFEYVSQPFLMDLEGKQGNFKNLREFVFKNIDGYFKIYSKHTPINLVRDLPQGFSALEPLVDLPIGINITRFQTLLALHRSYLTPGDSSSGWTAGAAAYYVGYLQPRTFLLKYNENGTITDAVDCALDPLSETKCTLKSFTVEKGIYQTSNFRVQPTESIVRFPNITNLCPFGEVFNATRFASVYAWNRKRISNCVADYSVLYNSASFSTFKCYGVSPTKLNDLCFTNVYADSFVIRGDEVRQIAPGQTGKIADYNYKLPDDFTGCVIAWNSNNLDSKVGGNYNYLYRLFRKSNLKPFERDISTEIYQAGSTPCNGVEGFNCYFPLQSYGFQPTNGVGYQPYRVVVLSFELLHAPATVCGPKKSTNLVKNKCVNFNFNGLTGTGVLTESNKKFLPFQQFGRDIADTTDAVRDPQTLEILDITPCSFGGVSVITPGTNTSNQVAVLYQGVNCTEVPVAIHADQLTPTWRVYSTGSNVFQTRAGCLIGAEHVNNSYECDIPIGAGICASYQTQTNSPRRARSVASQSIIAYTMSLGAENSVAYSNNSIAIPTNFTISVTTEILPVSMTKTSVDCTMYICGDSTECSNLLLQYGSFCTQLNRALTGIAVEQDKNTQEVFAQVKQIYKTPPIKDFGGFNFSQILPDPSKPSKRSFIEDLLFNKVTLADAGFIKQYGDCLGDIAARDLICAQKFNGLTVLPPLLTDEMIAQYTSALLAGTITSGWTFGAGAALQIPFAMQMAYRFNGIGVTQNVLYENQKLIANQFNSAIGKIQDSLSSTASALGKLQDVVNQNAQALNTLVKQLSSNFGAISSVLNDILSRLDPPEAEVQIDRLITGRLQSLQTYVTQQLIRAAEIRASANLAATKMSECVLGQSKRVDFCGKGYHLMSFPQSAPHGVVFLHVTYVFAQEKNFTTAPAICHDGKAHFPREGVFVSNGTHWFVTQRNFYEPQIITTDNTFVSGNCDVVIGIVNNTVYDPLQPELDSFKEELDKYFKNHTSPDVDLGDISGINASVVNIQKEIDRLNEVAKNLNESLIDLQELGKYEQYIKGGGGSDIDPYKEFGSSYQLLNFLPLDFFPDLNALVDTATALYEEELTGREHCSPHHTAIRQALVCWDELTKLIAWMSSNITSEQVRTIIVNHVNDTWGLKVRQSLWFHLSCLTFGQHTVQEFLVSFGVWIRTPAPYRPPNAPILSTLPEHTVIC

SEQ ID NO: 6890 - protein, 1365 aa, Artificial Sequence
  SARS-CoV-2/Iceland/189/2020__EPI_ISL_417709 spike protein (1-1211)(K986P_V987P_P1069F) WhcAg construct
MFVFLVLLPLVSSQCVNLTTRTQLPPAYTNSFTRGVYYPDKVFRSSVLHSTQDLFLPFFSNVTWFHAIHVSGTNGTKRFDNPVLPFNDGVYFASTEKSNIIRGWIFGTTLDSKTQSLLIVNNATNVVIKVCEFQFCNDPFLGVYYHKNNKSWMESEFRVYSSANNCTFEYVSQPFLMDLEGKQGNFKNLREFVFKNIDGYFKIYSKHTPINLVRDLPQGFSALEPLVDLPIGINITRFQTLLALHRSYLTPGDSSSGWTAGAAAYYVGYLQPRTFLLKYNENGTITDAVDCALDPLSETKCTLKSFTVEKGIYQTSNFRVQPTESIVRFPNITNLCPFGEVFNATRFASVYAWNRKRISNCVADYSVLYNSASFSTFKCYGVSPTKLNDLCFTNVYADSFVIRGDEVRQIAPGQTGKIADYNYKLPDDFTGCVIAWNSNNLDSKVGGNYNYLYRLFRKSNLKPFERDISTEIYQAGSTPCNGVEGFNCYFPLQSYGFQPTNGVGYQPYRVVVLSFELLHAPATVCGPKKSTNLVKNKCVNFNFNGLTGTGVLTESNKKFLPFQQFGRDIADTTDAVRDPQTLEILDITPCSFGGVSVITPGTNTSNQVAVLYQGVNCTEVPVAIHADQLTPTWRVYSTGSNVFQTRAGCLIGAEHVNNSYECDIPIGAGICASYQTQTNSPRRARSVASQSIIAYTMSLGAENSVAYSNNSIAIPTNFTISVTTEILPVSMTKTSVDCTMYICGDSTECSNLLLQYGSFCTQLNRALTGIAVEQDKNTQEVFAQVKQIYKTPPIKDFGGFNFSQILPDPSKPSKRSFIEDLLFNKVTLADAGFTKQYGDCLGDIAARDLICAQKFNGLTVLPPLLTDEMIAQYTSALLAGTITSGWTFGAGAALQIPFAMQMAYRFNGIGVTQNVLYENQKLIANQFNSAIGKIQDSLSSTASALGKLQDVVNQNAQALNTLVKQLSSNFGAISSVLNDILSRLDPPEAEVQIDRLITGRLQSLQTYVTQQLIRAAEIRASANLAATKMSECVLGQSKRVDFCGKGYHLMSFPQSAPHGVVFLHVTYVFAQEKNFTTAPAICHDGKAHFPREGVFVSNGTHWFVTQRNFYEPQIITTDNTFVSGNCDVVIGIVNNTVYDPLQPELDSFKEELDKYFKNHTSPDVDLGDISGINASVVNIQKEIDRLNEVAKNLNESLIDLQELGKYEQYIKGGGGSDIDPYKEFGSSYQLLNFLPLDFFPDLNALVDTATALYEEELTGREHCSPHHTAIRQALVCWDELTKLIAWMSSNITSEQVRTIIVNHVNDTWGLKVRQSLWFHLSCLTFGQHTVQEFLVSFGVWIRTPAPYRPPNAPILSTLPEHTVIC

SEQ ID NO: 6891 - protein, 1365 aa, Artificial Sequence
  SARS-CoV-2/Australia/NSW56/2020__EPI_ISL_417408 spike protein (1-1211)(K986P_V987P_P1069F) WhcAg construct
MFVFLVLLPLVSSQCVNLTTRTQLPPAYTNSFTRGVYYPDKVFRSSVLHSTQDLFLPFFSNVTWFHAIHVSGTNGTKRFDNPVLPFNDGVYFASTEKSNIIRGWIFGTTLDSKTQSLLIVNNATNVVIKVCEFQFCNDPFLGVYYHKNNKSWMESEFRVYSSANNCTFEYVSQPFLMDLEGKQGNFKNLREFVFKNIDGYFKIYSKHTPINLVRDLPQGFSALEPLVDLPIGINITRFQTLLALHRSYLTPGDSSSGWTAGAAAYYVGYLQPRTFLLKYNENGTITDAVDCALDPLSETKCTLKSFTVEKGIYQTSNFRVQPTESIVRFPNITNLCPFGEVFNATRFASVYAWNRKRISNCVADYSVLYNSASFSTFKCYGVSPTKLNDLCFTNVYADSFVIRGDEVRQIAPGQTGKIADYNYKLPDDFTGCVIAWNSNNLDSKVGGNYNYLYRLFRKSNLKPFERDISTEIYQAGSTPCNGVEGFNCYFPLQSYGFQPTNGVGYQPYRVVVLSFELLHAPATVCGPKKSTNLVKNKCVNFNFNGLTGTGVLTESNKKFLPFQQFGRDIADTTDAVRDPQTLEILDITPCSFGGVSVITPGTNTSNQVAVLYQDVNCTEVPVAIHADQLTPTWRVYSTGSNVFQTRAGCLIGAEHVNNSYECDIPIGAGICASYQTQTNSPRRARSVASQSIIAYTMSLGAENSVAYSNNSIAIPTNFTISVTTEILPVSMTKTSVDCTMYICGDSTECSNLLLQYGSFCTQLNRALTGIAVEQDKNTQEVFAQVKQIYKTPPIKDFGGFNFSQILPDSSKPSKRSFIEDLLFNKVTLADAGFIKQYGDCLGDIAARDLICAQKFNGLTVLPPLLTDEMIAQYTSALLAGTITSGWTFGAGAALQIPFAMQMAYRFNGIGVTQNVLYENQKLIANQFNSAIGKIQDSLSSTASALGKLQDVVNQNAQALNTLVKQLSSNFGAISSVLNDILSRLDPPEAEVQIDRLITGRLQSLQTYVTQQLIRAAEIRASANLAATKMSECVLGQSKRVDFCGKGYHLMSFPQSAPHGVVFLHVTYVFAQEKNFTTAPAICHDGKAHFPREGVFVSNGTHWFVTQRNFYEPQIITTDNTFVSGNCDVVIGIVNNTVYDPLQPELDSFKEELDKYFKNHTSPDVDLGDISGINASVVNIQKEIDRLNEVAKNLNESLIDLQELGKYEQYIKGGGGSDIDPYKEFGSSYQLLNFLPLDFFPDLNALVDTATALYEEELTGREHCSPHHTAIRQALVCWDELTKLIAWMSSNITSEQVRTIIVNHVNDTWGLKVRQSLWFHLSCLTFGQHTVQEFLVSFGVWIRTPAPYRPPNAPILSTLPEHTVIC

SEQ ID NO: 6892 - protein, 1365 aa, Artificial Sequence
  SARS-CoV-2/Iceland/280/2020__EPI_ISL_417608 spike protein (1-1211)(K986P_V987P_P1069F) WhcAg construct
MFVFLVLLPLVSSQCVNLTTRTQLPPAYTNSFTRGVYYPDKVFRSSVLHSTQDLFLPFFSNVTWFHAIHVSGTNGTKRFDNPVLPFNDGVYFASTEKSNIIRGWIFGTTLDSKTQSLLIVNNATNVVIKVCEFQFCNDPFLGVYYHKNNKSWMESEFRVYSSANNCTFEYVSQPFLMDLEGKQGNFKNLREFVFKNIDGYFKIYSKHTPINLVRDLPQGFSALEPLVDLPIGINITRFQTLLALHRSYLTPGDSSSGWTAGAAAYYVGYLQPRTFLLKYNENGTITDAVDCALDPLSETKCTLKSFTVEKGIYQTSNFRVQPTESIVRFPNITNLCPFGEVFNATRFASVYAWNRKRISNCVADYSVLYNSASFSTFKCYGVSPTKLNDLCFTNVYADSFVIRGDEVRQIAPGQTGKIADYNYKLPDDFTGCVIAWNSNNLDSKVGGNYNYLYRLFRKSNLKPFERDISTEIYQAGSTPCNGVEGFNCYFPLQSYGFQPTNGVGYQPYRVVVLSFELLHAPATVCGPKKSTNLVKNKCVNFNFNGLTGTGVLTESNKKFLPFQQFGRDIADTTDAVRDPQTLEILDITPCSFGGVSVITPGTNTSNQVAVLYQGVNCTEVPVAIHADQLTPTWRVYSTGSNVFQTRAGCLIGAEHVNNSYECDIPIGAGICASYHTQTNSPRRARSVASQSIIAYTMSLGAENSVAYSNNSIAIPTNFTISVTTEILPVSMTKTSVDCTMYICGDSTECSNLLLQYGSFCTQLNRALTGIAVEQDKNTQEVFAQVKQIYKTPPIKDFGGFNFSQILPDPSKPSKRSFIEDLLFNKVTLADAGFIKQYGDCLGDIAARDLICAQKFNGLTVLPPLLTDEMIAQYTSALLAGTITSGWTFGAGAALQIPFAMQMAYRFNGIGVTQNVLYENQKLIANQFNSAIGKIQDSLSSTASALGKLQDVVNQNAQALNTLVKQLSSNFGAISSVLNDILSRLDPPEAEVQIDRLITGRLQSLQTYVTQQLIRAAEIRASANLAATKMSECVLGQSKRVDFCGKGYHLMSFPQSAPHGVVFLHVTYVFAQEKNFTTAPAICHDGKAHFPREGVFVSNGTHWFVTQRNFYEPQIITTDNTFVSGNCDVVIGIVNNTVYDPLQPELDSFKEELDKYFKNHTSPDVDLGDISGINASVVNIQKEIDRLNEVAKNLNESLIDLQELGKYEQYIKGGGGSDIDPYKEFGSSYQLLNFLPLDFFPDLNALVDTATALYEEELTGREHCSPHHTAIRQALVCWDELTKLIAWMSSNITSEQVRTIIVNHVNDTWGLKVRQSLWFHLSCLTFGQHTVQEFLVSFGVWIRTPAPYRPPNAPILSTLPEHTVIC

SEQ ID NO: 6893 - protein, 1365 aa, Artificial Sequence; identical to SEQ ID NO: 6848
  SARS-CoV-2/Iceland/247/2020__EPI_ISL_417575 spike protein (1-1211)(K986P_V987P_P1069F) WhcAg construct

SEQ ID NO: 6894 - protein, 1365 aa, Artificial Sequence
  SARS-CoV-2/Iceland/238/2020__EPI_ISL_417566 spike protein (1-1211)(K986P_V987P_P1069F) WhcAg construct
MFVFLVLLPLVSSQCVNLTTRTQLPPAYTNSFTRGVYYPDKVFRSSVLHSTQDLFLPFFSNVTWFHAIHVSGTNGTKRFDNPVLPFNDGVYFASTEKSNIIRGWIFGTTLDSKTQSLLIVNNATNVVIKVCEFQFCNDPFLGVYYHKNNKSWMESEFRVYSSANNCTFEYVSQPFLMDLEGKQGNFKNLREFVFKNIDGYFKIYSKHTPINLVRDLPQGFSALEPLVDLPIGINITRFQTLLALHRSYLTPGDSSSGWTAGAAAYYVGYLQPRTFLLKYNENGTITDAVDCALDPLSETKCTLKSFTVEKGIYQTSNFRVQPTESIVRFPNITNLCPFGEVFNATRFASVYAWNRKRISNCVADYSVLYNSASFSTFKCYGVSPTKLNDLCFTNVYADSFVIRGDEVRQIAPGQTGKIADYNYKLPDDFTGCVIAWNSNNLDSKVGGNYNYLYRLFRKSNLKPFERDISTEIYQAGSTPCNGVEGFNCYFPLQSYGFQPTNGVGYQPYRVVVLSFELLHAPATVCGPKKSTNLVKNKCVNFNFNGLTGTGVLTESNKKFLPFQQFGRDIADTTDAVRDPQTLEILDITPCSFGGVSVITPGTNTSNQVAVLYQGVNCTEVPVAIHADQLTPTWRVYSTGSNVFQTRAGCLIGAEHVNNSYECDIPIGAGICASYQTQTNSPRRARSVASQSIIAYTMSLGAENSVAYSNNSIAIPTNFTISVTTEILPVSMTKTSVDCTMYICGDSTECSNLLLQYGSFCTQLNRALTGIAVEQDKNTQEVFAQVKQIYKTPPIKDFGGFNFSQILPDPSKPSKRSFIEDLLFNKVTLADVGFIKQYGDCLGDIAARDLICAQKFNGLTVLPPLLTDEMIAQYTSALLAGTITSGWTFGAGAALQIPFAMQMAYRFNGIGVTQNVLYENQKLIANQFNSAIGKIQDSLSSTASALGKLQDVVNQNAQALNTLVKQLSSNFGAISSVLNDILSRLDPPEAEVQIDRLITGRLQSLQTYVTQQLIRAAEIRASANLAATKMSECVLGQSKRVDFCGKGYHLMSFPQSAPHGVVFLHVTYVFAQEKNFTTAPAICHDGKAHFPREGVFVSNGTHWFVTQRNFYEPQIITTDNTFVSGNCDVVIGIVNNTVYDPLQPELDSFKEELDKYFKNHTSPDVDLGDISGINASVVNIQKEIDRLNEVAKNLNESLIDLQELGKYEQYIKGGGGSDIDPYKEFGSSYQLLNFLPLDFFPDLNALVDTATALYEEELTGREHCSPHHTAIRQALVCWDELTKLIAWMSSNITSEQVRTIIVNHVNDTWGLKVRQSLWFHLSCLTFGQHTVQEFLVSFGVWIRTPAPYRPPNAPILSTLPEHTVIC

SEQ ID NO: 6895 - protein, 1365 aa, Artificial Sequence
  SARS-CoV-2/Greece/16/2020__EPI_ISL_418265 spike protein (1-1211)(K986P_V987P_P1069F) WhcAg construct
MFVFLVLLPLVSSQCVNLTTRTQLPPAYTNSFTRGVYYPDKVFRSSVLHSTQDLFLPFFSNVTWFHAIHVSGTNGTKRFDNPVLPFNDGVYFASTEKSNIIRGWIFGTTLDSKTQSLLIVNNATNVVIKVCEFQFCNDPFLGVYYHKNNKSWMESEFRVYSSANNCTFEYVSQPFLMDLEGKQGNFKNLREFVFKNVDGYFKIYSKHTPINLVRDLPQGFSALEPLVDLPIGINITRFQTLLALHRSYLTPGDSSSGWTAGAAAYYVGYLQPRTFLLKYNENGTITDAVDCALDPLSETKCTLKSFTVEKGIYQTSNFRVQPTESIVRFPNITNLCPFGEVFNATRFASVYAWNRKRISNCVADYSVLYNSASFSTFKCYGVSPTKLNDLCFTNVYADSFVIRGDEVRQIAPGQTGKIADYNYKLPDDFTGCVIAWNSNNLDSKVGGNYNYLYRLFRKSNLKPFERDISTEIYQAGSTPCNGVEGFNCYFPLQSYGFQPTNGVGYQPYRVVVLSFELLHAPATVCGPKKSTNLVKNKCVNFNFNGLTGTGVLTESNKKFLPFQQFGRDIADTTDAVRDPQTLEILDITPCSFGGVSVITPGTNTSNQVAVLYQDVNCTEVPVAIHADQLTPTWRVYSTGSNVFQTRAGCLIGAEHVNNSYECDIPIGAGICASYQTQTNSPRRARSVASQSIIAYTMSLGAENSVAYSNNSIAIPTNFTISVTTEILPVSMTKTSVDCTMYICGDSTECSNLLLQYGSFCTQLNRALTGIAVEQDKNTQEVFAQVKQIYKTPPIKDFGGFNFSQILPDPSKPSKRSFIEDLLFNKVTLADAGFIKQYGDCLGDIAARDLICAQKFNGLTVLPPLLTDEMIAQYTSALLAGTITSGWTFGAGAALQIPFAMQMAYRFNGIGVTQNVLYENQKLIANQFNSAIGKIQDSLSSTASALGKLQDVVNQNAQALNTLVKQLSSNFGAISSVLNDILSRLDPPEAEVQIDRLITGRLQSLQTYVTQQLIRAAEIRASANLAATKMSECVLGQSKRVDFCGKGYHLMSFPQSAPHGVVFLHVTYVFAQEKNFTTAPAICHDGKAHFPREGVFVSNGTHWFVTQRNFYEPQIITTDNTFVSGNCDVVIGIVNNTVYDPLQPELDSFKEELDKYFKNHTSPDVDLGDISGINASVVNIQKEIDRLNEVAKNLNESLIDLQELGKYEQYIKGGGGSDIDPYKEFGSSYQLLNFLPLDFFPDLNALVDTATALYEEELTGREHCSPHHTAIRQALVCWDELTKLIAWMSSNITSEQVRTIIVNHVNDTWGLKVRQSLWFHLSCLTFGQHTVQEFLVSFGVWIRTPAPYRPPNAPILSTLPEHTVIC

SEQ ID NO: 6896 - protein, 1365 aa, Artificial Sequence
  SARS-CoV-2/Iceland/319/2020__EPI_ISL_417648 spike protein (1-1211)(K986P_V987P_P1069F) WhcAg construct
MFVFLVLLPLVSSQCVNLTTRTQLPPAYTNSFTRGVYYPDKVFRSSVLHSTQDLFLPFFSNVTWFHAIHVSGTNGTKRFDNPVLPFNDGVYFASTEKSNIIRGWIFGTTLDSKTQSLLIVNNATNVVIKVCEFQFCNDPFLGVYYHKNNKSWMESEFRVYSSANNCTFEYVSQPFLIDLEGKQGNFKNLREFVFKNIDGYFKIYSKHTPINLVRDLPQGFSALEPLVDLPIGINITRFQTLLALHRSYLTPGDSSSGWTAGAAAYYVGYLQPRTFLLKYNENGTITDAVDCALDPLSETKCTLKSFTVEKGIYQTSNFRVQPTESIVRFPNITNLCPFGEVFNATRFASVYAWNRKRISNCVADYSVLYNSASFSTFKCYGVSPTKLNDLCFTNVYADSFVIRGDEVRQIAPGQTGKIADYNYKLPDDFTGCVIAWNSNNLDSKVGGNYNYLYRLFRKSNLKPFERDISTEIYQAGSTPCNGVEGFNCYFPLQSYGFQPTNGVGYQPYRVVVLSFELLHAPATVCGPKKSTNLVKNKCVNFNFNGLTGTGVLTESNKKFLPFQQFGRDIADTTDAVRDPQTLEILDITPCSFGGVSVITPGTNTSNQVAVLYQGVNCTEVPVAIHADQLTPTWRVYSTGSNVFQTRAGCLIGAEHVNNSYECDIPIGAGICASYQTQTNSPRRARSVASQSIIAYTMSLGAENSVAYSNNSIAIPTNFTISVTTEILPVSMTKTSVDCTMYICGDSTECSNLLLQYGSFCTQLNRALTGIAVEQDKNTQEVFAQVKQIYKTPPIKDFGGFNFSQILPDPSKPSKRSFIEDLLFNKVTLADAGFIKQYGDCLGDIAARDLICAQKFNGLTVLPPLLTDEMIAQYTSALLAGTITSGWTFGAGAALQIPFAMQMAYRFNGIGVTQNVLYENQKLIANQFNSAIGKIQDSLSSTASALGKLQDVVNQNAQALNTLVKQLSSNFGAISSVLNDILSRLDPPEAEVQIDRLITGRLQSLQTYVTQQLIRAAEIRASANLAATKMSECVLGQSKRVDFCGKGYHLMSFPQSAPHGVVFLHVTYVFAQEKNFTTAPAICHDGKAHFPREGVFVSNGTHWFVTQRNFYEPQIITTDNTFVSGNCDVVIGIVNNTVYDPLQPELDSFKEELDKYFKNHTSPDVDLGDISGINASVVNIQKEIDRLNEVAKNLNESLIDLQELGKYEQYIKGGGGSDIDPYKEFGSSYQLLNFLPLDFFPDLNALVDTATALYEEELTGREHCSPHHTAIRQALVCWDELTKLIAWMSSNITSEQVRTIIVNHVNDTWGLKVRQSLWFHLSCLTFGQHTVQEFLVSFGVWIRTPAPYRPPNAPILSTLPEHTVIC

SEQ ID NO: 6897 - protein, 1365 aa, Artificial Sequence
  SARS-CoV-2/Congo/94/2020__EPI_ISL_417947 spike protein (1-1211)(K986P_V987P_P1069F) WhcAg construct
MFVFLVLLPLVSSQCVNLTTRTQLPPAYTNSFTRGVYYPDKVFRSSVLHSTQDLFLPFFSNVTWFHAIHVSGTNGTKRFDNPVLPFNDGVYFASTEKSNIIRGWIFGTTLDSKTQSLLIVNNATNVVIKVCEFQFCNDPFLGVYYHKNNKSWMESEFRVYSSANNCTFEYVSQPFLMDLEGKQGNFKNLREFVFKNIDGYFKIYSKHTPINLVRDLPQGFSALEPLVDLPIGINITRFQTLLALHRSYLTPGDSSSGWTAGAAAYYVGYLQPRTFLLKYNENGTITDAVDCALDPLSETKCTLKSFTVEKGIYQTSNFRVQPTESIVRFPNITNLCPFGEVFNATRFASVYAWNRKRISNCVADYSVLYNSASFSTFKCYGVSPTKLNDLCFTNVYADSFVIRGDEVRQIAPGQTGKIADYNYKLPDDFTGCVIAWNSNNLDSKVGGNYNYLYRLFRKSNLKPFERDISTEIYQAGSTPCNGVEGFNCYFPLQSYGFQPTNGVGYQPYRVVVLSFELLHAPATVCGPKKSTNLVKNKCVNFNFNGLTGTGVLTESNKKFLPFQQFGRDIADTTDAVRDPQTLEILDITPCSFGGVSVITPGTNTSNQVAVLYQGVNCTEVPVAIHADQLTPTWRVYSTGSNVFQTRAGCLIGAEHVNNSYECDIPIGAGICASYQTQTNSPRRARSVASQSIIAYTMSLGAENSVAYSNNSIAIPTNFTISVTTEILPVSMTKTSVDCTMYICGDSTECSNLLLQYGSFCTQLNRALTGIAVEQDKNTQEVFAQVKQIYKTPPIKDFGGFNFSQILPDPSKPSKRSFIEDILFNKVTLADAGFIKQYGDCLGDIAARDLICAQKFNGLTVLPPLLTDEMIAQYTSALLAGTITSGWTFGAGAALQIPFAMQMAYRFNGIGVTQNVLYENQKLIANQFNSAIGKIQDSLSSTASALGKLQDVVNQNAQALNTLVKQLSSNFGAISSVLNDILSRLDPPEAEVQIDRLITGRLQSLQTYVTQQLIRAAEIRASANLAATKMSECVLGQSKRVDFCGKGYHLMSFPQSAPHGVVFLHVTYVFAQEKNFTTAPAICHDGKAHFPREGVFVSNGTHWFVTQRNFYEPQIITTDNTFVSGNCDVVIGIVNNTVYDPLQPELDSFKEELDKYFKNHTSPDVDLGDISGINASVVNIQKEIDRLNEVAKNLNESLIDLQELGKYEQYIKGGGGSDIDPYKEFGSSYQLLNFLPLDFFPDLNALVDTATALYEEELTGREHCSPHHTAIRQALVCWDELTKLIAWMSSNITSEQVRTIIVNHVNDTWGLKVRQSLWFHLSCLTFGQHTVQEFLVSFGVWIRTPAPYRPPNAPILSTLPEHTVIC

SEQ ID NO: 6898 - protein, 1365 aa, Artificial Sequence
  SARS-CoV-2/Congo/158/2020__EPI_ISL_417950 spike protein (1-1211)(K986P_V987P_P1069F) WhcAg construct
MFVFLVLLPLVSSQCVNLTTRTQLPPAYTNSFTRGVYYPDKVFRSSVLHSTQDLFLPFFSNVTWFHAIHVSGTNGTKRFDNPVLPFNDGVYFASTEKSNIIRGWIFGTTLDSKTQSLLIVNNATNVVIKVCEFQFCNDPFLGVYYHKNNKSWMESEFRVYSSANNCTFEYVSQPFLMDLEGKQGNFKNLREFVFKNIDGYFKIYSKHTPINLVRDLPQGFSALEPLVDLPIGINITRFQTLLALHRSYLTPGDSSSGWTAGAAAYYVGYLQPRTFLLKYNENGTITDAVDCALDPLSETKCTLKSFTVEKGIYQTSNFRVQPTESIVRFPNITNLCPFGEVFNATRFASVYAWNRKRISNCVADYSVLYNSASFSTFKCYGVSPTKLNDLCFTNVYADSFVIRGDEVRQIAPGQTGKIADYNYKLPDDFTGCVIAWNSNNLDSKVGGNYNYLYRLFRKSNLKPFERDISTEIYQAGSTPCNGVEGFNCYFPLQSYGFQPTNGVGYQPYRVVVLSFELLHAPATVCGPKKSTNLVKNKCVNFNFNGLTGTGVLTESNKKFLPFQQFGRDIADTTDAVRDPQTLEILDITPCSFGGVSVITPGTNTSNQVAVLYQDVNCTEVPVAIHADQLTPTWRVYSTGSNVFQTRAGCLIGAEHVNNSYECDIPIGAGICASYQTQTNSPRRARSVASQSIIAYTMSLGAENSVAYSNNSIAIPTNFTISVTTEILPVSMTKTSVDCTMYICGDSTECSNLLLQYGSFCTQLNRALTGIAVEQDKNTQEVFAQVKQIYKTPPIKDFGGFNFSQILPDPSKPSKRSFIEDLLFNKVTLADAGFIKQYGDCLGDIAARDLICAQKFNGLTVLPPLLTDEMIAQYTSALLAGTITSGWTFGAGAALQIPFAMQMAYRFNGIGVTQNVLYENQKLIANQFNSAIGKIQDSLSSTASALGKLQDVVNQNAQALNTLVKQLSSNFGAISSVLNDILSRLDPPEAEVQIDRLITGRLQSLQTYVTQQLIRAAEIRASANLAATKMSECVLGQSKRVDFCGKGYHLMSFPQSAPHGVVFLHVTYVFAQEKNFTTAPAICHDGKAHFPREGVFVSNGTHWFVTQRNFYEPQIITTDNTFLSGNCDVVIGIVNNTVYDPLQPELDSFKEELDKYFKNHTSPDVDLGDISGINASVVNIQKEIDRLNEVAKNLNESLIDLQELGKYEQYIKGGGGSDIDPYKEFGSSYQLLNFLPLDFFPDLNALVDTATALYEEELTGREHCSPHHTAIRQALVCWDELTKLIAWMSSNITSEQVRTIIVNHVNDTWGLKVRQSLWFHLSCLTFGQHTVQEFLVSFGVWIRTPAPYRPPNAPILSTLPEHTVIC

SEQ ID NO: 6899 - protein, 1365 aa, Artificial Sequence
  SARS-CoV-2/USA/UT-00034/2020__EPI_ISL_417977 spike protein (1-1211)(K986P_V987P_P1069F) WhcAg construct
MFVFLVLLPLVSSQCVNLTTRTQLPPAYTNSFTRGVYYPDKVFRSSVLHSTQDLFLPFFSNVTWFHAIHVSGTNGTKRFDNPVLPFNDGVYFASTEKSNIIRGWIFGTTLDSKTQSLLIVNNATNVVIKVCEFQFCNDPFLGVYYYKNNKSWMESEFRVYSSANNCTFEYVSQPFLMDLEGKQGNFKNLREFVFKNIDGYFKIYSKHTPINLVRDLPQGFSALEPLVDLPIGINITRFQTLLALHRSYLTPGDSSSGWTAGAAAYYVGYLQPRTFLLKYNENGTITDAVDCALDPLSETKCTLKSFTVEKGIYQTSNFRVQPTESIVRFPNITNLCPFGEVFNATRFASVYAWNRKRISNCVADYSVLYNSASFSTFKCYGVSPTKLNDLCFTNVYADSFVIRGDEVRQIAPGQTGKIADYNYKLPDDFTGCVIAWNSNNLDSKVGGNYNYLYRLFRKSNLKPFERDISTEIYQAGSTPCNGVEGFNCYFPLQSYGFQPTNGVGYQPYRVVVLSFELLHAPATVCGPKKSTNLVKNKCVNFNFNGLTGTGVLTESNKKFLPFQQFGRDIADTTDAVRDPQTLEILDITPCSFGGVSVITPGTNTSNQVAVLYQGVNCTEVPVAIHADQLTPTWRVYSTGSNVFQTRAGCLIGAEHVNNSYECDIPIGAGICASYQTQTNSPRRARSVASQSIIAYTMSLGAENSVAYSNNSIAIPTNFTISVTTEILPVSMTKTSVDCTMYICGDSTECSNLLLQYGSFCTQLNRALTGIAVEQDKNTQEVFAQVKQIYKTPPIKDFGGFNFSQILPDPSKPSKRSFIEDLLFNKVTLADAGFIKQYGDCLGDIAARDLICAQKFNGLTVLPPLLTDEMIAQYTSALLAGTITSGWTFGAGAALQIPFAMQMAYRFNGIGVTQNVLYENQKLIANQFNSAIGKIQDSLSSTASALGKLQDVVNQNAQALNTLVKQLSSNFGAISSVLNDILSRLDPPEAEVQIDRLITGRLQSLQTYVTQQLIRAAEIRASANLAATKMSECVLGQSKRVDFCGKGYHLMSFPQSAPHGVVFLHVTYVFAQEKNFTTAPAICHDGKAHFPREGVFVSNGTHWFVTQRNFYEPQIITTDNTFVSGNCDVVIGIVNNTVYDPLQPELDSFKEELDKYFKNHTSPDVDLGDISGINASVVNIQKEIDRLNEVAKNLNESLIDLQELGKYEQYIKGGGGSDIDPYKEFGSSYQLLNFLPLDFFPDLNALVDTATALYEEELTGREHCSPHHTAIRQALVCWDELTKLIAWMSSNITSEQVRTIIVNHVNDTWGLKVRQSLWFHLSCLTFGQHTVQEFLVSFGVWIRTPAPYRPPNAPILSTLPEHTVIC

SEQ ID NO: 6900 - protein, 1365 aa, Artificial Sequence
  SARS-CoV-2/USA/UT-00033/2020__EPI_ISL_417976 spike protein (1-1211)(K986P_V987P_P1069F) WhcAg construct
MFVFLVLLPLVSSQCVNLTTRTQLPPAYTNSFTRGVYYPDKVFRSSVLHSTQDLFLPFFSNVTWFHAIHVSGTNGTKRFDNPVLPFNDGVYFASTEKSNIIRGWIFGTTLDSKTQSLLIVNNATNVVIKVCEFQFCNDPFLGVYYHKNNKSWMESEFRVYSSANNCTFEYVSQPFLMDLEGKQGNFKNLREFVFKNIDGYFKIYSKHTPINLVRDLPQGFSALEPLVDLPIGINITRFQTLLALHRSYLTPGDSSSGLTAGAAAYYVGYLQPRTFLLKYNENGTITDAVDCALDPLSETKCTLKSFTVEKGIYQTSNFRVQPTESIVRFPNITNLCPFGEVFNATRFASVYAWNRKRISNCVADYSVLYNSASFSTFKCYGVSPTKLNDLCFTNVYADSFVIRGDEVRQIAPGQTGKIADYNYKLPDDFTGCVIAWNSNNLDSKVGGNYNYLYRLFRKSNLKPFERDISTEIYQAGSTPCNGVEGFNCYFPLQSYGFQPTNGVGYQPYRVVVLSFELLHAPATVCGPKKSTNLVKNKCVNFNFNGLTGTGVLTESNKKFLPFQQFGRDIADTTDAVRDPQTLEILDITPCSFGGVSVITPGTNTSNQVAVLYQGVNCTEVPVAIHADQLTPTWRVYSTGSNVFQTRAGCLIGAEHVNNSYECDIPIGAGICASYQTQTNSPRRARSVASQSIIAYTMSLGAENSVAYSNNSIAIPTNFTISVTTEILPVSMTKTSVDCTMYICGDSTECSNLLLQYGSFCTQLNRALTGIAVEQDKNTQEVFAQVKQIYKTPPIKDFGGFNFSQILPDPSKPSKRSFIEDLLFNKVTLADAGFIKQYGDCLGDIAARDLICAQKFNGLTVLPPLLTDEMIAQYTSALLAGTITSGWTFGAGAALQIPFAMQMAYRFNGIGVTQNVLYENQKLIANQFNSAIGKIQDSLSSTASALGKLQDVVNQNAQALNTLVKQLSSNFGAISSVLNDILSRLDPPEAEVQIDRLITGRLQSLQTYVTQQLIRAAEIRASANLAATKMSECVLGQSKRVDFCGKGYHLMSFPQSAPHGVVFLHVTYVFAQEKNFTTAPAICHDGKAHFPREGVFVSNGTHWFVTQRNFYEPQIITTDNTFVSGNCDVVIGIVNNTVYDPLQPELDSFKEELDKYFKNHTSPDVDLGDISGINASVVNIQKEIDRLNEVAKNLNESLIDLQELGKYEQYIKGGGGSDIDPYKEFGSSYQLLNFLPLDFFPDLNALVDTATALYEEELTGREHCSPHHTAIRQALVCWDELTKLIAWMSSNITSEQVRTIIVNHVNDTWGLKVRQSLWFHLSCLTFGQHTVQEFLVSFGVWIRTPAPYRPPNAPILSTLPEHTVIC

SEQ ID NO: 6901 - protein, 1365 aa, Artificial Sequence
  SARS-CoV-2/USA/WI-13/2020__EPI_ISL_417516 spike protein (1-1211)(K986P_V987P_P1069F) WhcAg construct
MFVFLVLLPLVSSQCVNLTTRTQLPPAYTNSFTRGVYYPDKVFRSSVLHSTQDLFLPFFSNVTWFHAIHVSGTNGTKRFDNPVLPFNDGVYFASTEKSNIIRGWIFGTTLDSKTQSLLIVNNATNVVIKVCEFQFCNDPFLGVYYHKNNKSWMESEFRVYSSANNCTFEYVSQPFLMDLEGKQGNFKNLREFVFKNIDGYFKIYSKHTPINLVRDLPQGFSALEPLVDLPIGINITRFQTLLALHRSYLTPGDSSSGWTAGAAAYYVGYLQPRTFLLKYNENGTITDAVDCALDPLSETKCTLKSFTVEKGIYQTSNFRVLPTESIVRFPNITNLCPFGEVFNATRFASVYAWNRKRISNCVADYSVLYNSASFSTFKCYGVSPTKLNDLCFTNVYADSFVIRGDEVRQIAPGQTGKIADYNYKLPDDFTGCVIAWNSNNLDSKVGGNYNYLYRLFRKSNLKPFERDISTEIYQAGSTPCNGVEGFNCYFPLQSYGFQPTNGVGYQPYRVVVLSFELLHAPATVCGPKKSTNLVKNKCVNFNFNGLTGTGVLTESNKKFLPFQQFGRDIADTTDAVRDPQTLEILDITPCSFGGVSVITPGTNTSNQVAVLYQGVNCTEVPVAIHADQLTPTWRVYSTGSNVFQTRAGCLIGAEHVNNSYECDIPIGAGICASYQTQTNSPRRARSVASQSIIAYTMSLGAENSVAYSNNSIAIPTNFTISVTTEILPVSMTKTSVDCTMYICGDSTECSNLLLQYGSFCTQLNRALTGIAVEQDKNTQEVFAQVKQIYKTPPIKDFGGFNFSQILPDPSKPSKRSFIEDLLFNKVTLADAGFIKQYGDCLGDIAARDLICAQKFNGLTVLPPLLTDEMIAQYTSALLAGTITSGWTFGAGAALQIPFAMQMAYRFNGIGVTQNVLYENQKLIANQFNSAIGKIQDSLSSTASALGKLQDVVNQNAQALNTLVKQLSSNFGAISSVLNDILSRLDPPEAEVQIDRLITGRLQSLQTYVTQQLIRAAEIRASANLAATKMSECVLGQSKRVDFCGKGYHLMSFPQSAPHGVVFLHVTYVFAQEKNFTTAPAICHDGKAHFPREGVFVSNGTHWFVTQRNFYEPQIITTDNTFVSGNCDVVIGIVNNTVYDPLQPELDSFKEELDKYFKNHTSPDVDLGDISGINASVVNIQKEIDRLNEVAKNLNESLIDLQELGKYEQYIKGGGGSDIDPYKEFGSSYQLLNFLPLDFFPDLNALVDTATALYEEELTGREHCSPHHTAIRQALVCWDELTKLIAWMSSNITSEQVRTIIVNHVNDTWGLKVRQSLWFHLSCLTFGQHTVQEFLVSFGVWIRTPAPYRPPNAPILSTLPEHTVIC

SEQ ID NO: 6902 - protein, 1364 aa, Artificial Sequence
  SARS-CoV-2/India/1-27/2020__EPI_ISL_413522 spike protein (1-1210)(K985P_V986P_P1068F) WhcAg construct
MFVFLVLLPLVSSQCVNLTTRTQLPPAYTNSFTRGVYYPDKVFRSSVLHSTQDLFLPFFSNVTWFHAIHVSGTNGTKRFDNPVLPFNDGVYFASTEKSNIIRGWIFGTTLDSKTQSLLIVNNATNVVIKVCEFQFCNDPFLGVYHKNNKSWMESEFRVYSSANNCTFEYVSQPFLMDLEGKQGNFKNLREFVFKNIDGYFKIYSKHTPINLVRDLPQGFSALEPLVDLPIGINITRFQTLLALHRSYLTPGDSSSGWTAGAAAYYVGYLQPRTFLLKYNENGTITDAVDCALDPLSETKCTLKSFTVEKGIYQTSNFRVQPTESIVRFPNITNLCPFGEVFNATRFASVYAWNRKRISNCVADYSVLYNSASFSTFKCYGVSPTKLNDLCFTNVYADSFVIRGDEVIQIAPGQTGKIADYNYKLPDDFTGCVIAWNSNNLDSKVGGNYNYLYRLFRKSNLKPFERDISTEIYQAGSTPCNGVEGFNCYFPLQSYGFQPTNGVGYQPYRVVVLSFELLHAPATVCGPKKSTNLVKNKCVNFNFNGLTGTGVLTESNKKFLPFQQFGRDIADTTDAVRDPQTLEILDITPCSFGGVSVITPGTNTSNQVAVLYQDVNCTEVPVAIHADQLTPTWRVYSTGSNVFQTRAGCLIGAEHVNNSYECDIPIGAGICASYQTQTNSPRRARSVASQSIIAYTMSLGAENSVAYSNNSIAIPTNFTISVTTEILPVSMTKTSVDCTMYICGDSTECSNLLLQYGSFCTQLNRALTGIAVEQDKNTQEVFAQVKQIYKTPPIKDFGGFNFSQILPDPSKPSKRSFIEDLLFNKVTLADAGFIKQYGDCLGDIAARDLICAQKFNGLTVLPPLLTDEMIAQYTSALLAGTITSGWTFGAGAALQIPFAMQMAYRFNGIGVTQNVLYENQKLIANQFNSAIGKIQDSLSSTASALGKLQDVVNQNAQALNTLVKQLSSNFGAISSVLNDILSRLDPPEAEVQIDRLITGRLQSLQTYVTQQLIRAAEIRASANLAATKMSECVLGQSKRVDFCGKGYHLMSFPQSAPHGVVFLHVTYVFAQEKNFTTAPAICHDGKAHFPREGVFVSNGTHWFVTQRNFYEPQIITTDNTFVSGNCDVVIGIVNNTVYDPLQPELDSFKEELDKYFKNHTSPDVDLGDISGINASVVNIQKEIDRLNEVAKNLNESLIDLQELGKYEQYIKGGGGSDIDPYKEFGSSYQLLNFLPLDFFPDLNALVDTATALYEEELTGREHCSPHHTAIRQALVCWDELTKLIAWMSSNITSEQVRTIIVNHVNDTWGLKVRQSLWFHLSCLTFGQHTVQEFLVSFGVWIRTPAPYRPPNAPILSTLPEHTVIC

SEQ ID NO: 6903 - protein, 1359 aa, Artificial Sequence
  SARS-CoV-2/pangolin/Guangxi/P4L/2017__EPI_ISL_410538 spike protein (1-1205)(K980P_V981P_P1063F) WhcAg construct
MFVFLFVLPLVSSQCVNLTTRTGIPPGYTNSSTRGVYYPDKVFRSSILHLTQDLFLPFFSNVTWFNTINYQGGFKKFDNPVLPFNDGVYFASTEKSNIIRGWIFGTTLDARTQSLLIVNNATNVVIKVCEFQFCTDPFLGVYYHNNNKTWVENEFRVYSSANNCTFEYISQPFLMDLEGKQGNFKNLREFVFKNVDGYFKIYSKHTPIDLVRDLPRGFAALEPLVDLPIGINITRFQTLLALHRSYLTPGNLESGWTTGAAAYYVGYLQQRTFLLSYNQNGTITDAVDCSLDPLSETKCTLKSLTVEKGIYQTSNFRVQPTISIVRFPNITNLCPFGEVFNASKFASVYAWNRKRISNCVADYSVLYNSTSFSTFKCYGVSPTKLNDLCFTNVYADSFVVKGDEVRQIAPGQTGVIADYNYKLPDDFTGCVIAWNSVKQDALTGGNYGYLYRLFRKSKLKPFERDISTEIYQAGSTPCNGQVGLNCYYPLERYGFHPTTGVNYQPFRVVVLSFELLNGPATVCGPKLSTTLVKDKCVNFNFNGLTGTGVLTTSKKQFLPFQQFGRDISDTTDAVRDPQTLEILDITPCSFGGVSVITPGTNTSNQVAVLYQDVNCTEVPMAIHAEQLTPAWRVYSAGANVFQTRAGCLVGAEHVNNSYECDIPVGAGICASYHSMSSLRSVNQRSIIAYTMSLGAENSVAYSNNSIAIPTNFTISVTTEILPVSMTKTSVDCTMYICGDSIECSNLLLQYGSFCTQLNRALTGIAVEQDKNTQEVFAQVKQIYKTPPIKDFGGFNFSQILPDPSKPSKRSFIEDLLFNKVTLADAGFIKQYGDCLGDIAARDLICAQKFNGLTVLPPLLTDEMIAQYTSALLAGTITSGWTFGAGAALQIPFAMQMAYRFNGIGVTQNVLYENQKLIANQFNSAIGKIQDSLSSTASALGKLQDVVNQNAQALNTLVKQLSSNFGAISSVLNDILSRLDPPEAEVQIDRLITGRLQSLQTYVTQQLIRAAEIRASANLAATKMSECVLGQSKRVDFCGKGYHLMSFPQSAPHGVVFLHVTYVFAQEKNFTTAPAICHEGKAHFPREGVFVSNGTHWFITQRNFYEPQIITTDNTFVSGSCDVVIGIVNNTVYDPLQPELDSFKEELDKYFKNHTSPDVDLGDISGINASVVNIQKEIDRLNEVAKNLNESPIDLQELGKYEQYIKGGGGSDIDPYKEFGSSYQLLNFLPLDFFPDLNALVDTATALYEEELTGREHCSPHHTAIRQALVCWDELTKLIAWMSSNITSEQVRTIIVNHVNDTWGLKVRQSLWFHLSCLTFGQHTVQEFLVSFGVWIRTPAPYRPPNAPILSTLPEHTVIC

SEQ ID NO: 6904 - protein, 1359 aa, Artificial Sequence
  SARS-CoV-2/pangolin/Guangxi/P5L/2017__EPI_ISL_410540 spike protein (1-1205)(K980P_V981P_P1063F) WhcAg construct
MFVFLFVLPLVSSQCVNLTTRTGIPPGYTNSSTRGVYYPDKVFRSSILHLTQDLFLPFFSNVTWFNTINYQGGFKKFDNPVLPFNDGVYFASTEKSNIIRGWIFGTTLDARTQSLLIVNNATNVVIKVCEFQFCTDPFLGVYYHNNNKTWVENEFRVYSSANNCTFEYISQPFLMDLEGKQGNFKNLREFVFKNVDGYFKIYSKHTPIDLVRDLPRGFAALEPLVDLPIGINITRFQTLLALHRSYLTPGKLESGWTTGAAAYYVGYLQQRTFLLSYNQNGTITDAVDCSLDPLSETKCTLKSLTVEKGIYQTSNFRVQPTISIVRFPNITNLCPFGEVFNASKFASVYAWNRKRISNCVADYSVLYNSTSFSTFKCYGVSPTKLNDLCFTNVYADSFVVKGDEVRQIAPGQTGVIADYNYKLPDDFTGCVIAWNSVKQDALTGGNYGYLYRLFRKSKLKPFERDISTEIYQAGSTPCNGQVGLNCYYPLERYGFHPTTGVNYQPFRVVVLSFELLNGPATVCGPKLSTTLVKDKCVNFNFNGLTGTGVLTTSKKQFLPFQQFGRDISDTTDAVRDPQTLEILDITPCSFGGVSVITPGTNTSNQVAVLYQDVNCTEVPMAIHAEQLTPAWRVYSAGANVFQTRAGCLVGAEHVNNSYECDIPVGAGICASYHSMSSFRSVNQRSIIAYTMSLGAENSVAYSNNSIAIPTNFTISVTTEILPVSMTKTSVDCTMYICGDSIECSNLLLQYGSFCTQLNRALTGIAVEQDKNTQEVFAQVKQIYKTPPIKDFGGFNFSQILPDPSKPSKRSFIEDLLFNKVTLADAGFIKQYGDCLGDIAARDLICAQKFNGLTVLPPLLTDEMIAQYTSALLAGTITSGWTFGAGAALQIPFAMQMAYRFNGIGVTQNVLYENQKLIANQFNSAIGKIQDSLSSTASALGKLQDVVNQNAQALNTLVKQLSSNFGAISSVLNDILSRLDPPEAEVQIDRLITGRLQSLQTYVTQQLIRAAEIRASANLAATKMSECVLGQSKRVDFCGKGYHLMSFPQSAPHGVVFLHVTYVFAQEKNFTTAPAICHEGKAHFPREGVFVSNGTHWFITQRNFYEPQIITTDNTFVSGSCDVVIGIVNNTVYDPLQPELDSFKEELDKYFKNHTSPDVDLGDISGINASVVNIQKEIDRLNEVAKNLNESLIDLQELGKYEQYIKGGGGSDIDPYKEFGSSYQLLNFLPLDFFPDLNALVDTATALYEEELTGREHCSPHHTAIRQALVCWDELTKLIAWMSSNITSEQVRTIIVNHVNDTWGLKVRQSLWFHLSCLTFGQHTVQEFLVSFGVWIRTPAPYRPPNAPILSTLPEHTVIC

SEQ ID NO: 6905 - protein, 1359 aa, Artificial Sequence
  SARS-CoV-2/pangolin/Guangxi/P5E/2017__EPI_ISL_410541 spike protein (1-1205)(K980P_V981P_P1063F) WhcAg construct
MFVFLFVLPLVSSQCVNLTTRTGIPPGYTNSSTRGVYYPDKVFRSSILHLTQDLFLPFFSNVTWFNTITYQGGSKKFDNPVLPFNDGVYFASTEKSNIIRGWIFGTTLDARTQSLLIVNNATNVVIKVCEFQFCTDPFLGVYYHNNNKTWVENEFRVYSSANNCTFEYISQPFLMDLEGKQGNFKNLREFVFKNVDGYFKIYSKHTPIDLVRDLPRGFAALEPLVDLPIGINITRFQTLLALHRSYLTPGKLESGWTTGAAAYYVGYLQQRTFLLSYNQNGTITDAVDCSLDPLSETKCTLKSLTVEKGIYQTSNFRVQPTISIVRFPNITNLCPFGEVFNASKFASVYAWNRKRISNCVADYSVLYNSTSFSTFKCYGVSPTKLNDLCFTNVYADSFVVKGDEVRQIAPGQTGVIADYNYKLPDDFTGCVIAWNSVKQDALTGDNYGYLYRLFRKSKLKPFERDISTEIYQAGSTPCNGQVGLNCYYPLERYGFHPTTGVNYQPFRVVVLSFELLNGPATVCGPKLSTTLVKDKCVNFNFNGLTGTGVLTTSKKQFLPFQQFGRDISDTTDAVRDPQTLEILDITPCSFGGVSVITPGTNTSNQVAVLYQDVNCTEVPMAIHAEQLTPAWRVYSAGANVFQTRAGCLVGAEHVNNSYECDIPVGAGICASYHSMSSFRSVNQRSIIAYTMSLGAENSVAYSNNSIAIPTNFTISVTTEILPVSMTKTSVDCTMYICGDSIECSNLLLQYGSFCTQLNRALTGIAVEQDKNTQEVFAQVKQIYKTPPIKDFGGFNFSQILPDPSKPSKRSFIEDLLFNKVTLADAGFIKQYGDCLGDIAARDLICAQKFNGLTVLPPLLTDEMIAQYTSALLAGTITSGWTFGAGAALQIPFAMQMAYRFNGIGVTQNVLYENQKLIANQFNSAIGKIQDSLSSTASALGKLQDVVNQNAQALNTLVKQLSSNFGAISSVLNDILSRLDPPEAEVQIDRLITGRLQSLQTYVTQQLIRAAEIRASANLAATKMSECVLGQSKRVDFCGKGYHLMSFPQSAPHGVVFLHVTYVFAQEKNFTTAPAICHEGKAHFPREGVFVSNGTHWFITQRNFYEPQIITTDNTFVSGSCDVVIGIVNNTVYDPLQPELDSFKEELDKYFKNHTSPDVDLGDISGINASVVNIQKEIDRLNEVAKNLNESLIDLQELGKYEQYIKGGGGSDIDPYKEFGSSYQLLNFLPLDFFPDLNALVDTATALYEEELTGREHCSPHHTAIRQALVCWDELTKLIAWMSSNITSEQVRTIIVNHVNDTWGLKVRQSLWFHLSCLTFGQHTVQEFLVSFGVWIRTPAPYRPPNAPILSTLPEHTVIC

SEQ ID NO: 6906 - protein, 1357 aa, Artificial Sequence
  SARS-CoV-2/pangolin/Guangxi/P1E/2017__EPI_ISL_410539 spike protein (1-1203)(K978P_V979P_P1061F) WhcAg construct
MFVFLFVLPLVSSQCVNLTTRTGIQPGYTNSSTRGVYYPDKVFRSSILHLTQDLFLPFFSNVTWFNTINYQGGFKKFDNPVLPFNDGVYFASTEKSNIIRGWIFGTTLDARTQSLLIVNNATNVVIKVCEFQFCTDPFLGVYYHNNNKTWVENEFRVYSSANNCTFEYISQPFLMDLEGKQGNFKNLREFVFKNVDGYFKIYSKHTPIDLVRDLPRGFAALEPLVDLPIGINITRFQTLLALHRSYLTPGKLESGWTTGAAAYYVGYLQQRTFLLSYNQNGTITDAVDCSLDPLSETKCTLKSLTVEKGIYQTSNFRVQPTISIVRFPNITNLCPFGEVFNASKFASVYAWNRKRISNCVADYSVLYNSTSFSTFKCYGVSPTKLNDLCFTNVYADSFVVKGDEVRQIAPGQTGVIADYNYKLPDDFTGCVIAWNSVKQDALTGGNYLYRLFRKSKLKPFERDISTEIYQAGSTPCNGQVGLNCYYPLERYGFHPTTGVNYQPFRVVVLSFELLNGPATVCGPKLSTTLVKDKCVNFNFNGLTGTGVLTTSKKQFLPFQQFGRDISDTTDAVRDPQTLEILDITPCSFGGVSVITPGTNTSNQVAVLYQDVNCTEVPMAIHAEQLTPAWRVYSAGANVFQTRAGCLVGAEHVNNSYECDIPVGAGICASYHSMSSLRSVNQRSIIAYTMSLGAENSVAYSNNSIAIPTNFTISVTTEILPVSMTKTSVDCTMYICGDSIECSNLLLQYGSFCTQLNRALTGIAVEQDKNTQEVFAQVKQIYKTPPIKDFGGFNFSQILPDPSKPSKRSFIEDLLFNKVTLADAGFIKQYGDCLGDIAARDLICAQKFNGLTVLPPLLTDEMIAQYTSALLAGTITSGWTFGAGAALQIPFAMQMAYRFNGIGVTQNVLYENQKLIANQFNSAIGKIQDSLSSTASALGKLQDVVNQNAQALNTLVKQLSSNFGAISSVLNDILSRLDPPEAEVQIDRLITGRLQSLQTYVTQQLIRAAEIRASANLAATKMSECVLGQSKRVDFCGKGYHLMSFPQSAPHGVVFLHVTYVFAQEKNFTTAPAICHEGKAHFPREGVFVSNGTHWFITQRNFYEPQIITTDNTFVSGSCDVVIGIVNNTVYDPLQPELDSFKEELDKYFKNHTSPDVDLGDISGINASVVNIQKEIDRLNEVAKNLNESLIDLQELGKYEQYIKGGGGSDIDPYKEFGSSYQLLNFLPLDFFPDLNALVDTATALYEEELTGREHCSPHHTAIRQALVCWDELTKLIAWMSSNITSEQVRTIIVNHVNDTWGLKVRQSLWFHLSCLTFGQHTVQEFLVSFGVWIRTPAPYRPPNAPILSTLPEHTVIC

SEQ ID NO: 6907 - protein, 1365 aa, Artificial Sequence
  SARS-CoV-2/Wuhan/WIV05/2019__EPI_ISL_402128 spike protein (1-1211)(K986P_V987P_ H1048Q_H1064N_ H1083N_H1101N) WhcAg construct
MFVFLVLLPLVSSQCVNLTTRTQLPPAYTNSFTRGVYYPDKVFRSSVLHSTQDLFLPFFSNVTWFHAIHVSGTNGTKRFDNPVLPFNDGVYFASTEKSNIIRGWIFGTTLDSKTQSLLIVNNATNVVIKVCEFQFCNDPFLGVYYHKNNKSWMESEFRVYSSANNCTFEYVSQPFLMDLEGKQGNFKNLREFVFKNIDGYFKIYSKHTPINLVRDLPQGFSALEPLVDLPIGINITRFQTLLALHRSYLTPGDSSSGWTAGAAAYYVGYLQPRTFLLKYNENGTITDAVDCALDPLSETKCTLKSFTVEKGIYQTSNFRVQPTESIVRFPNITNLCPFGEVFNATRFASVYAWNRKRISNCVADYSVLYNSASFSTFKCYGVSPTKLNDLCFTNVYADSFVIRGDEVRQIAPGQTGKIADYNYKLPDDFTGCVIAWNSNNLDSKVGGNYNYLYRLFRKSNLKPFERDISTEIYQAGSTPCNGVEGFNCYFPLQSYGFQPTNGVGYQPYRVVVLSFELLHAPATVCGPKKSTNLVKNKCVNFNFNGLTGTGVLTESNKKFLPFQQFGRDIADTTDAVRDPQTLEILDITPCSFGGVSVITPGTNTSNQVAVLYQDVNCTEVPVAIHADQLTPTWRVYSTGSNVFQTRAGCLIGAEHVNNSYECDIPIGAGICASYQTQTNSPRRARSVASQSIIAYTMSLGAENSVAYSNNSIAIPTNFTISVTTEILPVSMTKTSVDCTMYICGDSTECSNLLLQYGSFCTQLNRALTGIAVEQDKNTQEVFAQVKQIYKTPPIKDFGGFNFSQILPDPSKPSKRSFIEDLLFNKVTLADAGFIKQYGDCLGDIAARDLICAQKFNGLTVLPPLLTDEMIAQYTSALLAGTITSGWTFGAGAALQIPFAMQMAYRFNGIGVTQNVLYENQKLIANQFNSAIGKIQDSLSSTASALGKLQDVVNQNAQALNTLVKQLSSNFGAISSVLNDILSRLDPPEAEVQIDRLITGRLQSLQTYVTQQLIRAAEIRASANLAATKMSECVLGQSKRVDFCGKGYQLMSFPQSAPHGVVFLNVTYVPAQEKNFTTAPAICNDGKAHFPREGVFVSNGTNWFVTQRNFYEPQIITTDNTFVSGNCDVVIGIVNNTVYDPLQPELDSFKEELDKYFKNHTSPDVDLGDISGINASVVNIQKEIDRLNEVAKNLNESLIDLQELGKYEQYIKGGGGSDIDPYKEFGSSYQLLNFLPLDFFPDLNALVDTATALYEEELTGREHCSPHHTAIRQALVCWDELTKLIAWMSSNITSEQVRTIIVNHVNDTWGLKVRQSLWFHLSCLTFGQHTVQEFLVSFGVWIRTPAPYRPPNAPILSTLPEHTVIC

SEQ ID NO: 6908 - protein, 1361 aa, Artificial Sequence
  SARS-CoV-2/bat/Yunnan/RaTG13/2013__EPI_ISL_402131 spike protein (1-1207)(K982P_V983P_ H1044Q_H1060N_ H1079N_H1097N) WhcAg construct
MFVFLVLLPLVSSQCVNLTTRTQLPPAYTNSSTRGVYYPDKVFRSSVLHLTQDLFLPFFSNVTWFHAIHVSGTNGIKRFDNPVLPFNDGVYFASTEKSNIIRGWIFGTTLDSKTQSLLIVNNATNVVIKVCEFQFCNDPFLGVYYHKNNKSWMESEFRVYSSANNCTFEYVSQPFLMDLEGKQGNFKNLREFVFKNIDGYFKIYSKHTPINLVRDLPPGFSALEPLVDLPIGINITRFQTLLALHRSYLTPGDSSSGWTAGAAAYYVGYLQPRTFLLKYNENGTITDAVDCALDPLSETKCTLKSFTVEKGIYQTSNFRVQPTDSIVRFPNITNLCPFGEVFNATTFASVYAWNRKRISNCVADYSVLYNSTSFSTFKCYGVSPTKLNDLCFTNVYADSFVITGDEVRQIAPGQTGKIADYNYKLPDDFTGCVIAWNSKHIDAKEGGNFNYLYRLFRKANLKPFERDISTEIYQAGSKPCNGQTGLNCYYPLYRYGFYPTDGVGHQPYRVVVLSFELLNAPATVCGPKKSTNLVKNKCVNFNFNGLTGTGVLTESNKKFLPFQQFGRDIADTTDAVRDPQTLEILDITPCSFGGVSVITPGTNASNQVAVLYQDVNCTEVPVAIHADQLTPTWRVYSTGSNVFQTRAGCLIGAEHVNNSYECDIPIGAGICASYQTQTNSRSVASQSIIAYTMSLGAENSVAYSNNSIAIPTNFTISVTTEILPVSMTKTSVDCTMYICGDSTECSNLLLQYGSFCTQLNRALTGIAVEQDKNTQEVFAQVKQIYKTPPIKDFGGFNFSQILPDPSKPSKRSFIEDLLFNKVTLADAGFIKQYGDCLGDIAARDLICAQKFNGLTVLPPLLTDEMIAQYTSALLAGTITSGWTFGAGAALQIPFAMQMAYRFNGIGVTQNVLYENQKLIANQFNSAIGKIQDSLSSTASALGKLQDVVNQNAQALNTLVKQLSSNFGAISSVLNDILSRLDPPEAEVQIDRLITGRLQSLQTYVTQQLIRAAEIRASANLAATKMSECVLGQSKRVDFCGKGYQLMSFPQSAPHGVVFLNVTYVPAQEKNFTTAPAICNDGKAHFPREGVFVSNGTNWFVTQRNFYEPQIITTDNTFVSGSCDVVIGIVNNTVYDPLQPELDSFKEELDKYFKNHTSPDVDLGDISGINASVVNIQKEIDRLNEVAKNLNESLIDLQELGKYEQYIKGGGGSDIDPYKEFGSSYQLLNFLPLDFFPDLNALVDTATALYEEELTGREHCSPHHTAIRQALVCWDELTKLIAWMSSNITSEQVRTIIVNHVNDTWGLKVRQSLWFHLSCLTFGQHTVQEFLVSFGVWIRTPAPYRPPNAPILSTLPEHTVIC

SEQ ID NO: 6909 - protein, 1365 aa, Artificial Sequence
  SARS-CoV-2/Wuhan/HBCDC-HB-01/2019__EPI_ISL_402132 spike protein (1-1211)(K986P_V987P_ H1048Q_H1064N_ H1083N_H1101N) WhcAg construct
MFVFLVLLPLVSSQCVNLTTRTQLPPAYTNSITRGVYYPDKVFRSSVLHSTQDLFLPFFSNVTWFHAIHVSGTNGTKRFDNPVLPFNDGVYFASTEKSNIIRGWIFGTTLDSKTQSLLIVNNATNVVIKVCEFQFCNDPFLGVYYHKNNKSWMESEFRVYSSANNCTFEYVSQPFLMDLEGKQGNFKNLREFVFKNIDGYFKIYSKHTPINLVRDLPQGFSALEPLVDLPIGINITRFQTLLALHRSYLTPGDSSSGWTAGAAAYYVGYLQPRTFLLKYNENGTITDAVDCALDPLSETKCTLKSFTVEKGIYQTSNFRVQPTESIVRFPNITNLCPFGEVFNATRFASVYAWNRKRISNCVADYSVLYNSASFSTFKCYGVSPTKLNDLCFTNVYADSFVIRGDEVRQIAPGQTGKIADYNYKLPDDFTGCVIAWNSNNLDSKVGGNYNYLYRLFRKSNLKPFERDISTEIYQAGSTPCNGVEGFNCYFPLQSYGFQPTNGVGYQPYRVVVLSFELLHAPATVCGPKKSTNLVKNKCVNFNFNGLTGTGVLTESNKKFLPFQQFGRDIADTTDAVRDPQTLEILDITPCSFGGVSVITPGTNTSNQVAVLYQDVNCTEVPVAIHADQLTPTWRVYSTGSNVFQTRAGCLIGAEHVNNSYECDIPIGAGICASYQTQTNSPRRARSVASQSIIAYTMSLGAENSVAYSNNSIAIPTNFTISVTTEILPVSMTKTSVDCTMYICGDSTECSNLLLQYGSFCTQLNRALTGIAVEQDKNTQEVFAQVKQIYKTPPIKDFGGFNFSQILPDPSKPSKRSFIEDLLFNKVTLADAGFIKQYGDCLGDIAARDLICAQKFNGLTVLPPLLTDEMIAQYTSALLAGTITSGWTFGAGAALQIPFAMQMAYRFNGIGVTQNVLYENQKLIANQFNSAIGKIQDSLSSTASALGKLQDVVNQNAQALNTLVKQLSSNFGAISSVLNDILSRLDPPEAEVQIDRLITGRLQSLQTYVTQQLIRAAEIRASANLAATKMSECVLGQSKRVDFCGKGYQLMSFPQSAPHGVVFLNVTYVPAQEKNFTTAPAICNDGKAHFPREGVFVSNGTNWFVTQRNFYEPQIITTDNTFVSGNCDVVIGIVNNTVYDPLQPELDSFKEELDKYFKNHTSPDVDLGDISGINASVVNIQKEIDRLNEVAKNLNESLIDLQELGKYEQYIKGGGGSDIDPYKEFGSSYQLLNFLPLDFFPDLNALVDTATALYEEELTGREHCSPHHTAIRQALVCWDELTKLIAWMSSNITSEQVRTIIVNHVNDTWGLKVRQSLWFHLSCLTFGQHTVQEFLVSFGVWIRTPAPYRPPNAPILSTLPEHTVIC

SEQ ID NO: 6910 - protein, 1365 aa, Artificial Sequence
  SARS-CoV-2/Guangdong/20SF028/2020__EPI_ISL_403936 spike protein (1-1211)(K986P_V987P_ H1048Q_H1064N_ H1083N_H1101N) WhcAg construct
MFVFLVLLPLVSSQCVNLTTRTQLPPAYTNSFTRGVYYPDKVFRSSVLYSTQDLFLPFFSNVTWFHAIHVSGTNGTKRFDNPVLPFNDGVYFASTEKSNIIRGWIFGTTLDSKTQSLLIVNNATNVVIKVCEFQFCNDPFLGVYYHKNNKSWMESEFRVYSSANNCTFEYVSQPFLMDLEGKQGNFKNLREFVFKNIDGYFKIYSKHTPINLVRDLPQGFSALEPLVDLPIGINITRFQTLLALHRSYLTPGDSSSGWTAGAAAYYVGYLQPRTFLLKYNENGTITDAVDCALDPLSETKCTLKSFTVEKGIYQTSNFRVQPTESIVRFPNITNLCPFGEVFNATRFASVYAWNRKRISNCVADYSVLYNSASFSTFKCYGVSPTKLNDLCFTNVYADSFVIRGDEVRQIAPGQTGKIADYNYKLPDDFTGCVIAWNSNNLDSKVGGNYNYLYRLFRKSNLKPFERDISTEIYQAGSTPCNGVEGFNCYFPLQSYGFQPTNGVGYQPYRVVVLSFELLHAPATVCGPKKSTNLVKNKCVNFNFNGLTGTGVLTESNKKFLPFQQFGRDIADTTDAVRDPQTLEILDITPCSFGGVSVITPGTNTSNQVAVLYQDVNCTEVPVAIHADQLTPTWRVYSTGSNVFQTRAGCLIGAEHVNNSYECDIPIGAGICASYQTQTNSPRRARSVASQSIIAYTMSLGAENSVAYSNNSIAIPTNFTISVTTEILPVSMTKTSVDCTMYICGDSTECSNLLLQYGSFCTQLNRALTGIAVEQDKNTQEVFAQVKQIYKTPPIKDFGGFNFSQILPDPSKPSKRSFIEDLLFNKVTLADAGFIKQYGDCLGDIAARDLICAQKFNGLTVLPPLLTDEMIAQYTSALLAGTITSGWTFGAGAALQIPFAMQMAYRFNGIGVTQNVLYENQKLIANQFNSAIGKIQDSLSSTASALGKLQDVVNQNAQALNTLVKQLSSNFGAISSVLNDILSRLDPPEAEVQIDRLITGRLQSLQTYVTQQLIRAAEIRASANLAATKMSECVLGQSKRVDFCGKGYQLMSFPQSAPHGVVFLNVTYVPAQEKNFTTAPAICNDGKAHFPREGVFVSNGTNWFVTQRNFYEPQIITTDNTFVSGNCDVVIGIVNNTVYDPLQPELDSFKEELDKYFKNHTSPDVDLGDISGINASVVNIQKEIDRLNEVAKNLNESLIDLQELGKYEQYIKGGGGSDIDPYKEFGSSYQLLNFLPLDFFPDLNALVDTATALYEEELTGREHCSPHHTAIRQALVCWDELTKLIAWMSSNITSEQVRTIIVNHVNDTWGLKVRQSLWFHLSCLTFGQHTVQEFLVSFGVWIRTPAPYRPPNAPILSTLPEHTVIC

SEQ ID NO: 6911 - protein, 1365 aa, Artificial Sequence
  SARS-CoV-2/Shenzhen/SZTH-001/2020__EPI_ISL_406592 spike protein (1-1211)(K986P_V987P_ H1048Q_H1064N_ H1083N_H1101N) WhcAg construct
MFVFLVLLPLVSSQCVNLTTRTQLPPAYTNSFTRGVYYPDKVFRSSVLHSTQDLFLPFFSNVTWFHAIHVSGTNGTKRFDNPVLPFNDGVYFASTEKSNIIRGWIFGTTLDSKTQSLLIVNNATNVVIKVCEFQFCNDPFLGVYYHKNNKSWMESEFRVYSSANNCTFEYVSQPFLMDLEGKQGNFKNLREFVFKNIDGYFKIYSKHTPINLVRDLPQGFSALEPLVDLPIGINITRFQTLLALHRSYLTPGDSSSGWTAGAAAYYVGYLQPRTFLLKYNENGTITDAVDCALDPLSETKCTLKSFTVEKGIYQTSNFRVQPTESIVRFPNITNLCPFGEVFNATRFASVYAWNRKRISNCVADYSVLYNSASFSTFKCYGVSPTKLNDLCFTNVYADSFVIRGDEVRQIAPGQTGKIADYNYKLPDDFTGCVIAWNSNNLDSKVGGNYNYLYRLFRKSNLKPFERDISTEIYQAGSTPCNGVEGFNCYFPLQSYGFQPTNGVGYQPYRVVVLSFELLHAPATVCGPKKSTNLVKNKCVNFNFNGLTGTGVLTESNKKFLPFQQFGRDIADTTDAVRDPQTLEILDITPCSFGGVSVITPGTNTSNQVAVLYQDVNCTEVPVAIHADQLTPTWRVYSTGSNVFQTRAGCLIGAEHVNNSYECDIPIGAGICASYQTQTNSPRRARSVASQSIIAYTMSLGAENSVAYSNNSIAIPTNFTISVTTEILPVSMTKTSVDCTMYICGDSTECSNLLLQYGSFCTQLNRALTGIAVEQDKNTQEVFAQVKQIYKTPPIKDFGGFNFSQILPDPSKPSKRSFIEDLLFNKVTLADAGFIKQYGDCLGDIAARDLICAQKFNGLTVLPPLLTDEMIAQYTSALLAGTITSGWTFGAGAALQIPFAMQMAYRFNGIGVTQNVLYENQKLIANQFNSAIGKIQDSLSSTASALGKLQDVVNQNAQALNTLVKQLSSNFGAISSVLNDILSRLDPPEAEVQIDRLITGRLQSLQTYVTQQLIRAAEIRASANLAATKMSECVLGQSKRVDFCGKGYQLMSFPQSAPHGVVFLNVTYVPAQEKNFTTAPAICNDGKAHFPREGVFVSNGTNWFVTQRNFYEPQIITTDNTFVSGNCDVLIGIVNNTVYDPLQPELDSFKEELDKYFKNHTSPDVDLGDISGINASVVNIQKEIDRLNEVAKNLNESLIDLQELGKYEQYIKGGGGSDIDPYKEFGSSYQLLNFLPLDFFPDLNALVDTATALYEEELTGREHCSPHHTAIRQALVCWDELTKLIAWMSSNITSEQVRTIIVNHVNDTWGLKVRQSLWFHLSCLTFGQHTVQEFLVSFGVWIRTPAPYRPPNAPILSTLPEHTVIC

SEQ ID NO: 6912 - protein, 1365 aa, Artificial Sequence
  SARS-CoV-2/Shenzhen/SZTH-004/2020__EPI_ISL_406595 spike protein (1-1211)(K986P_V987P_ H1048Q_H1064N_ H1083N_H1101N) WhcAg construct
MFVFLVLLPLVSSQCVNLTTRTQLPPAYTNSFTRGVYYPDKVFRSSVLHSTQDLFLPFFSNVTWFHAIHVSGTNGTKRFDNPVLPFNDGVYFASTEKSNIIRGWIFGTTLDSKTQSLLIVNNATNVVIKVCEFQFCNDPFLGVYYHKNNKSWMESEFRVYSSANNCTFEYVSQPFLMDLEGKQGNFKNLREFVFKNIDGYFKIYSKHTPINLVRDLPQGFSALEPLVDLPIGINITRFQTLLALHRSYLTPGDSSSGWTAGAAAYYVGYLQPRTFLLKYNENGTITDAVDCALDPLSETKCTLKSFTVEKGIYQTSNFRVQPTESIVRFPNITNLCPFGEVFNATRFASVYAWDRKRISNCVAYYSVLYNSASFSTFKCYGVSPTKLNDLCFTNVYADSFVIRGDEVRQIAPGQTGKIADYNYKLPDDFTGCVIAWNSNNLDSKVGGNYNYLYRLFRKSNLKPFERDISTEIYQAGSTPCNGVEGFNCYFPLQSYGFQPTNGVGYQPYRVVVLSFELLHAPATVCGPKKSTNLVKNKCVNFNFNGLTGTGVLTESNKKFLPFQQFGRDIADTTDAVRDPQTLEILDITPCSFGGVSVITPGTNTSNQVAVLYQDVNCTEVPVAIHADQLTPTWRVYSTGSNVFQTRAGCLIGAEHVNNSYECDIPIGAGICASYQTQTNSPRRARSVASQSIIAYTMSLGAENSVAYSNNSIAIPTNFTISVTTEILPVSMTKTSVDCTMYICGDSTECSNLLLQYGSFCTQLNRALTGIAVEQDKNTQEVFAQVKQIYKTPPIKDFGGFNFSQILPDPSKPSKRSFIEDLLFNKVTLADAGFIKQYGDCLGDIAARDLICAQKFNGLTVLPPLLTDEMIAQYTSALLAGTITSGWTFGAGAALQIPFAMQMAYRFNGIGVTQNVLYENQKLIANQFNSAIGKIQDSLSSTASALGKLQDVVNQNAQALNTLVKQLSSNFGAISSVLNDILSRLDPPEAEVQIDRLITGRLQSLQTYVTQQLIRAAEIRASANLAATKMSECVLGQSKRVDFCGKGYQLMSFPQSAPHGVVFLNVTYVPAQEKNFTTAPAICNDGKAHFPREGVFVSNGTNWFVTQRNFYEPQIITTDNTFVSGNCDVVIGIVNNTVYDPLQPELDSFKEELDKYFKNHTSPDVDLGDISGINASVVNIQKEIDRLNEVAKNLNESLIDLQELGKYEQYIKGGGGSDIDPYKEFGSSYQLLNFLPLDFFPDLNALVDTATALYEEELTGREHCSPHHTAIRQALVCWDELTKLIAWMSSNITSEQVRTIIVNHVNDTWGLKVRQSLWFHLSCLTFGQHTVQEFLVSFGVWIRTPAPYRPPNAPILSTLPEHTVIC

SEQ ID NO: 6913 - protein, 1365 aa, Artificial Sequence
  SARS-CoV-2/France/IDF0372/2020__EPI_ISL_406596 spike protein (1-1211)(K986P_V987P_ H1048Q_H1064N_ H1083N_H1101N) WhcAg construct
MFVFLVLLPLVSSQCVNLTTRTQLPPAYTNSFTRGVYYPDKVFRSSVLHSTQDLFLPFFSNVTWFHAIHVSGTNGTKRFDNPVLPFNDGVYFASTEKSNIIRGWIFGTTLDSKTQSLLIVNNATNVVIKVCEFQFCNDPFLGVYYHKNNKSWMESEFRVYSSANNCTFEYVSQPFLMDLEGKQGNFKNLREFVFKNIDGYFKIYSKHTPINLVRDLPQGFSALEPLVDLPIGINITRFQTLLALHRSYLTPGDSSSGWTAGAAAYYVGYLQPRTFLLKYNENGTITDAVDCALDPLSETKCTLKSFTVEKGIYQTSNFRVQPTESIVRFPNITNLCPFGEVFNATRFASVYAWNRKRISNCVADYSFLYNSASFSTFKCYGVSPTKLNDLCFTNVYADSFVIRGDEVRQIAPGQTGKIADYNYKLPDDFTGCVIAWNSNNLDSKVGGNYNYLYRLFRKSNLKPFERDISTEIYQAGSTPCNGVEGFNCYFPLQSYGFQPTNGVGYQPYRVVVLSFELLHAPATVCGPKKSTNLVKNKCVNFNFNGLTGTGVLTESNKKFLPFQQFGRDIADTTDAVRDPQTLEILDITPCSFGGVSVITPGTNTSNQVAVLYQDVNCTEVPVAIHADQLTPTWRVYSTGSNVFQTRAGCLIGAEHVNNSYECDIPIGAGICASYQTQTNSPRRARSVASQSIIAYTMSLGAENSVAYSNNSIAIPTNFTISVTTEILPVSMTKTSVDCTMYICGDSTECSNLLLQYGSFCTQLNRALTGIAVEQDKNTQEVFAQVKQIYKTPPIKDFGGFNFSQILPDPSKPSKRSFIEDLLFNKVTLADAGFIKQYGDCLGDIAARDLICAQKFNGLTVLPPLLTDEMIAQYTSALLAGTITSGWTFGAGAALQIPFAMQMAYRFNGIGVTQNVLYENQKLIANQFNSAIGKIQDSLSSTASALGKLQDVVNQNAQALNTLVKQLSSNFGAISSVLNDILSRLDPPEAEVQIDRLITGRLQSLQTYVTQQLIRAAEIRASANLAATKMSECVLGQSKRVDFCGKGYQLMSFPQSAPHGVVFLNVTYVPAQEKNFTTAPAICNDGKAHFPREGVFVSNGTNWFVTQRNFYEPQIITTDNTFVSGNCDVVIGIVNNTVYDPLQPELDSFKEELDKYFKNHTSPDVDLGDISGINASVVNIQKEIDRLNEVAKNLNESLIDLQELGKYEQYIKGGGGSDIDPYKEFGSSYQLLNFLPLDFFPDLNALVDTATALYEEELTGREHCSPHHTAIRQALVCWDELTKLIAWMSSNITSEQVRTIIVNHVNDTWGLKVRQSLWFHLSCLTFGQHTVQEFLVSFGVWIRTPAPYRPPNAPILSTLPEHTVIC

SEQ ID NO: 6914 - protein, 1365 aa, Artificial Sequence
  SARS-CoV-2/Australia/VIC01/2020__EPI_ISL_406844 spike protein (1-1211)(K986P_V987P_ H1048Q_H1064N_ H1083N_H1101N) WhcAg construct
MFVFLVLLPLVSSQCVNLTTRTQLPPAYTNSFTRGVYYPDKVFRSSVLHSTQDLFLPFFSNVTWFHAIHVSGTNGTKRFDNPVLPFNDGVYFASTEKSNIIRGWIFGTTLDSKTQSLLIVNNATNVVIKVCEFQFCNDPFLGVYYHKNNKSWMESEFRVYSSANNCTFEYVSQPFLMDLEGKQGNFKNLREFVFKNIDGYFKIYSKHTPINLVRDLPQGFSALEPLVDLPIGINITRFQTLLALHRRYLTPGDSSSGWTAGAAAYYVGYLQPRTFLLKYNENGTITDAVDCALDPLSETKCTLKSFTVEKGIYQTSNFRVQPTESIVRFPNITNLCPFGEVFNATRFASVYAWNRKRISNCVADYSVLYNSASFSTFKCYGVSPTKLNDLCFTNVYADSFVIRGDEVRQIAPGQTGKIADYNYKLPDDFTGCVIAWNSNNLDSKVGGNYNYLYRLFRKSNLKPFERDISTEIYQAGSTPCNGVEGFNCYFPLQSYGFQPTNGVGYQPYRVVVLSFELLHAPATVCGPKKSTNLVKNKCVNFNFNGLTGTGVLTESNKKFLPFQQFGRDIADTTDAVRDPQTLEILDITPCSFGGVSVITPGTNTSNQVAVLYQDVNCTEVPVAIHADQLTPTWRVYSTGSNVFQTRAGCLIGAEHVNNSYECDIPIGAGICASYQTQTNSPRRARSVASQSIIAYTMSLGAENSVAYSNNSIAIPTNFTISVTTEILPVSMTKTSVDCTMYICGDSTECSNLLLQYGSFCTQLNRALTGIAVEQDKNTQEVFAQVKQIYKTPPIKDFGGFNFSQILPDPSKPSKRSFIEDLLFNKVTLADAGFIKQYGDCLGDIAARDLICAQKFNGLTVLPPLLTDEMIAQYTSALLAGTITSGWTFGAGAALQIPFAMQMAYRFNGIGVTQNVLYENQKLIANQFNSAIGKIQDSLSSTASALGKLQDVVNQNAQALNTLVKQLSSNFGAISSVLNDILSRLDPPEAEVQIDRLITGRLQSLQTYVTQQLIRAAEIRASANLAATKMSECVLGQSKRVDFCGKGYQLMSFPQSAPHGVVFLNVTYVPAQEKNFTTAPAICNDGKAHFPREGVFVSNGTNWFVTQRNFYEPQIITTDNTFVSGNCDVVIGIVNNTVYDPLQPELDSFKEELDKYFKNHTSPDVDLGDISGINASVVNIQKEIDRLNEVAKNLNESLIDLQELGKYEQYIKGGGGSDIDPYKEFGSSYQLLNFLPLDFFPDLNALVDTATALYEEELTGREHCSPHHTAIRQALVCWDELTKLIAWMSSNITSEQVRTIIVNHVNDTWGLKVRQSLWFHLSCLTFGQHTVQEFLVSFGVWIRTPAPYRPPNAPILSTLPEHTVIC

SEQ ID NO: 6915 - protein, 1365 aa, Artificial Sequence
  SARS-CoV-2/Germany/BavPat1/2020__EPI_ISL_406862 spike protein (1-1211)(K986P_V987P_ H1048Q_H1064N_ H1083N_H1101N) WhcAg construct
MFVFLVLLPLVSSQCVNLTTRTQLPPAYTNSFTRGVYYPDKVFRSSVLHSTQDLFLPFFSNVTWFHAIHVSGTNGTKRFDNPVLPFNDGVYFASTEKSNIIRGWIFGTTLDSKTQSLLIVNNATNVVIKVCEFQFCNDPFLGVYYHKNNKSWMESEFRVYSSANNCTFEYVSQPFLMDLEGKQGNFKNLREFVFKNIDGYFKIYSKHTPINLVRDLPQGFSALEPLVDLPIGINITRFQTLLALHRSYLTPGDSSSGWTAGAAAYYVGYLQPRTFLLKYNENGTITDAVDCALDPLSETKCTLKSFTVEKGIYQTSNFRVQPTESIVRFPNITNLCPFGEVFNATRFASVYAWNRKRISNCVADYSVLYNSASFSTFKCYGVSPTKLNDLCFTNVYADSFVIRGDEVRQIAPGQTGKIADYNYKLPDDFTGCVIAWNSNNLDSKVGGNYNYLYRLFRKSNLKPFERDISTEIYQAGSTPCNGVEGFNCYFPLQSYGFQPTNGVGYQPYRVVVLSFELLHAPATVCGPKKSTNLVKNKCVNFNFNGLTGTGVLTESNKKFLPFQQFGRDIADTTDAVRDPQTLEILDITPCSFGGVSVITPGTNTSNQVAVLYQGVNCTEVPVAIHADQLTPTWRVYSTGSNVFQTRAGCLIGAEHVNNSYECDIPIGAGICASYQTQTNSPRRARSVASQSIIAYTMSLGAENSVAYSNNSIAIPTNFTISVTTEILPVSMTKTSVDCTMYICGDSTECSNLLLQYGSFCTQLNRALTGIAVEQDKNTQEVFAQVKQIYKTPPIKDFGGFNFSQILPDPSKPSKRSFIEDLLFNKVTLADAGFIKQYGDCLGDIAARDLICAQKFNGLTVLPPLLTDEMIAQYTSALLAGTITSGWTFGAGAALQIPFAMQMAYRFNGIGVTQNVLYENQKLIANQFNSAIGKIQDSLSSTASALGKLQDVVNQNAQALNTLVKQLSSNFGAISSVLNDILSRLDPPEAEVQIDRLITGRLQSLQTYVTQQLIRAAEIRASANLAATKMSECVLGQSKRVDFCGKGYQLMSFPQSAPHGVVFLNVTYVPAQEKNFTTAPAICNDGKAHFPREGVFVSNGTNWFVTQRNFYEPQIITTDNTFVSGNCDVVIGIVNNTVYDPLQPELDSFKEELDKYFKNHTSPDVDLGDISGINASVVNIQKEIDRLNEVAKNLNESLIDLQELGKYEQYIKGGGGSDIDPYKEFGSSYQLLNFLPLDFFPDLNALVDTATALYEEELTGREHCSPHHTAIRQALVCWDELTKLIAWMSSNITSEQVRTIIVNHVNDTWGLKVRQSLWFHLSCLTFGQHTVQEFLVSFGVWIRTPAPYRPPNAPILSTLPEHTVIC

SEQ ID NO: 6916 - protein, 1365 aa, Artificial Sequence
  SARS-CoV-2/Wuhan/HBCDC-HB-02/2020__EPI_ISL_412978 spike protein (1-1211)(K986P_V987P_ H1048Q_H1064N_ H1083N_H1101N) WhcAg construct
MFVFLVLLPLVSSQCVNLTTRTQLPPAYTNSFTRGVYYPDKVFRSSVLHSTQDLFLPFFSNVTWFHAIHVSGTNGTKRFDNPVLPFNDGVYFASTEKSNIIRGWIFGTTLDSKTQSLLIVNNATNVVIKVCEFQFCNDPFLGVYYHKNNKSWMESEFRVYSSANNCTFEYVSQPFLMDLEGKQGNFKNLREFVFKNIDGYFKIYSKHTPINLVRDLPQGFSALEPLVDLPIGINITRFQTLLALHRSYLTPGDSSSGWTAGAAAYYVGYLQPRTFLLKYNENGTITDAVDCALDPLSETKCTLKSFTVEKGIYQTSNFRVQPTESIVRFPNITNLCPFGEVFNATRFASVYAWNRKRISNCVADYSVLYNSASFSTFKCYGVSPTKLNDLCFTNVYADSFVIRGDEVRQIAPGQTGKIADYNYKLPDDFTGCVIAWNSNNLDSKVGGNYNYLYRLFRKSNLKPFERDISTEIYQAGSTPCNGVEGFNCYFPLQSYGFQPTNGVGYQPYRVVVLSFELLHAPATVCGPKKSTNLVKNKCVNFNFNGLTGTGVLTESNKKFLPFQQFGRDIADTTDAVRDPQTLEILDITPCSFGGVSVITPGTNTSNQVAVLYQDVNCTEVPVAIHADQLTPTWRVYSTGSNVFQTRAGCLIGAEHVNNSYECDIPIGAGICASYQTQTNSPRRARSVASQSIIAYTMSLGAENSVAYSNNSIAIPTNFTISVTTEILPVSMTKTSVDCTMYICGDSTECSNFLLQYGSFCTQLNRALTGIAVEQDKNTQEVFAQVKQIYKTPPIKDFGGFNFSQILPDPSKPSKRSFIEDLLFNKVTLADAGFIKQYGDCLGDIAARDLICAQKFNGLTVLPPLLTDEMIAQYTSALLAGTITSGWTFGAGAALQIPFAMQMAYRFNGIGVTQNVLYENQKLIANQFNSAIGKIQDSLSSTASALGKLQDVVNQNAQALNTLVKQLSSNFGAISSVLNDILSRLDPPEAEVQIDRLITGRLQSLQTYVTQQLIRAAEIRASANLAATKMSECVLGQSKRVDFCGKGYQLMSFPQSAPHGVVFLNVTYVPAQEKNFTTAPAICNDGKAHFPREGVFVSNGTNWFVTQRNFYEPQIITTDNTFVSGNCDVVIGIVNNTVYDPLQPELDSFKEELDKYFKNHTSPDVDLGDISGINASVVNIQKEIDRLNEVAKNLNESLIDLQELGKYEQYIKGGGGSDIDPYKEFGSSYQLLNFLPLDFFPDLNALVDTATALYEEELTGREHCSPHHTAIRQALVCWDELTKLIAWMSSNITSEQVRTIIVNHVNDTWGLKVRQSLWFHLSCLTFGQHTVQEFLVSFGVWIRTPAPYRPPNAPILSTLPEHTVIC

SEQ ID NO: 6917 - protein, 1365 aa, Artificial Sequence
  SARS-CoV-2/Australia/QLD02/2020__EPI_ISL_407896 spike protein (1-1211)(K986P_V987P_ H1048Q_H1064N_ H1083N_H1101N) WhcAg construct
MFVFLVLLPLVSSQCVNLTTRTQLPPAYTNSFTRGVYYPDKVFRSSVLHSTQDLFLPFFSNVTWFHAIHVSGTNGTKRFDNPVLPFNDGVYFASTEKSNIIRGWIFGTTLDSKTQSLLIVNNATNVVIKVCEFQFCNDPFLGVYYHKNNKSWMESEFRVYSSANNCTFEYVSQPFLMDLEGKQGNFKNLREFVFKNIDGYFKIYSKHTPINLVRDLPQGFSALEPLVDLPIGINITRFQTLLALHRSYLTPGDSSSGWTAGAAAYYVGYLQPRTFLLKYNENGTITDAVDCALDPLSETKCTLKSFTVEKGIYQTSNFRVQPTESIVRFPNITNLCPFGEVFNATRFASVYAWNRKRISNCVADYSVLYNSASFSTFKCYGVSPTKLNDLCFTNVYADSFVIRGDEVRQIAPGQTGKIADYNYKLPDDFTGCVIAWNSNNLDSKVGGNYNYLYRLFRKSNLKPFERDISTEIYQAGSTPCNGVEGFNCYFPLQSYGFQPTNGVGYQPYRVVVLSFELLHAPATVCGPKKSTNLVKNKCVNFNFNGLTGTGVLTESNKKFLPFQQFGRDIADTTDAVRDPQTLEILDITPCSFGGVSVITPGTNTSNQVAVLYQDVNCTEVPVAIHADQLTPTWRVYSTGSNVFQTRAGCLIGAEHVNNSYECDIPIGAGICASYQTQTNSPRRARSVASQSIIAYTMSLGAENSVAYSNNSIAIPTNFTISVTTEILPVSMTKTSVDCTMYICGDSTECSNLLLQYGSFCTQLNRALTGIAVEQDKNTQEVFAQVKQIYKTPPIKDFGGFNFSQILPDPSKPSKRSFIEDLLFNKVTLADAGFIKQYGDCLGDIAARDLICAQKFNGLTVLPPLLTDEMIAQYTSALLAGTITSGWTFGAGAALQIPFAMQMAYRFNGIGVTQNVLYENQKLIANQFNSAIGKIQDSLSSTASALGKLQDVVNQNAQALNTLVKQLSSNFGAISSVLNDILSRLDPPEAEVQIDRLITGRLQSLQTYVTQQLIRAAEIRASANLAATKMSECVLGQSKRVDFCGKGYQLMSFPQSAPHGVVFLNVTYVPAQEKNFTTAPAICNDGKAHFPREGVFVSNGTNWFVTQRNFYEPQIITTDNTFVSGNCDVVIGIVNNTVYDPLQLELDSFKEELDKYFKNHTSPDVDLGDISGINASVVNIQKEIDRLNEVAKNLNESLIDLQELGKYEQYIKGGGGSDIDPYKEFGSSYQLLNFLPLDFFPDLNALVDTATALYEEELTGREHCSPHHTAIRQALVCWDELTKLIAWMSSNITSEQVRTIIVNHVNDTWGLKVRQSLWFHLSCLTFGQHTVQEFLVSFGVWIRTPAPYRPPNAPILSTLPEHTVIC

SEQ ID NO: 6918 - protein, 1365 aa, Artificial Sequence
  SARS-CoV-2/India/1-31/2020__EPI_ISL_413523 spike protein (1-1211)(K986P_V987P_ H1048Q_H1064N_ H1083N_H1101N) WhcAg construct
MFVFLVLLPLVSSQCVNLTTRTQLPPAYTNSFTRGVYYPDKVFRSSVLHSTQDLFLPFFSNVTWFHAIHVSGTNGTKRFDNPVLPFNDGVYFASTEKSNIIRGWIFGTTLDSKTQSLLIVNNATNVVIKVCEFQFCNDPFLGVYYHKNNKSWMESEFRVYSSANNCTFEYVSQPFLMDLEGKQGNFKNLREFVFKNIDGYFKIYSKHTPINLVRDLPQGFSALEPLVDLPIGINITRFQTLLALHRSYLTPGDSSSGWTAGAAAYYVGYLQPRTFLLKYNENGTITDAVDCALDPLSETKCTLKSFTVEKGIYQTSNFRVQPTESIVRFPNITNLCPFGEVFNATRFASVYAWNRKRISNCVADYSVLYNSASFSTFKCYGVSPTKLNDLCFTNVYADSFVIRGDEVRQIAPGQTGKIADYNYKLPDDFTGCVIAWNSNNLDSKVGGNYNYLYRLFRKSNLKPFERDISTEIYQAGSTPCNGVEGFNCYFPLQSYGFQPTNGVGYQPYRVVVLSFELLHAPATVCGPKKSTNLVKNKCVNFNFNGLTGTGVLTESNKKFLPFQQFGRDIADTTDAVRDPQTLEILDITPCSFGGVSVITPGTNTSNQVAVLYQDVNCTEVPVAIHADQLTPTWRVYSTGSNVFQTRAGCLIGAEHVNNSYECDIPIGAGICASYQTQTNSPRRARSVASQSIIAYTMSLGAENSVAYSNNSIAIPTNFTISVTTEILPVSMTKTSVDCTMYICGDSTECSNLLLQYGSFCTQLNRALTGIAVEQDKNTQEVFAQVKQIYKTPPIKDFGGFNFSQILPDPSKPSKRSFIEDLLFNKVTLADAGFIKQYGDCLGDIAARDLICAQKFNGLTVLPPLLTDEMIAQYTSALLAGTITSGWTFGAGAALQIPFAMQMAYRFNGIGVTQNVLYENQKLIANQFNSVIGKIQDSLSSTASALGKLQDVVNQNAQALNTLVKQLSSNFGAISSVLNDILSRLDPPEAEVQIDRLITGRLQSLQTYVTQQLIRAAEIRASANLAATKMSECVLGQSKRVDFCGKGYQLMSFPQSAPHGVVFLNVTYVPAQEKNFTTAPAICNDGKAHFPREGVFVSNGTNWFVTQRNFYEPQIITTDNTFVSGNCDVVIGIVNNTVYDPLQPELDSFKEELDKYFKNHTSPDVDLGDISGINASVVNIQKEIDRLNEVAKNLNESLIDLQELGKYEQYIKGGGGSDIDPYKEFGSSYQLLNFLPLDFFPDLNALVDTATALYEEELTGREHCSPHHTAIRQALVCWDELTKLIAWMSSNITSEQVRTIIVNHVNDTWGLKVRQSLWFHLSCLTFGQHTVQEFLVSFGVWIRTPAPYRPPNAPILSTLPEHTVIC

SEQ ID NO: 6919 - protein, 1365 aa, Artificial Sequence
  SARS-CoV-2/Guangdong/GD2020087-P0008/2020__EPI_ISL_413863 spike protein (1-1211)(K986P_V987P_ H1048Q_H1064N_ H1083N_H1101N) WhcAg construct
MFVFLVLLPLVSSQCVNLTTRTQLPPAYTNSFTRGVYYPDKVFRSSVLHSTQDLFLPFFSNVTWFHAIHVSGTNGTKRFDNPVLPFNDGVYFASTEKSNIIRGWIFGTTLDSKTQSLLIVNNATNVVIKVCEFQFCNDPFLGVYYHKNNKSWMESEFRVYSSANNCTFEYVSQPFLMDLEGKQGNFKNLREFVFKNIDGYFKIYSKHTPINLVRDLPQGFSALEPLVDLPIGINITRFQTLLALHRSYLTPGDSSSGWTAGAAAYYVGYLQPRTFLLKYNENGTITDAVDCALDPLSETKCTLKSFTVEKGIYQTSNFRVQPTESIVRFPNITNLCPFGEVFNATRFASVYAWNRKRISNCVADYSVLYNSASFSTFKCYGVSPTKLNDLCFTNVYADSFVIRGDEVREIAPGQTGKIADYNYKLPDDFTGCVIAWNSNNLDSKVGGNYNYLYRLFRKSNLKPFERDISTEIYQAGSTPCNGVEGFNCYFPLQSYGFQPTNGVGYQPYRVVVLSFELLHAPATVCGPKKSTNLVKNKCVNFNFNGLTGTGVLTESNKKFLPFQQFGRDIADTTDAVRDPQTLEILDITPCSFGGVSVITPGTNTSNQVAVLYQDVNCTEVPVAIHADQLTPTWRVYSTGSNVFQTRAGCLIGAEHVNNSYECDIPIGAGICASYQTQTNSPRRARSVASQSIIAYTMSLGAENSVAYSNNSIAIPTNFTISVTTEILPVSMTKTSVDCTMYICGDSTECSNLLLQYGSFCTQLNRALTGIAVEQDKNTQEVFAQVKQIYKTPPIKDFGGFNFSQILPDPSKPSKRSFIEDLLFNKVTLADAGFIKQYGDCLGDIAARDLICAQKFNGLTVLPPLLTDEMIAQYTSALLAGTITSGWTFGAGAALQIPFAMQMAYRFNGIGVTQNVLYENQKLIANQFNSAIGKIQDSLSSTASALGKLQDVVNQNAQALNTLVKQLSSNFGAISSVLNDILSRLDPPEAEVQIDRLITGRLQSLQTYVTQQLIRAAEIRASANLAATKMSECVLGQSKRVDFCGKGYQLMSFPQSAPHGVVFLNVTYVPAQEKNFTTAPAICNDGKAHFPREGVFVSNGTNWFVTQRNFYEPQIITTDNTFVSGNCDVVIGIVNNTVYDPLQPELDSFKEELDKYFKNHTSPDVDLGDISGINASVVNIQKEIDRLNEVAKNLNESLIDLQELGKYEQYIKGGGGSDIDPYKEFGSSYQLLNFLPLDFFPDLNALVDTATALYEEELTGREHCSPHHTAIRQALVCWDELTKLIAWMSSNITSEQVRTIIVNHVNDTWGLKVRQSLWFHLSCLTFGQHTVQEFLVSFGVWIRTPAPYRPPNAPILSTLPEHTVIC

SEQ ID NO: 6920 - protein, 1365 aa, Artificial Sequence
  SARS-CoV-2/Sweden/01/2020__EPI_ISL_411951 spike protein (1-1211)(K986P_V987P_ H1048Q_H1064N_ H1083N_H1101N) WhcAg construct
MFVFLVLLPLVSSQCVNLTTRTQLPPAYTNSFTRGVYYPDKVFRSSVLHSTQDLFLPFFSNVTWFHAIHVSGTNGTKRFDNPVLPFNDGVYFASTEKSNIIRGWIFGTTLDSKTQSLLIVNNATNVVIKVCEFQFCNDPFLGVYYHKNNKSWMESEFRVYSSANNCTFEYVSQPFLMDLEGKQGNFKNLREFVFKNIDGYFKIYSKHTPINLVRDLPQGFSALEPLVDLPIGINITRFQTLLALHRSYLTPGDSSSGWTAGAAAYYVGYLQPRTFLLKYNENGTITDAVDCALDPLSETKCTLKSFTVEKGIYQTSNFRVQPTESIVRFPNITNLCPFGEVFNATRFASVYAWNRKRISNCVADYSVLYNSASFSTFKCYGVSPTKLNDLCFTNVYADSFVIRGDEVRQIAPGQTGKIADYNYKLPDDFTGCVIAWNSNNLDSKVGGNYNYLYRLFRKSNLKPFERDISTEIYQAGSTPCNGVEGFNCYFPLQSYGFQPTNGVGYQPYRVVVLSFELLHAPATVCGPKKSTNLVKNKCVNFNFNGLTGTGVLTESNKKFLPFQQFGRDIADTTDAVRDPQTLEILDITPCSFGGVSVITPGTNTSNQVAVLYQDVNCTEVPVAIHADQLTPTWRVYSTGSNVFQTRAGCLIGAEHVNNSYECDIPIGAGICASYQTQTNSPRRARSVASQSIIAYTMSLGAENSVAYSNNSIAIPTNFTISVTTEILPVSMTKTSVDCTMYICGDSTECSNLLLQYGSFCTQLNRALTGIAVEQDKNTQEVFAQVKQIYKTPPIKDCGGFNFSQILPDPSKPSKRSFIEDLLFNKVTLADAGFIKQYGDCLGDIAARDLICAQKFNGLTVLPPLLTDEMIAQYTSALLAGTITSGWTFGAGAALQIPFAMQMAYRFNGIGVTQNVLYENQKLIANQFNSAIGKIQDSLSSTASALGKLQDVVNQNAQALNTLVKQLSSNFGAISSVLNDILSRLDPPEAEVQIDRLITGRLQSLQTYVTQQLIRAAEIRASANLAATKMSECVLGQSKRVDFCGKGYQLMSFPQSAPHGVVFLNVTYVPAQEKNFTTAPAICNDGKAHFPREGVFVSNGTNWFVTQRNFYEPQIITTDNTFVSGNCDVVIGIVNNTVYDPLQPELDSFKEELDKYFKNHTSPDVDLGDISGINASVVNIQKEIDRLNEVAKNLNESLIDLQELGKYEQYIKGGGGSDIDPYKEFGSSYQLLNFLPLDFFPDLNALVDTATALYEEELTGREHCSPHHTAIRQALVCWDELTKLIAWMSSNITSEQVRTIIVNHVNDTWGLKVRQSLWFHLSCLTFGQHTVQEFLVSFGVWIRTPAPYRPPNAPILSTLPEHTVIC

SEQ ID NO: 6921 - protein, 1365 aa, Artificial Sequence
  SARS-CoV-2/Tianmen/HBCDC-HB-07/2020__EPI_ISL_412983 spike protein (1-1211)(K986P_V987P_ H1048Q_H1064N_ H1083N_H1101N) WhcAg construct
MFVFLVLLPLVSSQCVNLTTRTQLPPAYTNSFTRGVYYPDKVFRSSVLHSTQDLFLPFFSNVTWFHAIHVSGTNGTKRFDNPVLPFNDGVYFASTEKSNIIRGWIFGTTLDSKTQSLLIVNNATNVVIKVCEFQFCNDPFLGVYYHKNNKSWMESEFRVYSSANNCTFEYVSQPFLMDLEGKQGNFKNLREFVFKNIDGYFKIYSKHTPINLVRDLPQGFSALEPLVDLPIGINITRFQTLLALHRSYLTPGDSSSGWTAGAAAYYVGYLQPRTFLLKYNENGTITDAVDCALDPLSETKCTLKSFTVEKGIYQTSNFRVQPTESIVRFPNITNLCPFGEVFNATRFASVYAWNRKRISNCVADYSVLYNSASFSTFKCYGVSPTKLNDLCFTNVYADSFVIRGDEVRQIAPGQTGKIADYNYKLPDDFTGCVIAWNSNNLDSKVGGNYNYLYRLFRKSNLKPFERDISTEIYQAGSTPCNGVEGFNCYFPLQSYGFQPTNGVGYQPYRVVVLSFELLHAPATVCGPKKSTNLVKNKCVNFNFNGLTGTGVLTESNKKFLPFQQFGRDIADTTDAVRDPQTLEILDITPCSFGGVSVITPGTNTSNQVAVLYQDLNCTEVPVAIHADQLTPTWRVYSTGSNVFQTRAGCLIGAEHVNNSYECDIPIGAGICASYQTQTNSPRRARSVASQSIIAYTMSLGAENSVAYSNNSIAIPTNFTISVTTEILPVSMTKTSVDCTMYICGDSTECSNLLLQYGSFCTQLNRALTGIAVEQDKNTQEVFAQVKQIYKTPPIKDFGGFNFSQILPDPSKPSKRSFIEDLLFNKVTLADAGFIKQYGDCLGDIAARDLICAQKFNGLTVLPPLLTDEMIAQYTSALLAGTITSGWTFGAGAALQIPFAMQMAYRFNGIGVTQNVLYENQKLIANQFNSAIGKIQDSLSSTASALGKLQDVVNQNAQALNTLVKQLSSNFGAISSVLNDILSRLDPPEAEVQIDRLITGRLQSLQTYVTQQLIRAAEIRASANLAATKMSECVLGQSKRVDFCGKGYQLMSFPQSAPHGVVFLNVTYVPAQEKNFTTAPAICNDGKAHFPREGVFVSNGTNWFVTQRNFYEPQIITTDNTFVSGNCDVVIGIVNNTVYDPLQPELDSFKEELDKYFKNHTSPDVDLGDISGINASVVNIQKEIDRLNEVAKNLNESLIDLQELGKYEQYIKGGGGSDIDPYKEFGSSYQLLNFLPLDFFPDLNALVDTATALYEEELTGREHCSPHHTAIRQALVCWDELTKLIAWMSSNITSEQVRTIIVNHVNDTWGLKVRQSLWFHLSCLTFGQHTVQEFLVSFGVWIRTPAPYRPPNAPILSTLPEHTVIC

SEQ ID NO: 6922 - protein, 1365 aa, Artificial Sequence
  SARS-CoV-2/Hong Kong/case42_VM20002493/2020__EPI_ISL_414527 spike protein (1-1211)(K986P_V987P_ H1048Q_H1064N_ H1083N_H1101N) WhcAg construct
MFVFLVLLPLVSSQCVNLTTRTQLPPAYTNSFTRGVYYPDKVFRSSVLHSTQDLFLPFFSNVTWFHAIHVSGTNGTKRFDNPVLPFNDGVYFASTEKSNIIRGWIFGTTLDSKTQSLLIVNNATNVVIKVCEFQFCNDPFLGVYYHKNNKSWMESEFRVYSSANNCTFEYVSQPFLMDLEGKQGNFKNLREFVFKNIDGYFKIYSKHTPINLVRDLPQGFSALEPLVDLPIGINITRFQTLLALHRSYLTPGDSSSGWTAGAAAYYVGYLQPRTFLLKYNENGTITDAVDCALDPLSETKCTLKSFTVEKGIYQTSNFRVQPTESIVRFPNITNLCPFGEVFNATRFASVYAWNRKRISNCVADYSVLYNSASFSTFKCYGVSPTKLNDLCFTNVYADSFVIRGDEVRQIAPGQTGKIADYNYKLPDDFTGCVIAWNSNNLDSKVGGNYNYLYRLFRKSNLKPFERDISTEIYQAGSTPCNGVEGFNCYFPLQSYGFQPTNGVGYQPYRVVVLSFELLHAPATVCGPKKSTNLVKNKCVNFNFNGLTGTGVLTESNKKFLPFQQFGRDIADTTDAVRDPQTLEILDITPCSFGGVSVITPGTNTSNQVAVLYQDVNCTEVPVAIHADQLTPTWRVYSTGSNVFQTRAGCLIGAEHVNNSYECDIPIGAGICASYQTQTNSPRRARSVASQSIIAYTMSLGAENSVAYSNNSIAIPTNFAISVTTEILPVSMTKTSVDCTMYICGDSTECSNLLLQYGSFCTQLNRALTGIAVEQDKNTQEVFAQVKQIYKTPPIKDFGGFNFSQILPDPSKPSKRSFIEDLLFNKVTLADAGFIKQYGDCLGDIAARDLICAQKFNGLTVLPPLLTDEMIAQYTSALLAGTITSGWTFGAGAALQIPFAMQMAYRFNGIGVTQNVLYENQKLIANQFNSAIGKIQDSLSSTASALGKLQDVVNQNAQALNTLVKQLSSNFGAISSVLNDILSRLDPPEAEVQIDRLITGRLQSLQTYVTQQLIRAAEIRASANLAATKMSECVLGQSKRVDFCGKGYQLMSFPQSAPHGVVFLNVTYVPAQEKNFTTAPAICNDGKAHFPREGVFVSNGTNWFVTQRNFYEPQIITTDNTFVSGNCDVVIGIVNNTVYDPLQPELDSFKEELDKYFKNHTSPDVDLGDISGINASVVNIQKEIDRLNEVAKNLNESLIDLQELGKYEQYIKGGGGSDIDPYKEFGSSYQLLNFLPLDFFPDLNALVDTATALYEEELTGREHCSPHHTAIRQALVCWDELTKLIAWMSSNITSEQVRTIIVNHVNDTWGLKVRQSLWFHLSCLTFGQHTVQEFLVSFGVWIRTPAPYRPPNAPILSTLPEHTVIC

SEQ ID NO: 6923 - protein, 1365 aa, Artificial Sequence
  SARS-CoV-2/USA/CruiseA-23/2020__EPI_ISL_414482 spike protein (1-1211)(K986P_V987P_ H1048Q_H1064N_ H1083N_H1101N) WhcAg construct
MFVFLVLLPLVSSQCVNLTTRTQLPPAYTNSFTRGVYYPDKVFRSSVLHSTQDLFLPFFSNVTWFHAIHVSGTNGTKRFDNPVLPFNDGVYFASTEKSNIIRGWIFGTTLDSKTQSLLIVNNATNVVIKVCEFQFCNDPFLGVYYHKNNKSWMESEFRVYSSANNCTFEYVSQPFLMDLEVKQGNFKNLREFVFKNIDGYFKIYSKHTPINLVRDLPQGFSALEPLVDLPIGINITRFQTLLALHRSYLTPGDSSSGWTAGAAAYYVGYLQPRTFLLKYNENGTITDAVDCALDPLSETKCTLKSFTVEKGIYQTSNFRVQPTESIVRFPNITNLCPFGEVFNATRFASVYAWNRKRISNCVADYSVLYNSASFSTFKCYGVSPTKLNDLCFTNVYADSFVIRGDEVRQIAPGQTGKIADYNYKLPDDFTGCVIAWNSNNLDSKVGGNYNYLYRLFRKSNLKPFERDISTEIYQAGSTPCNGVEGFNCYFPLQSYGFQPTNGVGYQPYRVVVLSFELLHAPATVCGPKKSTNLVKNKCVNFNFNGLTGTGVLTESNKKFLPFQQFGRDIADTTDAVRDPQTLEILDITPCSFGGVSVITPGTNTSNQVAVLYQDVNCTEVPVAIHADQLTPTWRVYSTGSNVFQTRAGCLIGAEHVNNSYECDIPIGAGICASYQTQTNSPRRARSVASQSIIAYTMSLGAENSVAYSNNSIAIPTNFTISVTTEILPVSMTKTSVDCTMYICGDSTECSNLLLQYGSFCTQLNRALTGIAVEQDKNTQEVFAQVKQIYKTPPIKDFGGFNFSQILPDPSKPSKRSFIEDLLFNKVTLADAGFIKQYGDCLGDIAARDLICAQKFNGLTVLPPLLTDEMIAQYTSALLAGTITSGWTFGAGAALQIPFAMQMAYRFNGIGVTQNVLYENQKLIANQFNSAIGKIQDSLSSTASALGKLQDVVNQNAQALNTLVKQLSSNFGAISSVLNDILSRLDPPEAEVQIDRLITGRLQSLQTYVTQQLIRAAEIRASANLAATKMSECVLGQSKRVDFCGKGYQLMSFPQSAPHGVVFLNVTYVPAQEKNFTTAPAICNDGKAHFPREGVFVSNGTNWFVTQRNFYEPQIITTDNTFVSGNCDVVIGIVNNTVYDPLQPELDSFKEELDKYFKNHTSPDVDLGDISGINASVVNIQKEIDRLNEVAKNLNESLIDLQELGKYEQYIKGGGGSDIDPYKEFGSSYQLLNFLPLDFFPDLNALVDTATALYEEELTGREHCSPHHTAIRQALVCWDELTKLIAWMSSNITSEQVRTIIVNHVNDTWGLKVRQSLWFHLSCLTFGQHTVQEFLVSFGVWIRTPAPYRPPNAPILSTLPEHTVIC

SEQ ID NO: 6924 - protein, 1365 aa, Artificial Sequence
  SARS-CoV-2/Hong Kong/case85_VM20002868/2020__EPI_ISL_414519 spike protein (1-1211)(K986P_V987P_ H1048Q_H1064N_ H1083N_H1101N) WhcAg construct
MFVFLVLVPLVSSQCVNLTTRTQLPPAYTNSFTRGVYYPDKVFRSSVLHSTQDLFLPFFSNVTWFHAIHVSGTNGTKRFDNPVLPFNDGVYFASTEKSNIIRGWIFGTTLDSKTQSLLIVNNATNVVIKVCEFQFCNDPFLGVYYHKNNKSWMESEFRVYSSANNCTFEYVSQPFLMDLEGKQGNFKNLREFVFKNIDGYFKIYSKHTPINLVRDLPQGFSALEPLVDLPIGINITRFQTLLALHRSYLTPGDSSSGWTAGAAAYYVGYLQPRTFLLKYNENGTITDAVDCALDPLSETKCTLKSFTVEKGIYQTSNFRVQPTESIVRFPNITNLCPFGEVFNATRFASVYAWNRKRISNCVADYSVLYNSASFSTFKCYGVSPTKLNDLCFTNVYADSFVIRGDEVRQIAPGQTGKIADYNYKLPDDFTGCVIAWNSNNLDSKVGGNYNYLYRLFRKSNLKPFERDISTEIYQAGSTPCNGVEGFNCYFPLQSYGFQPTNGVGYQPYRVVVLSFELLHAPATVCGPKKSTNLVKNKCVNFNFNGLTGTGVLTESNKKFLPFQQFGRDIADTTDAVRDPQTLEILDITPCSFGGVSVITPGTNTSNQVAVLYQDVNCTEVPVAIHADQLTPTWRVYSTGSNVFQTRAGCLIGAEHVNNSYECDIPIGAGICASYQTQTNSPRRARSVASQSIIAYTMSLGAENSVAYSNNSIAIPTNFTISVTTEILPVSMTKTSVDCTMYICGDSTECSNLLLQYGSFCTQLNRALTGIAVEQDKNTQEVFAQVKQIYKTPPIKDFGGFNFSQILPDPSKPSKRSFIEDLLFNKVTLADAGFIKQYGDCLGDIAARDLICAQKFNGLTVLPPLLTDEMIAQYTSALLAGTITSGWTFGAGAALQIPFAMQMAYRFNGIGVTQNVLYENQKLIANQFNSAIGKIQDSLSSTASALGKLQDVVNQNAQALNTLVKQLSSNFGAISSVLNDILSRLDPPEAEVQIDRLITGRLQSLQTYVTQQLIRAAEIRASANLAATKMSECVLGQSKRVDFCGKGYQLMSFPQSAPHGVVFLNVTYVPAQEKNFTTAPAICNDGKAHFPREGVFVSNGTNWFVTQRNFYEPQIITTDNTFVSGNCDVVIGIVNNTVYDPLQPELDSFKEELDKYFKNHTSPDVDLGDISGINASVVNIQKEIDRLNEVAKNLNESLIDLQELGKYEQYIKGGGGSDIDPYKEFGSSYQLLNFLPLDFFPDLNALVDTATALYEEELTGREHCSPHHTAIRQALVCWDELTKLIAWMSSNITSEQVRTIIVNHVNDTWGLKVRQSLWFHLSCLTFGQHTVQEFLVSFGVWIRTPAPYRPPNAPILSTLPEHTVIC

SEQ ID NO: 6925 - protein, 1365 aa, Artificial Sequence; identical to SEQ ID NO: 6915
  SARS-CoV-2/England/200990660/2020__EPI_ISL_414523 spike protein (1-1211)(K986P_V987P_ H1048Q_H1064N_ H1083N_H1101N) WhcAg construct

SEQ ID NO: 6926 - protein, 1365 aa, Artificial Sequence
  SARS-CoV-2/Australia/NSW09/2020__EPI_ISL_413595 spike protein (1-1211)(K986P_V987P_ H1048Q_H1064N_ H1083N_H1101N) WhcAg construct
MFVFLVLLPLVSSQCVNLTTRTQLPPAYTNSFTRGVYYPDKVFRSSVLHSTQDLFLPFFSNVTWFHAIHVSGTNGTKRFDNPVLPFNDGVYFASTEKSNIIRGWIFGTTLDSKTQSLLIVNNATNVVIKVCEFQFCNDPFLGVYYHKNNKSWMESEFRVYSSANNCTFEYVSQPFLMDLEGKQGNFKNLREFVFKNIDGYFKIYSKHTPINLVRDLPQGFSALEPLVDLPIGINITRFQTLLALHRSYLTPGDSSSGWTAGAAAYYVGYLQPRTFLLKYNENGTITDAVDCALDPLSETKCTLKSFTVEKGIYQTSNFRVQPTESIVRFPNITNLCPFGEVFNATRFASVYAWNRKRISNCVADYSVLYNSASFSTFKCYGVSPTKLNDLCFTNVYADSFVIRGDEVRQIAPGQTGKIADYNYKLPDDFTGCVIAWNSNNLDSKVGGNYNYLYRLFRKSNLKPFERDISTEIYQAGSTPCNGVEGFNCYFPLQSYGFQPTNGVGYQPYRVVVLSFELLHAPATVCGPKKSTNLVKNKCVNFNFNGLTGTGVLTESNKKFLPFQQFGRDIADTTDAVRDPQTLEILDITPCSFGGVSVITPGTNTSNQVAVLYQDVNCTEVPVAIHADQLTPTWRVYSTGSNVFQTRAGCLIGAEHVNNSYECDIPIGAGICASYQTQTNSPRRARSVASQSIIAYTMSLGAENSVAYSNNSIAIPTNFTISVTTEILPVSMTKTSVDCTMYICGDSTECSNLLLQYGSFCTQLNRALTGIAVEQDKNTQEVFAQVKQIYKTPPIKDFGGFNFSQILPDPSKPSKRSFIEDLLFNKVTLADAGFIKQYGDCLGDIAARDLICAQKFNGLTVLPPLLTDEMIAQYTSALLAGTITSGWTFGAGAALQIPFAMQMAYRFNGIGVTQNVLYENQKLIANQFNSAIGKIQDSLSFTASALGKLQDVVNQNAQALNTLVKQLSSNFGAISSVLNDILSRLDPPEAEVQIDRLITGRLQSLQTYVTQQLIRAAEIRASANLAATKMSECVLGQSKRVDFCGKGYQLMSFPQSAPHGVVFLNVTYVPAQEKNFTTAPAICNDGKAHFPREGVFVSNGTNWFVTQRNFYEPQIITTDNTFVSGNCDVVIGIVNNTVYDPLQPELDSFKEELDKYFKNHTSPDVDLGDISGINASVVNIQKEIDRLNEVAKNLNESLIDLQELGKYEQYIKGGGGSDIDPYKEFGSSYQLLNFLPLDFFPDLNALVDTATALYEEELTGREHCSPHHTAIRQALVCWDELTKLIAWMSSNITSEQVRTIIVNHVNDTWGLKVRQSLWFHLSCLTFGQHTVQEFLVSFGVWIRTPAPYRPPNAPILSTLPEHTVIC

SEQ ID NO: 6927 - protein, 1365 aa, Artificial Sequence; identical to SEQ ID NO: 6907
  SARS-CoV-2/Australia/NSW10/2020__EPI_ISL_413596 spike protein (1-1211)(K986P_V987P_ H1048Q_H1064N_ H1083N_H1101N) WhcAg construct

SEQ ID NO: 6928 - protein, 1365 aa, Artificial Sequence
  SARS-CoV-2/Switzerland/1000477797/2020__EPI_ISL_413023 spike protein (1-1211)(K986P_V987P_ H1048Q_H1064N_ H1083N_H1101N) WhcAg construct
MFVFLVLLPLVSSQCVNLTTRTQLPPAYTNSFTRGVYYPDKVFRSSVLHSTQDLFLPFFSNVTWFHAIHVSGTNGTKRFDNPVLPFNDGVYFASTEKSNIIRGWIFGTTLDSKTQSLLIVNNATNVVIKVCEFQFCNDPFLGVYYHKNNKSWMESEFRVYSSANNCTFEYVSQPFLMDLEGKQGNFKNLREFVFKNIDGYFNIYSKHTPINLVRDLPQGFSALEPLVDLPIGINITRFQTLLALHRSYLTPGDSSSGWTAGAAAYYVGYLQPRTFLLKYNENGTITDAVDCALDPLSETKCTLKSFTVEKGIYQTSNFRVQPTESIVRFPNITNLCPFGEVFNATRFASVYAWNRKRISNCVADYSVLYNSASFSTFKCYGVSPTKLNDLCFTNVYADSFVIRGDEVRQIAPGQTGKIADYNYKLPDDFTGCVIAWNSNNLDSKVGGNYNYLYRLFRKSNLKPFERDISTEIYQAGSTPCNGVEGFNCYFPLQSYGFQPTNGVGYQPYRVVVLSFELLHAPATVCGPKKSTNLVKNKCVNFNFNGLTGTGVLTESNKKFLPFQQFGRDIADTTDAVRDPQTLEILDITPCSFGGVSVITPGTNTSNQVAVLYQGVNCTEVPVAIHADQLTPTWRVYSTGSNVFQTRAGCLIGAEHVNNSYECDIPIGAGICASYQTQTNSPRRARSVASQSIIAYTMSLGAENSVAYSNNSIAIPTNFTISVTTEILPVSMTKTSVDCTMYICGDSTECSNLLLQYGSFCTQLNRALTGIAVEQDKNTQEVFAQVKQIYKTPPIKDFGGFNFSQILPDPSKPSKRSFIEDLLFNKVTLADAGFIKQYGDCLGDIAARDLICAQKFNGLTVLPPLLTDEMIAQYTSALLAGTITSGWTFGAGAALQIPFAMQMAYRFNGIGVTQNVLYENQKLIANQFNSAIGKIQDSLSSTASALGKLQDVVNQNAQALNTLVKQLSSNFGAISSVLNDILSRLDPPEAEVQIDRLITGRLQSLQTYVTQQLIRAAEIRASANLAATKMSECVLGQSKRVDFCGKGYQLMSFPQSAPHGVVFLNVTYVPAQEKNFTTAPAICNDGKAHFPREGVFVSNGTNWFVTQRNFYEPQIITTDNTFVSGNCDVVIGIVNNTVYDPLQPELDSFKEELDKYFKNHTSPDVDLGDISGINASVVNIQKEIDRLNEVAKNLNESLIDLQELGKYEQYIKGGGGSDIDPYKEFGSSYQLLNFLPLDFFPDLNALVDTATALYEEELTGREHCSPHHTAIRQALVCWDELTKLIAWMSSNITSEQVRTIIVNHVNDTWGLKVRQSLWFHLSCLTFGQHTVQEFLVSFGVWIRTPAPYRPPNAPILSTLPEHTVIC

SEQ ID NO: 6929 - protein, 1365 aa, Artificial Sequence
  SARS-CoV-2/Belgium/BA-02291/2020__EPI_ISL_415159 spike protein (1-1211)(K986P_V987P_ H1048Q_H1064N_ H1083N_H1101N) WhcAg construct
MFVFLVLLPLVSSQCVNLTTRTQLPPAYTNSFTRGVYYPDKVFRSSVLHSTQDLFLPFFSNVTWFHAIHVSGTNGTKRFDNPVLPFNDGVYFASTEKSNIIRGWIFGTTLDSKTQSLLIVNNATNVVIKVCEFQFCNDPFLGVYYHKNNKSWMESEFRVYSSANNCTFEYVSQPFLMDLEGKQGNFKNLREFVFKNIDGYFKIYSKHTPINLVRDLPQGFSALEPLVDLPIGINITRFQTLLALHRSYLTPGDSSSGWTAGAAAYYVGYLQPRTFLLKYNENGTITDAVDCALDPLSETKCTLKSFTVEKGIYQTSNFRVQPTESIVRFPNITNLCPFGEVFNATRFASVYAWNRKRISNCVADYSVLYNSASFSTFKCYGVSPTKLNDLCFTNVYADSFVIRGDEVRQIAPGQTGKIADYNYKLPDDFTGCVIAWNSNNLDSKVGGNYNYLYRLFRRSNLKPFERDISTEIYQAGSTPCNGVEGFNCYFPLQSYGFQPTNGVGYQPYRVVVLSFELLPAPATVCGPKKSTNLVKNKCVNFNFNGLTGTGVLTESNKKFLPFQQFGRDIADTTDAVRDPQTLEILDITPCSFGGVSVITPGTNTSNQVAVLYQGVNCTEVPVAIHADQLTPTWRVYSTGSNVFQTRAGCLIGAEHVNNSYECDIPIGAGICASYQTQTNSPRRARSVASQSIIAYTMSLGAENSVAYSNNSIAIPTNFTISVTTEILPVSMTKTSVDCTMYICGDSTECSNLLLQYGSFCTQLNRALTGIAVEQDKNTQEVFAQVKQIYKTPPIKDFGGFNFSQILPDPSKPSKRSFIEDLLFNKVTLADAGFIKQYGDCLGDIAARDLICAQKFNGLTVLPPLLTDEMIAQYTSALLAGTITSGWTFGAGAALQIPFAMQMAYRFNGIGVTQNVLYENQKLIANQFNSAIGKIQDSLSSAAPALGKLQDVVNQNAQALNTLVKQLSSNFGAISSVLNDILSRLDPPEAEVQIDRLITGRLQSLQTYVTQQLIRAAEIRASANLAATKMSECVLGQSKRVDFCGKGYQLMSFPQSAPHGVVFLNVTYVPAQEKNFTTAPAICNDGKAHFPREGVFVSNGTNWFVTQRNFYEPQIITTDNTFVSGNCDVVIGIVNNTVYDPLQPELDSFKEELDKYFKNHTSPDVDLGDISGINASVVNIQKEIDRLNEVAKNLNESLIDLQELGKYEQYIKGGGGSDIDPYKEFGSSYQLLNFLPLDFFPDLNALVDTATALYEEELTGREHCSPHHTAIRQALVCWDELTKLIAWMSSNITSEQVRTIIVNHVNDTWGLKVRQSLWFHLSCLTFGQHTVQEFLVSFGVWIRTPAPYRPPNAPILSTLPEHTVIC

SEQ ID NO: 6930 - protein, 1365 aa, Artificial Sequence
  SARS-CoV-2/USA/WA8-UW5/2020__EPI_ISL_413486 spike protein (1-1211)(K986P_V987P_ H1048Q_H1064N_ H1083N_H1101N) WhcAg construct
MFVFLVLLPLVSSQCVNLTTRTQLPPAYTNSFTRGVYYPDKVFRSSVLHSTQDLFLPFFSNVTWFHAIHVSGTNGTKRFDNPVLPFNDGVYFASTEKSNIIRGWIFGTTLDSKTQSLLIVNNATNVVIKVCEFQFCNDPFLGVYYHKNNKSWMESEFRVYSSANNCTFEYVSQPFLMDLEGKQGNFKNLREFVFKNIDGYFKIYSKHTPINLVRDLPQGFSALEPLVDLPIGINITRFQTLLALHRSYLTPGDSSSGWTAGAAAYYVGYLQPRTFLLKYNENGTITDAVDCALDPLSETKCTLKSFTVEKGIYQTSNFRVQPTESIVRFPNITNLCPFGEVFNATRFASVYAWNRKRISNCVADYSVLYNSASFSTFKCYGVSPTKLNDLCFTNVYADSFVIRGDEVRQIAPGQTGKIADYNYKLPDDFTGCVIAWNSNNLDSKVGGNYNYLYRLFRKSNLKPFERDISTEIYQAGSTPCNGVEGFNCYFPLQSYGFQPTNGVGYQPYRVVVLSFELLHAPATVCGPKKSTNLVKNKCVNFNFNGLTGTGVLTESNKKFLPFQQFGRDIADTTDAVRDPQTLEILDITPCSFGGVSVITPGTNTSNQVAVLYQDVNCTEVPVAIHADQLTPTWRVYSTGSNVFQTRAGCLIGAEYVNNSYECDIPIGAGICASYQTQTNSPRRARSVASQSIIAYTMSLGAENSVAYSNNSIAIPTNFTISVTTEILPVSMTKTSVDCTMYICGDSTECSNLLLQYGSFCTQLNRALTGIAVEQDKNTQEVFAQVKQIYKTPPIKDFGGFNFSQILPDPSKPSKRSFIEDLLFNKVTLADAGFIKQYGDCLGDIAARDLICAQKFNGLTVLPPLLTDEMIAQYTSALLAGTITSGWTFGAGAALQIPFAMQMAYRFNGIGVTQNVLYENQKLIANQFNSAIGKIQDSLSSTASALGKLQDVVNQNAQALNTLVKQLSSNFGAISSVLNDILSRLDPPEAEVQIDRLITGRLQSLQTYVTQQLIRAAEIRASANLAATKMSECVLGQSKRVDFCGKGYQLMSFPQSAPHGVVFLNVTYVPAQEKNFTTAPAICNDGKAHFPREGVFVSNGTNWFVTQRNFYEPQIITTDNTFVSGNCDVVIGIVNNTVYDPLQPELDSFKEELDKYFKNHTSPDVDLGDISGINASVVNIQKEIDRLNEVAKNLNESLIDLQELGKYEQYIKGGGGSDIDPYKEFGSSYQLLNFLPLDFFPDLNALVDTATALYEEELTGREHCSPHHTAIRQALVCWDELTKLIAWMSSNITSEQVRTIIVNHVNDTWGLKVRQSLWFHLSCLTFGQHTVQEFLVSFGVWIRTPAPYRPPNAPILSTLPEHTVIC

SEQ ID NO: 6931 - protein, 1365 aa, Artificial Sequence
  SARS-CoV-2/England/20102000506/2020__EPI_ISL_415147 spike protein (1-1211)(K986P_V987P_ H1048Q_H1064N_ H1083N_H1101N) WhcAg construct
MFVFLVLLPLVSSQCVNLTTRTQLPPAYTNSFTRGVYYPDKVFRSSVLHSTQDLFLPFFSNVTWFHAIHVSGTNGTKRFDNPVLPFNDGVYFASTEKSNIIRGWIFGTTLDSKTQSLLIVNNATNVVIKVCEFQFCNDPFLGVYYHKNNKSWMESEFRVYSSANNCTFEYVSQPFLMDLEGKQGNFKNLREFVFKNIDGYFKIYSKHTPINLVRDLPQGFSALEPLVDLPIGINITRFQTLLALHRSYLTPGDSSSGWTAGAAAYYVGYLQPRTFLLKYNENGTITDAVDCALDPLSETKCTLKSFTVEKGIYQTSNFRVQPTESIVRFPNITNLCPFGEVFNATRFASVYAWNRKRISNCVADYSVLYNSASFSTFKCYGVSPTKLNDLCFTNVYADSFVIRGDEVRQIAPGQTGKIADYNYKLPDDFTGCVIAWNSNNLDSKVGGNYNYLYRLFRKSNLKPFERDISTEIYQAGSTPCNGVEGFNCYFPLQSYGFQPTNGVGYQPYRVVVLSFELLHAPATVCGPKKSTNLVKNKCVNFNFNGLTGTGVLTESNKKFLPFQQFGRDIADTTDAVRDPQTLEILDITPCSFGGVSVITPGTNTSNQVAVLYQGVNCTEVPVAIHADQLTPTWRVYSTGSNVFQTRAGCLIGAEHVNNSYECDIPIGAGICASYQTQTNSPRRARSVASQSIIAYTMSLGAENSVAYSNNSIAIPTNFTISVTTEILPVSMTKTSVDCTMYICGDSTECSNLLLQYGSFCTQLNRALTGIAVEQDKNTQEVFAQVKQIYKTPPIKDFGGFNFSQILPDPSKPSKRSFIEDLLFNKVTLADAGFIKQYGYCLGDIAARDLICAQKFNGLTVLPPLLTDEMIAQYTSALLAGTITSGWTFGAGAALQIPFAMQMAYRFNGIGVTQNVLYENQKLIANQFNSAIGKIQDSLSSTASALGKLQDVVNQNAQALNTLVKQLSSNFGAISSVLNDILSRLDPPEAEVQIDRLITGRLQSLQTYVTQQLIRAAEIRASANLAATKMSECVLGQSKRVDFCGKGYQLMSFPQSAPHGVVFLNVTYVPAQEKNFTTAPAICNDGKAHFPREGVFVSNGTNWFVTQRNFYEPQIITTDNTFVSGNCDVVIGIVNNTVYDPLQPELDSFKEELDKYFKNHTSPDVDLGDISGINASVVNIQKEIDRLNEVAKNLNESLIDLQELGKYEQYIKGGGGSDIDPYKEFGSSYQLLNFLPLDFFPDLNALVDTATALYEEELTGREHCSPHHTAIRQALVCWDELTKLIAWMSSNITSEQVRTIIVNHVNDTWGLKVRQSLWFHLSCLTFGQHTVQEFLVSFGVWIRTPAPYRPPNAPILSTLPEHTVIC

SEQ ID NO: 6932 - protein, 1365 aa, Artificial Sequence
  SARS-CoV-2/Belgium/VAG-03013/2020__EPI_ISL_415155 spike protein (1-1211)(K986P_V987P_ H1048Q_H1064N_ H1083N_H1101N) WhcAg construct
MFVFLVLLPLVSSQCVNLTTRTQLPPAYTNSFTRGVYYPDKVFRSSVLHSTQDLFLPFFSNVTWFHAIHVSGTNGTKRFDNPVLPFNDGVYFASTEKSNIIRGWIFGTTLDSKTQSLLIVNNATNVVIKVCEFQFCNDPFLGVYYHKNNKSWMESEFRVYSSANNCTFEYVSQPFLMDLEGKQGNFKNLREFVFKNIDGYFKIYSKHTPINLVRDLPQGFSALEPLVDLPIGINITRFQTLLALHRSYLTPGDSSSGWTAGAAAYYVGYLQPRTFLLKYNENGTITDAVDCALDPLSETKCTLKSFTVEKGIYQTSNFRVQPTESIVRFPNITNLCPFGEVFNATRFASVYAWNRKRISNCVADYSVLYNSASFSTFKCYGVSPTKLNDLCFTNVYADSFVIRGDEVRQIAPGQTGKIADYNYKLPDDFTGCVIAWNSNNLDSKVGGNYNYLYRLFRKSNLKPFERDISTEIYQAGSTPCNGVEGFNCYFPLQSYGFQPTNGVGYQPYRVVVLSFELLHAPATVCGPKKSTNLVKNKCVNFNFNGLTGTGVLTESNKKFLPFQQFGRDIADTTDAVRDPQTLEILDITPCSFGGVSVITPGTNTSNQVAVLYQGVNCTEVPVAIHADQLTPTWRVYSTGSNVFQTRAGCLIGAEHVNNSYECDIPIGAGICASYQTQTNSPRRARSVASQSIIAYTMSLGAENSVAYSNNSIAIPTNFTISVTTEILPVSMTKTSVDCTMYICGDSTECSNLLLQYGSFCTQLNRALTGIAVEQDKNTQEVFAQVKQIYKTPPIKDFGGFNFSQILPDPSKPSKRSFIEDLLFNKVTLADAGFIKQYGDCLGDIAARDLICAQKFNGLTVLPPLLTDEMIAQYTSALLAGTITSGWTFGAGAALQIPFAMQMAYRFNGIGVTQNVLYENQKLIANQFNSAIGKIQDSLSSTATALGKLQDVVNQNAQALNTLVKQLSSNFGAISSVLNDILSRLDPPEAEVQIDRLITGRLQSLQTYVTQQLIRAAEIRASANLAATKMSECVLGQSKRVDFCGKGYQLMSFPQSAPHGVVFLNVTYVPAQEKNFTTAPAICNDGKAHFPREGVFVSNGTNWFVTQRNFYEPQIITTDNTFVSGNCDVVIGIVNNTVYDPLQPELDSFKEELDKYFKNHTSPDVDLGDISGINASVVNIQKEIDRLNEVAKNLNESLIDLQELGKYEQYIKGGGGSDIDPYKEFGSSYQLLNFLPLDFFPDLNALVDTATALYEEELTGREHCSPHHTAIRQALVCWDELTKLIAWMSSNITSEQVRTIIVNHVNDTWGLKVRQSLWFHLSCLTFGQHTVQEFLVSFGVWIRTPAPYRPPNAPILSTLPEHTVIC

SEQ ID NO: 6933 - protein, 1365 aa, Artificial Sequence
  SARS-CoV-2/Belgium/BC-03016/2020__EPI_ISL_415157 spike protein (1-1211)(K986P_V987P_ H1048Q_H1064N_ H1083N_H1101N) WhcAg construct
MFVFLVLLPLVSSQCVNLTTRTQLPPAYTNSFTRGVYYPDKVFRSSVLHSTQDLFLPFFSNVTWFHAIHVSGTNGTKRFDNPVLPFNDGVYFASTEKSNIIRGWIFGTTLDSKTQSLLIVNNATNVVIKVCEFQFCNDPFLGVYYHKNNKSWMESEFRVYSSANNCTFEYVSQPFLMDLEGKQGNFKNLREFVFKNIDGYFKIYSKHTPINLVRDLPQGFSALEPLVDLPIGINITRFQTLLALHRSYLTPGDSSSGWTAGAAAYYVGYLQPRTFLLKYNENGTITDAVDCALDPLSETKCTLKSFTVEKGIYQTSNFRVQPTESIVRFPNITNLCPFGEVFNATRFASVYAWNRKRISNCVADYSVLYNSASFSTFKCYGVSPTKLNDLCFTNVYADSFVIRGDEVRQIAPGQTGKIADYNYKLPDDFTGCVIAWNSNNLDSKVGGNYNYLYRLFRKSNLKPFERDISTEIYQAGSTPCNGVEGFNCYFPLQSYGFQPTNGVGYQPYRVVVLSFELLHAPATVCGPKKSTNLVKNKCVNFNFNGLTGTGVLTESNKKFLPFQQFGRDIADTTDAVRDPQTLEILDITPCSFGGVSVITPGTNTSNQVAVLYQGVNCTEVPVAIHADQLTPTWRVYSTGSNVFQTRAGCLIGAEHVNNSYECDIPIGAGICASYQTQTNSPRRARSVASQSIIAYTMSLGAENSVAYSNNSIAIPTNFTISVTTEILPVSMTKTSVDCTMYICGDSTECSNLLLQYGSFCTQLNRALTGIAVEQDKNTQEVFAQVKQIYKTPPIKDFGGFNFSQILPDPSKPSKRSFIEDLLFNKVTLADAGFIKQYGDCLGDIAARDLICAQKFNGLTVLPPLLTDEMIAQYTSALLAGTITSGWTFGAGAALQIPFAMQMAYRFNGIGVTQNVLYENQKLIANQFNSAIGKIQDSLSSTAPALGKLQDVVNQNAQALNTLVKQLSSNFGAISSVLNDILSRLDPPEAEVQIDRLITGRLQSLQTYVTQQLIRAAEIRASANLAATKMSECVLGQSKRVDFCGKGYQLMSFPQSAPHGVVFLNVTYVPAQEKNFTTAPAICNDGKAHFPREGVFVSNGTNWFVTQRNFYEPQIITTDNTFVSGNCDVVIGIVNNTVYDPLQPELDSFKEELDKYFKNHTSPDVDLGDISGINASVVNIQKEIDRLNEVAKNLNESLIDLQELGKYEQYIKGGGGSDIDPYKEFGSSYQLLNFLPLDFFPDLNALVDTATALYEEELTGREHCSPHHTAIRQALVCWDELTKLIAWMSSNITSEQVRTIIVNHVNDTWGLKVRQSLWFHLSCLTFGQHTVQEFLVSFGVWIRTPAPYRPPNAPILSTLPEHTVIC

SEQ ID NO: 6934 - protein, 1365 aa, Artificial Sequence
  SARS-CoV-2/Germany/BavPat3/2020__EPI_ISL_414521 spike protein (1-1211)(K986P_V987P_ H1048Q_H1064N_ H1083N_H1101N) WhcAg construct
MFVFLVLLPLVSSQCVNLTTRTQLPPAYTNSFTRGVYYPDKVFRSSVLHSTQDLFLPFFSNVTWFHAIHVSGTNGTKRFDNPVLPFNDGVYFASTEKSNIIRGWIFGTTLDSKTQSLLIVNNATNVVIKVCEFQFCNDPFLGVYYHKNNKSWMESEFRVYSSANNCTFEYVSQPFLMDLEGKQGNFKNLREFVFKNIDGYFKIYSKHTPINLVRDLPQGFSALEPLVDLPIGINITRFQTLLALHRSYLTPGDSSSGWTAGAAAYYVGYLQPRTFLLKYNENGTITDAVDCALDPLSETKCTLKSFTVEKGIYQTSNFRVQPTESIVRFPNITNLCPFGEVFNATRFASVYAWNRKRISNCVADYSVLYNSASFSTFKCYGVSPTKLNDLCFTNVYADSFVIRGDEVRQIAPGQTGKIADYNYKLPDDFTGCVIAWNSNNLDSKVGGNYNYLYRLFRKSNLKPFERDISTEIYQAGSTPCNGVEGFNCYFPLQSYGFQPTNGVGYQPYRVVVLSFELLHAPATVCGPKKSTNLVKNKCVNFNFNGLTGTGVLTESNKKFLPFQQFGRDIADTTDAVRDPQTLEILDITPCSFGGVSVITPGTNTSNQVAVLYQDVNCTEVPVAIHADQLTPTWRVYSTGSNVFQTRAGCLIGAEHVNNSYECDIPIGAGICASYQTQTNSPRRARSVASQSIIAYTMSLGAENSVAYSNNSIAIPTNFTISVTTEILPVSMTKTSVDCTMYICGDSTECSNLLLQYGSFCTQLNRALTGIAVEQDKNTQQVFAQVKQIYKTPPIKDFGGFNFSQILPDPSKPSKRSFIEDLLFNKVTLADAGFIKQYGDCLGDIAARDLICAQKFNGLTVLPPLLTDEMIAQYTSALLAGTITSGWTFGAGAALQIPFAMQMAYRFNGIGVTQNVLYENQKLIANQFNSAIGKIQDSLSSTASALGKLQDVVNQNAQALNTLVKQLSSNFGAISSVLNDILSRLDPPEAEVQIDRLITGRLQSLQTYVTQQLIRAAEIRASANLAATKMSECVLGQSKRVDFCGKGYQLMSFPQSAPHGVVFLNVTYVPAQEKNFTTAPAICNDGKAHFPREGVFVSNGTNWFVTQRNFYEPQIITTDNTFVSGNCDVVIGIVNNTVYDPLQPELDSFKEELDKYFKNHTSPDVDLGDISGINASVVNIQKEIDRLNEVAKNLNESLIDLQELGKYEQYIKGGGGSDIDPYKEFGSSYQLLNFLPLDFFPDLNALVDTATALYEEELTGREHCSPHHTAIRQALVCWDELTKLIAWMSSNITSEQVRTIIVNHVNDTWGLKVRQSLWFHLSCLTFGQHTVQEFLVSFGVWIRTPAPYRPPNAPILSTLPEHTVIC

SEQ ID NO: 6935 - protein, 1365 aa, Artificial Sequence
  SARS-CoV-2/France/HF1805/2020__EPI_ISL_414628 spike protein (1-1211)(K986P_V987P_ H1048Q_H1064N_ H1083N_H1101N) WhcAg construct
MFVFLVLLPLVSSQCVNLTTRTQLPPAYTNSFTRGVYYPDKVFRSSVLHSTQDLFLPFFSNVTWFHAIHVSGTNGTKRFDNPVLPFNDGVYFASTEKSNIIRGWIFGTTLDSKTQSLLIVNNATNVVIKVCEFQFCNDPFLGVYYHKNNKSWMESEFRVYSSANNCTFEYVSQPFLMDLEGKQGNFKNLREFVFKNIDGYFKIYSKHTPINLVRDLPQGFSALEPLVDLPIGINITRFQTLLALHRSYLTPGDSSSGWTAGAAAYYVGYLQPRTFLLKYNENGTITDAVDCALDPLSETKCTLKSFTVEKGIYQTSNFRVQPTESIVRFPNITNLCPFGEVFNATRFASVYAWNRKRISNCVADYSVLYNSASFSTFKCYGVSPTKLNDLCFTNVYADSFVIRGDEVRQIAPGQTGKIADYNYKLPDDFTGCVIAWNSNNLDSKVGGNYNYLYRLFRKSNLKPFERDISTEIYQAGSTPCNGVEGFNCYFPLQSYGFQPTNGVGYQPYRVVVLSFELLHAPATVCGPKKSTNLVKNKCVNFNFNGLTGTGVLTESNKKFLPFQQFGRDIADTTDAVRDPQTLEILDITPCSFGGVSVITPGTNTSNQVAVLYQGVNCTEVPVAIHADQLTPTWRVYSTGSNVFQTRAGCLIGAEHVNNSYECDIPIGAGICASYQTQTNSPRRARSVASQSIIAYTMSLGAENSVAYSNNSIAIPTNFTISVTTEILPVSMTKTSVDCTMYICGDSTECSNLLLQYGSFCTQLNRALTGIAVEQDKNTQEVFAQVKQIYKTPPIKDFGGFNFSQILPDPSKPSKRSFIEDLLFNKVTLADAGFIKQYGDCLGDIAARDLICAQKFNGLTVLPPLLTDEMIAQYTSALLAGTITSGWTFGAGAALQIPFAMQMAYRFNGIGVTQNVLYENQKLIANQFNSAIGKIQDSLSSTASALGKLQDVVNQNAQALNTLVKQLSSNFGAISSVLNDILSRLDPPEAEVQIDRLITGRLQSLQTYVTQQLIRAAEIRASANLAATKMSECVLGQSKRVDFCGKGYQLMSFPQSAPHGVVFLNVTYVPAQEKNFTTAPAICNDGKAHFPREGVFVSNGTNWFVTQRNFYEPQIITTDNTFVSGNCDVVIGVVNNTVYDPLQPELDSFKEELDKYFKNHTSPDVDLGDISGINASVVNIQKEIDRLNEVAKNLNESLIDLQELGKYEQYIKGGGGSDIDPYKEFGSSYQLLNFLPLDFFPDLNALVDTATALYEEELTGREHCSPHHTAIRQALVCWDELTKLIAWMSSNITSEQVRTIIVNHVNDTWGLKVRQSLWFHLSCLTFGQHTVQEFLVSFGVWIRTPAPYRPPNAPILSTLPEHTVIC

SEQ ID NO: 6936 - protein, 1365 aa, Artificial Sequence
  SARS-CoV-2/Netherlands/ZuidHolland_9/2020__EPI_ISL_414445 spike protein (1-1211)(K986P_V987P_ H1048Q_H1064N_ H1083N_H1101N) WhcAg construct
MFVFLVLLPLVSSQCVNLTTRTQLPPAYTNSFTRGVYYPDKVFRSSVLHSTQDLFLPFFSNVTWFHAIHVSGTNGTKRFDNPVLPFNDGVYFASTEKSNIIRGWIFGTTLDSKTQSLLIVNNATNVVIKVCEFQFCNDPFLGVYYHKNNKSWMESEFRVYSSANNCTFEYVSQPFLMDLEGKQGNFKNLREFVFKNIDGYFKIYSKHTPINLVRDLPQGFSALEPLVDLPIGINITRFQTLLALHRSYLTPGDSSSGWTAGAAAYYVGYLQPRTFLLKYNENGTITDAVDCALDPLSETKCTLKSFTVEKGIYQTSNFRVQPTESIVRFPNITNLCPFGEVFNATRFASVYAWNRKRISNCVADYSVLYNSASFSTFKCYGVSPTKLNDLCFTNVYADSFVIRGDEVRQIAPGQTGKIADYNYKLPDDFTGCVIAWNSNNLDSKVGGNYNYLYRLFRKSNLKPFERDISTEIYQAGSTPCNGVEGFNCYFPLQSYGFQPTNGVGYQPYRVVVLSFELLHAPATVCGPKKSTNLVKNKCVNFNFNGLTGTGVLTESNKKFLPFQQFGRDIADTTDAVRDPQTLEILDITPCSFGGVSVITPGTNTSNQVAVLYQGVNCTEVPVAIHADQLTPTWRVYSTGSNVFQTRAGCLIGAEHVNNSYECDIPIGAGICASYQTQTNSPRRARSVASQSIIAYTMSLGAENSVAYSNNSIAIPTNFTISVTTEILPVSMTKTSVDCTMYICGDSTECSNLLLQYGSFCTQLNRALTGIAVEQDKNTQEVFAQVKQIYKTPPIKDFGGFNFSQILPDPSKPSKRSFIEDLLFNKVTLADAGFIKQYGDCLGDIAARDLICVQKFNGLTVLPPLLTDEMIAQYTSALLAGTITSGWTFGAGAALQIPFAMQMAYRFNGIGVTQNVLYENQKLIANQFNSAIGKIQDSLSSTASALGKLQDVVNQNAQALNTLVKQLSSNFGAISSVLNDILSRLDPPEAEVQIDRLITGRLQSLQTYVTQQLIRAAEIRASANLAATKMSECVLGQSKRVDFCGKGYQLMSFPQSAPHGVVFLNVTYVPAQEKNFTTAPAICNDGKAHFPREGVFVSNGTNWFVTQRNFYEPQIITTDNTFVSGNCDVVIGIVNNTVYDPLQPELDSFKEELDKYFKNHTSPDVDLGDISGINASVVNIQKEIDRLNEVAKNLNESLIDLQELGKYEQYIKGGGGSDIDPYKEFGSSYQLLNFLPLDFFPDLNALVDTATALYEEELTGREHCSPHHTAIRQALVCWDELTKLIAWMSSNITSEQVRTIIVNHVNDTWGLKVRQSLWFHLSCLTFGQHTVQEFLVSFGVWIRTPAPYRPPNAPILSTLPEHTVIC

SEQ ID NO: 6937 - protein, 1365 aa, Artificial Sequence
  SARS-CoV-2/Finland/FIN03032020A/2020__EPI_ISL_413602 spike protein (1-1211)(K986P_V987P_ H1048Q_H1064N_ H1083N_H1101N) WhcAg construct
MFVFLVLLPLVSSQCVNLTTRTQLPPAYTNSFTRGVYYPDKVFRSSVLHSTQDLFLPFFSNVTWFHAIHVSGTNGTKRFDNPVLPFNDGVYFASTEKSNIIRGWIFGTTLDSKTQSLLIVNNATNVVIKVCEFQFCNDPFLGVYYHKNNKSWMESEFRVYSSANNCTFEYVSQPFLMDLEGKQGNFKNLREFVFKNIDGYFKIYSKHTPINLVRDLPQGFSALEPLVDLPIGINITRFQTLLALHRSYLTPGDSSSGWTAGAAAYYVGYLQPRTFLLKYNENGTITDAVDCALDPLSETKCTLKSFTVEKGIYQTSNFRVQPTESIVRFPNITNLCPFGEVFNATRFASVYAWNRKRISNCVADYSVLYNSASFSTFKCYGVSPTKLNDLCFTNVYADSFVIRGDEVRQIAPGQTGKIADYNYKLPDDFTGCVISWNSNNLDSKVGGNYNYLYRLFRKSNLKPFERDISTEIYQAGSTPCNGVEGFNCYFPLQSYGFQPTNGVGYQPYRVVVLSFELLHAPATVCGPKKSTNLVKNKCVNFNFNGLTGTGVLTESNKKFLPFQQFGRDIADTTDAVRDPQTLEILDITPCSFGGVSVITPGTNTSNQVAVLYQGVNCTEVPVAIHADQLTPTWRVYSTGSNVFQTRAGCLIGAEHVNNSYECDIPIGAGICASYQTQTNSPRRARSVASQSIIAYTMSLGAENSVAYSNNSIAIPTNFTISVTTEILPVSMTKTSVDCTMYICGDSTECSNLLLQYGSFCTQLNRALTGIAVEQDKNTQEVFAQVKQIYKTPPIKDFGGFNFSQILPDPSKPSKRSFIEDLLFNKVTLADAGFIKQYGDCLGDIAARDLICAQKFNGLTVLPPLLTDEMIAQYTSALLAGTITSGWTFGAGAALQIPFAMQMAYRFNGIGVTQNVLYENQKLIANQFNSAIGKIQDSLSSTASALGKLQDVVNQNAQALNTLVKQLSSNFGAISSVLNDILSRLDPPEAEVQIDRLITGRLQSLQTYVTQQLIRAAEIRASANLAATKMSECVLGQSKRVDFCGKGYQLMSFPQSAPHGVVFLNVTYVPAQEKNFTTAPAICNDGKAHFPREGVFVSNGTNWFVTQRNFYEPQIITTDNTFVSGNCDVVIGIVNNTVYDPLQPELDSFKEELDKYFKNHTSPDVDLGDISGINASVVNIQKEIDRLNEVAKNLNESLIDLQELGKYEQYIKGGGGSDIDPYKEFGSSYQLLNFLPLDFFPDLNALVDTATALYEEELTGREHCSPHHTAIRQALVCWDELTKLIAWMSSNITSEQVRTIIVNHVNDTWGLKVRQSLWFHLSCLTFGQHTVQEFLVSFGVWIRTPAPYRPPNAPILSTLPEHTVIC

SEQ ID NO: 6938 - protein, 1365 aa, Artificial Sequence
  SARS-CoV-2/France/GE1977/2020__EPI_ISL_414632 spike protein (1-1211)(K986P_V987P_ H1048Q_H1064N_ H1083N_H1101N) WhcAg construct
MFVFLVLLPLVSSQCVNLTTRTQLPPAYTNSFTRGVYYPDKVFRSSVLHSTQDLFLPFFSNVTWFHAIHVSGTNGTKRFDNPVLPFNDGVYFASTEKSNIIRGWIFGTTLDSKTQSLLIVNNATNVVIKVCEFQFCNDPFLGVYYHKNNKSWMESEFRVYSSANNCTFEYVSQPFLMDLEGKQGNFKNLREFVFKNIDGYFKIYSKHTPINLVRDLPQGFSALEPLVDLPIGINITRFQTLLALHRSYLTPGDSSSGWTAGAAAYYVGYLQPRTFLLKYNENGTITDAVDCALDPLSETKCTLKSFTVEKGIYQTSNFRVQPTESIVRFPNITNLCPFGEVFNATRFASVYAWNRKRISNCVADYSVLYNSASFSTFKCYGVSPTKLNDLCFTNVYADSFVIRGDEVRQIAPGQTGKIADYNYKLPDDFTGCVIAWNSNNLDSKVGGNYNYLYRLFRKSNLKPFERDISTEIYQAGSTPCNGVEGFNCYFPLQSYGFQPTNGVGYQPYRVVVLSFELLHAPATVCGPKKSTNLVKNKCVNFNFNGLTGTGVLTESNKKFLPFQQFGRDIADTTDAVRDPQTLEILDITPCSFGGVSVITPGTNTSNQVAVLYQGVNCTEVPVAIHADQLTPTWRVYSTGSNVFQTRAGCLIGAEHVNNSYECDIPIGAGICASYQTQTNSPRRARSVASQSIIAYTMSLGAENSVAYSNNSIAIPTNFTISVTTEILPVSMTKTSVDCTMYICGDSTECSNLLLQYGSFCTQLNRALTGIAVEQDKNTQEVFAQVKQIYKTPPIKDFGGFNFSQILPDPSKPSKRSFIEDLLFNKVTLADAGFIKQYGDCLGDIAARDLICAQKFNGLTVLPPLLTDEMIAQYTSALLAGTITSGWTFGAGAALQIPFAMQMAYRFNGIGVTQNVLYENQKLIANQFNSAIGKIQDSLFSTASALGKLQDVVNQNAQALNTLVKQLSSNFGAISSVLNDILSRLDPPEAEVQIDRLITGRLQSLQTYVTQQLIRAAEIRASANLAATKMSECVLGQSKRVDFCGKGYQLMSFPQSAPHGVVFLNVTYVPAQEKNFTTAPAICNDGKAHFPREGVFVSNGTNWFVTQRNFYEPQIITTDNTFVSGNCDVVIGIVNNTVYDPLQPELDSFKEELDKYFKNHTSPDVDLGDISGINASVVNIQKEIDRLNEVAKNLNESLIDLQELGKYEQYIKGGGGSDIDPYKEFGSSYQLLNFLPLDFFPDLNALVDTATALYEEELTGREHCSPHHTAIRQALVCWDELTKLIAWMSSNITSEQVRTIIVNHVNDTWGLKVRQSLWFHLSCLTFGQHTVQEFLVSFGVWIRTPAPYRPPNAPILSTLPEHTVIC

SEQ ID NO: 6939 - protein, 1365 aa, Artificial Sequence
  SARS-CoV-2/Finland/FIN-313/2020__EPI_ISL_414641 spike protein (1-1211)(K986P_V987P_ H1048Q_H1064N_ H1083N_H1101N) WhcAg construct
MFVFLVLLPLVSSQCVNLTTRTQLPPAYTNSFTRGVYYPDKVFRSSVLHSTQDLFLPFFSNVTWFHAIHVSGTNGTKRFDNPVLPFNDGVYFASTEKSNIIRGWIFGTTLDSKTQSLLIVNNATNVVIKVCEFQFCNDPFLGVYYHKNNKSWMESEFRVYSSANNCTFEYVSQPFLMDLEGKQGNFKNLREFVFKNIDGYFKIYSKHTPINLVRDLPQGFSALEPLVDLPIGINITRFKTLLALHRSYLTPGDSSSGWTAGAAAYYVGYLQPRTFLLKYNENGTITDAVDCALDPLSETKCTLKSFTVEKGIYQTSNFRVQPTESIVRFPNITNLCPFGEVFNATRFASVYAWNRKRISNCVADYSVLYNSASFSTFKCYGVSPTKLNDLCFTNVYADSFVIRGDEVRQIAPGQTGKIADYNYKLPDDFTGCVIAWNSNNLDSKVGGNYNYLYRLFRKSNLKPFERDISTEIYQAGSTPCNGVEGFNCYFPLQSYGFQPTNGVGYQPYRVVVLSFELLHAPATVCGPKKSTNLVKNKCVNFNFNGLTGTGVLTESNKKFLPFQQFGRDIADTTDAVRDPQTLEILDITPCSFGGVSVITPGTNTSNQVAVLYQGVNCTEVPVAIHADQLTPTWRVYSTGSNVFQTRAGCLIGAEHVNNSYECDIPIGAGICASYQTQTNSPRRARSVASQSIIAYTMSLGAENSVAYSNNSIAIPTNFTISVTTEILPVSMTKTSVDCTMYICGDSTECSNLLLQYGSFCTQLNRALTGIAVEQDKNTQEVFAQVKQIYKTPPIKDFGGFNFSQILPDPSKPSKRSFIEDLLFNKVTLADAGFIKQYGDCLGDIAARDLICAQKFNGLTVLPPLLTDEMIAQYTSALLAGTITSGWTFGAGAALQIPFAMQMAYRFNGIGVTQNVLYENQKLIANQFNSAIGKIQDSLSSTASALGKLQDVVNQNAQALNTLVKQLSSNFGAISSVLNDILSRLDPPEAEVQIDRLITGRLQSLQTYVTQQLIRAAEIRASANLAATKMSECVLGQSKRVDFCGKGYQLMSFPQSAPHGVVFLNVTYVPAQEKNFTTAPAICNDGKAHFPREGVFVSNGTNWFVTQRNFYEPQIITTDNTFVSGNCDVVIGIVNNTVYDPLQPELDSFKEELDKYFKNHTSPDVDLGDISGINASVVNIQKEIDRLNEVAKNLNESLIDLQELGKYEQYIKGGGGSDIDPYKEFGSSYQLLNFLPLDFFPDLNALVDTATALYEEELTGREHCSPHHTAIRQALVCWDELTKLIAWMSSNITSEQVRTIIVNHVNDTWGLKVRQSLWFHLSCLTFGQHTVQEFLVSFGVWIRTPAPYRPPNAPILSTLPEHTVIC

SEQ ID NO: 6940 - protein, 1365 aa, Artificial Sequence
  SARS-CoV-2/Netherlands/ZuidHolland_2/2020__EPI_ISL_414556 spike protein (1-1211)(K986P_V987P_ H1048Q_H1064N_ H1083N_H1101N) WhcAg construct
MFVFLVLLPLVSSQCVNLTTRTQLPPAYTNSFTRGVYYPDKVFRSSVLHSTQDLFLPFFSNVTWFHAIHVSGTNGTKRFDNPVLPFNDGVYFASTEKSNIIRGWIFGTTLDSKTQSLLIVNNATNVVIKVCEFQFCNDPFLGVYYHKNNKSWMESEFRVYSSANNCTFEYVSQPFLMDLEGKQGNFKNLREFVFKNIDGYFKIYSKHTPINLVRDLPQGFSALEPLVDLPIGINITRFQTLLALHRSYLTPGDSSSGWTAGAAAYYVGYLQPRTFLLKYNENGTITDAVDCALDPLSETKCTLKSFTVEKGIYQTSNFRVQPTESIVRFPNITNLCPFGEVFNATRFASVYAWNRKRISNCVADYSVLYNSASFSTFKCYGVSPTKLNDLCFTNVYADSFVIRGDEVRQIAPGQTGKIADYNYKLPDDFTGCVIAWNSNNLDSKVGGNYNYLYRLFRKSNLKPFERDISTEIYQAGSTPCNGVEGFNCYFPLQSYGFQPTNGVGYQPYRVVVLSFELLHAPATVCGPKKSTNLVKNKCVNFNFNGLTGTGVLTESNKKFLPFQQFGRDIADTTDAVRDPQTLEILDITPCSFGGVSVITPGTNTSNQVAVLYQGVNCTEVPVAIHADQLTPTWRVYSTGSNVFQTRAGCLIGAEHVNNSYECDIPIGAGICASYQTQTNSPRRARSVASQSIIAYTMSLGAENSVAYSNNSIAIPTNFTISVTTEILPVSMTKTSVDCTMYICGDSTECSNLLLQYGSFCTQLNRALTGIALEQDKNTQEVFAQVKQIYKTPPIKDFGGFNFSQILPDPSKPSKRSFIEDLLFNKVTLADAGFIKQYGDCLGDIAARDLICAQKFNGLTVLPPLLTDEMIAQYTSALLAGTITSGWTFGAGAALQIPFAMQMAYRFNGIGVTQNVLYENQKLIANQFNSAIGKIQDSLSSTASALGKLQDVVNQNAQALNTLVKQLSSNFGAISSVLNDILSRLDPPEAEVQIDRLITGRLQSLQTYVTQQLIRAAEIRASANLAATKMSECVLGQSKRVDFCGKGYQLMSFPQSAPHGVVFLNVTYVPAQEKNFTTAPAICNDGKAHFPREGVFVSNGTNWFVTQRNFYEPQIITTDNTFVSGNCDVVIGIVNNTVYDPLQPELDSFKEELDKYFKNHTSPDVDLGDISGINASVVNIQKEIDRLNEVAKNLNESLIDLQELGKYEQYIKGGGGSDIDPYKEFGSSYQLLNFLPLDFFPDLNALVDTATALYEEELTGREHCSPHHTAIRQALVCWDELTKLIAWMSSNITSEQVRTIIVNHVNDTWGLKVRQSLWFHLSCLTFGQHTVQEFLVSFGVWIRTPAPYRPPNAPILSTLPEHTVIC

SEQ ID NO: 6941 - protein, 1365 aa, Artificial Sequence
  SARS-CoV-2/USA/WA-UW31/2020__EPI_ISL_414618 spike protein (1-1211)(K986P_V987P_ H1048Q_H1064N_ H1083N_H1101N) WhcAg construct
MFVFLVLLPLVSSQCVNLTTRTQLPPAYTNSFTRGVYYPDKVFRSSVLHSTQDLFLPFFSNVTWFHAIHVSGTNGTKRFDNPVLPFNDGVYFASTEKSNIIRGWIFGTTLDSKTQSLLIVNNATNVVIKVCEFQFCNDPFLGVYYHKNNKSWMESEFRVYSSANNCTFEYVSQPFLMDLEGKQGNFKNLREFVFKNIDGYFKIYSKHTPINLVRDLPQGFSALEPLVDLPIGINITRFQTLLALHRSYLTPGDSSSGWTAGAAAYYVGYLQPRTFLLKYNENGTITDAVDCALDPLSETKCTLKSFTVEKGIYQTSNFRVQPTESIVRFPNITNLCPFGEVFNATRFASVYAWNRKRISNCVADYSVLYNSASFSTFKCYGVSPTKLNDLCFTNVYADSFVIRGDEVRQIAPGQTGKIADYNYKLPDDFTGCVIAWNSNNLDSKVGGNYNYLYRLFRKSNLKPFERDISTEIYQAGSTPCNGAEGFNCYFPLQSYGFQPTNGVGYQPYRVVVLSFELLHAPATVCGPKKSTNLVKNKCVNFNFNGLTGTGVLTESNKKFLPFQQFGRDIADTTDAVRDPQTLEILDITPCSFGGVSVITPGTNTSNQVAVLYQDVNCTEVPVAIHADQLTPTWRVYSTGSNVFQTRAGCLIGAEHVNNSYECDIPIGAGICASYQTQTNSPRRARSVASQSIIAYTMSLGAENSVAYSNNSIAIPTNFTISVTTEILPVSMTKTSVDCTMYICGDSTECSNLLLQYGSFCTQLNRALTGIAVEQDKNTQEVFAQVKQIYKTPPIKDFGGFNFSQILPDPSKPSKRSFIEDLLFNKVTLADAGFIKQYGDCLGDIAARDLICAQKFNGLTVLPPLLTDEMIAQYTSALLAGTITSGWTFGAGAALQIPFAMQMAYRFNGIGVTQNVLYENQKLIANQFNSAIGKIQDSLSSTASALGKLQDVVNQNAQALNTLVKQLSSNFGAISSVLNDILSRLDPPEAEVQIDRLITGRLQSLQTYVTQQLIRAAEIRASANLAATKMSECVLGQSKRVDFCGKGYQLMSFPQSAPHGVVFLNVTYVPAQEKNFTTAPAICNDGKAHFPREGVFVSNGTNWFVTQRNFYEPQIITTDNTFVSGNCDVVIGIVNNTVYDPLQPELDSFKEELDKYFKNHTSPDVDLGDISGINASVVNIQKEIDRLNEVAKNLNESLIDLQELGKYEQYIKGGGGSDIDPYKEFGSSYQLLNFLPLDFFPDLNALVDTATALYEEELTGREHCSPHHTAIRQALVCWDELTKLIAWMSSNITSEQVRTIIVNHVNDTWGLKVRQSLWFHLSCLTFGQHTVQEFLVSFGVWIRTPAPYRPPNAPILSTLPEHTVIC

SEQ ID NO: 6942 - protein, 1365 aa, Artificial Sequence
  SARS-CoV-2/South Korea/SNU01/2020__EPI_ISL_411929 spike protein (1-1211)(K986P_V987P_ H1048Q_H1064N_ H1083N_H1101N) WhcAg construct
MFVFLVLLPLVSSQCVNLTTRTQLPPAYTNSFTRGVYYPDKVFRSSVLHSTQDLFLPFFSNVTWFHAIHVSGTNGTKRFDNPVLPFNDGVYFASTEKSNIIRGWIFGTTLDSKTQSLLIVNNATNVVIKVCEFQFCNDPFLGVYYHKNNKSWMESEFRVYSSANNCTFEYVSQPFLMDLEGKQGNFKNLREFVFKNIDGYFKIYSKHTPINLVRDLPQGFWALEPLVDLPIGINITRFQTLLALHRSYLTPGDSSSGWTAGAAAYYVGYLQPRTFLLKYNENGTITDAVDCALDPLSETKCTLKSFTVEKGIYQTSNFRVQPTESIVRFPNITNLCPFGEVFNATRFASVYAWNRKRISNCVADYSVLYNSASFSTFKCYGVSPTKLNDLCFTNVYADSFVIRGDEVRQIAPGQTGKIADYNYKLPDDFTGCVIAWNSNNLDSKVGGNYNYLYRLFRKSNLKPFERDISTEIYQAGSTPCNGVEGFNCYFPLQSYGFQPTNGVGYQPYRVVVLSFELLHAPATVCGPKKSTNLVKNKCVNFNFNGLTGTGVLTESNKKFLPFQQFGRDIADTTDAVRDPQTLEILDITPCSFGGVSVITPGTNTSNQVAVLYQDVNCTEVPVAIHADQLTPTWRVYSTGSNVFQTRAGCLIGAEHVNNSYECDIPIGAGICASYQTQTNSPRRARSVASQSIIAYTMSLGAENSVAYSNNSIAIPTNFTISVTTEILPVSMTKTSVDCTMYICGDSTECSNLLLQYGSFCTQLNRALTGIAVEQDKNTQEVFAQVKQIYKTPPIKDFGGFNFSQILPDPSKPSKRSFIEDLLFNKVTLADAGFIKQYGDCLGDIAARDLICAQKFNGLTVLPPLLTDEMIAQYTSALLAGTITSGWTFGAGAALQIPFAMQMAYRFNGIGVTQNVLYENQKLIANQFNSAIGKIQDSLSSTASALGKLQDVVNQNAQALNTLVKQLSSNFGAISSVLNDILSRLDPPEAEVQIDRLITGRLQSLQTYVTQQLIRAAEIRASANLAATKMSECVLGQSKRVDFCGKGYQLMSFPQSAPHGVVFLNVTYVPAQEKNFTTAPAICNDGKAHFPREGVFVSNGTNWFVTQRNFYEPQIITTDNTFVSGNCDVVIGIVNNTVYDPLQPELDSFKEELDKYFKNHTSPDVDLGDISGINASVVNIQKEIDRLNEVAKNLNESLIDLQELGKYEQYIKGGGGSDIDPYKEFGSSYQLLNFLPLDFFPDLNALVDTATALYEEELTGREHCSPHHTAIRQALVCWDELTKLIAWMSSNITSEQVRTIIVNHVNDTWGLKVRQSLWFHLSCLTFGQHTVQEFLVSFGVWIRTPAPYRPPNAPILSTLPEHTVIC

SEQ ID NO: 6943 - protein, 1365 aa, Artificial Sequence
  SARS-CoV-2/China/WF0004/2020__EPI_ISL_413694 spike protein (1-1211)(K986P_V987P_ H1048Q_H1064N_ H1083N_H1101N) WhcAg construct
MFVFLVLLPLVSSQCVNLTTRTQLPPAYTNSFTRGVYYPDKVFRSSVLHSTQDLFLPFFSNVTWFHAIHVSGTNGTKRFDNPVLPFNDGVYFASTEKSNIIRGWIFGTTLDSKTQSLLIVNNATNVVIKVCEFQFCNDPFLGVYYHKNNKSWTESEFRVYSSANNCTFEYVSQPFLMDLEGKQGNFKNLREFVFKNIDGYFKIYSKHTPINLVRDLPQGFSALEPLVDLPIGINITRFQTLLALHRSYLTPGDSSSGWTAGAAAYYVGYLQPRTFLLKYNENGTITDAVDCALDPLSETKCTLKSFTVEKGIYQTSNFRVQPTESIVRFPNITNLCPFGEVFNATRFASVYAWNRKRISNCVADYSVLYNSASFSTFKCYGVSPTKLNDLCFTNVYADSFVIRGDEVRQIAPGQTGKIADYNYKLPDDFTGCVIAWNSNNLDSKVGGNYNYLYRLFRKSNLKPFERDISTEIYQAGSTPCNGVEGFNCYFPLQSYGFQPTNGVGYQPYRVVVLSFELLHAPATVCGPKKSTNLVKNKCVNFNFNGLTGTGVLTESNKKFLPFQQFGRDIADTTDAVRDPQTLEILDITPCSFGGVSVITPGTNTSNQVAVLYQDVNCTEVPVAIHADQLTPTWRVYSTGSNVFQTRAGCLIGAEHVNNSYECDIPIGAGICASYQTQTNSPRRARSVASQSIIAYTMSLGAENSVAYSNNSIAIPTNFTISVTTEILPVSMTKTSVDCTMYICGDSTECSNLLLQYGSFCTQLNRALTGIAVEQDKNTQEVFAQVKQIYKTPPIKDFGGFNFSQILPDPSKPSKRSFIEDLLFNKVTLADAGFIKQYGDCLGDIAARDLICAQKFNGLTVLPPLLTDEMIAQYTSALLAGTITSGWTFGAGAALQIPFAMQMAYRFNGIGVTQNVLYENQKLIANQFNSAIGKIQDSLSSTASALGKLQDVVNQNAQALNTLVKQLSSNFGAISSVLNDILSRLDPPEAEVQIDRLITGRLQSLQTYVTQQLIRAAEIRASANLAATKMSECVLGQSKRFDFCGKGYQLMSFPQSAPHGVVFLNVTYVPAQEKNFTTAPAICNDGKAHFPREGVFVSNGTNWFVTQRNFYEPQIITTDNTFVSGNCDVVIGIVNNTVYDPLQPELDSFKEELDKYFKNHTSPDVDLGDISGINASVVNIQKEIDRLNEVAKNLNESLIDLQELGKYEQYIKGGGGSDIDPYKEFGSSYQLLNFLPLDFFPDLNALVDTATALYEEELTGREHCSPHHTAIRQALVCWDELTKLIAWMSSNITSEQVRTIIVNHVNDTWGLKVRQSLWFHLSCLTFGQHTVQEFLVSFGVWIRTPAPYRPPNAPILSTLPEHTVIC

SEQ ID NO: 6944 - protein, 1365 aa, Artificial Sequence
  SARS-CoV-2/China/WF0028/2020__EPI_ISL_413791 spike protein (1-1211)(K986P_V987P_ H1048Q_H1064N_ H1083N_H1101N) WhcAg construct
MFVFLVLLPLVSSQCVNLTTRTQLPPAYTNSFTRGVYYPDKVFRSSVLHSTQDLFLPFFSNVTWFHAIHVSGTNGTKRFDNPVLPFNDGVYFASTEKSNIIRGWIFGTTLDSKTQSLLIVNNATNVVIKVCEFQFCNDPFLGVYYHKNNKSWMESEFRVYSSANNCTFEYVSQPFLMDLEGKQGNFKNLREFVFKNIDGYFKIYSKHTPINLVRDLPQGFSALEPLVDLPIGINITRFQTLLALHRSYLTPGDSSSGWTAGAAAYYVGYLQPRTFLLKYNENGTITDAVDCALDPLSETKCTLKSFTVEKGIYQTSNFRVQPTESIVRFPNITNLCPFGEVFNATRFASVYAWNRKRISNCVADYSVLYNSASFSTFKCYGVSPTKLNDLCFTNVYADSFVIRGDEVRQIAPGQTGKIADYNYKLPDDFTGCVIAWNSNNLDSKVGGNYNYLYRLFRKSNLKPFERDISTEIYQAGSTPCNGVEGFNCYFPLQSYGFQPTNGVGYQPYRVVVLSFELLHAPATVCGPKKSTNLVKNKCVNFNFNGLTGTGVLTESNKKFLPFQQFGRDIADTTDAVRDPQTLEILDITPCSFGGVSVITPGTNTSNQVAVLYQDVNCTEVPVAIHADQLTPTWRVYSTGSNVFQTRAGCLIGAEHVNNSYECDIPIGAGICASYQTQTNSPRRARSVASQSIIAYTMSLGAENSVAYSNNSIAIPTNFTISVTTEILPVSMTKTSVDCTMYICGDSTECSNLLLQYGSFCTQLNRALTGIAVEQDKNTQEVFAQVKQIYKTPPIKDFGGFNFSQILPDPSKPSKRSFIEDLLFNKVTLADAGFIKQYGDCLGDIAARDLICAQKFNGLTVLPPLLTDEMIAQYTSALLAGTITSGWTFGAGAALQIPFAMQMAYRFNGIGVTQNVLYENQKLIANQFNSAIGKIQDSLSSTASALGKLQDVVNQNAQALNTLVKQLSSNFGAISSVLNDILSRLDPPEAEVQIDRLITGRLQSLQTYVTQQLIRAAEIRASANLAATKMSECVLGQSKRVDFCGKGYQLMSFPQSAPHGVVFLNVTYVPAQEKNFTTAPAICNDGKAHFPREGVFVSNGTNWFVTQRNFYEPQIITTDNTFVSGNCDVVIGIVNNTVYDPLQPELESFKEELDKYFKNHTSPDVDLGDISGINASVVNIQKEIDRLNEVAKNLNESLIDLQELGKYEQYIKGGGGSDIDPYKEFGSSYQLLNFLPLDFFPDLNALVDTATALYEEELTGREHCSPHHTAIRQALVCWDELTKLIAWMSSNITSEQVRTIIVNHVNDTWGLKVRQSLWFHLSCLTFGQHTVQEFLVSFGVWIRTPAPYRPPNAPILSTLPEHTVIC

SEQ ID NO: 6945 - protein, 1365 aa, Artificial Sequence
  SARS-CoV-2/2019-nCoV/USA-CruiseA-18/2020__MT159716.1 spike protein (1-1211)(K986P_V987P_ H1048Q_H1064N_ H1083N_H1101N) WhcAg construct
MFVFLVLLPLVSSQCVNLTTRTQLPPAYTNSFTRGVYYPDKVFRSSVLHSTQDLFLPFFSNVTWFHAIHVSGTNGTKRFDNPVLPFNDGVYFASTEKSNIIRGWIFGTTLDSKTQSLLIVNNATNVVIKVCEFQFCNDPFLGVYYHKNNKSWMESELRVYSSANNCTFEYVSQPFLMDLEGKQGNFKNLREFVFKNIDGYFKIYSKHTPINLVRDLPQGFSALEPLVDLPIGINITRFQTLLALHRSYLTPGDSSSGWTAGAAAYYVGYLQPRTFLLKYNENGTITDAVDCALDPLSETKCTLKSFTVEKGIYQTSNFRVQPTESIVRFPNITNLCPFGEVFNATRFASVYAWNRKRISNCVADYSVLYNSASFSTFKCYGVSPTKLNDLCFTNVYADSFVIRGDEVRQIAPGQTGKIADYNYKLPDDFTGCVIAWNSNNLDSKVGGNYNYLYRLFRKSNLKPFERDISTEIYQAGSTPCNGVEGFNCYFPLQSYGFQPTNGVGYQPYRVVVLSFELLHAPATVCGPKKSTNLVKNKCVNFNFNGLTGTGVLTESNKKFLPFQQFGRDIADTTDAVRDPQTLEILDITPCSFGGVSVITPGTNTSNQVAVLYQDVNCTEVPVAIHADQLTPTWRVYSTGSNVFQTRAGCLIGAEHVNNSYECDIPIGAGICASYQTQTNSPRRARSVASQSIIAYTMSLGAENSVAYSNNSIAIPTNFTISVTTEILPVSMTKTSVDCTMYICGDSTECSNLLLQYGSFCTQLNRALTGIAVEQDKNTQEVFAQVKQIYKTPPIKDFGGFNFSQILPDPSKPSKRSFIEDLLFNKVTLADAGFIKQYGDCLGDIAARDLICAQKFNGLTVLPPLLTDEMIAQYTSALLAGTITSGWTFGAGAALQIPFAMQMAYRFNGIGVTQNVLYENQKLIANQFNSAIGKIQDSLSSTASALGKLQDVVNQNAQALNTLVKQLSSNFGAISSVLNDILSRLDPPEAEVQIDRLITGRLQSLQTYVTQQLIRAAEIRASANLAATKMSECVLGQSKRVDFCGKGYQLMSFPQSAPHGVVFLNVTYVPAQEKNFTTAPAICNDGKAHFPREGVFVSNGTNWFVTQRNFYEPQIITTDNTFVSGNCDVVIGIVNNTVYDPLQPELDSFKEELDKYFKNHTSPDVDLGDISGINASVVNIQKEIDRLNEVAKNLNESLIDLQELGKYEQYIKGGGGSDIDPYKEFGSSYQLLNFLPLDFFPDLNALVDTATALYEEELTGREHCSPHHTAIRQALVCWDELTKLIAWMSSNITSEQVRTIIVNHVNDTWGLKVRQSLWFHLSCLTFGQHTVQEFLVSFGVWIRTPAPYRPPNAPILSTLPEHTVIC

SEQ ID NO: 6946 - protein, 1365 aa, Artificial Sequence
  SARS-CoV-2/SARS-CoV-2/Yunnan-01/human/2020/CHN__MT049951.1 spike protein (1-1211)(K986P_V987P_ H1048Q_H1064N_ H1083N_H1101N) WhcAg construct
MFVFLVLLPLVSSQCVNLTTRTQLPPANTNSFTRGVYYPDKVFRSSVLHSTQDLFLPFFSNVTWFHAIHVSGTNGTKRFDNPVLPFNDGVYFASTEKSNIIRGWIFGTTLDSKTQSLLIVNNATNVVIKVCEFQFCNDPFLGVYYHKNNKSWMESEFRVYSSANNCTFEYVSQPFLMDLEGKQGNFKNLREFVFKNIDGYFKIYSKHTPINLVRDLPQGFSALEPLVDLPIGINITRFQTLLALHRSYLTPGDSSSGWTAGAAAYYVGYLQPRTFLLKYNENGTITDAVDCALDPLSETKCTLKSFTVEKGIYQTSNFRVQPTESIVRFPNITNLCPFGEVFNATRFASVYAWNRKRISNCVADYSVLYNSASFSTFKCYGVSPTKLNDLCFTNVYADSFVIRGDEVRQIAPGQTGKIADYNYKLPDDFTGCVIAWNSNNLDSKVGGNYNYLYRLFRKSNLKPFERDISTEIYQAGSTPCNGVEGFNCYFPLQSYGFQPTNGVGYQPYRVVVLSFELLHAPATVCGPKKSTNLVKNKCVNFNFNGLTGTGVLTESNKKFLPFQQFGRDIADTTDAVRDPQTLEILDITPCSFGGVSVITPGTNTSNQVAVLYQDVNCTEVPVAIHADQLTPTWRVYSTGSNVFQTRAGCLIGAEHVNNSYECDIPIGAGICASYQTQTNSPRRARSVASQSIIAYTMSLGAENSVAYSNNSIAIPTNFTISVTTEILPVSMTKTSVDCTMYICGDSTECSNLLLQYGSFCTQLNRALTGIAVEQDKNTQEVFAQVKQIYKTPPIKDFGGFNFSQILPDPSKPSKRSFIEDLLFNKVTLADAGFIKQYGDCLGDIAARDLICAQKFNGLTVLPPLLTDEMIAQYTSALLAGTITSGWTFGAGAALQIPFAMQMAYRFNGIGVTQNVLYENQKLIANQFNSAIGKIQDSLSSTASALGKLQDVVNQNAQALNTLVKQLSSNFGAISSVLNDILSRLDPPEAEVQIDRLITGRLQSLQTYVTQQLIRAAEIRASANLAATKMSECVLGQSKRVDFCGKGYQLMSFPQSAPHGVVFLNVTYVPAQEKNFTTAPAICNDGKAHFPREGVFVSNGTNWFVTQRNFYEPQIITTDNTFVSGNCDVVIGIVNNTVYDPLQPELDSFKEELDKYFKNHTSPDVDLGDISGINASVVNIQKEIDRLNEVAKNLNESLIDLQELGKYEQYIKGGGGSDIDPYKEFGSSYQLLNFLPLDFFPDLNALVDTATALYEEELTGREHCSPHHTAIRQALVCWDELTKLIAWMSSNITSEQVRTIIVNHVNDTWGLKVRQSLWFHLSCLTFGQHTVQEFLVSFGVWIRTPAPYRPPNAPILSTLPEHTVIC

SEQ ID NO: 6947 - protein, 1365 aa, Artificial Sequence
  SARS-CoV-2/USA/WA-UW292/2020__EPI_ISL_418077 spike protein (1-1211)(K986P_V987P_ H1048Q_H1064N_ H1083N_H1101N) WhcAg construct
MFVFLVLLPLVSSQCVNLTTRTQLPPAYTNSFTRGVYYPDKVFRSSVLHSTQDLFLPFFSNVTWFHAIHVSGTNGTKRFDNPVLPFNDGVYFASTEKSNIIRGWIFGTTLDSKTQSLLIVNNATNVVIKVCEFQFCNDPFLGVYYHKNNKSWMESEFRVYSSANNCTFEYVSQPFLMDLEGKQGNFKNLREFVFKNIDGYFKIYSKHTPINLVRDLPQGFSALEPLVDLPIGINITRFQTLLALHRSYLTPGDSSSGWTAGAAAYYVGYLQPRTFLLKYNENGTITDAVDCALDPLSETKCTLKSFTVEKGIYQTSNFRVQPTESIVRFPNITNLCPFGEVFNATRFASVYAWNRKRISNCVADYSVLYNSASFSTFKCYGVSPTKLNDLCFTNVYADSFVIRGDEVRQIAPGQTGKIADYNYKLPDDFTGCVIAWNSNNLDSKVGGNYNYLYRLFRKSNLKPFERDISTEIYQASSTPCNGVEGFNCYFPLQSYGFQPTNGVGYQPYRVVVLSFELLHAPATVCGPKKSTNLVKNKCVNFNFNGLTGTGVLTESNKKFLPFQQFGRDIADTTDAVRDPQTLEILDITPCSFGGVSVITPGTNTSNQVAVLYQDVNCTEVPVAIHADQLTPTWRVYSTGSNVFQTRAGCLIGAEHVNNSYECDIPIGAGICASYQTQTNSPRRARSVASQSIIAYTMSLGAENSVAYSNNSIAIPTNFTISVTTEILPVSMTKTSVDCTMYICGDSTECSNLLLQYGSFCTQLNRALTGIAVEQDKNTQEVFAQVKQIYKTPPIKDFGGFNFSQILPDPSKPSKRSFIEDLLFNKVTLADAGFIKQYGDCLGDIAARDLICAQKFNGLTVLPPLLTDEMIAQYTSALLAGTITSGWTFGAGAALQIPFAMQMAYRFNGIGVTQNVLYENQKLIANQFNSAIGKIQDSLSSTASALGKLQDVVNQNAQALNTLVKQLSSNFGAISSVLNDILSRLDPPEAEVQIDRLITGRLQSLQTYVTQQLIRAAEIRASANLAATKMSECVLGQSKRVDFCGKGYQLMSFPQSAPHGVVFLNVTYVPAQEKNFTTAPAICNDGKAHFPREGVFVSNGTNWFVTQRNFYEPQIITTDNTFVSGNCDVVIGIVNNTVYDPLQPELDSFKEELDKYFKNHTSPDVDLGDISGINASVVNIQKEIDRLNEVAKNLNESLIDLQELGKYEQYIKGGGGSDIDPYKEFGSSYQLLNFLPLDFFPDLNALVDTATALYEEELTGREHCSPHHTAIRQALVCWDELTKLIAWMSSNITSEQVRTIIVNHVNDTWGLKVRQSLWFHLSCLTFGQHTVQEFLVSFGVWIRTPAPYRPPNAPILSTLPEHTVIC

SEQ ID NO: 6948 - protein, 1365 aa, Artificial Sequence
  SARS-CoV-2/Iceland/192/2020__EPI_ISL_417819 spike protein (1-1211)(K986P_V987P_ H1048Q_H1064N_ H1083N_H1101N) WhcAg construct
MFVFFVLLPLVSSQCVNLTTRTQLPPAYTNSFTRGVYYPDKVFRSSVLHSTQDLFLPFFSNVTWFHAIHVSGTNGTKRFDNPVLPFNDGVYFASTEKSNIIRGWIFGTTLDSKTQSLLIVNNATNVVIKVCEFQFCNDPFLGVYYHKNNKSWMESEFRVYSSANNCTFEYVSQPFLMDLEGKQGNFKNLREFVFKNIDGYFKIYSKHTPINLVRDLPQGFSALEPLVDLPIGINITRFQTLLALHRSYLTPGDSSSGWTAGAAAYYVGYLQPRTFLLKYNENGTITDAVDCALDPLSETKCTLKSFTVEKGIYQTSNFRVQPTESIVRFPNITNLCPFGEVFNATRFASVYAWNRKRISNCVADYSVLYNSASFSTFKCYGVSPTKLNDLCFTNVYADSFVIRGDEVRQIAPGQTGKIADYNYKLPDDFTGCVIAWNSNNLDSKVGGNYNYLYRLFRKSNLKPFERDISTEIYQAGSTPCNGVEGFNCYFPLQSYGFQPTNGVGYQPYRVVVLSFELLHAPATVCGPKKSTNLVKNKCVNFNFNGLTGTGVLTESNKKFLPFQQFGRDIADTTDAVRDPQTLEILDITPCSFGGVSVITPGTNTSNQVAVLYQGVNCTEVPVAIHADQLTPTWRVYSTGSNVFQTRAGCLIGAEHVNNSYECDIPIGAGICASYQTQTNSPRRARSVASQSIIAYTMSLGAENSVAYSNNSIAIPTNFTISVTTEILPVSMTKTSVDCTMYICGDSTECSNLLLQYGSFCTQLNRALTGIAVEQDKNTQEVFAQVKQIYKTPPIKDFGGFNFSQILPDPSKPSKRSFIEDLLFNKVTLADAGFIKQYGDCLGDIAARDLICAQKFNGLTVLPPLLTDEMIAQYTSALLAGTITSGWTFGAGAALQIPFAMQMAYRFNGIGVTQNVLYENQKLIANQFNSAIGKIQDSLSSTASALGKLQDVVNQNAQALNTLVKQLSSNFGAISSVLNDILSRLDPPEAEVQIDRLITGRLQSLQTYVTQQLIRAAEIRASANLAATKMSECVLGQSKRVDFCGKGYQLMSFPQSAPHGVVFLNVTYVPAQEKNFTTAPAICNDGKAHFPREGVFVSNGTNWFVTQRNFYEPQIITTDNTFVSGNCDVVIGIVNNTVYDPLQPELDSFKEELDKYFKNHTSPDVDLGDISGINASVVNIQKEIDRLNEVAKNLNESLIDLQELGKYEQYIKGGGGSDIDPYKEFGSSYQLLNFLPLDFFPDLNALVDTATALYEEELTGREHCSPHHTAIRQALVCWDELTKLIAWMSSNITSEQVRTIIVNHVNDTWGLKVRQSLWFHLSCLTFGQHTVQEFLVSFGVWIRTPAPYRPPNAPILSTLPEHTVIC

SEQ ID NO: 6949 - protein, 1365 aa, Artificial Sequence
  SARS-CoV-2/Belgium/ULG-6939/2020__EPI_ISL_417020 spike protein (1-1211)(K986P_V987P_ H1048Q_H1064N_ H1083N_H1101N) WhcAg construct
MFVFLVLLPLVSSQCVNLTTRTQLPPAYTNSFTRGVYYPDKVFRSSVLHSTQDLFLPFFSNVTWFHAIHVSGTNGTKRFDNPVLPFNDGVYFASTEKSNIIRGWIFGTTLDSKTQSLLIVNNATNVVIKVCEFQFCNDPFLGVYYHKNNKSWMESEFRVYSSANNCTFEYVSQPFLMDLEGKQGNFKNLREFVFKNIDGYFKIYSKHTPINLVRDLPQGFSALEPLVDLPIGINITRFQTLLALHRSYLTPGDSSSGWTAGAAAYYVGYLQPRTFLLKYNENGTITDAVDCALDPLSETKCTLKSFTVEKGIYQTSNFRVQPTESIVRFPNITNLCPFGEVFNATRFASVYAWNRKRISNCVADYSVLYNSASFSTFKCYGVSPTKLNDLCFTNVYADSFVIRGDEVRQIAPGQTGKIADYNYKLPDDFTGCVIAWNSNNLDSKVGGNYNYLYRLFRKSNLKPFERDISTEIYQAGSTPCNGVEGFNCYFPLQSYGFQPTNGVGYQPYRVVVLSFELLHAPATVCGPKKSTNLVKNKCVNFNFNGLTGTGVLTESNKKFLPFQQFGRDIADTTDAVRDPQTLEILDITPCSFGGVSVITPGTNTSNQVAVLYQGVNCTEVPVAIHADQLTPTWRVYSTGSNVFQTRAGCLIGAEHVNNSYECDIPIGAGICASYQTQTNSPRRARSVASQSIIAYTMSLGAENSVVYSNNSIAIPTNFTISVTTEILPVSMTKTSVDCTMYICGDSTECSNLLLQYGSFCTQLNRALTGIAVEQDKNTQEVFAQVKQIYKTPPIKDFGGFNFSQILPDPSKPSKRSFIEDLLFNKVTLADAGFIKQYGDCLGDIAARDLICAQKFNGLTVLPPLLTDEMIAQYTSALLAGTITSGWTFGAGAALQIPFAMQMAYRFNGIGVTQNVLYENQKLIANQFNSAIGKIQDSLSSTASALGKLQDVVNQNAQALNTLVKQLSSNFGAISSVLNDILSRLDPPEAEVQIDRLITGRLQSLQTYVTQQLIRAAEIRASANLAATKMSECVLGQSKRVDFCGKGYQLMSFPQSAPHGVVFLNVTYVPAQEKNFTTAPAICNDGKAHFPREGVFVSNGTNWFVTQRNFYEPQIITTDNTFVSGNCDVVIGIVNNTVYDPLQPELDSFKEELDKYFKNHTSPDVDLGDISGINASVVNIQKEIDRLNEVAKNLNESLIDLQELGKYEQYIKGGGGSDIDPYKEFGSSYQLLNFLPLDFFPDLNALVDTATALYEEELTGREHCSPHHTAIRQALVCWDELTKLIAWMSSNITSEQVRTIIVNHVNDTWGLKVRQSLWFHLSCLTFGQHTVQEFLVSFGVWIRTPAPYRPPNAPILSTLPEHTVIC

SEQ ID NO: 6950 - protein, 1365 aa, Artificial Sequence
  SARS-CoV-2/France/HF2496/2020__EPI_ISL_418231 spike protein (1-1211)(K986P_V987P_ H1048Q_H1064N_ H1083N_H1101N) WhcAg construct
MFVFLVLLPLVSSQCVNLTTRTQLPPAYTNSFTRGVYYPDKVFRSSVLHSTQDLFLPFFSNVTWFHAIHVSGTNGTKRFDNPVLPFNDGVYFASTEKSNIIRGWIFGTTLDSKTQSLLIVNNATNVVIKVCEFQFCNDPFLGVYYHKNNKSWMESEFRVYSSANNCTFEYVSQPFLMDLEGKQGNFKNLREFVFKNIDGYFKIYSKHTPINLVRDLPQGFSALEPLVDLPIGINITRFQTLLALHRSYLTPGDSSSGWTAGAAAYYVGYLQPRTFLLKYNENGTITDAVDCALDPLSETKCTLKSFTVEKGIYQTSNFRVQPTESIVRFPNITNLCPFGEVFNATRFASVYAWNRKRISNCVADYSVLYNSASFSTFKCYGVSPTKLNDLCFTNVYADSFVIRGDEVRQIAPGQTGKIADYNYKLPDDFTGCVIAWNSNNLDSKVGGNYNYLYRLFRKSNLKPFERDISTEIYQAGSTPCNGVEGFNCYFPLQSYGFQPTNGVGYQPYRVVVLSFELLHAPATVCGPKKSTNLVKNKCVNFNFNGLTGTGVLTESNKKFLPFQQFGRDIADTTDAVRDPQTLEILDITPCSFGGVSVITPGTNTSNQVAVLYQGVNCTEVPVAIHADQLTPTWRVYSTGSNVFQTRAGCLIGAEHVNNSYECDIPIGAGICASYQTQTNSPRRARSVASQSIIAYTMSLGAENSVAYSNNSIAIPTNFTISVTTEILPVSMTKTSVDCTMYICGDSTECSNLLLQYGSFCTQLNRALTGIAVEQDKNTQEVFAQVKQIYKTPPIKDFGGFNFSQILPDPSKPSKRSFIEDLLFNKVTLADAGFIKQYGDCLGDIVARDLICAQKFNGLTVLPPLLTDEMIAQYTSALLAGTITSGWTFGAGAALQIPFAMQMAYRFNGIGVTQNVLYENQKLIANQFNSAIGKIQDSLSSTASALGKLQDVVNQNAQALNTLVKQLSSNFGAISSVLNDILSRLDPPEAEVQIDRLITGRLQSLQTYVTQQLIRAAEIRASANLAATKMSECVLGQSKRVDFCGKGYQLMSFPQSAPHGVVFLNVTYVPAQEKNFTTAPAICNDGKAHFPREGVFVSNGTNWFVTQRNFYEPQIITTDNTFVSGNCDVVIGIVNNTVYDPLQPELDSFKEELDKYFKNHTSPDVDLGDISGINASVVNIQKEIDRLNEVAKNLNESLIDLQELGKYEQYIKGGGGSDIDPYKEFGSSYQLLNFLPLDFFPDLNALVDTATALYEEELTGREHCSPHHTAIRQALVCWDELTKLIAWMSSNITSEQVRTIIVNHVNDTWGLKVRQSLWFHLSCLTFGQHTVQEFLVSFGVWIRTPAPYRPPNAPILSTLPEHTVIC

SEQ ID NO: 6951 - protein, 1365 aa, Artificial Sequence
  SARS-CoV-2/USA/WA-UW291/2020__EPI_ISL_418076 spike protein (1-1211)(K986P_V987P_ H1048Q_H1064N_ H1083N_H1101N) WhcAg construct
MFVFLVLLPLVSSQCVNLTTRTQLPPAYTNSFTRGVYYPDKVFRSSVLHSTQDLFLPFFSNVTWFHAIHVSGTNGTKRFDNPVLPFNDGVYFASTEKSNIIRGWIFGTTLDSKTQSLLIVNNATNVVIKVCEFQFCNDPFLGVYYHKNNKSWMESEFRVYSSANNCTFEYVSQPFLMDLEGKQGNFKNLREFVFKNIDGYFKIYSKHTPINLVRDLPQGFSALEPLVDLPIGINITRFQTLLALHRSYLTPGDSSSGWTAGAAAYYVGYLQPRTFLLKYNENGTITDAVDCALDPLSETKCTLKSFTVEKGIYQTSNFRVQPTESIVRFPNITNLCPFGEVFNATRFASVYAWNRKRISNCVADYSVLYNSASFSTFKCYGVSPTKLNDLCFTNVYADSFVIRGDEVRQIAPGQTGKIADYNYKLPDDFTGCVIAWNSNNLDSKVGGNYNYLYRLFRKSNLKPFERDISTEIYQAGSTPCNGVEGFNCYFPLQSYGFQPTNGVGYQPYRVVVLSFELLHAPATVCGPKKSTNLVKNKCVNFNFNGLTGTGVLTESNKKFLPFQQFGRDIADTTDAVRDPQTLEILDITPCSFGGVSVITPGTNTSNQVAVLYQGVNCTEVPVAIHADQLTPTWRVYSTGSNVFQTRAGCLIGAEHVNNSYECDIPIGAGICASYQTQTNSPRRARSVASQSIIAYTMSLGAENSVAYSNNSIAIPTNFTISVTTEILPVSMTKTSVDCTMYICGDSTECSNLLLQYGSFCTQLNRALTGIAVEQDKNTQEVFAQVKQIYKTPPIKDFGGFNFSQILPDPSKPSKRSFIEDLLFNKVTLADAGFIKQYGDCLGDIAARDLICAQKFNGLTVLPPLLTDEMIAQYTSALLAGTITSGWTFGAGAALQIPFAMQMAYRFNGIGVTQNVLYENQKLIANQFNSAIGKIQYSLSSTASALGKLQDVVNQNAQALNTLVKQLSSNFGAISSVLNDILSRLDPPEAEVQIDRLITGRLQSLQTYVTQQLIRAAEIRASANLAATKMSECVLGQSKRVDFCGKGYQLMSFPQSAPHGVVFLNVTYVPAQEKNFTTAPAICNDGKAHFPREGVFVSNGTNWFVTQRNFYEPQIITTDNTFVSGNCDVVIGIVNNTVYDPLQPELDSFKEELDKYFKNHTSPDVDLGDISGINASVVNIQKEIDRLNEVAKNLNESLIDLQELGKYEQYIKGGGGSDIDPYKEFGSSYQLLNFLPLDFFPDLNALVDTATALYEEELTGREHCSPHHTAIRQALVCWDELTKLIAWMSSNITSEQVRTIIVNHVNDTWGLKVRQSLWFHLSCLTFGQHTVQEFLVSFGVWIRTPAPYRPPNAPILSTLPEHTVIC

SEQ ID NO: 6952 - protein, 1365 aa, Artificial Sequence; identical to SEQ ID NO: 6915
  SARS-CoV-2/Portugal/PT0034/2020__EPI_ISL_418019 spike protein (1-1211)(K986P_V987P_ H1048Q_H1064N_ H1083N_H1101N) WhcAg construct

SEQ ID NO: 6953 - protein, 1365 aa, Artificial Sequence
  SARS-CoV-2/Iceland/202/2020__EPI_ISL_417750 spike protein (1-1211)(K986P_V987P_ H1048Q_H1064N_ H1083N_H1101N) WhcAg construct
MFVFLVLLPLVSSQCVNLTTRTQLPPAYTNSFTRGVYYPDKVFRSSVLHSTQDLFLPFFSNVTWFHAIHVSGTNGTKRFDNPVLPFNDGVYFASTEKSNIIRGWIFGTTLDSKTQSLLIVNNATNVVIKVCEFQFCNDPFLGVYYHKNNKSWMESEFRVYSSANNCTFEYVSQPFLMDLEGKQGNFKNLREFVFKNIDGYFKIYSKHTPINLVRDLPQGFSALEPLVDLPIGINITRFQTLLALHRSYLTPGDSSSGWTAGAAAYYVGYLQPRTFLLKYNENGTITDAVDCALDPLSETKCTLKSFTVEKGIYQTSNFRVQPTESIVRFPNITNLCPFGEVFNATRFASVYAWNRKRISNCVADYSVLYNSASFSTFKCYGVSPTKLNDLCFTNVYADSFVIRGDEVRQIAPGQTGKIADYNYKLPDDFTGCVIAWNSNNLDSKVGGNYNYLYRLFRKSNLKPFERDISTEIYQAGSTPCNGVEGFNCYFPLQSYGFQPTNGVGYQPYRVVVLSFELLHAPATVCGPKKSTNLVKNKCVNFNFNGLTGTGVLTESNKKFLPFQQFGRDIADTTDAVRDPQTLEILDITPCSFGGVSVITPGTNTSNQVAVLYQDVNCTEVPVAIHADQLTPTWRVYSTGSNVFQTRAGCLIGAEHVNNSYECDIPIGAGICASYQTQTNSPRRARSVASQSIIAYTMSLGAENSVAYSNNSIAIPTNFTISVTTEILPVSMTKTSVDCTMYICGDSTECSNLLLQYGSFCTQLNRALTGIAVEQDKNTQEVFAQVKQIYKTPPIKDFGGFNFSQILPDPSKPSKRSFIEDLLFNKVTLADAGFIKQYGDCLGDIAARDLICAQKFNGLTVLPPLLTDEMIAQYTSALLAGTITSGWTFGAGAALQIPFAMQMAYRFNGIGVTQNVLYENQKLIANQFNSAIGKIQDSLSSTASALGKLQDVVNQNAQALNTLVKQLSSNFGAISSVLNDILSRLDPPEAEVQIDRLITGRLQSLQTYVTQQLIRAAEIRASANLAATKMSECVLGQSKRVDFCGKGYQLMSFPQSAPHGVVFLNVTYVPAQEKNFTTAPAICNDGKAHFPREGVFVSNGTNWFVTQRNFYEPQIITTDNTFVSGNCDVVIGIVNNTVYDPLQPELDSFKEELDKYFKNHTSPDVDLGDIPGINASVVNIQKEIDRLNEVAKNLNESLIDLQELGKYEQYIKGGGGSDIDPYKEFGSSYQLLNFLPLDFFPDLNALVDTATALYEEELTGREHCSPHHTAIRQALVCWDELTKLIAWMSSNITSEQVRTIIVNHVNDTWGLKVRQSLWFHLSCLTFGQHTVQEFLVSFGVWIRTPAPYRPPNAPILSTLPEHTVIC

SEQ ID NO: 6954 - protein, 1365 aa, Artificial Sequence
  SARS-CoV-2/USA/WA-UW261/2020__EPI_ISL_418046 spike protein (1-1211)(K986P_V987P_ H1048Q_H1064N_ H1083N_H1101N) WhcAg construct
MFVFLVLLPLVSSQCVNLTTRTQLPPAYTNSFTRGVYYPDKVFRSSVLHSTQDLFLPFFSNVTWFHAIHVSGTNGTKRFDNPVLPFNDGVYFASTEKSNIIRGWIFGTTLDSKTQSLLIVNNATNVVIKVCEFQFCNDPFLGVYYHKNNKSWMESEFRVYSSANNCTFEYVSQPFLMDLEGKQGNFKNLREFVFKNIDGYFKIYSKHTPINLVRDLPQGFSALEPLVDLPIGINITRFQTLLALHRSYLTPGDSSSGWTAGAAAYYVGYLQPRTFLLKYNENGTITDAVDCALDPLSETKCTLKSFTVEKGIYQTSNFRVQPTESIVRFPNITNLCPFGEVFNATRFTSVYAWNRKRISNCVADYSVLYNSASFSTFKCYGVSPTKLNDLCFTNVYADSFVIRGDEVRQIAPGQTGKIADYNYKLPDDFTGCVIAWNSNNLDSKVGGNYNYLYRLFRKSNLKPFERDISTEIYQAGSTPCNGVEGFNCYFPLQSYGFQPTNGVGYQPYRVVVLSFELLHAPATVCGPKKSTNLVKNKCVNFNFNGLTGTGVLTESNKKFLPFQQFGRDIADTTDAVRDPQTLEILDITPCSFGGVSVITPGTNTSNQVAVLYQDVNCTEVPVAIHADQLTPTWRVYSTGSNVFQTRAGCLIGAEHVNNSYECDIPIGAGICASYQTQTNSPRRARSVASQSIIAYTMSLGAENSVAYSNNSIAIPTNFTISVTTEILPVSMTKTSVDCTMYICGDSTECSNLLLQYGSFCTQLNRALTGIAVEQDKNTQEVFAQVKQIYKTPPIKDFGGFNFSQILPDPSKPSKRSFIEDLLFNKVTLADAGFIKQYGDCLGDIAARDLICAQKFNGLTVLPPLLTDEMIAQYTSALLAGTITSGWTFGAGAALQIPFAMQMAYRFNGIGVTQNVLYENQKLIANQFNSAIGKIQDSLSSTASALGKLQDVVNQNAQALNTLVKQLSSNFGAISSVLNDILSRLDPPEAEVQIDRLITGRLQSLQTYVTQQLIRAAEIRASANLAATKMSECVLGQSKRVDFCGKGYQLMSFPQSAPHGVVFLNVTYVPAQEKNFTTAPAICNDGKAHFPREGVFVSNGTNWFVTQRNFYEPQIITTDNTFVSGNCDVVIGIVNNTVYDPLQPELDSFKEELDKYFKNHTSPDVDLGDISGINASVVNIQKEIDRLNEVAKNLNESLIDLQELGKYEQYIKGGGGSDIDPYKEFGSSYQLLNFLPLDFFPDLNALVDTATALYEEELTGREHCSPHHTAIRQALVCWDELTKLIAWMSSNITSEQVRTIIVNHVNDTWGLKVRQSLWFHLSCLTFGQHTVQEFLVSFGVWIRTPAPYRPPNAPILSTLPEHTVIC

SEQ ID NO: 6955 - protein, 1365 aa, Artificial Sequence
  SARS-CoV-2/Portugal/PT0035/2020__EPI_ISL_418020 spike protein (1-1211)(K986P_V987P_ H1048Q_H1064N_ H1083N_H1101N) WhcAg construct
MFVFLVLLPLVSSQCVNLTTRTQLPPAYTNSFTRGVYYPDKVFRSSVLHSTQDLFLPFFSNVTWFHAIHVSGTNGTKRFDNPVLPFNDGVYFASTEKSNIIRGWIFGTTLDSKTQSLLIVNNATNVVIKVCEFQFCNDPFLGVYYHKNNKSWMESEFRVYSSANNCTFEYVSQPFLMDLEGKQGNFKNLREFVFKNIDGYFKIYSKHTPINLVRDLPQGFSALEPLVDLPIGINITRFQTLLALHRSYLTPGDSSSGWTAGAAAYYVGYLQPRTFLLKYNENGTITDAVDCALDPLSETKCTLKSFTVEKGIYQTSNFRVQPTESIVRFPNITNLCPFGEVFNATRFASVYAWNRKRISNCVADYSVLYNSASFSTFKCYGVSPTKLNDLCFTNVYADSFVIRGDEVRQIAPGQTGKIADYNYKLPDDFTGCVIAWNSNNLDSKVGGNYNYLYRLFRKSNLKPFERDISTEIYQAGSTPCNGVEGFNCYFPLQSYGFQPTNGVGYQPYRVVVLSFELLHAPATVCGPKKSTNLVKNKCVNFNFNGLTGTGVLTESNKKFLPFQQFGRDIADTTDAVRDPQTLEILDITPCSFGGVSVITPGTNTSNQVAVLYQDVNCTEVPVAIHADQLTPTWRVYSTGSNVFQTRAGCLIGAEHVNNSYECDIPIGAGICASYQTQTNSPRRARSVASQSIIAYTMSLGAENSVAYSNNSIAIPTNFTISVTTEILPVSMTKTSVDCTMYICGDSTECSNLLLQYGSFCTQLNRALTGIAVEQDKNTQEVFAQVKQIYKTPPIKDFGGFNFSQILPDPSKPSKRSFIEDLLFNKVTLADAGFIKQYGDCLGDISARDLICAQKFNGLTVLPPLLTDEMIAQYTSALLAGTITSGWTFGAGAALQIPFAMQMAYRFNGIGVTQNVLYENQKLIANQFNSAIGKIQDSLSSTASALGKLQDVVNQNAQALNTLVKQLSSNFGAISSVLNDILSRLDPPEAEVQIDRLITGRLQSLQTYVTQQLIRAAEIRASANLAATKMSECVLGQSKRVDFCGKGYQLMSFPQSAPHGVVFLNVTYVPAQEKNFTTAPAICNDGKAHFPREGVFVSNGTNWFVTQRNFYEPQIITTDNTFVSGNCDVVIGIVNNTVYDPLQPELDSFKEELDKYFKNHTSPDVDLGDISGINASVVNIQKEIDRLNEVAKNLNESLIDLQELGKYEQYIKGGGGSDIDPYKEFGSSYQLLNFLPLDFFPDLNALVDTATALYEEELTGREHCSPHHTAIRQALVCWDELTKLIAWMSSNITSEQVRTIIVNHVNDTWGLKVRQSLWFHLSCLTFGQHTVQEFLVSFGVWIRTPAPYRPPNAPILSTLPEHTVIC

SEQ ID NO: 6956 - protein, 1365 aa, Artificial Sequence
  SARS-CoV-2/USA/NY-NYUMC7/2020__EPI_ISL_418192 spike protein (1-1211)(K986P_V987P_ H1048Q_H1064N_ H1083N_H1101N) WhcAg construct
MFVFLVLLPLVSSQCVNLTTRTQLPPAYTNSFTRGVYYPDKVFRSSVLHSTQDLFLPFFSNVTWFHAIHVSGTNGTKRFDNPVLPFNDGVYFASTEKSNIIRGWIFGTTLDSKTQSLLIVNNATNVVIKVCEFQFCNDPFLGVYHHKNNKSWMESEFRVYSSANNCTFEYVSQPFLMDLEGKQGNFKNLREFVFKNIDGYFKIYSKHTPINLVRDLPQGFSALEPLVDLPIGINITRFQTLLALHRSYLTPGDSSSGWTAGAAAYYVGYLQPRTFLLKYNENGTITDAVDCALDPLSETKCTLKSFTVEKGIYQTSNFRVQPTESIVRFPNITNLCPFGEVFNATRFASVYAWNRKRISNCVADYSVLYNSASFSTFKCYGVSPTKLNDLCFTNVYADSFVIRGDEVRQIAPGQTGKIADYNYKLPDDFTGCVIAWNSNNLDSKVGGNYNYLYRLFRKSNLKPFERDISTEIYQAGSTPCNGVEGFNCYFPLQSYGFQPTNGVGYQPYRVVVLSFELLHAPATVCGPKKSTNLVKNKCVNFNFNGLTGTGVLTESNKKFLPFQQFGRDIADTTDAVRDPQTLEILDITPCSFGGVSVITPGTNTSNQVAVLYQGVNCTEVPVAIHADQLTPTWRVYSTGSNVFQTRAGCLIGAEHVNNSYECDIPIGAGICASYQTQTNSPRRARSVASQSIIAYTMSLGAENSVAYSNNSIAIPTNFTISVTTEILPVSMTKTSVDCTMYICGDSTECSNLLLQYGSFCTQLNRALTGIAVEQDKNTQEVFAQVKQIYKTPPIKDFGGFNFSQILPDPSKPSKRSFIEDLLFNKVTLADAGFIKQYGDCLGDIAARDLICAQKFNGLTVLPPLLTDEMIAQYTSALLAGTITSGWTFGAGAALQIPFAMQMAYRFNGIGVTQNVLYENQKLIANQFNSAIGKIQDSLSSTASALGKLQDVVNQNAQALNTLVKQLSSNFGAISSVLNDILSRLDPPEAEVQIDRLITGRLQSLQTYVTQQLIRAAEIRASANLAATKMSECVLGQSKRVDFCGKGYQLMSFPQSAPHGVVFLNVTYVPAQEKNFTTAPAICNDGKAHFPREGVFVSNGTNWFVTQRNFYEPQIITTDNTFVSGNCDVVIGIVNNTVYDPLQPELDSFKEELDKYFKNHTSPDVDLGDISGINASVVNIQKEIDRLNEVAKNLNESLIDLQELGKYEQYIKGGGGSDIDPYKEFGSSYQLLNFLPLDFFPDLNALVDTATALYEEELTGREHCSPHHTAIRQALVCWDELTKLIAWMSSNITSEQVRTIIVNHVNDTWGLKVRQSLWFHLSCLTFGQHTVQEFLVSFGVWIRTPAPYRPPNAPILSTLPEHTVIC

SEQ ID NO: 6957 - protein, 1365 aa, Artificial Sequence
  SARS-CoV-2/Iceland/189/2020__EPI_ISL_417709 spike protein (1-1211)(K986P_V987P_ H1048Q_H1064N_ H1083N_H1101N) WhcAg construct
MFVFLVLLPLVSSQCVNLTTRTQLPPAYTNSFTRGVYYPDKVFRSSVLHSTQDLFLPFFSNVTWFHAIHVSGTNGTKRFDNPVLPFNDGVYFASTEKSNIIRGWIFGTTLDSKTQSLLIVNNATNVVIKVCEFQFCNDPFLGVYYHKNNKSWMESEFRVYSSANNCTFEYVSQPFLMDLEGKQGNFKNLREFVFKNIDGYFKIYSKHTPINLVRDLPQGFSALEPLVDLPIGINITRFQTLLALHRSYLTPGDSSSGWTAGAAAYYVGYLQPRTFLLKYNENGTITDAVDCALDPLSETKCTLKSFTVEKGIYQTSNFRVQPTESIVRFPNITNLCPFGEVFNATRFASVYAWNRKRISNCVADYSVLYNSASFSTFKCYGVSPTKLNDLCFTNVYADSFVIRGDEVRQIAPGQTGKIADYNYKLPDDFTGCVIAWNSNNLDSKVGGNYNYLYRLFRKSNLKPFERDISTEIYQAGSTPCNGVEGFNCYFPLQSYGFQPTNGVGYQPYRVVVLSFELLHAPATVCGPKKSTNLVKNKCVNFNFNGLTGTGVLTESNKKFLPFQQFGRDIADTTDAVRDPQTLEILDITPCSFGGVSVITPGTNTSNQVAVLYQGVNCTEVPVAIHADQLTPTWRVYSTGSNVFQTRAGCLIGAEHVNNSYECDIPIGAGICASYQTQTNSPRRARSVASQSIIAYTMSLGAENSVAYSNNSIAIPTNFTISVTTEILPVSMTKTSVDCTMYICGDSTECSNLLLQYGSFCTQLNRALTGIAVEQDKNTQEVFAQVKQIYKTPPIKDFGGFNFSQILPDPSKPSKRSFIEDLLFNKVTLADAGFTKQYGDCLGDIAARDLICAQKFNGLTVLPPLLTDEMIAQYTSALLAGTITSGWTFGAGAALQIPFAMQMAYRFNGIGVTQNVLYENQKLIANQFNSAIGKIQDSLSSTASALGKLQDVVNQNAQALNTLVKQLSSNFGAISSVLNDILSRLDPPEAEVQIDRLITGRLQSLQTYVTQQLIRAAEIRASANLAATKMSECVLGQSKRVDFCGKGYQLMSFPQSAPHGVVFLNVTYVPAQEKNFTTAPAICNDGKAHFPREGVFVSNGTNWFVTQRNFYEPQIITTDNTFVSGNCDVVIGIVNNTVYDPLQPELDSFKEELDKYFKNHTSPDVDLGDISGINASVVNIQKEIDRLNEVAKNLNESLIDLQELGKYEQYIKGGGGSDIDPYKEFGSSYQLLNFLPLDFFPDLNALVDTATALYEEELTGREHCSPHHTAIRQALVCWDELTKLIAWMSSNITSEQVRTIIVNHVNDTWGLKVRQSLWFHLSCLTFGQHTVQEFLVSFGVWIRTPAPYRPPNAPILSTLPEHTVIC

SEQ ID NO: 6958 - protein, 1365 aa, Artificial Sequence
  SARS-CoV-2/Australia/NSW56/2020__EPI_ISL_417408 spike protein (1-1211)(K986P_V987P_ H1048Q_H1064N_ H1083N_H1101N) WhcAg construct
MFVFLVLLPLVSSQCVNLTTRTQLPPAYTNSFTRGVYYPDKVFRSSVLHSTQDLFLPFFSNVTWFHAIHVSGTNGTKRFDNPVLPFNDGVYFASTEKSNIIRGWIFGTTLDSKTQSLLIVNNATNVVIKVCEFQFCNDPFLGVYYHKNNKSWMESEFRVYSSANNCTFEYVSQPFLMDLEGKQGNFKNLREFVFKNIDGYFKIYSKHTPINLVRDLPQGFSALEPLVDLPIGINITRFQTLLALHRSYLTPGDSSSGWTAGAAAYYVGYLQPRTFLLKYNENGTITDAVDCALDPLSETKCTLKSFTVEKGIYQTSNFRVQPTESIVRFPNITNLCPFGEVFNATRFASVYAWNRKRISNCVADYSVLYNSASFSTFKCYGVSPTKLNDLCFTNVYADSFVIRGDEVRQIAPGQTGKIADYNYKLPDDFTGCVIAWNSNNLDSKVGGNYNYLYRLFRKSNLKPFERDISTEIYQAGSTPCNGVEGFNCYFPLQSYGFQPTNGVGYQPYRVVVLSFELLHAPATVCGPKKSTNLVKNKCVNFNFNGLTGTGVLTESNKKFLPFQQFGRDIADTTDAVRDPQTLEILDITPCSFGGVSVITPGTNTSNQVAVLYQDVNCTEVPVAIHADQLTPTWRVYSTGSNVFQTRAGCLIGAEHVNNSYECDIPIGAGICASYQTQTNSPRRARSVASQSIIAYTMSLGAENSVAYSNNSIAIPTNFTISVTTEILPVSMTKTSVDCTMYICGDSTECSNLLLQYGSFCTQLNRALTGIAVEQDKNTQEVFAQVKQIYKTPPIKDFGGFNFSQILPDSSKPSKRSFIEDLLFNKVTLADAGFIKQYGDCLGDIAARDLICAQKFNGLTVLPPLLTDEMIAQYTSALLAGTITSGWTFGAGAALQIPFAMQMAYRFNGIGVTQNVLYENQKLIANQFNSAIGKIQDSLSSTASALGKLQDVVNQNAQALNTLVKQLSSNFGAISSVLNDILSRLDPPEAEVQIDRLITGRLQSLQTYVTQQLIRAAEIRASANLAATKMSECVLGQSKRVDFCGKGYQLMSFPQSAPHGVVFLNVTYVPAQEKNFTTAPAICNDGKAHFPREGVFVSNGTNWFVTQRNFYEPQIITTDNTFVSGNCDVVIGIVNNTVYDPLQPELDSFKEELDKYFKNHTSPDVDLGDISGINASVVNIQKEIDRLNEVAKNLNESLIDLQELGKYEQYIKGGGGSDIDPYKEFGSSYQLLNFLPLDFFPDLNALVDTATALYEEELTGREHCSPHHTAIRQALVCWDELTKLIAWMSSNITSEQVRTIIVNHVNDTWGLKVRQSLWFHLSCLTFGQHTVQEFLVSFGVWIRTPAPYRPPNAPILSTLPEHTVIC

SEQ ID NO: 6959 - protein, 1365 aa, Artificial Sequence
  SARS-CoV-2/Iceland/280/2020__EPI_ISL_417608 spike protein (1-1211)(K986P_V987P_ H1048Q_H1064N_ H1083N_H1101N) WhcAg construct
MFVFLVLLPLVSSQCVNLTTRTQLPPAYTNSFTRGVYYPDKVFRSSVLHSTQDLFLPFFSNVTWFHAIHVSGTNGTKRFDNPVLPFNDGVYFASTEKSNIIRGWIFGTTLDSKTQSLLIVNNATNVVIKVCEFQFCNDPFLGVYYHKNNKSWMESEFRVYSSANNCTFEYVSQPFLMDLEGKQGNFKNLREFVFKNIDGYFKIYSKHTPINLVRDLPQGFSALEPLVDLPIGINITRFQTLLALHRSYLTPGDSSSGWTAGAAAYYVGYLQPRTFLLKYNENGTITDAVDCALDPLSETKCTLKSFTVEKGIYQTSNFRVQPTESIVRFPNITNLCPFGEVFNATRFASVYAWNRKRISNCVADYSVLYNSASFSTFKCYGVSPTKLNDLCFTNVYADSFVIRGDEVRQIAPGQTGKIADYNYKLPDDFTGCVIAWNSNNLDSKVGGNYNYLYRLFRKSNLKPFERDISTEIYQAGSTPCNGVEGFNCYFPLQSYGFQPTNGVGYQPYRVVVLSFELLHAPATVCGPKKSTNLVKNKCVNFNFNGLTGTGVLTESNKKFLPFQQFGRDIADTTDAVRDPQTLEILDITPCSFGGVSVITPGTNTSNQVAVLYQGVNCTEVPVAIHADQLTPTWRVYSTGSNVFQTRAGCLIGAEHVNNSYECDIPIGAGICASYHTQTNSPRRARSVASQSIIAYTMSLGAENSVAYSNNSIAIPTNFTISVTTEILPVSMTKTSVDCTMYICGDSTECSNLLLQYGSFCTQLNRALTGIAVEQDKNTQEVFAQVKQIYKTPPIKDFGGFNFSQILPDPSKPSKRSFIEDLLFNKVTLADAGFIKQYGDCLGDIAARDLICAQKFNGLTVLPPLLTDEMIAQYTSALLAGTITSGWTFGAGAALQIPFAMQMAYRFNGIGVTQNVLYENQKLIANQFNSAIGKIQDSLSSTASALGKLQDVVNQNAQALNTLVKQLSSNFGAISSVLNDILSRLDPPEAEVQIDRLITGRLQSLQTYVTQQLIRAAEIRASANLAATKMSECVLGQSKRVDFCGKGYQLMSFPQSAPHGVVFLNVTYVPAQEKNFTTAPAICNDGKAHFPREGVFVSNGTNWFVTQRNFYEPQIITTDNTFVSGNCDVVIGIVNNTVYDPLQPELDSFKEELDKYFKNHTSPDVDLGDISGINASVVNIQKEIDRLNEVAKNLNESLIDLQELGKYEQYIKGGGGSDIDPYKEFGSSYQLLNFLPLDFFPDLNALVDTATALYEEELTGREHCSPHHTAIRQALVCWDELTKLIAWMSSNITSEQVRTIIVNHVNDTWGLKVRQSLWFHLSCLTFGQHTVQEFLVSFGVWIRTPAPYRPPNAPILSTLPEHTVIC

SEQ ID NO: 6960 - protein, 1365 aa, Artificial Sequence; identical to SEQ ID NO: 6915
  SARS-CoV-2/Iceland/247/2020__EPI_ISL_417575 spike protein (1-1211)(K986P_V987P_ H1048Q_H1064N_ H1083N_H1101N) WhcAg construct

SEQ ID NO: 6961 - protein, 1365 aa, Artificial Sequence
  SARS-CoV-2/Iceland/238/2020__EPI_ISL_417566 spike protein (1-1211)(K986P_V987P_ H1048Q_H1064N_ H1083N_H1101N) WhcAg construct
MFVFLVLLPLVSSQCVNLTTRTQLPPAYTNSFTRGVYYPDKVFRSSVLHSTQDLFLPFFSNVTWFHAIHVSGTNGTKRFDNPVLPFNDGVYFASTEKSNIIRGWIFGTTLDSKTQSLLIVNNATNVVIKVCEFQFCNDPFLGVYYHKNNKSWMESEFRVYSSANNCTFEYVSQPFLMDLEGKQGNFKNLREFVFKNIDGYFKIYSKHTPINLVRDLPQGFSALEPLVDLPIGINITRFQTLLALHRSYLTPGDSSSGWTAGAAAYYVGYLQPRTFLLKYNENGTITDAVDCALDPLSETKCTLKSFTVEKGIYQTSNFRVQPTESIVRFPNITNLCPFGEVFNATRFASVYAWNRKRISNCVADYSVLYNSASFSTFKCYGVSPTKLNDLCFTNVYADSFVIRGDEVRQIAPGQTGKIADYNYKLPDDFTGCVIAWNSNNLDSKVGGNYNYLYRLFRKSNLKPFERDISTEIYQAGSTPCNGVEGFNCYFPLQSYGFQPTNGVGYQPYRVVVLSFELLHAPATVCGPKKSTNLVKNKCVNFNFNGLTGTGVLTESNKKFLPFQQFGRDIADTTDAVRDPQTLEILDITPCSFGGVSVITPGTNTSNQVAVLYQGVNCTEVPVAIHADQLTPTWRVYSTGSNVFQTRAGCLIGAEHVNNSYECDIPIGAGICASYQTQTNSPRRARSVASQSIIAYTMSLGAENSVAYSNNSIAIPTNFTISVTTEILPVSMTKTSVDCTMYICGDSTECSNLLLQYGSFCTQLNRALTGIAVEQDKNTQEVFAQVKQIYKTPPIKDFGGFNFSQILPDPSKPSKRSFIEDLLFNKVTLADVGFIKQYGDCLGDIAARDLICAQKFNGLTVLPPLLTDEMIAQYTSALLAGTITSGWTFGAGAALQIPFAMQMAYRFNGIGVTQNVLYENQKLIANQFNSAIGKIQDSLSSTASALGKLQDVVNQNAQALNTLVKQLSSNFGAISSVLNDILSRLDPPEAEVQIDRLITGRLQSLQTYVTQQLIRAAEIRASANLAATKMSECVLGQSKRVDFCGKGYQLMSFPQSAPHGVVFLNVTYVPAQEKNFTTAPAICNDGKAHFPREGVFVSNGTNWFVTQRNFYEPQIITTDNTFVSGNCDVVIGIVNNTVYDPLQPELDSFKEELDKYFKNHTSPDVDLGDISGINASVVNIQKEIDRLNEVAKNLNESLIDLQELGKYEQYIKGGGGSDIDPYKEFGSSYQLLNFLPLDFFPDLNALVDTATALYEEELTGREHCSPHHTAIRQALVCWDELTKLIAWMSSNITSEQVRTIIVNHVNDTWGLKVRQSLWFHLSCLTFGQHTVQEFLVSFGVWIRTPAPYRPPNAPILSTLPEHTVIC

SEQ ID NO: 6962 - protein, 1365 aa, Artificial Sequence
  SARS-CoV-2/Greece/16/2020__EPI_ISL_418265 spike protein (1-1211)(K986P_V987P_ H1048Q_H1064N_ H1083N_H1101N) WhcAg construct
MFVFLVLLPLVSSQCVNLTTRTQLPPAYTNSFTRGVYYPDKVFRSSVLHSTQDLFLPFFSNVTWFHAIHVSGTNGTKRFDNPVLPFNDGVYFASTEKSNIIRGWIFGTTLDSKTQSLLIVNNATNVVIKVCEFQFCNDPFLGVYYHKNNKSWMESEFRVYSSANNCTFEYVSQPFLMDLEGKQGNFKNLREFVFKNVDGYFKIYSKHTPINLVRDLPQGFSALEPLVDLPIGINITRFQTLLALHRSYLTPGDSSSGWTAGAAAYYVGYLQPRTFLLKYNENGTITDAVDCALDPLSETKCTLKSFTVEKGIYQTSNFRVQPTESIVRFPNITNLCPFGEVFNATRFASVYAWNRKRISNCVADYSVLYNSASFSTFKCYGVSPTKLNDLCFTNVYADSFVIRGDEVRQIAPGQTGKIADYNYKLPDDFTGCVIAWNSNNLDSKVGGNYNYLYRLFRKSNLKPFERDISTEIYQAGSTPCNGVEGFNCYFPLQSYGFQPTNGVGYQPYRVVVLSFELLHAPATVCGPKKSTNLVKNKCVNFNFNGLTGTGVLTESNKKFLPFQQFGRDIADTTDAVRDPQTLEILDITPCSFGGVSVITPGTNTSNQVAVLYQDVNCTEVPVAIHADQLTPTWRVYSTGSNVFQTRAGCLIGAEHVNNSYECDIPIGAGICASYQTQTNSPRRARSVASQSIIAYTMSLGAENSVAYSNNSIAIPTNFTISVTTEILPVSMTKTSVDCTMYICGDSTECSNLLLQYGSFCTQLNRALTGIAVEQDKNTQEVFAQVKQIYKTPPIKDFGGFNFSQILPDPSKPSKRSFIEDLLFNKVTLADAGFIKQYGDCLGDIAARDLICAQKFNGLTVLPPLLTDEMIAQYTSALLAGTITSGWTFGAGAALQIPFAMQMAYRFNGIGVTQNVLYENQKLIANQFNSAIGKIQDSLSSTASALGKLQDVVNQNAQALNTLVKQLSSNFGAISSVLNDILSRLDPPEAEVQIDRLITGRLQSLQTYVTQQLIRAAEIRASANLAATKMSECVLGQSKRVDFCGKGYQLMSFPQSAPHGVVFLNVTYVPAQEKNFTTAPAICNDGKAHFPREGVFVSNGTNWFVTQRNFYEPQIITTDNTFVSGNCDVVIGIVNNTVYDPLQPELDSFKEELDKYFKNHTSPDVDLGDISGINASVVNIQKEIDRLNEVAKNLNESLIDLQELGKYEQYIKGGGGSDIDPYKEFGSSYQLLNFLPLDFFPDLNALVDTATALYEEELTGREHCSPHHTAIRQALVCWDELTKLIAWMSSNITSEQVRTIIVNHVNDTWGLKVRQSLWFHLSCLTFGQHTVQEFLVSFGVWIRTPAPYRPPNAPILSTLPEHTVIC

SEQ ID NO: 6963 - protein, 1365 aa, Artificial Sequence
  SARS-CoV-2/Iceland/319/2020__EPI_ISL_417648 spike protein (1-1211)(K986P_V987P_ H1048Q_H1064N_ H1083N_H1101N) WhcAg construct
MFVFLVLLPLVSSQCVNLTTRTQLPPAYTNSFTRGVYYPDKVFRSSVLHSTQDLFLPFFSNVTWFHAIHVSGTNGTKRFDNPVLPFNDGVYFASTEKSNIIRGWIFGTTLDSKTQSLLIVNNATNVVIKVCEFQFCNDPFLGVYYHKNNKSWMESEFRVYSSANNCTFEYVSQPFLIDLEGKQGNFKNLREFVFKNIDGYFKIYSKHTPINLVRDLPQGFSALEPLVDLPIGINITRFQTLLALHRSYLTPGDSSSGWTAGAAAYYVGYLQPRTFLLKYNENGTITDAVDCALDPLSETKCTLKSFTVEKGIYQTSNFRVQPTESIVRFPNITNLCPFGEVFNATRFASVYAWNRKRISNCVADYSVLYNSASFSTFKCYGVSPTKLNDLCFTNVYADSFVIRGDEVRQIAPGQTGKIADYNYKLPDDFTGCVIAWNSNNLDSKVGGNYNYLYRLFRKSNLKPFERDISTEIYQAGSTPCNGVEGFNCYFPLQSYGFQPTNGVGYQPYRVVVLSFELLHAPATVCGPKKSTNLVKNKCVNFNFNGLTGTGVLTESNKKFLPFQQFGRDIADTTDAVRDPQTLEILDITPCSFGGVSVITPGTNTSNQVAVLYQGVNCTEVPVAIHADQLTPTWRVYSTGSNVFQTRAGCLIGAEHVNNSYECDIPIGAGICASYQTQTNSPRRARSVASQSIIAYTMSLGAENSVAYSNNSIAIPTNFTISVTTEILPVSMTKTSVDCTMYICGDSTECSNLLLQYGSFCTQLNRALTGIAVEQDKNTQEVFAQVKQIYKTPPIKDFGGFNFSQILPDPSKPSKRSFIEDLLFNKVTLADAGFIKQYGDCLGDIAARDLICAQKFNGLTVLPPLLTDEMIAQYTSALLAGTITSGWTFGAGAALQIPFAMQMAYRFNGIGVTQNVLYENQKLIANQFNSAIGKIQDSLSSTASALGKLQDVVNQNAQALNTLVKQLSSNFGAISSVLNDILSRLDPPEAEVQIDRLITGRLQSLQTYVTQQLIRAAEIRASANLAATKMSECVLGQSKRVDFCGKGYQLMSFPQSAPHGVVFLNVTYVPAQEKNFTTAPAICNDGKAHFPREGVFVSNGTNWFVTQRNFYEPQIITTDNTFVSGNCDVVIGIVNNTVYDPLQPELDSFKEELDKYFKNHTSPDVDLGDISGINASVVNIQKEIDRLNEVAKNLNESLIDLQELGKYEQYIKGGGGSDIDPYKEFGSSYQLLNFLPLDFFPDLNALVDTATALYEEELTGREHCSPHHTAIRQALVCWDELTKLIAWMSSNITSEQVRTIIVNHVNDTWGLKVRQSLWFHLSCLTFGQHTVQEFLVSFGVWIRTPAPYRPPNAPILSTLPEHTVIC

SEQ ID NO: 6964 - protein, 1365 aa, Artificial Sequence
  SARS-CoV-2/Congo/94/2020__EPI_ISL_417947 spike protein (1-1211)(K986P_V987P_ H1048Q_H1064N_ H1083N_H1101N) WhcAg construct
MFVFLVLLPLVSSQCVNLTTRTQLPPAYTNSFTRGVYYPDKVFRSSVLHSTQDLFLPFFSNVTWFHAIHVSGTNGTKRFDNPVLPFNDGVYFASTEKSNIIRGWIFGTTLDSKTQSLLIVNNATNVVIKVCEFQFCNDPFLGVYYHKNNKSWMESEFRVYSSANNCTFEYVSQPFLMDLEGKQGNFKNLREFVFKNIDGYFKIYSKHTPINLVRDLPQGFSALEPLVDLPIGINITRFQTLLALHRSYLTPGDSSSGWTAGAAAYYVGYLQPRTFLLKYNENGTITDAVDCALDPLSETKCTLKSFTVEKGIYQTSNFRVQPTESIVRFPNITNLCPFGEVFNATRFASVYAWNRKRISNCVADYSVLYNSASFSTFKCYGVSPTKLNDLCFTNVYADSFVIRGDEVRQIAPGQTGKIADYNYKLPDDFTGCVIAWNSNNLDSKVGGNYNYLYRLFRKSNLKPFERDISTEIYQAGSTPCNGVEGFNCYFPLQSYGFQPTNGVGYQPYRVVVLSFELLHAPATVCGPKKSTNLVKNKCVNFNFNGLTGTGVLTESNKKFLPFQQFGRDIADTTDAVRDPQTLEILDITPCSFGGVSVITPGTNTSNQVAVLYQGVNCTEVPVAIHADQLTPTWRVYSTGSNVFQTRAGCLIGAEHVNNSYECDIPIGAGICASYQTQTNSPRRARSVASQSIIAYTMSLGAENSVAYSNNSIAIPTNFTISVTTEILPVSMTKTSVDCTMYICGDSTECSNLLLQYGSFCTQLNRALTGIAVEQDKNTQEVFAQVKQIYKTPPIKDFGGFNFSQILPDPSKPSKRSFIEDILFNKVTLADAGFIKQYGDCLGDIAARDLICAQKFNGLTVLPPLLTDEMIAQYTSALLAGTITSGWTFGAGAALQIPFAMQMAYRFNGIGVTQNVLYENQKLIANQFNSAIGKIQDSLSSTASALGKLQDVVNQNAQALNTLVKQLSSNFGAISSVLNDILSRLDPPEAEVQIDRLITGRLQSLQTYVTQQLIRAAEIRASANLAATKMSECVLGQSKRVDFCGKGYQLMSFPQSAPHGVVFLNVTYVPAQEKNFTTAPAICNDGKAHFPREGVFVSNGTNWFVTQRNFYEPQIITTDNTFVSGNCDVVIGIVNNTVYDPLQPELDSFKEELDKYFKNHTSPDVDLGDISGINASVVNIQKEIDRLNEVAKNLNESLIDLQELGKYEQYIKGGGGSDIDPYKEFGSSYQLLNFLPLDFFPDLNALVDTATALYEEELTGREHCSPHHTAIRQALVCWDELTKLIAWMSSNITSEQVRTIIVNHVNDTWGLKVRQSLWFHLSCLTFGQHTVQEFLVSFGVWIRTPAPYRPPNAPILSTLPEHTVIC

SEQ ID NO: 6965 - protein, 1365 aa, Artificial Sequence
  SARS-CoV-2/Congo/158/2020__EPI_ISL_417950 spike protein (1-1211)(K986P_V987P_ H1048Q_H1064N_ H1083N_H1101N) WhcAg construct
MFVFLVLLPLVSSQCVNLTTRTQLPPAYTNSFTRGVYYPDKVFRSSVLHSTQDLFLPFFSNVTWFHAIHVSGTNGTKRFDNPVLPFNDGVYFASTEKSNIIRGWIFGTTLDSKTQSLLIVNNATNVVIKVCEFQFCNDPFLGVYYHKNNKSWMESEFRVYSSANNCTFEYVSQPFLMDLEGKQGNFKNLREFVFKNIDGYFKIYSKHTPINLVRDLPQGFSALEPLVDLPIGINITRFQTLLALHRSYLTPGDSSSGWTAGAAAYYVGYLQPRTFLLKYNENGTITDAVDCALDPLSETKCTLKSFTVEKGIYQTSNFRVQPTESIVRFPNITNLCPFGEVFNATRFASVYAWNRKRISNCVADYSVLYNSASFSTFKCYGVSPTKLNDLCFTNVYADSFVIRGDEVRQIAPGQTGKIADYNYKLPDDFTGCVIAWNSNNLDSKVGGNYNYLYRLFRKSNLKPFERDISTEIYQAGSTPCNGVEGFNCYFPLQSYGFQPTNGVGYQPYRVVVLSFELLHAPATVCGPKKSTNLVKNKCVNFNFNGLTGTGVLTESNKKFLPFQQFGRDIADTTDAVRDPQTLEILDITPCSFGGVSVITPGTNTSNQVAVLYQDVNCTEVPVAIHADQLTPTWRVYSTGSNVFQTRAGCLIGAEHVNNSYECDIPIGAGICASYQTQTNSPRRARSVASQSIIAYTMSLGAENSVAYSNNSIAIPTNFTISVTTEILPVSMTKTSVDCTMYICGDSTECSNLLLQYGSFCTQLNRALTGIAVEQDKNTQEVFAQVKQIYKTPPIKDFGGFNFSQILPDPSKPSKRSFIEDLLFNKVTLADAGFIKQYGDCLGDIAARDLICAQKFNGLTVLPPLLTDEMIAQYTSALLAGTITSGWTFGAGAALQIPFAMQMAYRFNGIGVTQNVLYENQKLIANQFNSAIGKIQDSLSSTASALGKLQDVVNQNAQALNTLVKQLSSNFGAISSVLNDILSRLDPPEAEVQIDRLITGRLQSLQTYVTQQLIRAAEIRASANLAATKMSECVLGQSKRVDFCGKGYQLMSFPQSAPHGVVFLNVTYVPAQEKNFTTAPAICNDGKAHFPREGVFVSNGTNWFVTQRNFYEPQIITTDNTFLSGNCDVVIGIVNNTVYDPLQPELDSFKEELDKYFKNHTSPDVDLGDISGINASVVNIQKEIDRLNEVAKNLNESLIDLQELGKYEQYIKGGGGSDIDPYKEFGSSYQLLNFLPLDFFPDLNALVDTATALYEEELTGREHCSPHHTAIRQALVCWDELTKLIAWMSSNITSEQVRTIIVNHVNDTWGLKVRQSLWFHLSCLTFGQHTVQEFLVSFGVWIRTPAPYRPPNAPILSTLPEHTVIC

SEQ ID NO: 6966 - protein, 1365 aa, Artificial Sequence
  SARS-CoV-2/USA/UT-00034/2020__EPI_ISL_417977 spike protein (1-1211)(K986P_V987P_ H1048Q_H1064N_ H1083N_H1101N) WhcAg construct
MFVFLVLLPLVSSQCVNLTTRTQLPPAYTNSFTRGVYYPDKVFRSSVLHSTQDLFLPFFSNVTWFHAIHVSGTNGTKRFDNPVLPFNDGVYFASTEKSNIIRGWIFGTTLDSKTQSLLIVNNATNVVIKVCEFQFCNDPFLGVYYYKNNKSWMESEFRVYSSANNCTFEYVSQPFLMDLEGKQGNFKNLREFVFKNIDGYFKIYSKHTPINLVRDLPQGFSALEPLVDLPIGINITRFQTLLALHRSYLTPGDSSSGWTAGAAAYYVGYLQPRTFLLKYNENGTITDAVDCALDPLSETKCTLKSFTVEKGIYQTSNFRVQPTESIVRFPNITNLCPFGEVFNATRFASVYAWNRKRISNCVADYSVLYNSASFSTFKCYGVSPTKLNDLCFTNVYADSFVIRGDEVRQIAPGQTGKIADYNYKLPDDFTGCVIAWNSNNLDSKVGGNYNYLYRLFRKSNLKPFERDISTEIYQAGSTPCNGVEGFNCYFPLQSYGFQPTNGVGYQPYRVVVLSFELLHAPATVCGPKKSTNLVKNKCVNFNFNGLTGTGVLTESNKKFLPFQQFGRDIADTTDAVRDPQTLEILDITPCSFGGVSVITPGTNTSNQVAVLYQGVNCTEVPVAIHADQLTPTWRVYSTGSNVFQTRAGCLIGAEHVNNSYECDIPIGAGICASYQTQTNSPRRARSVASQSIIAYTMSLGAENSVAYSNNSIAIPTNFTISVTTEILPVSMTKTSVDCTMYICGDSTECSNLLLQYGSFCTQLNRALTGIAVEQDKNTQEVFAQVKQIYKTPPIKDFGGFNFSQILPDPSKPSKRSFIEDLLFNKVTLADAGFIKQYGDCLGDIAARDLICAQKFNGLTVLPPLLTDEMIAQYTSALLAGTITSGWTFGAGAALQIPFAMQMAYRFNGIGVTQNVLYENQKLIANQFNSAIGKIQDSLSSTASALGKLQDVVNQNAQALNTLVKQLSSNFGAISSVLNDILSRLDPPEAEVQIDRLITGRLQSLQTYVTQQLIRAAEIRASANLAATKMSECVLGQSKRVDFCGKGYQLMSFPQSAPHGVVFLNVTYVPAQEKNFTTAPAICNDGKAHFPREGVFVSNGTNWFVTQRNFYEPQIITTDNTFVSGNCDVVIGIVNNTVYDPLQPELDSFKEELDKYFKNHTSPDVDLGDISGINASVVNIQKEIDRLNEVAKNLNESLIDLQELGKYEQYIKGGGGSDIDPYKEFGSSYQLLNFLPLDFFPDLNALVDTATALYEEELTGREHCSPHHTAIRQALVCWDELTKLIAWMSSNITSEQVRTIIVNHVNDTWGLKVRQSLWFHLSCLTFGQHTVQEFLVSFGVWIRTPAPYRPPNAPILSTLPEHTVIC

SEQ ID NO: 6967 - protein, 1365 aa, Artificial Sequence
  SARS-CoV-2/USA/UT-00033/2020__EPI_ISL_417976 spike protein (1-1211)(K986P_V987P_ H1048Q_H1064N_ H1083N_H1101N) WhcAg construct
MFVFLVLLPLVSSQCVNLTTRTQLPPAYTNSFTRGVYYPDKVFRSSVLHSTQDLFLPFFSNVTWFHAIHVSGTNGTKRFDNPVLPFNDGVYFASTEKSNIIRGWIFGTTLDSKTQSLLIVNNATNVVIKVCEFQFCNDPFLGVYYHKNNKSWMESEFRVYSSANNCTFEYVSQPFLMDLEGKQGNFKNLREFVFKNIDGYFKIYSKHTPINLVRDLPQGFSALEPLVDLPIGINITRFQTLLALHRSYLTPGDSSSGLTAGAAAYYVGYLQPRTFLLKYNENGTITDAVDCALDPLSETKCTLKSFTVEKGIYQTSNFRVQPTESIVRFPNITNLCPFGEVFNATRFASVYAWNRKRISNCVADYSVLYNSASFSTFKCYGVSPTKLNDLCFTNVYADSFVIRGDEVRQIAPGQTGKIADYNYKLPDDFTGCVIAWNSNNLDSKVGGNYNYLYRLFRKSNLKPFERDISTEIYQAGSTPCNGVEGFNCYFPLQSYGFQPTNGVGYQPYRVVVLSFELLHAPATVCGPKKSTNLVKNKCVNFNFNGLTGTGVLTESNKKFLPFQQFGRDIADTTDAVRDPQTLEILDITPCSFGGVSVITPGTNTSNQVAVLYQGVNCTEVPVAIHADQLTPTWRVYSTGSNVFQTRAGCLIGAEHVNNSYECDIPIGAGICASYQTQTNSPRRARSVASQSIIAYTMSLGAENSVAYSNNSIAIPTNFTISVTTEILPVSMTKTSVDCTMYICGDSTECSNLLLQYGSFCTQLNRALTGIAVEQDKNTQEVFAQVKQIYKTPPIKDFGGFNFSQILPDPSKPSKRSFIEDLLFNKVTLADAGFIKQYGDCLGDIAARDLICAQKFNGLTVLPPLLTDEMIAQYTSALLAGTITSGWTFGAGAALQIPFAMQMAYRFNGIGVTQNVLYENQKLIANQFNSAIGKIQDSLSSTASALGKLQDVVNQNAQALNTLVKQLSSNFGAISSVLNDILSRLDPPEAEVQIDRLITGRLQSLQTYVTQQLIRAAEIRASANLAATKMSECVLGQSKRVDFCGKGYQLMSFPQSAPHGVVFLNVTYVPAQEKNFTTAPAICNDGKAHFPREGVFVSNGTNWFVTQRNFYEPQIITTDNTFVSGNCDVVIGIVNNTVYDPLQPELDSFKEELDKYFKNHTSPDVDLGDISGINASVVNIQKEIDRLNEVAKNLNESLIDLQELGKYEQYIKGGGGSDIDPYKEFGSSYQLLNFLPLDFFPDLNALVDTATALYEEELTGREHCSPHHTAIRQALVCWDELTKLIAWMSSNITSEQVRTIIVNHVNDTWGLKVRQSLWFHLSCLTFGQHTVQEFLVSFGVWIRTPAPYRPPNAPILSTLPEHTVIC

SEQ ID NO: 6968 - protein, 1365 aa, Artificial Sequence
  SARS-CoV-2/USA/WI-13/2020__EPI_ISL_417516 spike protein (1-1211)(K986P_V987P_ H1048Q_H1064N_ H1083N_H1101N) WhcAg construct
MFVFLVLLPLVSSQCVNLTTRTQLPPAYTNSFTRGVYYPDKVFRSSVLHSTQDLFLPFFSNVTWFHAIHVSGTNGTKRFDNPVLPFNDGVYFASTEKSNIIRGWIFGTTLDSKTQSLLIVNNATNVVIKVCEFQFCNDPFLGVYYHKNNKSWMESEFRVYSSANNCTFEYVSQPFLMDLEGKQGNFKNLREFVFKNIDGYFKIYSKHTPINLVRDLPQGFSALEPLVDLPIGINITRFQTLLALHRSYLTPGDSSSGWTAGAAAYYVGYLQPRTFLLKYNENGTITDAVDCALDPLSETKCTLKSFTVEKGIYQTSNFRVLPTESIVRFPNITNLCPFGEVFNATRFASVYAWNRKRISNCVADYSVLYNSASFSTFKCYGVSPTKLNDLCFTNVYADSFVIRGDEVRQIAPGQTGKIADYNYKLPDDFTGCVIAWNSNNLDSKVGGNYNYLYRLFRKSNLKPFERDISTEIYQAGSTPCNGVEGFNCYFPLQSYGFQPTNGVGYQPYRVVVLSFELLHAPATVCGPKKSTNLVKNKCVNFNFNGLTGTGVLTESNKKFLPFQQFGRDIADTTDAVRDPQTLEILDITPCSFGGVSVITPGTNTSNQVAVLYQGVNCTEVPVAIHADQLTPTWRVYSTGSNVFQTRAGCLIGAEHVNNSYECDIPIGAGICASYQTQTNSPRRARSVASQSIIAYTMSLGAENSVAYSNNSIAIPTNFTISVTTEILPVSMTKTSVDCTMYICGDSTECSNLLLQYGSFCTQLNRALTGIAVEQDKNTQEVFAQVKQIYKTPPIKDFGGFNFSQILPDPSKPSKRSFIEDLLFNKVTLADAGFIKQYGDCLGDIAARDLICAQKFNGLTVLPPLLTDEMIAQYTSALLAGTITSGWTFGAGAALQIPFAMQMAYRFNGIGVTQNVLYENQKLIANQFNSAIGKIQDSLSSTASALGKLQDVVNQNAQALNTLVKQLSSNFGAISSVLNDILSRLDPPEAEVQIDRLITGRLQSLQTYVTQQLIRAAEIRASANLAATKMSECVLGQSKRVDFCGKGYQLMSFPQSAPHGVVFLNVTYVPAQEKNFTTAPAICNDGKAHFPREGVFVSNGTNWFVTQRNFYEPQIITTDNTFVSGNCDVVIGIVNNTVYDPLQPELDSFKEELDKYFKNHTSPDVDLGDISGINASVVNIQKEIDRLNEVAKNLNESLIDLQELGKYEQYIKGGGGSDIDPYKEFGSSYQLLNFLPLDFFPDLNALVDTATALYEEELTGREHCSPHHTAIRQALVCWDELTKLIAWMSSNITSEQVRTIIVNHVNDTWGLKVRQSLWFHLSCLTFGQHTVQEFLVSFGVWIRTPAPYRPPNAPILSTLPEHTVIC

SEQ ID NO: 6969 - protein, 1364 aa, Artificial Sequence
  SARS-CoV-2/India/1-27/2020__EPI_ISL_413522 spike protein (1-1210)(K985P_V986P_ H1047Q_H1063N_ H1082N_H1100N) WhcAg construct
MFVFLVLLPLVSSQCVNLTTRTQLPPAYTNSFTRGVYYPDKVFRSSVLHSTQDLFLPFFSNVTWFHAIHVSGTNGTKRFDNPVLPFNDGVYFASTEKSNIIRGWIFGTTLDSKTQSLLIVNNATNVVIKVCEFQFCNDPFLGVYHKNNKSWMESEFRVYSSANNCTFEYVSQPFLMDLEGKQGNFKNLREFVFKNIDGYFKIYSKHTPINLVRDLPQGFSALEPLVDLPIGINITRFQTLLALHRSYLTPGDSSSGWTAGAAAYYVGYLQPRTFLLKYNENGTITDAVDCALDPLSETKCTLKSFTVEKGIYQTSNFRVQPTESIVRFPNITNLCPFGEVFNATRFASVYAWNRKRISNCVADYSVLYNSASFSTFKCYGVSPTKLNDLCFTNVYADSFVIRGDEVIQIAPGQTGKIADYNYKLPDDFTGCVIAWNSNNLDSKVGGNYNYLYRLFRKSNLKPFERDISTEIYQAGSTPCNGVEGFNCYFPLQSYGFQPTNGVGYQPYRVVVLSFELLHAPATVCGPKKSTNLVKNKCVNFNFNGLTGTGVLTESNKKFLPFQQFGRDIADTTDAVRDPQTLEILDITPCSFGGVSVITPGTNTSNQVAVLYQDVNCTEVPVAIHADQLTPTWRVYSTGSNVFQTRAGCLIGAEHVNNSYECDIPIGAGICASYQTQTNSPRRARSVASQSIIAYTMSLGAENSVAYSNNSIAIPTNFTISVTTEILPVSMTKTSVDCTMYICGDSTECSNLLLQYGSFCTQLNRALTGIAVEQDKNTQEVFAQVKQIYKTPPIKDFGGFNFSQILPDPSKPSKRSFIEDLLFNKVTLADAGFIKQYGDCLGDIAARDLICAQKFNGLTVLPPLLTDEMIAQYTSALLAGTITSGWTFGAGAALQIPFAMQMAYRFNGIGVTQNVLYENQKLIANQFNSAIGKIQDSLSSTASALGKLQDVVNQNAQALNTLVKQLSSNFGAISSVLNDILSRLDPPEAEVQIDRLITGRLQSLQTYVTQQLIRAAEIRASANLAATKMSECVLGQSKRVDFCGKGYQLMSFPQSAPHGVVFLNVTYVPAQEKNFTTAPAICNDGKAHFPREGVFVSNGTNWFVTQRNFYEPQIITTDNTFVSGNCDVVIGIVNNTVYDPLQPELDSFKEELDKYFKNHTSPDVDLGDISGINASVVNIQKEIDRLNEVAKNLNESLIDLQELGKYEQYIKGGGGSDIDPYKEFGSSYQLLNFLPLDFFPDLNALVDTATALYEEELTGREHCSPHHTAIRQALVCWDELTKLIAWMSSNITSEQVRTIIVNHVNDTWGLKVRQSLWFHLSCLTFGQHTVQEFLVSFGVWIRTPAPYRPPNAPILSTLPEHTVIC

SEQ ID NO: 6970 - protein, 1359 aa, Artificial Sequence
  SARS-CoV-2/pangolin/Guangxi/P4L/2017__EPI_ISL_410538 spike protein (1-1205)(K980P_V981P_ H1042Q_H1058N_ H1077N_H1095N) WhcAg construct
MFVFLFVLPLVSSQCVNLTTRTGIPPGYTNSSTRGVYYPDKVFRSSILHLTQDLFLPFFSNVTWFNTINYQGGFKKFDNPVLPFNDGVYFASTEKSNIIRGWIFGTTLDARTQSLLIVNNATNVVIKVCEFQFCTDPFLGVYYHNNNKTWVENEFRVYSSANNCTFEYISQPFLMDLEGKQGNFKNLREFVFKNVDGYFKIYSKHTPIDLVRDLPRGFAALEPLVDLPIGINITRFQTLLALHRSYLTPGNLESGWTTGAAAYYVGYLQQRTFLLSYNQNGTITDAVDCSLDPLSETKCTLKSLTVEKGIYQTSNFRVQPTISIVRFPNITNLCPFGEVFNASKFASVYAWNRKRISNCVADYSVLYNSTSFSTFKCYGVSPTKLNDLCFTNVYADSFVVKGDEVRQIAPGQTGVIADYNYKLPDDFTGCVIAWNSVKQDALTGGNYGYLYRLFRKSKLKPFERDISTEIYQAGSTPCNGQVGLNCYYPLERYGFHPTTGVNYQPFRVVVLSFELLNGPATVCGPKLSTTLVKDKCVNFNFNGLTGTGVLTTSKKQFLPFQQFGRDISDTTDAVRDPQTLEILDITPCSFGGVSVITPGTNTSNQVAVLYQDVNCTEVPMAIHAEQLTPAWRVYSAGANVFQTRAGCLVGAEHVNNSYECDIPVGAGICASYHSMSSLRSVNQRSIIAYTMSLGAENSVAYSNNSIAIPTNFTISVTTEILPVSMTKTSVDCTMYICGDSIECSNLLLQYGSFCTQLNRALTGIAVEQDKNTQEVFAQVKQIYKTPPIKDFGGFNFSQILPDPSKPSKRSFIEDLLFNKVTLADAGFIKQYGDCLGDIAARDLICAQKFNGLTVLPPLLTDEMIAQYTSALLAGTITSGWTFGAGAALQIPFAMQMAYRFNGIGVTQNVLYENQKLIANQFNSAIGKIQDSLSSTASALGKLQDVVNQNAQALNTLVKQLSSNFGAISSVLNDILSRLDPPEAEVQIDRLITGRLQSLQTYVTQQLIRAAEIRASANLAATKMSECVLGQSKRVDFCGKGYQLMSFPQSAPHGVVFLNVTYVPAQEKNFTTAPAICNEGKAHFPREGVFVSNGTNWFITQRNFYEPQIITTDNTFVSGSCDVVIGIVNNTVYDPLQPELDSFKEELDKYFKNHTSPDVDLGDISGINASVVNIQKEIDRLNEVAKNLNESPIDLQELGKYEQYIKGGGGSDIDPYKEFGSSYQLLNFLPLDFFPDLNALVDTATALYEEELTGREHCSPHHTAIRQALVCWDELTKLIAWMSSNITSEQVRTIIVNHVNDTWGLKVRQSLWFHLSCLTFGQHTVQEFLVSFGVWIRTPAPYRPPNAPILSTLPEHTVIC

SEQ ID NO: 6971 - protein, 1359 aa, Artificial Sequence
  SARS-CoV-2/pangolin/Guangxi/P5L/2017__EPI_ISL_410540 spike protein (1-1205)(K980P_V981P_ H1042Q_H1058N_ H1077N_H1095N) WhcAg construct
MFVFLFVLPLVSSQCVNLTTRTGIPPGYTNSSTRGVYYPDKVFRSSILHLTQDLFLPFFSNVTWFNTINYQGGFKKFDNPVLPFNDGVYFASTEKSNIIRGWIFGTTLDARTQSLLIVNNATNVVIKVCEFQFCTDPFLGVYYHNNNKTWVENEFRVYSSANNCTFEYISQPFLMDLEGKQGNFKNLREFVFKNVDGYFKIYSKHTPIDLVRDLPRGFAALEPLVDLPIGINITRFQTLLALHRSYLTPGKLESGWTTGAAAYYVGYLQQRTFLLSYNQNGTITDAVDCSLDPLSETKCTLKSLTVEKGIYQTSNFRVQPTISIVRFPNITNLCPFGEVFNASKFASVYAWNRKRISNCVADYSVLYNSTSFSTFKCYGVSPTKLNDLCFTNVYADSFVVKGDEVRQIAPGQTGVIADYNYKLPDDFTGCVIAWNSVKQDALTGGNYGYLYRLFRKSKLKPFERDISTEIYQAGSTPCNGQVGLNCYYPLERYGFHPTTGVNYQPFRVVVLSFELLNGPATVCGPKLSTTLVKDKCVNFNFNGLTGTGVLTTSKKQFLPFQQFGRDISDTTDAVRDPQTLEILDITPCSFGGVSVITPGTNTSNQVAVLYQDVNCTEVPMAIHAEQLTPAWRVYSAGANVFQTRAGCLVGAEHVNNSYECDIPVGAGICASYHSMSSFRSVNQRSIIAYTMSLGAENSVAYSNNSIAIPTNFTISVTTEILPVSMTKTSVDCTMYICGDSIECSNLLLQYGSFCTQLNRALTGIAVEQDKNTQEVFAQVKQIYKTPPIKDFGGFNFSQILPDPSKPSKRSFIEDLLFNKVTLADAGFIKQYGDCLGDIAARDLICAQKFNGLTVLPPLLTDEMIAQYTSALLAGTITSGWTFGAGAALQIPFAMQMAYRFNGIGVTQNVLYENQKLIANQFNSAIGKIQDSLSSTASALGKLQDVVNQNAQALNTLVKQLSSNFGAISSVLNDILSRLDPPEAEVQIDRLITGRLQSLQTYVTQQLIRAAEIRASANLAATKMSECVLGQSKRVDFCGKGYQLMSFPQSAPHGVVFLNVTYVPAQEKNFTTAPAICNEGKAHFPREGVFVSNGTNWFITQRNFYEPQIITTDNTFVSGSCDVVIGIVNNTVYDPLQPELDSFKEELDKYFKNHTSPDVDLGDISGINASVVNIQKEIDRLNEVAKNLNESLIDLQELGKYEQYIKGGGGSDIDPYKEFGSSYQLLNFLPLDFFPDLNALVDTATALYEEELTGREHCSPHHTAIRQALVCWDELTKLIAWMSSNITSEQVRTIIVNHVNDTWGLKVRQSLWFHLSCLTFGQHTVQEFLVSFGVWIRTPAPYRPPNAPILSTLPEHTVIC

SEQ ID NO: 6972 - protein, 1359 aa, Artificial Sequence
  SARS-CoV-2/pangolin/Guangxi/P5E/2017__EPI_ISL_410541 spike protein (1-1205)(K980P_V981P_ H1042Q_H1058N_ H1077N_H1095N) WhcAg construct
MFVFLFVLPLVSSQCVNLTTRTGIPPGYTNSSTRGVYYPDKVFRSSILHLTQDLFLPFFSNVTWFNTITYQGGSKKFDNPVLPFNDGVYFASTEKSNIIRGWIFGTTLDARTQSLLIVNNATNVVIKVCEFQFCTDPFLGVYYHNNNKTWVENEFRVYSSANNCTFEYISQPFLMDLEGKQGNFKNLREFVFKNVDGYFKIYSKHTPIDLVRDLPRGFAALEPLVDLPIGINITRFQTLLALHRSYLTPGKLESGWTTGAAAYYVGYLQQRTFLLSYNQNGTITDAVDCSLDPLSETKCTLKSLTVEKGIYQTSNFRVQPTISIVRFPNITNLCPFGEVFNASKFASVYAWNRKRISNCVADYSVLYNSTSFSTFKCYGVSPTKLNDLCFTNVYADSFVVKGDEVRQIAPGQTGVIADYNYKLPDDFTGCVIAWNSVKQDALTGDNYGYLYRLFRKSKLKPFERDISTEIYQAGSTPCNGQVGLNCYYPLERYGFHPTTGVNYQPFRVVVLSFELLNGPATVCGPKLSTTLVKDKCVNFNFNGLTGTGVLTTSKKQFLPFQQFGRDISDTTDAVRDPQTLEILDITPCSFGGVSVITPGTNTSNQVAVLYQDVNCTEVPMAIHAEQLTPAWRVYSAGANVFQTRAGCLVGAEHVNNSYECDIPVGAGICASYHSMSSFRSVNQRSIIAYTMSLGAENSVAYSNNSIAIPTNFTISVTTEILPVSMTKTSVDCTMYICGDSIECSNLLLQYGSFCTQLNRALTGIAVEQDKNTQEVFAQVKQIYKTPPIKDFGGFNFSQILPDPSKPSKRSFIEDLLFNKVTLADAGFIKQYGDCLGDIAARDLICAQKFNGLTVLPPLLTDEMIAQYTSALLAGTITSGWTFGAGAALQIPFAMQMAYRFNGIGVTQNVLYENQKLIANQFNSAIGKIQDSLSSTASALGKLQDVVNQNAQALNTLVKQLSSNFGAISSVLNDILSRLDPPEAEVQIDRLITGRLQSLQTYVTQQLIRAAEIRASANLAATKMSECVLGQSKRVDFCGKGYQLMSFPQSAPHGVVFLNVTYVPAQEKNFTTAPAICNEGKAHFPREGVFVSNGTNWFITQRNFYEPQIITTDNTFVSGSCDVVIGIVNNTVYDPLQPELDSFKEELDKYFKNHTSPDVDLGDISGINASVVNIQKEIDRLNEVAKNLNESLIDLQELGKYEQYIKGGGGSDIDPYKEFGSSYQLLNFLPLDFFPDLNALVDTATALYEEELTGREHCSPHHTAIRQALVCWDELTKLIAWMSSNITSEQVRTIIVNHVNDTWGLKVRQSLWFHLSCLTFGQHTVQEFLVSFGVWIRTPAPYRPPNAPILSTLPEHTVIC

SEQ ID NO: 6973 - protein, 1357 aa, Artificial Sequence
  SARS-CoV-2/pangolin/Guangxi/P1E/2017__EPI_ISL_410539 spike protein (1-1203)(K978P_V979P_ H1040Q_H1056N_ H1075N_H1093N) WhcAg construct
MFVFLFVLPLVSSQCVNLTTRTGIQPGYTNSSTRGVYYPDKVFRSSILHLTQDLFLPFFSNVTWFNTINYQGGFKKFDNPVLPFNDGVYFASTEKSNIIRGWIFGTTLDARTQSLLIVNNATNVVIKVCEFQFCTDPFLGVYYHNNNKTWVENEFRVYSSANNCTFEYISQPFLMDLEGKQGNFKNLREFVFKNVDGYFKIYSKHTPIDLVRDLPRGFAALEPLVDLPIGINITRFQTLLALHRSYLTPGKLESGWTTGAAAYYVGYLQQRTFLLSYNQNGTITDAVDCSLDPLSETKCTLKSLTVEKGIYQTSNFRVQPTISIVRFPNITNLCPFGEVFNASKFASVYAWNRKRISNCVADYSVLYNSTSFSTFKCYGVSPTKLNDLCFTNVYADSFVVKGDEVRQIAPGQTGVIADYNYKLPDDFTGCVIAWNSVKQDALTGGNYLYRLFRKSKLKPFERDISTEIYQAGSTPCNGQVGLNCYYPLERYGFHPTTGVNYQPFRVVVLSFELLNGPATVCGPKLSTTLVKDKCVNFNFNGLTGTGVLTTSKKQFLPFQQFGRDISDTTDAVRDPQTLEILDITPCSFGGVSVITPGTNTSNQVAVLYQDVNCTEVPMAIHAEQLTPAWRVYSAGANVFQTRAGCLVGAEHVNNSYECDIPVGAGICASYHSMSSLRSVNQRSIIAYTMSLGAENSVAYSNNSIAIPTNFTISVTTEILPVSMTKTSVDCTMYICGDSIECSNLLLQYGSFCTQLNRALTGIAVEQDKNTQEVFAQVKQIYKTPPIKDFGGFNFSQILPDPSKPSKRSFIEDLLFNKVTLADAGFIKQYGDCLGDIAARDLICAQKFNGLTVLPPLLTDEMIAQYTSALLAGTITSGWTFGAGAALQIPFAMQMAYRFNGIGVTQNVLYENQKLIANQFNSAIGKIQDSLSSTASALGKLQDVVNQNAQALNTLVKQLSSNFGAISSVLNDILSRLDPPEAEVQIDRLITGRLQSLQTYVTQQLIRAAEIRASANLAATKMSECVLGQSKRVDFCGKGYQLMSFPQSAPHGVVFLNVTYVPAQEKNFTTAPAICNEGKAHFPREGVFVSNGTNWFITQRNFYEPQIITTDNTFVSGSCDVVIGIVNNTVYDPLQPELDSFKEELDKYFKNHTSPDVDLGDISGINASVVNIQKEIDRLNEVAKNLNESLIDLQELGKYEQYIKGGGGSDIDPYKEFGSSYQLLNFLPLDFFPDLNALVDTATALYEEELTGREHCSPHHTAIRQALVCWDELTKLIAWMSSNITSEQVRTIIVNHVNDTWGLKVRQSLWFHLSCLTFGQHTVQEFLVSFGVWIRTPAPYRPPNAPILSTLPEHTVIC

SEQ ID NO: 6974 - protein, 1365 aa, Artificial Sequence
  SARS-CoV-2/Wuhan/WIV05/2019__EPI_ISL_402128 spike protein (1-1211)(I712C_T1077C) WhcAg construct
MFVFLVLLPLVSSQCVNLTTRTQLPPAYTNSFTRGVYYPDKVFRSSVLHSTQDLFLPFFSNVTWFHAIHVSGTNGTKRFDNPVLPFNDGVYFASTEKSNIIRGWIFGTTLDSKTQSLLIVNNATNVVIKVCEFQFCNDPFLGVYYHKNNKSWMESEFRVYSSANNCTFEYVSQPFLMDLEGKQGNFKNLREFVFKNIDGYFKIYSKHTPINLVRDLPQGFSALEPLVDLPIGINITRFQTLLALHRSYLTPGDSSSGWTAGAAAYYVGYLQPRTFLLKYNENGTITDAVDCALDPLSETKCTLKSFTVEKGIYQTSNFRVQPTESIVRFPNITNLCPFGEVFNATRFASVYAWNRKRISNCVADYSVLYNSASFSTFKCYGVSPTKLNDLCFTNVYADSFVIRGDEVRQIAPGQTGKIADYNYKLPDDFTGCVIAWNSNNLDSKVGGNYNYLYRLFRKSNLKPFERDISTEIYQAGSTPCNGVEGFNCYFPLQSYGFQPTNGVGYQPYRVVVLSFELLHAPATVCGPKKSTNLVKNKCVNFNFNGLTGTGVLTESNKKFLPFQQFGRDIADTTDAVRDPQTLEILDITPCSFGGVSVITPGTNTSNQVAVLYQDVNCTEVPVAIHADQLTPTWRVYSTGSNVFQTRAGCLIGAEHVNNSYECDIPIGAGICASYQTQTNSPRRARSVASQSIIAYTMSLGAENSVAYSNNSCAIPTNFTISVTTEILPVSMTKTSVDCTMYICGDSTECSNLLLQYGSFCTQLNRALTGIAVEQDKNTQEVFAQVKQIYKTPPIKDFGGFNFSQILPDPSKPSKRSFIEDLLFNKVTLADAGFIKQYGDCLGDIAARDLICAQKFNGLTVLPPLLTDEMIAQYTSALLAGTITSGWTFGAGAALQIPFAMQMAYRFNGIGVTQNVLYENQKLIANQFNSAIGKIQDSLSSTASALGKLQDVVNQNAQALNTLVKQLSSNFGAISSVLNDILSRLDKVEAEVQIDRLITGRLQSLQTYVTQQLIRAAEIRASANLAATKMSECVLGQSKRVDFCGKGYHLMSFPQSAPHGVVFLHVTYVPAQEKNFTCAPAICHDGKAHFPREGVFVSNGTHWFVTQRNFYEPQIITTDNTFVSGNCDVVIGIVNNTVYDPLQPELDSFKEELDKYFKNHTSPDVDLGDISGINASVVNIQKEIDRLNEVAKNLNESLIDLQELGKYEQYIKGGGGSDIDPYKEFGSSYQLLNFLPLDFFPDLNALVDTATALYEEELTGREHCSPHHTAIRQALVCWDELTKLIAWMSSNITSEQVRTIIVNHVNDTWGLKVRQSLWFHLSCLTFGQHTVQEFLVSFGVWIRTPAPYRPPNAPILSTLPEHTVIC

SEQ ID NO: 6975 - protein, 1361 aa, Artificial Sequence
  SARS-CoV-2/bat/Yunnan/RaTG13/2013__EPI_ISL_402131 spike protein (1-1207)(I708C_T1073C) WhcAg construct
MFVFLVLLPLVSSQCVNLTTRTQLPPAYTNSSTRGVYYPDKVFRSSVLHLTQDLFLPFFSNVTWFHAIHVSGTNGIKRFDNPVLPFNDGVYFASTEKSNIIRGWIFGTTLDSKTQSLLIVNNATNVVIKVCEFQFCNDPFLGVYYHKNNKSWMESEFRVYSSANNCTFEYVSQPFLMDLEGKQGNFKNLREFVFKNIDGYFKIYSKHTPINLVRDLPPGFSALEPLVDLPIGINITRFQTLLALHRSYLTPGDSSSGWTAGAAAYYVGYLQPRTFLLKYNENGTITDAVDCALDPLSETKCTLKSFTVEKGIYQTSNFRVQPTDSIVRFPNITNLCPFGEVFNATTFASVYAWNRKRISNCVADYSVLYNSTSFSTFKCYGVSPTKLNDLCFTNVYADSFVITGDEVRQIAPGQTGKIADYNYKLPDDFTGCVIAWNSKHIDAKEGGNFNYLYRLFRKANLKPFERDISTEIYQAGSKPCNGQTGLNCYYPLYRYGFYPTDGVGHQPYRVVVLSFELLNAPATVCGPKKSTNLVKNKCVNFNFNGLTGTGVLTESNKKFLPFQQFGRDIADTTDAVRDPQTLEILDITPCSFGGVSVITPGTNASNQVAVLYQDVNCTEVPVAIHADQLTPTWRVYSTGSNVFQTRAGCLIGAEHVNNSYECDIPIGAGICASYQTQTNSRSVASQSIIAYTMSLGAENSVAYSNNSCAIPTNFTISVTTEILPVSMTKTSVDCTMYICGDSTECSNLLLQYGSFCTQLNRALTGIAVEQDKNTQEVFAQVKQIYKTPPIKDFGGFNFSQILPDPSKPSKRSFIEDLLFNKVTLADAGFIKQYGDCLGDIAARDLICAQKFNGLTVLPPLLTDEMIAQYTSALLAGTITSGWTFGAGAALQIPFAMQMAYRFNGIGVTQNVLYENQKLIANQFNSAIGKIQDSLSSTASALGKLQDVVNQNAQALNTLVKQLSSNFGAISSVLNDILSRLDKVEAEVQIDRLITGRLQSLQTYVTQQLIRAAEIRASANLAATKMSECVLGQSKRVDFCGKGYHLMSFPQSAPHGVVFLHVTYVPAQEKNFTCAPAICHDGKAHFPREGVFVSNGTHWFVTQRNFYEPQIITTDNTFVSGSCDVVIGIVNNTVYDPLQPELDSFKEELDKYFKNHTSPDVDLGDISGINASVVNIQKEIDRLNEVAKNLNESLIDLQELGKYEQYIKGGGGSDIDPYKEFGSSYQLLNFLPLDFFPDLNALVDTATALYEEELTGREHCSPHHTAIRQALVCWDELTKLIAWMSSNITSEQVRTIIVNHVNDTWGLKVRQSLWFHLSCLTFGQHTVQEFLVSFGVWIRTPAPYRPPNAPILSTLPEHTVIC

SEQ ID NO: 6976 - protein, 1365 aa, Artificial Sequence
  SARS-CoV-2/Wuhan/HBCDC-HB-01/2019__EPI_ISL_402132 spike protein (1-1211)(I712C_T1077C) WhcAg construct
MFVFLVLLPLVSSQCVNLTTRTQLPPAYTNSITRGVYYPDKVFRSSVLHSTQDLFLPFFSNVTWFHAIHVSGTNGTKRFDNPVLPFNDGVYFASTEKSNIIRGWIFGTTLDSKTQSLLIVNNATNVVIKVCEFQFCNDPFLGVYYHKNNKSWMESEFRVYSSANNCTFEYVSQPFLMDLEGKQGNFKNLREFVFKNIDGYFKIYSKHTPINLVRDLPQGFSALEPLVDLPIGINITRFQTLLALHRSYLTPGDSSSGWTAGAAAYYVGYLQPRTFLLKYNENGTITDAVDCALDPLSETKCTLKSFTVEKGIYQTSNFRVQPTESIVRFPNITNLCPFGEVFNATRFASVYAWNRKRISNCVADYSVLYNSASFSTFKCYGVSPTKLNDLCFTNVYADSFVIRGDEVRQIAPGQTGKIADYNYKLPDDFTGCVIAWNSNNLDSKVGGNYNYLYRLFRKSNLKPFERDISTEIYQAGSTPCNGVEGFNCYFPLQSYGFQPTNGVGYQPYRVVVLSFELLHAPATVCGPKKSTNLVKNKCVNFNFNGLTGTGVLTESNKKFLPFQQFGRDIADTTDAVRDPQTLEILDITPCSFGGVSVITPGTNTSNQVAVLYQDVNCTEVPVAIHADQLTPTWRVYSTGSNVFQTRAGCLIGAEHVNNSYECDIPIGAGICASYQTQTNSPRRARSVASQSIIAYTMSLGAENSVAYSNNSCAIPTNFTISVTTEILPVSMTKTSVDCTMYICGDSTECSNLLLQYGSFCTQLNRALTGIAVEQDKNTQEVFAQVKQIYKTPPIKDFGGFNFSQILPDPSKPSKRSFIEDLLFNKVTLADAGFIKQYGDCLGDIAARDLICAQKFNGLTVLPPLLTDEMIAQYTSALLAGTITSGWTFGAGAALQIPFAMQMAYRFNGIGVTQNVLYENQKLIANQFNSAIGKIQDSLSSTASALGKLQDVVNQNAQALNTLVKQLSSNFGAISSVLNDILSRLDKVEAEVQIDRLITGRLQSLQTYVTQQLIRAAEIRASANLAATKMSECVLGQSKRVDFCGKGYHLMSFPQSAPHGVVFLHVTYVPAQEKNFTCAPAICHDGKAHFPREGVFVSNGTHWFVTQRNFYEPQIITTDNTFVSGNCDVVIGIVNNTVYDPLQPELDSFKEELDKYFKNHTSPDVDLGDISGINASVVNIQKEIDRLNEVAKNLNESLIDLQELGKYEQYIKGGGGSDIDPYKEFGSSYQLLNFLPLDFFPDLNALVDTATALYEEELTGREHCSPHHTAIRQALVCWDELTKLIAWMSSNITSEQVRTIIVNHVNDTWGLKVRQSLWFHLSCLTFGQHTVQEFLVSFGVWIRTPAPYRPPNAPILSTLPEHTVIC

SEQ ID NO: 6977 - protein, 1365 aa, Artificial Sequence
  SARS-CoV-2/Guangdong/20SF028/2020__EPI_ISL_403936 spike protein (1-1211)(I712C_T1077C) WhcAg construct
MFVFLVLLPLVSSQCVNLTTRTQLPPAYTNSFTRGVYYPDKVFRSSVLYSTQDLFLPFFSNVTWFHAIHVSGTNGTKRFDNPVLPFNDGVYFASTEKSNIIRGWIFGTTLDSKTQSLLIVNNATNVVIKVCEFQFCNDPFLGVYYHKNNKSWMESEFRVYSSANNCTFEYVSQPFLMDLEGKQGNFKNLREFVFKNIDGYFKIYSKHTPINLVRDLPQGFSALEPLVDLPIGINITRFQTLLALHRSYLTPGDSSSGWTAGAAAYYVGYLQPRTFLLKYNENGTITDAVDCALDPLSETKCTLKSFTVEKGIYQTSNFRVQPTESIVRFPNITNLCPFGEVFNATRFASVYAWNRKRISNCVADYSVLYNSASFSTFKCYGVSPTKLNDLCFTNVYADSFVIRGDEVRQIAPGQTGKIADYNYKLPDDFTGCVIAWNSNNLDSKVGGNYNYLYRLFRKSNLKPFERDISTEIYQAGSTPCNGVEGFNCYFPLQSYGFQPTNGVGYQPYRVVVLSFELLHAPATVCGPKKSTNLVKNKCVNFNFNGLTGTGVLTESNKKFLPFQQFGRDIADTTDAVRDPQTLEILDITPCSFGGVSVITPGTNTSNQVAVLYQDVNCTEVPVAIHADQLTPTWRVYSTGSNVFQTRAGCLIGAEHVNNSYECDIPIGAGICASYQTQTNSPRRARSVASQSIIAYTMSLGAENSVAYSNNSCAIPTNFTISVTTEILPVSMTKTSVDCTMYICGDSTECSNLLLQYGSFCTQLNRALTGIAVEQDKNTQEVFAQVKQIYKTPPIKDFGGFNFSQILPDPSKPSKRSFIEDLLFNKVTLADAGFIKQYGDCLGDIAARDLICAQKFNGLTVLPPLLTDEMIAQYTSALLAGTITSGWTFGAGAALQIPFAMQMAYRFNGIGVTQNVLYENQKLIANQFNSAIGKIQDSLSSTASALGKLQDVVNQNAQALNTLVKQLSSNFGAISSVLNDILSRLDKVEAEVQIDRLITGRLQSLQTYVTQQLIRAAEIRASANLAATKMSECVLGQSKRVDFCGKGYHLMSFPQSAPHGVVFLHVTYVPAQEKNFTCAPAICHDGKAHFPREGVFVSNGTHWFVTQRNFYEPQIITTDNTFVSGNCDVVIGIVNNTVYDPLQPELDSFKEELDKYFKNHTSPDVDLGDISGINASVVNIQKEIDRLNEVAKNLNESLIDLQELGKYEQYIKGGGGSDIDPYKEFGSSYQLLNFLPLDFFPDLNALVDTATALYEEELTGREHCSPHHTAIRQALVCWDELTKLIAWMSSNITSEQVRTIIVNHVNDTWGLKVRQSLWFHLSCLTFGQHTVQEFLVSFGVWIRTPAPYRPPNAPILSTLPEHTVIC

SEQ ID NO: 6978 - protein, 1365 aa, Artificial Sequence
  SARS-CoV-2/Shenzhen/SZTH-001/2020__EPI_ISL_406592 spike protein (1-1211)(I712C_T1077C) WhcAg construct
MFVFLVLLPLVSSQCVNLTTRTQLPPAYTNSFTRGVYYPDKVFRSSVLHSTQDLFLPFFSNVTWFHAIHVSGTNGTKRFDNPVLPFNDGVYFASTEKSNIIRGWIFGTTLDSKTQSLLIVNNATNVVIKVCEFQFCNDPFLGVYYHKNNKSWMESEFRVYSSANNCTFEYVSQPFLMDLEGKQGNFKNLREFVFKNIDGYFKIYSKHTPINLVRDLPQGFSALEPLVDLPIGINITRFQTLLALHRSYLTPGDSSSGWTAGAAAYYVGYLQPRTFLLKYNENGTITDAVDCALDPLSETKCTLKSFTVEKGIYQTSNFRVQPTESIVRFPNITNLCPFGEVFNATRFASVYAWNRKRISNCVADYSVLYNSASFSTFKCYGVSPTKLNDLCFTNVYADSFVIRGDEVRQIAPGQTGKIADYNYKLPDDFTGCVIAWNSNNLDSKVGGNYNYLYRLFRKSNLKPFERDISTEIYQAGSTPCNGVEGFNCYFPLQSYGFQPTNGVGYQPYRVVVLSFELLHAPATVCGPKKSTNLVKNKCVNFNFNGLTGTGVLTESNKKFLPFQQFGRDIADTTDAVRDPQTLEILDITPCSFGGVSVITPGTNTSNQVAVLYQDVNCTEVPVAIHADQLTPTWRVYSTGSNVFQTRAGCLIGAEHVNNSYECDIPIGAGICASYQTQTNSPRRARSVASQSIIAYTMSLGAENSVAYSNNSCAIPTNFTISVTTEILPVSMTKTSVDCTMYICGDSTECSNLLLQYGSFCTQLNRALTGIAVEQDKNTQEVFAQVKQIYKTPPIKDFGGFNFSQILPDPSKPSKRSFIEDLLFNKVTLADAGFIKQYGDCLGDIAARDLICAQKFNGLTVLPPLLTDEMIAQYTSALLAGTITSGWTFGAGAALQIPFAMQMAYRFNGIGVTQNVLYENQKLIANQFNSAIGKIQDSLSSTASALGKLQDVVNQNAQALNTLVKQLSSNFGAISSVLNDILSRLDKVEAEVQIDRLITGRLQSLQTYVTQQLIRAAEIRASANLAATKMSECVLGQSKRVDFCGKGYHLMSFPQSAPHGVVFLHVTYVPAQEKNFTCAPAICHDGKAHFPREGVFVSNGTHWFVTQRNFYEPQIITTDNTFVSGNCDVLIGIVNNTVYDPLQPELDSFKEELDKYFKNHTSPDVDLGDISGINASVVNIQKEIDRLNEVAKNLNESLIDLQELGKYEQYIKGGGGSDIDPYKEFGSSYQLLNFLPLDFFPDLNALVDTATALYEEELTGREHCSPHHTAIRQALVCWDELTKLIAWMSSNITSEQVRTIIVNHVNDTWGLKVRQSLWFHLSCLTFGQHTVQEFLVSFGVWIRTPAPYRPPNAPILSTLPEHTVIC

SEQ ID NO: 6979 - protein, 1365 aa, Artificial Sequence
  SARS-CoV-2/Shenzhen/SZTH-004/2020__EPI_ISL_406595 spike protein (1-1211)(I712C_T1077C) WhcAg construct
MFVFLVLLPLVSSQCVNLTTRTQLPPAYTNSFTRGVYYPDKVFRSSVLHSTQDLFLPFFSNVTWFHAIHVSGTNGTKRFDNPVLPFNDGVYFASTEKSNIIRGWIFGTTLDSKTQSLLIVNNATNVVIKVCEFQFCNDPFLGVYYHKNNKSWMESEFRVYSSANNCTFEYVSQPFLMDLEGKQGNFKNLREFVFKNIDGYFKIYSKHTPINLVRDLPQGFSALEPLVDLPIGINITRFQTLLALHRSYLTPGDSSSGWTAGAAAYYVGYLQPRTFLLKYNENGTITDAVDCALDPLSETKCTLKSFTVEKGIYQTSNFRVQPTESIVRFPNITNLCPFGEVFNATRFASVYAWDRKRISNCVAYYSVLYNSASFSTFKCYGVSPTKLNDLCFTNVYADSFVIRGDEVRQIAPGQTGKIADYNYKLPDDFTGCVIAWNSNNLDSKVGGNYNYLYRLFRKSNLKPFERDISTEIYQAGSTPCNGVEGFNCYFPLQSYGFQPTNGVGYQPYRVVVLSFELLHAPATVCGPKKSTNLVKNKCVNFNFNGLTGTGVLTESNKKFLPFQQFGRDIADTTDAVRDPQTLEILDITPCSFGGVSVITPGTNTSNQVAVLYQDVNCTEVPVAIHADQLTPTWRVYSTGSNVFQTRAGCLIGAEHVNNSYECDIPIGAGICASYQTQTNSPRRARSVASQSIIAYTMSLGAENSVAYSNNSCAIPTNFTISVTTEILPVSMTKTSVDCTMYICGDSTECSNLLLQYGSFCTQLNRALTGIAVEQDKNTQEVFAQVKQIYKTPPIKDFGGFNFSQILPDPSKPSKRSFIEDLLFNKVTLADAGFIKQYGDCLGDIAARDLICAQKFNGLTVLPPLLTDEMIAQYTSALLAGTITSGWTFGAGAALQIPFAMQMAYRFNGIGVTQNVLYENQKLIANQFNSAIGKIQDSLSSTASALGKLQDVVNQNAQALNTLVKQLSSNFGAISSVLNDILSRLDKVEAEVQIDRLITGRLQSLQTYVTQQLIRAAEIRASANLAATKMSECVLGQSKRVDFCGKGYHLMSFPQSAPHGVVFLHVTYVPAQEKNFTCAPAICHDGKAHFPREGVFVSNGTHWFVTQRNFYEPQIITTDNTFVSGNCDVVIGIVNNTVYDPLQPELDSFKEELDKYFKNHTSPDVDLGDISGINASVVNIQKEIDRLNEVAKNLNESLIDLQELGKYEQYIKGGGGSDIDPYKEFGSSYQLLNFLPLDFFPDLNALVDTATALYEEELTGREHCSPHHTAIRQALVCWDELTKLIAWMSSNITSEQVRTIIVNHVNDTWGLKVRQSLWFHLSCLTFGQHTVQEFLVSFGVWIRTPAPYRPPNAPILSTLPEHTVIC

SEQ ID NO: 6980 - protein, 1365 aa, Artificial Sequence
  SARS-CoV-2/France/IDF0372/2020__EPI_ISL_406596 spike protein (1-1211)(I712C_T1077C) WhcAg construct
MFVFLVLLPLVSSQCVNLTTRTQLPPAYTNSFTRGVYYPDKVFRSSVLHSTQDLFLPFFSNVTWFHAIHVSGTNGTKRFDNPVLPFNDGVYFASTEKSNIIRGWIFGTTLDSKTQSLLIVNNATNVVIKVCEFQFCNDPFLGVYYHKNNKSWMESEFRVYSSANNCTFEYVSQPFLMDLEGKQGNFKNLREFVFKNIDGYFKIYSKHTPINLVRDLPQGFSALEPLVDLPIGINITRFQTLLALHRSYLTPGDSSSGWTAGAAAYYVGYLQPRTFLLKYNENGTITDAVDCALDPLSETKCTLKSFTVEKGIYQTSNFRVQPTESIVRFPNITNLCPFGEVFNATRFASVYAWNRKRISNCVADYSFLYNSASFSTFKCYGVSPTKLNDLCFTNVYADSFVIRGDEVRQIAPGQTGKIADYNYKLPDDFTGCVIAWNSNNLDSKVGGNYNYLYRLFRKSNLKPFERDISTEIYQAGSTPCNGVEGFNCYFPLQSYGFQPTNGVGYQPYRVVVLSFELLHAPATVCGPKKSTNLVKNKCVNFNFNGLTGTGVLTESNKKFLPFQQFGRDIADTTDAVRDPQTLEILDITPCSFGGVSVITPGTNTSNQVAVLYQDVNCTEVPVAIHADQLTPTWRVYSTGSNVFQTRAGCLIGAEHVNNSYECDIPIGAGICASYQTQTNSPRRARSVASQSIIAYTMSLGAENSVAYSNNSCAIPTNFTISVTTEILPVSMTKTSVDCTMYICGDSTECSNLLLQYGSFCTQLNRALTGIAVEQDKNTQEVFAQVKQIYKTPPIKDFGGFNFSQILPDPSKPSKRSFIEDLLFNKVTLADAGFIKQYGDCLGDIAARDLICAQKFNGLTVLPPLLTDEMIAQYTSALLAGTITSGWTFGAGAALQIPFAMQMAYRFNGIGVTQNVLYENQKLIANQFNSAIGKIQDSLSSTASALGKLQDVVNQNAQALNTLVKQLSSNFGAISSVLNDILSRLDKVEAEVQIDRLITGRLQSLQTYVTQQLIRAAEIRASANLAATKMSECVLGQSKRVDFCGKGYHLMSFPQSAPHGVVFLHVTYVPAQEKNFTCAPAICHDGKAHFPREGVFVSNGTHWFVTQRNFYEPQIITTDNTFVSGNCDVVIGIVNNTVYDPLQPELDSFKEELDKYFKNHTSPDVDLGDISGINASVVNIQKEIDRLNEVAKNLNESLIDLQELGKYEQYIKGGGGSDIDPYKEFGSSYQLLNFLPLDFFPDLNALVDTATALYEEELTGREHCSPHHTAIRQALVCWDELTKLIAWMSSNITSEQVRTIIVNHVNDTWGLKVRQSLWFHLSCLTFGQHTVQEFLVSFGVWIRTPAPYRPPNAPILSTLPEHTVIC

SEQ ID NO: 6981 - protein, 1365 aa, Artificial Sequence
  SARS-CoV-2/Australia/VIC01/2020__EPI_ISL_406844 spike protein (1-1211)(I712C_T1077C) WhcAg construct
MFVFLVLLPLVSSQCVNLTTRTQLPPAYTNSFTRGVYYPDKVFRSSVLHSTQDLFLPFFSNVTWFHAIHVSGTNGTKRFDNPVLPFNDGVYFASTEKSNIIRGWIFGTTLDSKTQSLLIVNNATNVVIKVCEFQFCNDPFLGVYYHKNNKSWMESEFRVYSSANNCTFEYVSQPFLMDLEGKQGNFKNLREFVFKNIDGYFKIYSKHTPINLVRDLPQGFSALEPLVDLPIGINITRFQTLLALHRRYLTPGDSSSGWTAGAAAYYVGYLQPRTFLLKYNENGTITDAVDCALDPLSETKCTLKSFTVEKGIYQTSNFRVQPTESIVRFPNITNLCPFGEVFNATRFASVYAWNRKRISNCVADYSVLYNSASFSTFKCYGVSPTKLNDLCFTNVYADSFVIRGDEVRQIAPGQTGKIADYNYKLPDDFTGCVIAWNSNNLDSKVGGNYNYLYRLFRKSNLKPFERDISTEIYQAGSTPCNGVEGFNCYFPLQSYGFQPTNGVGYQPYRVVVLSFELLHAPATVCGPKKSTNLVKNKCVNFNFNGLTGTGVLTESNKKFLPFQQFGRDIADTTDAVRDPQTLEILDITPCSFGGVSVITPGTNTSNQVAVLYQDVNCTEVPVAIHADQLTPTWRVYSTGSNVFQTRAGCLIGAEHVNNSYECDIPIGAGICASYQTQTNSPRRARSVASQSIIAYTMSLGAENSVAYSNNSCAIPTNFTISVTTEILPVSMTKTSVDCTMYICGDSTECSNLLLQYGSFCTQLNRALTGIAVEQDKNTQEVFAQVKQIYKTPPIKDFGGFNFSQILPDPSKPSKRSFIEDLLFNKVTLADAGFIKQYGDCLGDIAARDLICAQKFNGLTVLPPLLTDEMIAQYTSALLAGTITSGWTFGAGAALQIPFAMQMAYRFNGIGVTQNVLYENQKLIANQFNSAIGKIQDSLSSTASALGKLQDVVNQNAQALNTLVKQLSSNFGAISSVLNDILSRLDKVEAEVQIDRLITGRLQSLQTYVTQQLIRAAEIRASANLAATKMSECVLGQSKRVDFCGKGYHLMSFPQSAPHGVVFLHVTYVPAQEKNFTCAPAICHDGKAHFPREGVFVSNGTHWFVTQRNFYEPQIITTDNTFVSGNCDVVIGIVNNTVYDPLQPELDSFKEELDKYFKNHTSPDVDLGDISGINASVVNIQKEIDRLNEVAKNLNESLIDLQELGKYEQYIKGGGGSDIDPYKEFGSSYQLLNFLPLDFFPDLNALVDTATALYEEELTGREHCSPHHTAIRQALVCWDELTKLIAWMSSNITSEQVRTIIVNHVNDTWGLKVRQSLWFHLSCLTFGQHTVQEFLVSFGVWIRTPAPYRPPNAPILSTLPEHTVIC

SEQ ID NO: 6982 - protein, 1365 aa, Artificial Sequence
  SARS-CoV-2/Germany/BavPat1/2020__EPI_ISL_406862 spike protein (1-1211)(I712C_T1077C) WhcAg construct
MFVFLVLLPLVSSQCVNLTTRTQLPPAYTNSFTRGVYYPDKVFRSSVLHSTQDLFLPFFSNVTWFHAIHVSGTNGTKRFDNPVLPFNDGVYFASTEKSNIIRGWIFGTTLDSKTQSLLIVNNATNVVIKVCEFQFCNDPFLGVYYHKNNKSWMESEFRVYSSANNCTFEYVSQPFLMDLEGKQGNFKNLREFVFKNIDGYFKIYSKHTPINLVRDLPQGFSALEPLVDLPIGINITRFQTLLALHRSYLTPGDSSSGWTAGAAAYYVGYLQPRTFLLKYNENGTITDAVDCALDPLSETKCTLKSFTVEKGIYQTSNFRVQPTESIVRFPNITNLCPFGEVFNATRFASVYAWNRKRISNCVADYSVLYNSASFSTFKCYGVSPTKLNDLCFTNVYADSFVIRGDEVRQIAPGQTGKIADYNYKLPDDFTGCVIAWNSNNLDSKVGGNYNYLYRLFRKSNLKPFERDISTEIYQAGSTPCNGVEGFNCYFPLQSYGFQPTNGVGYQPYRVVVLSFELLHAPATVCGPKKSTNLVKNKCVNFNFNGLTGTGVLTESNKKFLPFQQFGRDIADTTDAVRDPQTLEILDITPCSFGGVSVITPGTNTSNQVAVLYQGVNCTEVPVAIHADQLTPTWRVYSTGSNVFQTRAGCLIGAEHVNNSYECDIPIGAGICASYQTQTNSPRRARSVASQSIIAYTMSLGAENSVAYSNNSCAIPTNFTISVTTEILPVSMTKTSVDCTMYICGDSTECSNLLLQYGSFCTQLNRALTGIAVEQDKNTQEVFAQVKQIYKTPPIKDFGGFNFSQILPDPSKPSKRSFIEDLLFNKVTLADAGFIKQYGDCLGDIAARDLICAQKFNGLTVLPPLLTDEMIAQYTSALLAGTITSGWTFGAGAALQIPFAMQMAYRFNGIGVTQNVLYENQKLIANQFNSAIGKIQDSLSSTASALGKLQDVVNQNAQALNTLVKQLSSNFGAISSVLNDILSRLDKVEAEVQIDRLITGRLQSLQTYVTQQLIRAAEIRASANLAATKMSECVLGQSKRVDFCGKGYHLMSFPQSAPHGVVFLHVTYVPAQEKNFTCAPAICHDGKAHFPREGVFVSNGTHWFVTQRNFYEPQIITTDNTFVSGNCDVVIGIVNNTVYDPLQPELDSFKEELDKYFKNHTSPDVDLGDISGINASVVNIQKEIDRLNEVAKNLNESLIDLQELGKYEQYIKGGGGSDIDPYKEFGSSYQLLNFLPLDFFPDLNALVDTATALYEEELTGREHCSPHHTAIRQALVCWDELTKLIAWMSSNITSEQVRTIIVNHVNDTWGLKVRQSLWFHLSCLTFGQHTVQEFLVSFGVWIRTPAPYRPPNAPILSTLPEHTVIC

SEQ ID NO: 6983 - protein, 1365 aa, Artificial Sequence
  SARS-CoV-2/Wuhan/HBCDC-HB-02/2020__EPI_ISL_412978 spike protein (1-1211)(I712C_T1077C) WhcAg construct
MFVFLVLLPLVSSQCVNLTTRTQLPPAYTNSFTRGVYYPDKVFRSSVLHSTQDLFLPFFSNVTWFHAIHVSGTNGTKRFDNPVLPFNDGVYFASTEKSNIIRGWIFGTTLDSKTQSLLIVNNATNVVIKVCEFQFCNDPFLGVYYHKNNKSWMESEFRVYSSANNCTFEYVSQPFLMDLEGKQGNFKNLREFVFKNIDGYFKIYSKHTPINLVRDLPQGFSALEPLVDLPIGINITRFQTLLALHRSYLTPGDSSSGWTAGAAAYYVGYLQPRTFLLKYNENGTITDAVDCALDPLSETKCTLKSFTVEKGIYQTSNFRVQPTESIVRFPNITNLCPFGEVFNATRFASVYAWNRKRISNCVADYSVLYNSASFSTFKCYGVSPTKLNDLCFTNVYADSFVIRGDEVRQIAPGQTGKIADYNYKLPDDFTGCVIAWNSNNLDSKVGGNYNYLYRLFRKSNLKPFERDISTEIYQAGSTPCNGVEGFNCYFPLQSYGFQPTNGVGYQPYRVVVLSFELLHAPATVCGPKKSTNLVKNKCVNFNFNGLTGTGVLTESNKKFLPFQQFGRDIADTTDAVRDPQTLEILDITPCSFGGVSVITPGTNTSNQVAVLYQDVNCTEVPVAIHADQLTPTWRVYSTGSNVFQTRAGCLIGAEHVNNSYECDIPIGAGICASYQTQTNSPRRARSVASQSIIAYTMSLGAENSVAYSNNSCAIPTNFTISVTTEILPVSMTKTSVDCTMYICGDSTECSNFLLQYGSFCTQLNRALTGIAVEQDKNTQEVFAQVKQIYKTPPIKDFGGFNFSQILPDPSKPSKRSFIEDLLFNKVTLADAGFIKQYGDCLGDIAARDLICAQKFNGLTVLPPLLTDEMIAQYTSALLAGTITSGWTFGAGAALQIPFAMQMAYRFNGIGVTQNVLYENQKLIANQFNSAIGKIQDSLSSTASALGKLQDVVNQNAQALNTLVKQLSSNFGAISSVLNDILSRLDKVEAEVQIDRLITGRLQSLQTYVTQQLIRAAEIRASANLAATKMSECVLGQSKRVDFCGKGYHLMSFPQSAPHGVVFLHVTYVPAQEKNFTCAPAICHDGKAHFPREGVFVSNGTHWFVTQRNFYEPQIITTDNTFVSGNCDVVIGIVNNTVYDPLQPELDSFKEELDKYFKNHTSPDVDLGDISGINASVVNIQKEIDRLNEVAKNLNESLIDLQELGKYEQYIKGGGGSDIDPYKEFGSSYQLLNFLPLDFFPDLNALVDTATALYEEELTGREHCSPHHTAIRQALVCWDELTKLIAWMSSNITSEQVRTIIVNHVNDTWGLKVRQSLWFHLSCLTFGQHTVQEFLVSFGVWIRTPAPYRPPNAPILSTLPEHTVIC

SEQ ID NO: 6984 - protein, 1365 aa, Artificial Sequence
  SARS-CoV-2/Australia/QLD02/2020__EPI_ISL_407896 spike protein (1-1211)(I712C_T1077C) WhcAg construct
MFVFLVLLPLVSSQCVNLTTRTQLPPAYTNSFTRGVYYPDKVFRSSVLHSTQDLFLPFFSNVTWFHAIHVSGTNGTKRFDNPVLPFNDGVYFASTEKSNIIRGWIFGTTLDSKTQSLLIVNNATNVVIKVCEFQFCNDPFLGVYYHKNNKSWMESEFRVYSSANNCTFEYVSQPFLMDLEGKQGNFKNLREFVFKNIDGYFKIYSKHTPINLVRDLPQGFSALEPLVDLPIGINITRFQTLLALHRSYLTPGDSSSGWTAGAAAYYVGYLQPRTFLLKYNENGTITDAVDCALDPLSETKCTLKSFTVEKGIYQTSNFRVQPTESIVRFPNITNLCPFGEVFNATRFASVYAWNRKRISNCVADYSVLYNSASFSTFKCYGVSPTKLNDLCFTNVYADSFVIRGDEVRQIAPGQTGKIADYNYKLPDDFTGCVIAWNSNNLDSKVGGNYNYLYRLFRKSNLKPFERDISTEIYQAGSTPCNGVEGFNCYFPLQSYGFQPTNGVGYQPYRVVVLSFELLHAPATVCGPKKSTNLVKNKCVNFNFNGLTGTGVLTESNKKFLPFQQFGRDIADTTDAVRDPQTLEILDITPCSFGGVSVITPGTNTSNQVAVLYQDVNCTEVPVAIHADQLTPTWRVYSTGSNVFQTRAGCLIGAEHVNNSYECDIPIGAGICASYQTQTNSPRRARSVASQSIIAYTMSLGAENSVAYSNNSCAIPTNFTISVTTEILPVSMTKTSVDCTMYICGDSTECSNLLLQYGSFCTQLNRALTGIAVEQDKNTQEVFAQVKQIYKTPPIKDFGGFNFSQILPDPSKPSKRSFIEDLLFNKVTLADAGFIKQYGDCLGDIAARDLICAQKFNGLTVLPPLLTDEMIAQYTSALLAGTITSGWTFGAGAALQIPFAMQMAYRFNGIGVTQNVLYENQKLIANQFNSAIGKIQDSLSSTASALGKLQDVVNQNAQALNTLVKQLSSNFGAISSVLNDILSRLDKVEAEVQIDRLITGRLQSLQTYVTQQLIRAAEIRASANLAATKMSECVLGQSKRVDFCGKGYHLMSFPQSAPHGVVFLHVTYVPAQEKNFTCAPAICHDGKAHFPREGVFVSNGTHWFVTQRNFYEPQIITTDNTFVSGNCDVVIGIVNNTVYDPLQLELDSFKEELDKYFKNHTSPDVDLGDISGINASVVNIQKEIDRLNEVAKNLNESLIDLQELGKYEQYIKGGGGSDIDPYKEFGSSYQLLNFLPLDFFPDLNALVDTATALYEEELTGREHCSPHHTAIRQALVCWDELTKLIAWMSSNITSEQVRTIIVNHVNDTWGLKVRQSLWFHLSCLTFGQHTVQEFLVSFGVWIRTPAPYRPPNAPILSTLPEHTVIC

SEQ ID NO: 6985 - protein, 1365 aa, Artificial Sequence
  SARS-CoV-2/India/1-31/2020__EPI_ISL_413523 spike protein (1-1211)(I712C_T1077C) WhcAg construct
MFVFLVLLPLVSSQCVNLTTRTQLPPAYTNSFTRGVYYPDKVFRSSVLHSTQDLFLPFFSNVTWFHAIHVSGTNGTKRFDNPVLPFNDGVYFASTEKSNIIRGWIFGTTLDSKTQSLLIVNNATNVVIKVCEFQFCNDPFLGVYYHKNNKSWMESEFRVYSSANNCTFEYVSQPFLMDLEGKQGNFKNLREFVFKNIDGYFKIYSKHTPINLVRDLPQGFSALEPLVDLPIGINITRFQTLLALHRSYLTPGDSSSGWTAGAAAYYVGYLQPRTFLLKYNENGTITDAVDCALDPLSETKCTLKSFTVEKGIYQTSNFRVQPTESIVRFPNITNLCPFGEVFNATRFASVYAWNRKRISNCVADYSVLYNSASFSTFKCYGVSPTKLNDLCFTNVYADSFVIRGDEVRQIAPGQTGKIADYNYKLPDDFTGCVIAWNSNNLDSKVGGNYNYLYRLFRKSNLKPFERDISTEIYQAGSTPCNGVEGFNCYFPLQSYGFQPTNGVGYQPYRVVVLSFELLHAPATVCGPKKSTNLVKNKCVNFNFNGLTGTGVLTESNKKFLPFQQFGRDIADTTDAVRDPQTLEILDITPCSFGGVSVITPGTNTSNQVAVLYQDVNCTEVPVAIHADQLTPTWRVYSTGSNVFQTRAGCLIGAEHVNNSYECDIPIGAGICASYQTQTNSPRRARSVASQSIIAYTMSLGAENSVAYSNNSCAIPTNFTISVTTEILPVSMTKTSVDCTMYICGDSTECSNLLLQYGSFCTQLNRALTGIAVEQDKNTQEVFAQVKQIYKTPPIKDFGGFNFSQILPDPSKPSKRSFIEDLLFNKVTLADAGFIKQYGDCLGDIAARDLICAQKFNGLTVLPPLLTDEMIAQYTSALLAGTITSGWTFGAGAALQIPFAMQMAYRFNGIGVTQNVLYENQKLIANQFNSVIGKIQDSLSSTASALGKLQDVVNQNAQALNTLVKQLSSNFGAISSVLNDILSRLDKVEAEVQIDRLITGRLQSLQTYVTQQLIRAAEIRASANLAATKMSECVLGQSKRVDFCGKGYHLMSFPQSAPHGVVFLHVTYVPAQEKNFTCAPAICHDGKAHFPREGVFVSNGTHWFVTQRNFYEPQIITTDNTFVSGNCDVVIGIVNNTVYDPLQPELDSFKEELDKYFKNHTSPDVDLGDISGINASVVNIQKEIDRLNEVAKNLNESLIDLQELGKYEQYIKGGGGSDIDPYKEFGSSYQLLNFLPLDFFPDLNALVDTATALYEEELTGREHCSPHHTAIRQALVCWDELTKLIAWMSSNITSEQVRTIIVNHVNDTWGLKVRQSLWFHLSCLTFGQHTVQEFLVSFGVWIRTPAPYRPPNAPILSTLPEHTVIC

SEQ ID NO: 6986 - protein, 1365 aa, Artificial Sequence
  SARS-CoV-2/Guangdong/GD2020087-P0008/2020__EPI_ISL_413863 spike protein (1-1211)(I712C_T1077C) WhcAg construct
MFVFLVLLPLVSSQCVNLTTRTQLPPAYTNSFTRGVYYPDKVFRSSVLHSTQDLFLPFFSNVTWFHAIHVSGTNGTKRFDNPVLPFNDGVYFASTEKSNIIRGWIFGTTLDSKTQSLLIVNNATNVVIKVCEFQFCNDPFLGVYYHKNNKSWMESEFRVYSSANNCTFEYVSQPFLMDLEGKQGNFKNLREFVFKNIDGYFKIYSKHTPINLVRDLPQGFSALEPLVDLPIGINITRFQTLLALHRSYLTPGDSSSGWTAGAAAYYVGYLQPRTFLLKYNENGTITDAVDCALDPLSETKCTLKSFTVEKGIYQTSNFRVQPTESIVRFPNITNLCPFGEVFNATRFASVYAWNRKRISNCVADYSVLYNSASFSTFKCYGVSPTKLNDLCFTNVYADSFVIRGDEVREIAPGQTGKIADYNYKLPDDFTGCVIAWNSNNLDSKVGGNYNYLYRLFRKSNLKPFERDISTEIYQAGSTPCNGVEGFNCYFPLQSYGFQPTNGVGYQPYRVVVLSFELLHAPATVCGPKKSTNLVKNKCVNFNFNGLTGTGVLTESNKKFLPFQQFGRDIADTTDAVRDPQTLEILDITPCSFGGVSVITPGTNTSNQVAVLYQDVNCTEVPVAIHADQLTPTWRVYSTGSNVFQTRAGCLIGAEHVNNSYECDIPIGAGICASYQTQTNSPRRARSVASQSIIAYTMSLGAENSVAYSNNSCAIPTNFTISVTTEILPVSMTKTSVDCTMYICGDSTECSNLLLQYGSFCTQLNRALTGIAVEQDKNTQEVFAQVKQIYKTPPIKDFGGFNFSQILPDPSKPSKRSFIEDLLFNKVTLADAGFIKQYGDCLGDIAARDLICAQKFNGLTVLPPLLTDEMIAQYTSALLAGTITSGWTFGAGAALQIPFAMQMAYRFNGIGVTQNVLYENQKLIANQFNSAIGKIQDSLSSTASALGKLQDVVNQNAQALNTLVKQLSSNFGAISSVLNDILSRLDKVEAEVQIDRLITGRLQSLQTYVTQQLIRAAEIRASANLAATKMSECVLGQSKRVDFCGKGYHLMSFPQSAPHGVVFLHVTYVPAQEKNFTCAPAICHDGKAHFPREGVFVSNGTHWFVTQRNFYEPQIITTDNTFVSGNCDVVIGIVNNTVYDPLQPELDSFKEELDKYFKNHTSPDVDLGDISGINASVVNIQKEIDRLNEVAKNLNESLIDLQELGKYEQYIKGGGGSDIDPYKEFGSSYQLLNFLPLDFFPDLNALVDTATALYEEELTGREHCSPHHTAIRQALVCWDELTKLIAWMSSNITSEQVRTIIVNHVNDTWGLKVRQSLWFHLSCLTFGQHTVQEFLVSFGVWIRTPAPYRPPNAPILSTLPEHTVIC

SEQ ID NO: 6987 - protein, 1365 aa, Artificial Sequence
  SARS-CoV-2/Sweden/01/2020__EPI_ISL_411951 spike protein (1-1211)(I712C_T1077C) WhcAg construct
MFVFLVLLPLVSSQCVNLTTRTQLPPAYTNSFTRGVYYPDKVFRSSVLHSTQDLFLPFFSNVTWFHAIHVSGTNGTKRFDNPVLPFNDGVYFASTEKSNIIRGWIFGTTLDSKTQSLLIVNNATNVVIKVCEFQFCNDPFLGVYYHKNNKSWMESEFRVYSSANNCTFEYVSQPFLMDLEGKQGNFKNLREFVFKNIDGYFKIYSKHTPINLVRDLPQGFSALEPLVDLPIGINITRFQTLLALHRSYLTPGDSSSGWTAGAAAYYVGYLQPRTFLLKYNENGTITDAVDCALDPLSETKCTLKSFTVEKGIYQTSNFRVQPTESIVRFPNITNLCPFGEVFNATRFASVYAWNRKRISNCVADYSVLYNSASFSTFKCYGVSPTKLNDLCFTNVYADSFVIRGDEVRQIAPGQTGKIADYNYKLPDDFTGCVIAWNSNNLDSKVGGNYNYLYRLFRKSNLKPFERDISTEIYQAGSTPCNGVEGFNCYFPLQSYGFQPTNGVGYQPYRVVVLSFELLHAPATVCGPKKSTNLVKNKCVNFNFNGLTGTGVLTESNKKFLPFQQFGRDIADTTDAVRDPQTLEILDITPCSFGGVSVITPGTNTSNQVAVLYQDVNCTEVPVAIHADQLTPTWRVYSTGSNVFQTRAGCLIGAEHVNNSYECDIPIGAGICASYQTQTNSPRRARSVASQSIIAYTMSLGAENSVAYSNNSCAIPTNFTISVTTEILPVSMTKTSVDCTMYICGDSTECSNLLLQYGSFCTQLNRALTGIAVEQDKNTQEVFAQVKQIYKTPPIKDCGGFNFSQILPDPSKPSKRSFIEDLLFNKVTLADAGFIKQYGDCLGDIAARDLICAQKFNGLTVLPPLLTDEMIAQYTSALLAGTITSGWTFGAGAALQIPFAMQMAYRFNGIGVTQNVLYENQKLIANQFNSAIGKIQDSLSSTASALGKLQDVVNQNAQALNTLVKQLSSNFGAISSVLNDILSRLDKVEAEVQIDRLITGRLQSLQTYVTQQLIRAAEIRASANLAATKMSECVLGQSKRVDFCGKGYHLMSFPQSAPHGVVFLHVTYVPAQEKNFTCAPAICHDGKAHFPREGVFVSNGTHWFVTQRNFYEPQIITTDNTFVSGNCDVVIGIVNNTVYDPLQPELDSFKEELDKYFKNHTSPDVDLGDISGINASVVNIQKEIDRLNEVAKNLNESLIDLQELGKYEQYIKGGGGSDIDPYKEFGSSYQLLNFLPLDFFPDLNALVDTATALYEEELTGREHCSPHHTAIRQALVCWDELTKLIAWMSSNITSEQVRTIIVNHVNDTWGLKVRQSLWFHLSCLTFGQHTVQEFLVSFGVWIRTPAPYRPPNAPILSTLPEHTVIC

SEQ ID NO: 6988 - protein, 1365 aa, Artificial Sequence
  SARS-CoV-2/Tianmen/HBCDC-HB-07/2020__EPI_ISL_412983 spike protein (1-1211)(I712C_T1077C) WhcAg construct
MFVFLVLLPLVSSQCVNLTTRTQLPPAYTNSFTRGVYYPDKVFRSSVLHSTQDLFLPFFSNVTWFHAIHVSGTNGTKRFDNPVLPFNDGVYFASTEKSNIIRGWIFGTTLDSKTQSLLIVNNATNVVIKVCEFQFCNDPFLGVYYHKNNKSWMESEFRVYSSANNCTFEYVSQPFLMDLEGKQGNFKNLREFVFKNIDGYFKIYSKHTPINLVRDLPQGFSALEPLVDLPIGINITRFQTLLALHRSYLTPGDSSSGWTAGAAAYYVGYLQPRTFLLKYNENGTITDAVDCALDPLSETKCTLKSFTVEKGIYQTSNFRVQPTESIVRFPNITNLCPFGEVFNATRFASVYAWNRKRISNCVADYSVLYNSASFSTFKCYGVSPTKLNDLCFTNVYADSFVIRGDEVRQIAPGQTGKIADYNYKLPDDFTGCVIAWNSNNLDSKVGGNYNYLYRLFRKSNLKPFERDISTEIYQAGSTPCNGVEGFNCYFPLQSYGFQPTNGVGYQPYRVVVLSFELLHAPATVCGPKKSTNLVKNKCVNFNFNGLTGTGVLTESNKKFLPFQQFGRDIADTTDAVRDPQTLEILDITPCSFGGVSVITPGTNTSNQVAVLYQDLNCTEVPVAIHADQLTPTWRVYSTGSNVFQTRAGCLIGAEHVNNSYECDIPIGAGICASYQTQTNSPRRARSVASQSIIAYTMSLGAENSVAYSNNSCAIPTNFTISVTTEILPVSMTKTSVDCTMYICGDSTECSNLLLQYGSFCTQLNRALTGIAVEQDKNTQEVFAQVKQIYKTPPIKDFGGFNFSQILPDPSKPSKRSFIEDLLFNKVTLADAGFIKQYGDCLGDIAARDLICAQKFNGLTVLPPLLTDEMIAQYTSALLAGTITSGWTFGAGAALQIPFAMQMAYRFNGIGVTQNVLYENQKLIANQFNSAIGKIQDSLSSTASALGKLQDVVNQNAQALNTLVKQLSSNFGAISSVLNDILSRLDKVEAEVQIDRLITGRLQSLQTYVTQQLIRAAEIRASANLAATKMSECVLGQSKRVDFCGKGYHLMSFPQSAPHGVVFLHVTYVPAQEKNFTCAPAICHDGKAHFPREGVFVSNGTHWFVTQRNFYEPQIITTDNTFVSGNCDVVIGIVNNTVYDPLQPELDSFKEELDKYFKNHTSPDVDLGDISGINASVVNIQKEIDRLNEVAKNLNESLIDLQELGKYEQYIKGGGGSDIDPYKEFGSSYQLLNFLPLDFFPDLNALVDTATALYEEELTGREHCSPHHTAIRQALVCWDELTKLIAWMSSNITSEQVRTIIVNHVNDTWGLKVRQSLWFHLSCLTFGQHTVQEFLVSFGVWIRTPAPYRPPNAPILSTLPEHTVIC

SEQ ID NO: 6989 - protein, 1365 aa, Artificial Sequence
  SARS-CoV-2/Hong Kong/case42_VM20002493/2020__EPI_ISL_414527 spike protein (1-1211)(I712C_T1077C) WhcAg construct
MFVFLVLLPLVSSQCVNLTTRTQLPPAYTNSFTRGVYYPDKVFRSSVLHSTQDLFLPFFSNVTWFHAIHVSGTNGTKRFDNPVLPFNDGVYFASTEKSNIIRGWIFGTTLDSKTQSLLIVNNATNVVIKVCEFQFCNDPFLGVYYHKNNKSWMESEFRVYSSANNCTFEYVSQPFLMDLEGKQGNFKNLREFVFKNIDGYFKIYSKHTPINLVRDLPQGFSALEPLVDLPIGINITRFQTLLALHRSYLTPGDSSSGWTAGAAAYYVGYLQPRTFLLKYNENGTITDAVDCALDPLSETKCTLKSFTVEKGIYQTSNFRVQPTESIVRFPNITNLCPFGEVFNATRFASVYAWNRKRISNCVADYSVLYNSASFSTFKCYGVSPTKLNDLCFTNVYADSFVIRGDEVRQIAPGQTGKIADYNYKLPDDFTGCVIAWNSNNLDSKVGGNYNYLYRLFRKSNLKPFERDISTEIYQAGSTPCNGVEGFNCYFPLQSYGFQPTNGVGYQPYRVVVLSFELLHAPATVCGPKKSTNLVKNKCVNFNFNGLTGTGVLTESNKKFLPFQQFGRDIADTTDAVRDPQTLEILDITPCSFGGVSVITPGTNTSNQVAVLYQDVNCTEVPVAIHADQLTPTWRVYSTGSNVFQTRAGCLIGAEHVNNSYECDIPIGAGICASYQTQTNSPRRARSVASQSIIAYTMSLGAENSVAYSNNSCAIPTNFAISVTTEILPVSMTKTSVDCTMYICGDSTECSNLLLQYGSFCTQLNRALTGIAVEQDKNTQEVFAQVKQIYKTPPIKDFGGFNFSQILPDPSKPSKRSFIEDLLFNKVTLADAGFIKQYGDCLGDIAARDLICAQKFNGLTVLPPLLTDEMIAQYTSALLAGTITSGWTFGAGAALQIPFAMQMAYRFNGIGVTQNVLYENQKLIANQFNSAIGKIQDSLSSTASALGKLQDVVNQNAQALNTLVKQLSSNFGAISSVLNDILSRLDKVEAEVQIDRLITGRLQSLQTYVTQQLIRAAEIRASANLAATKMSECVLGQSKRVDFCGKGYHLMSFPQSAPHGVVFLHVTYVPAQEKNFTCAPAICHDGKAHFPREGVFVSNGTHWFVTQRNFYEPQIITTDNTFVSGNCDVVIGIVNNTVYDPLQPELDSFKEELDKYFKNHTSPDVDLGDISGINASVVNIQKEIDRLNEVAKNLNESLIDLQELGKYEQYIKGGGGSDIDPYKEFGSSYQLLNFLPLDFFPDLNALVDTATALYEEELTGREHCSPHHTAIRQALVCWDELTKLIAWMSSNITSEQVRTIIVNHVNDTWGLKVRQSLWFHLSCLTFGQHTVQEFLVSFGVWIRTPAPYRPPNAPILSTLPEHTVIC

SEQ ID NO: 6990 - protein, 1365 aa, Artificial Sequence
  SARS-CoV-2/USA/CruiseA-23/2020__EPI_ISL_414482 spike protein (1-1211)(I712C_T1077C) WhcAg construct
MFVFLVLLPLVSSQCVNLTTRTQLPPAYTNSFTRGVYYPDKVFRSSVLHSTQDLFLPFFSNVTWFHAIHVSGTNGTKRFDNPVLPFNDGVYFASTEKSNIIRGWIFGTTLDSKTQSLLIVNNATNVVIKVCEFQFCNDPFLGVYYHKNNKSWMESEFRVYSSANNCTFEYVSQPFLMDLEVKQGNFKNLREFVFKNIDGYFKIYSKHTPINLVRDLPQGFSALEPLVDLPIGINITRFQTLLALHRSYLTPGDSSSGWTAGAAAYYVGYLQPRTFLLKYNENGTITDAVDCALDPLSETKCTLKSFTVEKGIYQTSNFRVQPTESIVRFPNITNLCPFGEVFNATRFASVYAWNRKRISNCVADYSVLYNSASFSTFKCYGVSPTKLNDLCFTNVYADSFVIRGDEVRQIAPGQTGKIADYNYKLPDDFTGCVIAWNSNNLDSKVGGNYNYLYRLFRKSNLKPFERDISTEIYQAGSTPCNGVEGFNCYFPLQSYGFQPTNGVGYQPYRVVVLSFELLHAPATVCGPKKSTNLVKNKCVNFNFNGLTGTGVLTESNKKFLPFQQFGRDIADTTDAVRDPQTLEILDITPCSFGGVSVITPGTNTSNQVAVLYQDVNCTEVPVAIHADQLTPTWRVYSTGSNVFQTRAGCLIGAEHVNNSYECDIPIGAGICASYQTQTNSPRRARSVASQSIIAYTMSLGAENSVAYSNNSCAIPTNFTISVTTEILPVSMTKTSVDCTMYICGDSTECSNLLLQYGSFCTQLNRALTGIAVEQDKNTQEVFAQVKQIYKTPPIKDFGGFNFSQILPDPSKPSKRSFIEDLLFNKVTLADAGFIKQYGDCLGDIAARDLICAQKFNGLTVLPPLLTDEMIAQYTSALLAGTITSGWTFGAGAALQIPFAMQMAYRFNGIGVTQNVLYENQKLIANQFNSAIGKIQDSLSSTASALGKLQDVVNQNAQALNTLVKQLSSNFGAISSVLNDILSRLDKVEAEVQIDRLITGRLQSLQTYVTQQLIRAAEIRASANLAATKMSECVLGQSKRVDFCGKGYHLMSFPQSAPHGVVFLHVTYVPAQEKNFTCAPAICHDGKAHFPREGVFVSNGTHWFVTQRNFYEPQIITTDNTFVSGNCDVVIGIVNNTVYDPLQPELDSFKEELDKYFKNHTSPDVDLGDISGINASVVNIQKEIDRLNEVAKNLNESLIDLQELGKYEQYIKGGGGSDIDPYKEFGSSYQLLNFLPLDFFPDLNALVDTATALYEEELTGREHCSPHHTAIRQALVCWDELTKLIAWMSSNITSEQVRTIIVNHVNDTWGLKVRQSLWFHLSCLTFGQHTVQEFLVSFGVWIRTPAPYRPPNAPILSTLPEHTVIC

SEQ ID NO: 6991 - protein, 1365 aa, Artificial Sequence
  SARS-CoV-2/Hong Kong/case85_VM20002868/2020__EPI_ISL_414519 spike protein (1-1211)(I712C_T1077C) WhcAg construct
MFVFLVLVPLVSSQCVNLTTRTQLPPAYTNSFTRGVYYPDKVFRSSVLHSTQDLFLPFFSNVTWFHAIHVSGTNGTKRFDNPVLPFNDGVYFASTEKSNIIRGWIFGTTLDSKTQSLLIVNNATNVVIKVCEFQFCNDPFLGVYYHKNNKSWMESEFRVYSSANNCTFEYVSQPFLMDLEGKQGNFKNLREFVFKNIDGYFKIYSKHTPINLVRDLPQGFSALEPLVDLPIGINITRFQTLLALHRSYLTPGDSSSGWTAGAAAYYVGYLQPRTFLLKYNENGTITDAVDCALDPLSETKCTLKSFTVEKGIYQTSNFRVQPTESIVRFPNITNLCPFGEVFNATRFASVYAWNRKRISNCVADYSVLYNSASFSTFKCYGVSPTKLNDLCFTNVYADSFVIRGDEVRQIAPGQTGKIADYNYKLPDDFTGCVIAWNSNNLDSKVGGNYNYLYRLFRKSNLKPFERDISTEIYQAGSTPCNGVEGFNCYFPLQSYGFQPTNGVGYQPYRVVVLSFELLHAPATVCGPKKSTNLVKNKCVNFNFNGLTGTGVLTESNKKFLPFQQFGRDIADTTDAVRDPQTLEILDITPCSFGGVSVITPGTNTSNQVAVLYQDVNCTEVPVAIHADQLTPTWRVYSTGSNVFQTRAGCLIGAEHVNNSYECDIPIGAGICASYQTQTNSPRRARSVASQSIIAYTMSLGAENSVAYSNNSCAIPTNFTISVTTEILPVSMTKTSVDCTMYICGDSTECSNLLLQYGSFCTQLNRALTGIAVEQDKNTQEVFAQVKQIYKTPPIKDFGGFNFSQILPDPSKPSKRSFIEDLLFNKVTLADAGFIKQYGDCLGDIAARDLICAQKFNGLTVLPPLLTDEMIAQYTSALLAGTITSGWTFGAGAALQIPFAMQMAYRFNGIGVTQNVLYENQKLIANQFNSAIGKIQDSLSSTASALGKLQDVVNQNAQALNTLVKQLSSNFGAISSVLNDILSRLDKVEAEVQIDRLITGRLQSLQTYVTQQLIRAAEIRASANLAATKMSECVLGQSKRVDFCGKGYHLMSFPQSAPHGVVFLHVTYVPAQEKNFTCAPAICHDGKAHFPREGVFVSNGTHWFVTQRNFYEPQIITTDNTFVSGNCDVVIGIVNNTVYDPLQPELDSFKEELDKYFKNHTSPDVDLGDISGINASVVNIQKEIDRLNEVAKNLNESLIDLQELGKYEQYIKGGGGSDIDPYKEFGSSYQLLNFLPLDFFPDLNALVDTATALYEEELTGREHCSPHHTAIRQALVCWDELTKLIAWMSSNITSEQVRTIIVNHVNDTWGLKVRQSLWFHLSCLTFGQHTVQEFLVSFGVWIRTPAPYRPPNAPILSTLPEHTVIC

SEQ ID NO: 6992 - protein, 1365 aa, Artificial Sequence; identical to SEQ ID NO: 6982
  SARS-CoV-2/England/200990660/2020__EPI_ISL_414523 spike protein (1-1211)(I712C_T1077C) WhcAg construct

SEQ ID NO: 6993 - protein, 1365 aa, Artificial Sequence
  SARS-CoV-2/Australia/NSW09/2020__EPI_ISL_413595 spike protein (1-1211)(I712C_T1077C) WhcAg construct
MFVFLVLLPLVSSQCVNLTTRTQLPPAYTNSFTRGVYYPDKVFRSSVLHSTQDLFLPFFSNVTWFHAIHVSGTNGTKRFDNPVLPFNDGVYFASTEKSNIIRGWIFGTTLDSKTQSLLIVNNATNVVIKVCEFQFCNDPFLGVYYHKNNKSWMESEFRVYSSANNCTFEYVSQPFLMDLEGKQGNFKNLREFVFKNIDGYFKIYSKHTPINLVRDLPQGFSALEPLVDLPIGINITRFQTLLALHRSYLTPGDSSSGWTAGAAAYYVGYLQPRTFLLKYNENGTITDAVDCALDPLSETKCTLKSFTVEKGIYQTSNFRVQPTESIVRFPNITNLCPFGEVFNATRFASVYAWNRKRISNCVADYSVLYNSASFSTFKCYGVSPTKLNDLCFTNVYADSFVIRGDEVRQIAPGQTGKIADYNYKLPDDFTGCVIAWNSNNLDSKVGGNYNYLYRLFRKSNLKPFERDISTEIYQAGSTPCNGVEGFNCYFPLQSYGFQPTNGVGYQPYRVVVLSFELLHAPATVCGPKKSTNLVKNKCVNFNFNGLTGTGVLTESNKKFLPFQQFGRDIADTTDAVRDPQTLEILDITPCSFGGVSVITPGTNTSNQVAVLYQDVNCTEVPVAIHADQLTPTWRVYSTGSNVFQTRAGCLIGAEHVNNSYECDIPIGAGICASYQTQTNSPRRARSVASQSIIAYTMSLGAENSVAYSNNSCAIPTNFTISVTTEILPVSMTKTSVDCTMYICGDSTECSNLLLQYGSFCTQLNRALTGIAVEQDKNTQEVFAQVKQIYKTPPIKDFGGFNFSQILPDPSKPSKRSFIEDLLFNKVTLADAGFIKQYGDCLGDIAARDLICAQKFNGLTVLPPLLTDEMIAQYTSALLAGTITSGWTFGAGAALQIPFAMQMAYRFNGIGVTQNVLYENQKLIANQFNSAIGKIQDSLSFTASALGKLQDVVNQNAQALNTLVKQLSSNFGAISSVLNDILSRLDKVEAEVQIDRLITGRLQSLQTYVTQQLIRAAEIRASANLAATKMSECVLGQSKRVDFCGKGYHLMSFPQSAPHGVVFLHVTYVPAQEKNFTCAPAICHDGKAHFPREGVFVSNGTHWFVTQRNFYEPQIITTDNTFVSGNCDVVIGIVNNTVYDPLQPELDSFKEELDKYFKNHTSPDVDLGDISGINASVVNIQKEIDRLNEVAKNLNESLIDLQELGKYEQYIKGGGGSDIDPYKEFGSSYQLLNFLPLDFFPDLNALVDTATALYEEELTGREHCSPHHTAIRQALVCWDELTKLIAWMSSNITSEQVRTIIVNHVNDTWGLKVRQSLWFHLSCLTFGQHTVQEFLVSFGVWIRTPAPYRPPNAPILSTLPEHTVIC

SEQ ID NO: 6994 - protein, 1365 aa, Artificial Sequence; identical to SEQ ID NO: 6974
  SARS-CoV-2/Australia/NSW10/2020__EPI_ISL_413596 spike protein (1-1211)(I712C_T1077C) WhcAg construct

SEQ ID NO: 6995 - protein, 1365 aa, Artificial Sequence
  SARS-CoV-2/Switzerland/1000477797/2020__EPI_ISL_413023 spike protein (1-1211)(I712C_T1077C) WhcAg construct
MFVFLVLLPLVSSQCVNLTTRTQLPPAYTNSFTRGVYYPDKVFRSSVLHSTQDLFLPFFSNVTWFHAIHVSGTNGTKRFDNPVLPFNDGVYFASTEKSNIIRGWIFGTTLDSKTQSLLIVNNATNVVIKVCEFQFCNDPFLGVYYHKNNKSWMESEFRVYSSANNCTFEYVSQPFLMDLEGKQGNFKNLREFVFKNIDGYFNIYSKHTPINLVRDLPQGFSALEPLVDLPIGINITRFQTLLALHRSYLTPGDSSSGWTAGAAAYYVGYLQPRTFLLKYNENGTITDAVDCALDPLSETKCTLKSFTVEKGIYQTSNFRVQPTESIVRFPNITNLCPFGEVFNATRFASVYAWNRKRISNCVADYSVLYNSASFSTFKCYGVSPTKLNDLCFTNVYADSFVIRGDEVRQIAPGQTGKIADYNYKLPDDFTGCVIAWNSNNLDSKVGGNYNYLYRLFRKSNLKPFERDISTEIYQAGSTPCNGVEGFNCYFPLQSYGFQPTNGVGYQPYRVVVLSFELLHAPATVCGPKKSTNLVKNKCVNFNFNGLTGTGVLTESNKKFLPFQQFGRDIADTTDAVRDPQTLEILDITPCSFGGVSVITPGTNTSNQVAVLYQGVNCTEVPVAIHADQLTPTWRVYSTGSNVFQTRAGCLIGAEHVNNSYECDIPIGAGICASYQTQTNSPRRARSVASQSIIAYTMSLGAENSVAYSNNSCAIPTNFTISVTTEILPVSMTKTSVDCTMYICGDSTECSNLLLQYGSFCTQLNRALTGIAVEQDKNTQEVFAQVKQIYKTPPIKDFGGFNFSQILPDPSKPSKRSFIEDLLFNKVTLADAGFIKQYGDCLGDIAARDLICAQKFNGLTVLPPLLTDEMIAQYTSALLAGTITSGWTFGAGAALQIPFAMQMAYRFNGIGVTQNVLYENQKLIANQFNSAIGKIQDSLSSTASALGKLQDVVNQNAQALNTLVKQLSSNFGAISSVLNDILSRLDKVEAEVQIDRLITGRLQSLQTYVTQQLIRAAEIRASANLAATKMSECVLGQSKRVDFCGKGYHLMSFPQSAPHGVVFLHVTYVPAQEKNFTCAPAICHDGKAHFPREGVFVSNGTHWFVTQRNFYEPQIITTDNTFVSGNCDVVIGIVNNTVYDPLQPELDSFKEELDKYFKNHTSPDVDLGDISGINASVVNIQKEIDRLNEVAKNLNESLIDLQELGKYEQYIKGGGGSDIDPYKEFGSSYQLLNFLPLDFFPDLNALVDTATALYEEELTGREHCSPHHTAIRQALVCWDELTKLIAWMSSNITSEQVRTIIVNHVNDTWGLKVRQSLWFHLSCLTFGQHTVQEFLVSFGVWIRTPAPYRPPNAPILSTLPEHTVIC

SEQ ID NO: 6996 - protein, 1365 aa, Artificial Sequence
  SARS-CoV-2/Belgium/BA-02291/2020__EPI_ISL_415159 spike protein (1-1211)(I712C_T1077C) WhcAg construct
MFVFLVLLPLVSSQCVNLTTRTQLPPAYTNSFTRGVYYPDKVFRSSVLHSTQDLFLPFFSNVTWFHAIHVSGTNGTKRFDNPVLPFNDGVYFASTEKSNIIRGWIFGTTLDSKTQSLLIVNNATNVVIKVCEFQFCNDPFLGVYYHKNNKSWMESEFRVYSSANNCTFEYVSQPFLMDLEGKQGNFKNLREFVFKNIDGYFKIYSKHTPINLVRDLPQGFSALEPLVDLPIGINITRFQTLLALHRSYLTPGDSSSGWTAGAAAYYVGYLQPRTFLLKYNENGTITDAVDCALDPLSETKCTLKSFTVEKGIYQTSNFRVQPTESIVRFPNITNLCPFGEVFNATRFASVYAWNRKRISNCVADYSVLYNSASFSTFKCYGVSPTKLNDLCFTNVYADSFVIRGDEVRQIAPGQTGKIADYNYKLPDDFTGCVIAWNSNNLDSKVGGNYNYLYRLFRRSNLKPFERDISTEIYQAGSTPCNGVEGFNCYFPLQSYGFQPTNGVGYQPYRVVVLSFELLPAPATVCGPKKSTNLVKNKCVNFNFNGLTGTGVLTESNKKFLPFQQFGRDIADTTDAVRDPQTLEILDITPCSFGGVSVITPGTNTSNQVAVLYQGVNCTEVPVAIHADQLTPTWRVYSTGSNVFQTRAGCLIGAEHVNNSYECDIPIGAGICASYQTQTNSPRRARSVASQSIIAYTMSLGAENSVAYSNNSCAIPTNFTISVTTEILPVSMTKTSVDCTMYICGDSTECSNLLLQYGSFCTQLNRALTGIAVEQDKNTQEVFAQVKQIYKTPPIKDFGGFNFSQILPDPSKPSKRSFIEDLLFNKVTLADAGFIKQYGDCLGDIAARDLICAQKFNGLTVLPPLLTDEMIAQYTSALLAGTITSGWTFGAGAALQIPFAMQMAYRFNGIGVTQNVLYENQKLIANQFNSAIGKIQDSLSSAAPALGKLQDVVNQNAQALNTLVKQLSSNFGAISSVLNDILSRLDKVEAEVQIDRLITGRLQSLQTYVTQQLIRAAEIRASANLAATKMSECVLGQSKRVDFCGKGYHLMSFPQSAPHGVVFLHVTYVPAQEKNFTCAPAICHDGKAHFPREGVFVSNGTHWFVTQRNFYEPQIITTDNTFVSGNCDVVIGIVNNTVYDPLQPELDSFKEELDKYFKNHTSPDVDLGDISGINASVVNIQKEIDRLNEVAKNLNESLIDLQELGKYEQYIKGGGGSDIDPYKEFGSSYQLLNFLPLDFFPDLNALVDTATALYEEELTGREHCSPHHTAIRQALVCWDELTKLIAWMSSNITSEQVRTIIVNHVNDTWGLKVRQSLWFHLSCLTFGQHTVQEFLVSFGVWIRTPAPYRPPNAPILSTLPEHTVIC

SEQ ID NO: 6997 - protein, 1365 aa, Artificial Sequence
  SARS-CoV-2/USA/WA8-UW5/2020__EPI_ISL_413486 spike protein (1-1211)(I712C_T1077C) WhcAg construct
MFVFLVLLPLVSSQCVNLTTRTQLPPAYTNSFTRGVYYPDKVFRSSVLHSTQDLFLPFFSNVTWFHAIHVSGTNGTKRFDNPVLPFNDGVYFASTEKSNIIRGWIFGTTLDSKTQSLLIVNNATNVVIKVCEFQFCNDPFLGVYYHKNNKSWMESEFRVYSSANNCTFEYVSQPFLMDLEGKQGNFKNLREFVFKNIDGYFKIYSKHTPINLVRDLPQGFSALEPLVDLPIGINITRFQTLLALHRSYLTPGDSSSGWTAGAAAYYVGYLQPRTFLLKYNENGTITDAVDCALDPLSETKCTLKSFTVEKGIYQTSNFRVQPTESIVRFPNITNLCPFGEVFNATRFASVYAWNRKRISNCVADYSVLYNSASFSTFKCYGVSPTKLNDLCFTNVYADSFVIRGDEVRQIAPGQTGKIADYNYKLPDDFTGCVIAWNSNNLDSKVGGNYNYLYRLFRKSNLKPFERDISTEIYQAGSTPCNGVEGFNCYFPLQSYGFQPTNGVGYQPYRVVVLSFELLHAPATVCGPKKSTNLVKNKCVNFNFNGLTGTGVLTESNKKFLPFQQFGRDIADTTDAVRDPQTLEILDITPCSFGGVSVITPGTNTSNQVAVLYQDVNCTEVPVAIHADQLTPTWRVYSTGSNVFQTRAGCLIGAEYVNNSYECDIPIGAGICASYQTQTNSPRRARSVASQSIIAYTMSLGAENSVAYSNNSCAIPTNFTISVTTEILPVSMTKTSVDCTMYICGDSTECSNLLLQYGSFCTQLNRALTGIAVEQDKNTQEVFAQVKQIYKTPPIKDFGGFNFSQILPDPSKPSKRSFIEDLLFNKVTLADAGFIKQYGDCLGDIAARDLICAQKFNGLTVLPPLLTDEMIAQYTSALLAGTITSGWTFGAGAALQIPFAMQMAYRFNGIGVTQNVLYENQKLIANQFNSAIGKIQDSLSSTASALGKLQDVVNQNAQALNTLVKQLSSNFGAISSVLNDILSRLDKVEAEVQIDRLITGRLQSLQTYVTQQLIRAAEIRASANLAATKMSECVLGQSKRVDFCGKGYHLMSFPQSAPHGVVFLHVTYVPAQEKNFTCAPAICHDGKAHFPREGVFVSNGTHWFVTQRNFYEPQIITTDNTFVSGNCDVVIGIVNNTVYDPLQPELDSFKEELDKYFKNHTSPDVDLGDISGINASVVNIQKEIDRLNEVAKNLNESLIDLQELGKYEQYIKGGGGSDIDPYKEFGSSYQLLNFLPLDFFPDLNALVDTATALYEEELTGREHCSPHHTAIRQALVCWDELTKLIAWMSSNITSEQVRTIIVNHVNDTWGLKVRQSLWFHLSCLTFGQHTVQEFLVSFGVWIRTPAPYRPPNAPILSTLPEHTVIC

SEQ ID NO: 6998 - protein, 1365 aa, Artificial Sequence
  SARS-CoV-2/England/20102000506/2020__EPI_ISL_415147 spike protein (1-1211)(I712C_T1077C) WhcAg construct
MFVFLVLLPLVSSQCVNLTTRTQLPPAYTNSFTRGVYYPDKVFRSSVLHSTQDLFLPFFSNVTWFHAIHVSGTNGTKRFDNPVLPFNDGVYFASTEKSNIIRGWIFGTTLDSKTQSLLIVNNATNVVIKVCEFQFCNDPFLGVYYHKNNKSWMESEFRVYSSANNCTFEYVSQPFLMDLEGKQGNFKNLREFVFKNIDGYFKIYSKHTPINLVRDLPQGFSALEPLVDLPIGINITRFQTLLALHRSYLTPGDSSSGWTAGAAAYYVGYLQPRTFLLKYNENGTITDAVDCALDPLSETKCTLKSFTVEKGIYQTSNFRVQPTESIVRFPNITNLCPFGEVFNATRFASVYAWNRKRISNCVADYSVLYNSASFSTFKCYGVSPTKLNDLCFTNVYADSFVIRGDEVRQIAPGQTGKIADYNYKLPDDFTGCVIAWNSNNLDSKVGGNYNYLYRLFRKSNLKPFERDISTEIYQAGSTPCNGVEGFNCYFPLQSYGFQPTNGVGYQPYRVVVLSFELLHAPATVCGPKKSTNLVKNKCVNFNFNGLTGTGVLTESNKKFLPFQQFGRDIADTTDAVRDPQTLEILDITPCSFGGVSVITPGTNTSNQVAVLYQGVNCTEVPVAIHADQLTPTWRVYSTGSNVFQTRAGCLIGAEHVNNSYECDIPIGAGICASYQTQTNSPRRARSVASQSIIAYTMSLGAENSVAYSNNSCAIPTNFTISVTTEILPVSMTKTSVDCTMYICGDSTECSNLLLQYGSFCTQLNRALTGIAVEQDKNTQEVFAQVKQIYKTPPIKDFGGFNFSQILPDPSKPSKRSFIEDLLFNKVTLADAGFIKQYGYCLGDIAARDLICAQKFNGLTVLPPLLTDEMIAQYTSALLAGTITSGWTFGAGAALQIPFAMQMAYRFNGIGVTQNVLYENQKLIANQFNSAIGKIQDSLSSTASALGKLQDVVNQNAQALNTLVKQLSSNFGAISSVLNDILSRLDKVEAEVQIDRLITGRLQSLQTYVTQQLIRAAEIRASANLAATKMSECVLGQSKRVDFCGKGYHLMSFPQSAPHGVVFLHVTYVPAQEKNFTCAPAICHDGKAHFPREGVFVSNGTHWFVTQRNFYEPQIITTDNTFVSGNCDVVIGIVNNTVYDPLQPELDSFKEELDKYFKNHTSPDVDLGDISGINASVVNIQKEIDRLNEVAKNLNESLIDLQELGKYEQYIKGGGGSDIDPYKEFGSSYQLLNFLPLDFFPDLNALVDTATALYEEELTGREHCSPHHTAIRQALVCWDELTKLIAWMSSNITSEQVRTIIVNHVNDTWGLKVRQSLWFHLSCLTFGQHTVQEFLVSFGVWIRTPAPYRPPNAPILSTLPEHTVIC

SEQ ID NO: 6999 - protein, 1365 aa, Artificial Sequence
  SARS-CoV-2/Belgium/VAG-03013/2020__EPI_ISL_415155 spike protein (1-1211)(I712C_T1077C) WhcAg construct
MFVFLVLLPLVSSQCVNLTTRTQLPPAYTNSFTRGVYYPDKVFRSSVLHSTQDLFLPFFSNVTWFHAIHVSGTNGTKRFDNPVLPFNDGVYFASTEKSNIIRGWIFGTTLDSKTQSLLIVNNATNVVIKVCEFQFCNDPFLGVYYHKNNKSWMESEFRVYSSANNCTFEYVSQPFLMDLEGKQGNFKNLREFVFKNIDGYFKIYSKHTPINLVRDLPQGFSALEPLVDLPIGINITRFQTLLALHRSYLTPGDSSSGWTAGAAAYYVGYLQPRTFLLKYNENGTITDAVDCALDPLSETKCTLKSFTVEKGIYQTSNFRVQPTESIVRFPNITNLCPFGEVFNATRFASVYAWNRKRISNCVADYSVLYNSASFSTFKCYGVSPTKLNDLCFTNVYADSFVIRGDEVRQIAPGQTGKIADYNYKLPDDFTGCVIAWNSNNLDSKVGGNYNYLYRLFRKSNLKPFERDISTEIYQAGSTPCNGVEGFNCYFPLQSYGFQPTNGVGYQPYRVVVLSFELLHAPATVCGPKKSTNLVKNKCVNFNFNGLTGTGVLTESNKKFLPFQQFGRDIADTTDAVRDPQTLEILDITPCSFGGVSVITPGTNTSNQVAVLYQGVNCTEVPVAIHADQLTPTWRVYSTGSNVFQTRAGCLIGAEHVNNSYECDIPIGAGICASYQTQTNSPRRARSVASQSIIAYTMSLGAENSVAYSNNSCAIPTNFTISVTTEILPVSMTKTSVDCTMYICGDSTECSNLLLQYGSFCTQLNRALTGIAVEQDKNTQEVFAQVKQIYKTPPIKDFGGFNFSQILPDPSKPSKRSFIEDLLFNKVTLADAGFIKQYGDCLGDIAARDLICAQKFNGLTVLPPLLTDEMIAQYTSALLAGTITSGWTFGAGAALQIPFAMQMAYRFNGIGVTQNVLYENQKLIANQFNSAIGKIQDSLSSTATALGKLQDVVNQNAQALNTLVKQLSSNFGAISSVLNDILSRLDKVEAEVQIDRLITGRLQSLQTYVTQQLIRAAEIRASANLAATKMSECVLGQSKRVDFCGKGYHLMSFPQSAPHGVVFLHVTYVPAQEKNFTCAPAICHDGKAHFPREGVFVSNGTHWFVTQRNFYEPQIITTDNTFVSGNCDVVIGIVNNTVYDPLQPELDSFKEELDKYFKNHTSPDVDLGDISGINASVVNIQKEIDRLNEVAKNLNESLIDLQELGKYEQYIKGGGGSDIDPYKEFGSSYQLLNFLPLDFFPDLNALVDTATALYEEELTGREHCSPHHTAIRQALVCWDELTKLIAWMSSNITSEQVRTIIVNHVNDTWGLKVRQSLWFHLSCLTFGQHTVQEFLVSFGVWIRTPAPYRPPNAPILSTLPEHTVIC

SEQ ID NO: 7000 - protein, 1365 aa, Artificial Sequence
  SARS-CoV-2/Belgium/BC-03016/2020__EPI_ISL_415157 spike protein (1-1211)(I712C_T1077C) WhcAg construct
MFVFLVLLPLVSSQCVNLTTRTQLPPAYTNSFTRGVYYPDKVFRSSVLHSTQDLFLPFFSNVTWFHAIHVSGTNGTKRFDNPVLPFNDGVYFASTEKSNIIRGWIFGTTLDSKTQSLLIVNNATNVVIKVCEFQFCNDPFLGVYYHKNNKSWMESEFRVYSSANNCTFEYVSQPFLMDLEGKQGNFKNLREFVFKNIDGYFKIYSKHTPINLVRDLPQGFSALEPLVDLPIGINITRFQTLLALHRSYLTPGDSSSGWTAGAAAYYVGYLQPRTFLLKYNENGTITDAVDCALDPLSETKCTLKSFTVEKGIYQTSNFRVQPTESIVRFPNITNLCPFGEVFNATRFASVYAWNRKRISNCVADYSVLYNSASFSTFKCYGVSPTKLNDLCFTNVYADSFVIRGDEVRQIAPGQTGKIADYNYKLPDDFTGCVIAWNSNNLDSKVGGNYNYLYRLFRKSNLKPFERDISTEIYQAGSTPCNGVEGFNCYFPLQSYGFQPTNGVGYQPYRVVVLSFELLHAPATVCGPKKSTNLVKNKCVNFNFNGLTGTGVLTESNKKFLPFQQFGRDIADTTDAVRDPQTLEILDITPCSFGGVSVITPGTNTSNQVAVLYQGVNCTEVPVAIHADQLTPTWRVYSTGSNVFQTRAGCLIGAEHVNNSYECDIPIGAGICASYQTQTNSPRRARSVASQSIIAYTMSLGAENSVAYSNNSCAIPTNFTISVTTEILPVSMTKTSVDCTMYICGDSTECSNLLLQYGSFCTQLNRALTGIAVEQDKNTQEVFAQVKQIYKTPPIKDFGGFNFSQILPDPSKPSKRSFIEDLLFNKVTLADAGFIKQYGDCLGDIAARDLICAQKFNGLTVLPPLLTDEMIAQYTSALLAGTITSGWTFGAGAALQIPFAMQMAYRFNGIGVTQNVLYENQKLIANQFNSAIGKIQDSLSSTAPALGKLQDVVNQNAQALNTLVKQLSSNFGAISSVLNDILSRLDKVEAEVQIDRLITGRLQSLQTYVTQQLIRAAEIRASANLAATKMSECVLGQSKRVDFCGKGYHLMSFPQSAPHGVVFLHVTYVPAQEKNFTCAPAICHDGKAHFPREGVFVSNGTHWFVTQRNFYEPQIITTDNTFVSGNCDVVIGIVNNTVYDPLQPELDSFKEELDKYFKNHTSPDVDLGDISGINASVVNIQKEIDRLNEVAKNLNESLIDLQELGKYEQYIKGGGGSDIDPYKEFGSSYQLLNFLPLDFFPDLNALVDTATALYEEELTGREHCSPHHTAIRQALVCWDELTKLIAWMSSNITSEQVRTIIVNHVNDTWGLKVRQSLWFHLSCLTFGQHTVQEFLVSFGVWIRTPAPYRPPNAPILSTLPEHTVIC

SEQ ID NO: 7001 - protein, 1365 aa, Artificial Sequence
  SARS-CoV-2/Germany/BavPat3/2020__EPI_ISL_414521 spike protein (1-1211)(I712C_T1077C) WhcAg construct
MFVFLVLLPLVSSQCVNLTTRTQLPPAYTNSFTRGVYYPDKVFRSSVLHSTQDLFLPFFSNVTWFHAIHVSGTNGTKRFDNPVLPFNDGVYFASTEKSNIIRGWIFGTTLDSKTQSLLIVNNATNVVIKVCEFQFCNDPFLGVYYHKNNKSWMESEFRVYSSANNCTFEYVSQPFLMDLEGKQGNFKNLREFVFKNIDGYFKIYSKHTPINLVRDLPQGFSALEPLVDLPIGINITRFQTLLALHRSYLTPGDSSSGWTAGAAAYYVGYLQPRTFLLKYNENGTITDAVDCALDPLSETKCTLKSFTVEKGIYQTSNFRVQPTESIVRFPNITNLCPFGEVFNATRFASVYAWNRKRISNCVADYSVLYNSASFSTFKCYGVSPTKLNDLCFTNVYADSFVIRGDEVRQIAPGQTGKIADYNYKLPDDFTGCVIAWNSNNLDSKVGGNYNYLYRLFRKSNLKPFERDISTEIYQAGSTPCNGVEGFNCYFPLQSYGFQPTNGVGYQPYRVVVLSFELLHAPATVCGPKKSTNLVKNKCVNFNFNGLTGTGVLTESNKKFLPFQQFGRDIADTTDAVRDPQTLEILDITPCSFGGVSVITPGTNTSNQVAVLYQDVNCTEVPVAIHADQLTPTWRVYSTGSNVFQTRAGCLIGAEHVNNSYECDIPIGAGICASYQTQTNSPRRARSVASQSIIAYTMSLGAENSVAYSNNSCAIPTNFTISVTTEILPVSMTKTSVDCTMYICGDSTECSNLLLQYGSFCTQLNRALTGIAVEQDKNTQQVFAQVKQIYKTPPIKDFGGFNFSQILPDPSKPSKRSFIEDLLFNKVTLADAGFIKQYGDCLGDIAARDLICAQKFNGLTVLPPLLTDEMIAQYTSALLAGTITSGWTFGAGAALQIPFAMQMAYRFNGIGVTQNVLYENQKLIANQFNSAIGKIQDSLSSTASALGKLQDVVNQNAQALNTLVKQLSSNFGAISSVLNDILSRLDKVEAEVQIDRLITGRLQSLQTYVTQQLIRAAEIRASANLAATKMSECVLGQSKRVDFCGKGYHLMSFPQSAPHGVVFLHVTYVPAQEKNFTCAPAICHDGKAHFPREGVFVSNGTHWFVTQRNFYEPQIITTDNTFVSGNCDVVIGIVNNTVYDPLQPELDSFKEELDKYFKNHTSPDVDLGDISGINASVVNIQKEIDRLNEVAKNLNESLIDLQELGKYEQYIKGGGGSDIDPYKEFGSSYQLLNFLPLDFFPDLNALVDTATALYEEELTGREHCSPHHTAIRQALVCWDELTKLIAWMSSNITSEQVRTIIVNHVNDTWGLKVRQSLWFHLSCLTFGQHTVQEFLVSFGVWIRTPAPYRPPNAPILSTLPEHTVIC

SEQ ID NO: 7002 - protein, 1365 aa, Artificial Sequence
  SARS-CoV-2/France/HF1805/2020__EPI_ISL_414628 spike protein (1-1211)(I712C_T1077C) WhcAg construct
MFVFLVLLPLVSSQCVNLTTRTQLPPAYTNSFTRGVYYPDKVFRSSVLHSTQDLFLPFFSNVTWFHAIHVSGTNGTKRFDNPVLPFNDGVYFASTEKSNIIRGWIFGTTLDSKTQSLLIVNNATNVVIKVCEFQFCNDPFLGVYYHKNNKSWMESEFRVYSSANNCTFEYVSQPFLMDLEGKQGNFKNLREFVFKNIDGYFKIYSKHTPINLVRDLPQGFSALEPLVDLPIGINITRFQTLLALHRSYLTPGDSSSGWTAGAAAYYVGYLQPRTFLLKYNENGTITDAVDCALDPLSETKCTLKSFTVEKGIYQTSNFRVQPTESIVRFPNITNLCPFGEVFNATRFASVYAWNRKRISNCVADYSVLYNSASFSTFKCYGVSPTKLNDLCFTNVYADSFVIRGDEVRQIAPGQTGKIADYNYKLPDDFTGCVIAWNSNNLDSKVGGNYNYLYRLFRKSNLKPFERDISTEIYQAGSTPCNGVEGFNCYFPLQSYGFQPTNGVGYQPYRVVVLSFELLHAPATVCGPKKSTNLVKNKCVNFNFNGLTGTGVLTESNKKFLPFQQFGRDIADTTDAVRDPQTLEILDITPCSFGGVSVITPGTNTSNQVAVLYQGVNCTEVPVAIHADQLTPTWRVYSTGSNVFQTRAGCLIGAEHVNNSYECDIPIGAGICASYQTQTNSPRRARSVASQSIIAYTMSLGAENSVAYSNNSCAIPTNFTISVTTEILPVSMTKTSVDCTMYICGDSTECSNLLLQYGSFCTQLNRALTGIAVEQDKNTQEVFAQVKQIYKTPPIKDFGGFNFSQILPDPSKPSKRSFIEDLLFNKVTLADAGFIKQYGDCLGDIAARDLICAQKFNGLTVLPPLLTDEMIAQYTSALLAGTITSGWTFGAGAALQIPFAMQMAYRFNGIGVTQNVLYENQKLIANQFNSAIGKIQDSLSSTASALGKLQDVVNQNAQALNTLVKQLSSNFGAISSVLNDILSRLDKVEAEVQIDRLITGRLQSLQTYVTQQLIRAAEIRASANLAATKMSECVLGQSKRVDFCGKGYHLMSFPQSAPHGVVFLHVTYVPAQEKNFTCAPAICHDGKAHFPREGVFVSNGTHWFVTQRNFYEPQIITTDNTFVSGNCDVVIGVVNNTVYDPLQPELDSFKEELDKYFKNHTSPDVDLGDISGINASVVNIQKEIDRLNEVAKNLNESLIDLQELGKYEQYIKGGGGSDIDPYKEFGSSYQLLNFLPLDFFPDLNALVDTATALYEEELTGREHCSPHHTAIRQALVCWDELTKLIAWMSSNITSEQVRTIIVNHVNDTWGLKVRQSLWFHLSCLTFGQHTVQEFLVSFGVWIRTPAPYRPPNAPILSTLPEHTVIC

SEQ ID NO: 7003 - protein, 1365 aa, Artificial Sequence
  SARS-CoV-2/Netherlands/ZuidHolland_9/2020__EPI_ISL_414445 spike protein (1-1211)(I712C_T1077C) WhcAg construct
MFVFLVLLPLVSSQCVNLTTRTQLPPAYTNSFTRGVYYPDKVFRSSVLHSTQDLFLPFFSNVTWFHAIHVSGTNGTKRFDNPVLPFNDGVYFASTEKSNIIRGWIFGTTLDSKTQSLLIVNNATNVVIKVCEFQFCNDPFLGVYYHKNNKSWMESEFRVYSSANNCTFEYVSQPFLMDLEGKQGNFKNLREFVFKNIDGYFKIYSKHTPINLVRDLPQGFSALEPLVDLPIGINITRFQTLLALHRSYLTPGDSSSGWTAGAAAYYVGYLQPRTFLLKYNENGTITDAVDCALDPLSETKCTLKSFTVEKGIYQTSNFRVQPTESIVRFPNITNLCPFGEVFNATRFASVYAWNRKRISNCVADYSVLYNSASFSTFKCYGVSPTKLNDLCFTNVYADSFVIRGDEVRQIAPGQTGKIADYNYKLPDDFTGCVIAWNSNNLDSKVGGNYNYLYRLFRKSNLKPFERDISTEIYQAGSTPCNGVEGFNCYFPLQSYGFQPTNGVGYQPYRVVVLSFELLHAPATVCGPKKSTNLVKNKCVNFNFNGLTGTGVLTESNKKFLPFQQFGRDIADTTDAVRDPQTLEILDITPCSFGGVSVITPGTNTSNQVAVLYQGVNCTEVPVAIHADQLTPTWRVYSTGSNVFQTRAGCLIGAEHVNNSYECDIPIGAGICASYQTQTNSPRRARSVASQSIIAYTMSLGAENSVAYSNNSCAIPTNFTISVTTEILPVSMTKTSVDCTMYICGDSTECSNLLLQYGSFCTQLNRALTGIAVEQDKNTQEVFAQVKQIYKTPPIKDFGGFNFSQILPDPSKPSKRSFIEDLLFNKVTLADAGFIKQYGDCLGDIAARDLICVQKFNGLTVLPPLLTDEMIAQYTSALLAGTITSGWTFGAGAALQIPFAMQMAYRFNGIGVTQNVLYENQKLIANQFNSAIGKIQDSLSSTASALGKLQDVVNQNAQALNTLVKQLSSNFGAISSVLNDILSRLDKVEAEVQIDRLITGRLQSLQTYVTQQLIRAAEIRASANLAATKMSECVLGQSKRVDFCGKGYHLMSFPQSAPHGVVFLHVTYVPAQEKNFTCAPAICHDGKAHFPREGVFVSNGTHWFVTQRNFYEPQIITTDNTFVSGNCDVVIGIVNNTVYDPLQPELDSFKEELDKYFKNHTSPDVDLGDISGINASVVNIQKEIDRLNEVAKNLNESLIDLQELGKYEQYIKGGGGSDIDPYKEFGSSYQLLNFLPLDFFPDLNALVDTATALYEEELTGREHCSPHHTAIRQALVCWDELTKLIAWMSSNITSEQVRTIIVNHVNDTWGLKVRQSLWFHLSCLTFGQHTVQEFLVSFGVWIRTPAPYRPPNAPILSTLPEHTVIC

SEQ ID NO: 7004 - protein, 1365 aa, Artificial Sequence
  SARS-CoV-2/Finland/FIN03032020A/2020__EPI_ISL_413602 spike protein (1-1211)(I712C_T1077C) WhcAg construct
MFVFLVLLPLVSSQCVNLTTRTQLPPAYTNSFTRGVYYPDKVFRSSVLHSTQDLFLPFFSNVTWFHAIHVSGTNGTKRFDNPVLPFNDGVYFASTEKSNIIRGWIFGTTLDSKTQSLLIVNNATNVVIKVCEFQFCNDPFLGVYYHKNNKSWMESEFRVYSSANNCTFEYVSQPFLMDLEGKQGNFKNLREFVFKNIDGYFKIYSKHTPINLVRDLPQGFSALEPLVDLPIGINITRFQTLLALHRSYLTPGDSSSGWTAGAAAYYVGYLQPRTFLLKYNENGTITDAVDCALDPLSETKCTLKSFTVEKGIYQTSNFRVQPTESIVRFPNITNLCPFGEVFNATRFASVYAWNRKRISNCVADYSVLYNSASFSTFKCYGVSPTKLNDLCFTNVYADSFVIRGDEVRQIAPGQTGKIADYNYKLPDDFTGCVISWNSNNLDSKVGGNYNYLYRLFRKSNLKPFERDISTEIYQAGSTPCNGVEGFNCYFPLQSYGFQPTNGVGYQPYRVVVLSFELLHAPATVCGPKKSTNLVKNKCVNFNFNGLTGTGVLTESNKKFLPFQQFGRDIADTTDAVRDPQTLEILDITPCSFGGVSVITPGTNTSNQVAVLYQGVNCTEVPVAIHADQLTPTWRVYSTGSNVFQTRAGCLIGAEHVNNSYECDIPIGAGICASYQTQTNSPRRARSVASQSIIAYTMSLGAENSVAYSNNSCAIPTNFTISVTTEILPVSMTKTSVDCTMYICGDSTECSNLLLQYGSFCTQLNRALTGIAVEQDKNTQEVFAQVKQIYKTPPIKDFGGFNFSQILPDPSKPSKRSFIEDLLFNKVTLADAGFIKQYGDCLGDIAARDLICAQKFNGLTVLPPLLTDEMIAQYTSALLAGTITSGWTFGAGAALQIPFAMQMAYRFNGIGVTQNVLYENQKLIANQFNSAIGKIQDSLSSTASALGKLQDVVNQNAQALNTLVKQLSSNFGAISSVLNDILSRLDKVEAEVQIDRLITGRLQSLQTYVTQQLIRAAEIRASANLAATKMSECVLGQSKRVDFCGKGYHLMSFPQSAPHGVVFLHVTYVPAQEKNFTCAPAICHDGKAHFPREGVFVSNGTHWFVTQRNFYEPQIITTDNTFVSGNCDVVIGIVNNTVYDPLQPELDSFKEELDKYFKNHTSPDVDLGDISGINASVVNIQKEIDRLNEVAKNLNESLIDLQELGKYEQYIKGGGGSDIDPYKEFGSSYQLLNFLPLDFFPDLNALVDTATALYEEELTGREHCSPHHTAIRQALVCWDELTKLIAWMSSNITSEQVRTIIVNHVNDTWGLKVRQSLWFHLSCLTFGQHTVQEFLVSFGVWIRTPAPYRPPNAPILSTLPEHTVIC

SEQ ID NO: 7005 - protein, 1365 aa, Artificial Sequence
  SARS-CoV-2/France/GE1977/2020__EPI_ISL_414632 spike protein (1-1211)(I712C_T1077C) WhcAg construct
MFVFLVLLPLVSSQCVNLTTRTQLPPAYTNSFTRGVYYPDKVFRSSVLHSTQDLFLPFFSNVTWFHAIHVSGTNGTKRFDNPVLPFNDGVYFASTEKSNIIRGWIFGTTLDSKTQSLLIVNNATNVVIKVCEFQFCNDPFLGVYYHKNNKSWMESEFRVYSSANNCTFEYVSQPFLMDLEGKQGNFKNLREFVFKNIDGYFKIYSKHTPINLVRDLPQGFSALEPLVDLPIGINITRFQTLLALHRSYLTPGDSSSGWTAGAAAYYVGYLQPRTFLLKYNENGTITDAVDCALDPLSETKCTLKSFTVEKGIYQTSNFRVQPTESIVRFPNITNLCPFGEVFNATRFASVYAWNRKRISNCVADYSVLYNSASFSTFKCYGVSPTKLNDLCFTNVYADSFVIRGDEVRQIAPGQTGKIADYNYKLPDDFTGCVIAWNSNNLDSKVGGNYNYLYRLFRKSNLKPFERDISTEIYQAGSTPCNGVEGFNCYFPLQSYGFQPTNGVGYQPYRVVVLSFELLHAPATVCGPKKSTNLVKNKCVNFNFNGLTGTGVLTESNKKFLPFQQFGRDIADTTDAVRDPQTLEILDITPCSFGGVSVITPGTNTSNQVAVLYQGVNCTEVPVAIHADQLTPTWRVYSTGSNVFQTRAGCLIGAEHVNNSYECDIPIGAGICASYQTQTNSPRRARSVASQSIIAYTMSLGAENSVAYSNNSCAIPTNFTISVTTEILPVSMTKTSVDCTMYICGDSTECSNLLLQYGSFCTQLNRALTGIAVEQDKNTQEVFAQVKQIYKTPPIKDFGGFNFSQILPDPSKPSKRSFIEDLLFNKVTLADAGFIKQYGDCLGDIAARDLICAQKFNGLTVLPPLLTDEMIAQYTSALLAGTITSGWTFGAGAALQIPFAMQMAYRFNGIGVTQNVLYENQKLIANQFNSAIGKIQDSLFSTASALGKLQDVVNQNAQALNTLVKQLSSNFGAISSVLNDILSRLDKVEAEVQIDRLITGRLQSLQTYVTQQLIRAAEIRASANLAATKMSECVLGQSKRVDFCGKGYHLMSFPQSAPHGVVFLHVTYVPAQEKNFTCAPAICHDGKAHFPREGVFVSNGTHWFVTQRNFYEPQIITTDNTFVSGNCDVVIGIVNNTVYDPLQPELDSFKEELDKYFKNHTSPDVDLGDISGINASVVNIQKEIDRLNEVAKNLNESLIDLQELGKYEQYIKGGGGSDIDPYKEFGSSYQLLNFLPLDFFPDLNALVDTATALYEEELTGREHCSPHHTAIRQALVCWDELTKLIAWMSSNITSEQVRTIIVNHVNDTWGLKVRQSLWFHLSCLTFGQHTVQEFLVSFGVWIRTPAPYRPPNAPILSTLPEHTVIC

SEQ ID NO: 7006 - protein, 1365 aa, Artificial Sequence
  SARS-CoV-2/Finland/FIN-313/2020__EPI_ISL_414641 spike protein (1-1211)(I712C_T1077C) WhcAg construct
MFVFLVLLPLVSSQCVNLTTRTQLPPAYTNSFTRGVYYPDKVFRSSVLHSTQDLFLPFFSNVTWFHAIHVSGTNGTKRFDNPVLPFNDGVYFASTEKSNIIRGWIFGTTLDSKTQSLLIVNNATNVVIKVCEFQFCNDPFLGVYYHKNNKSWMESEFRVYSSANNCTFEYVSQPFLMDLEGKQGNFKNLREFVFKNIDGYFKIYSKHTPINLVRDLPQGFSALEPLVDLPIGINITRFKTLLALHRSYLTPGDSSSGWTAGAAAYYVGYLQPRTFLLKYNENGTITDAVDCALDPLSETKCTLKSFTVEKGIYQTSNFRVQPTESIVRFPNITNLCPFGEVFNATRFASVYAWNRKRISNCVADYSVLYNSASFSTFKCYGVSPTKLNDLCFTNVYADSFVIRGDEVRQIAPGQTGKIADYNYKLPDDFTGCVIAWNSNNLDSKVGGNYNYLYRLFRKSNLKPFERDISTEIYQAGSTPCNGVEGFNCYFPLQSYGFQPTNGVGYQPYRVVVLSFELLHAPATVCGPKKSTNLVKNKCVNFNFNGLTGTGVLTESNKKFLPFQQFGRDIADTTDAVRDPQTLEILDITPCSFGGVSVITPGTNTSNQVAVLYQGVNCTEVPVAIHADQLTPTWRVYSTGSNVFQTRAGCLIGAEHVNNSYECDIPIGAGICASYQTQTNSPRRARSVASQSIIAYTMSLGAENSVAYSNNSCAIPTNFTISVTTEILPVSMTKTSVDCTMYICGDSTECSNLLLQYGSFCTQLNRALTGIAVEQDKNTQEVFAQVKQIYKTPPIKDFGGFNFSQILPDPSKPSKRSFIEDLLFNKVTLADAGFIKQYGDCLGDIAARDLICAQKFNGLTVLPPLLTDEMIAQYTSALLAGTITSGWTFGAGAALQIPFAMQMAYRFNGIGVTQNVLYENQKLIANQFNSAIGKIQDSLSSTASALGKLQDVVNQNAQALNTLVKQLSSNFGAISSVLNDILSRLDKVEAEVQIDRLITGRLQSLQTYVTQQLIRAAEIRASANLAATKMSECVLGQSKRVDFCGKGYHLMSFPQSAPHGVVFLHVTYVPAQEKNFTCAPAICHDGKAHFPREGVFVSNGTHWFVTQRNFYEPQIITTDNTFVSGNCDVVIGIVNNTVYDPLQPELDSFKEELDKYFKNHTSPDVDLGDISGINASVVNIQKEIDRLNEVAKNLNESLIDLQELGKYEQYIKGGGGSDIDPYKEFGSSYQLLNFLPLDFFPDLNALVDTATALYEEELTGREHCSPHHTAIRQALVCWDELTKLIAWMSSNITSEQVRTIIVNHVNDTWGLKVRQSLWFHLSCLTFGQHTVQEFLVSFGVWIRTPAPYRPPNAPILSTLPEHTVIC

SEQ ID NO: 7007 - protein, 1365 aa, Artificial Sequence
  SARS-CoV-2/Netherlands/ZuidHolland_2/2020__EPI_ISL_414556 spike protein (1-1211)(I712C_T1077C) WhcAg construct
MFVFLVLLPLVSSQCVNLTTRTQLPPAYTNSFTRGVYYPDKVFRSSVLHSTQDLFLPFFSNVTWFHAIHVSGTNGTKRFDNPVLPFNDGVYFASTEKSNIIRGWIFGTTLDSKTQSLLIVNNATNVVIKVCEFQFCNDPFLGVYYHKNNKSWMESEFRVYSSANNCTFEYVSQPFLMDLEGKQGNFKNLREFVFKNIDGYFKIYSKHTPINLVRDLPQGFSALEPLVDLPIGINITRFQTLLALHRSYLTPGDSSSGWTAGAAAYYVGYLQPRTFLLKYNENGTITDAVDCALDPLSETKCTLKSFTVEKGIYQTSNFRVQPTESIVRFPNITNLCPFGEVFNATRFASVYAWNRKRISNCVADYSVLYNSASFSTFKCYGVSPTKLNDLCFTNVYADSFVIRGDEVRQIAPGQTGKIADYNYKLPDDFTGCVIAWNSNNLDSKVGGNYNYLYRLFRKSNLKPFERDISTEIYQAGSTPCNGVEGFNCYFPLQSYGFQPTNGVGYQPYRVVVLSFELLHAPATVCGPKKSTNLVKNKCVNFNFNGLTGTGVLTESNKKFLPFQQFGRDIADTTDAVRDPQTLEILDITPCSFGGVSVITPGTNTSNQVAVLYQGVNCTEVPVAIHADQLTPTWRVYSTGSNVFQTRAGCLIGAEHVNNSYECDIPIGAGICASYQTQTNSPRRARSVASQSIIAYTMSLGAENSVAYSNNSCAIPTNFTISVTTEILPVSMTKTSVDCTMYICGDSTECSNLLLQYGSFCTQLNRALTGIALEQDKNTQEVFAQVKQIYKTPPIKDFGGFNFSQILPDPSKPSKRSFIEDLLFNKVTLADAGFIKQYGDCLGDIAARDLICAQKFNGLTVLPPLLTDEMIAQYTSALLAGTITSGWTFGAGAALQIPFAMQMAYRFNGIGVTQNVLYENQKLIANQFNSAIGKIQDSLSSTASALGKLQDVVNQNAQALNTLVKQLSSNFGAISSVLNDILSRLDKVEAEVQIDRLITGRLQSLQTYVTQQLIRAAEIRASANLAATKMSECVLGQSKRVDFCGKGYHLMSFPQSAPHGVVFLHVTYVPAQEKNFTCAPAICHDGKAHFPREGVFVSNGTHWFVTQRNFYEPQIITTDNTFVSGNCDVVIGIVNNTVYDPLQPELDSFKEELDKYFKNHTSPDVDLGDISGINASVVNIQKEIDRLNEVAKNLNESLIDLQELGKYEQYIKGGGGSDIDPYKEFGSSYQLLNFLPLDFFPDLNALVDTATALYEEELTGREHCSPHHTAIRQALVCWDELTKLIAWMSSNITSEQVRTIIVNHVNDTWGLKVRQSLWFHLSCLTFGQHTVQEFLVSFGVWIRTPAPYRPPNAPILSTLPEHTVIC

SEQ ID NO: 7008 - protein, 1365 aa, Artificial Sequence
  SARS-CoV-2/USA/WA-UW31/2020__EPI_ISL_414618 spike protein (1-1211)(I712C_T1077C) WhcAg construct
MFVFLVLLPLVSSQCVNLTTRTQLPPAYTNSFTRGVYYPDKVFRSSVLHSTQDLFLPFFSNVTWFHAIHVSGTNGTKRFDNPVLPFNDGVYFASTEKSNIIRGWIFGTTLDSKTQSLLIVNNATNVVIKVCEFQFCNDPFLGVYYHKNNKSWMESEFRVYSSANNCTFEYVSQPFLMDLEGKQGNFKNLREFVFKNIDGYFKIYSKHTPINLVRDLPQGFSALEPLVDLPIGINITRFQTLLALHRSYLTPGDSSSGWTAGAAAYYVGYLQPRTFLLKYNENGTITDAVDCALDPLSETKCTLKSFTVEKGIYQTSNFRVQPTESIVRFPNITNLCPFGEVFNATRFASVYAWNRKRISNCVADYSVLYNSASFSTFKCYGVSPTKLNDLCFTNVYADSFVIRGDEVRQIAPGQTGKIADYNYKLPDDFTGCVIAWNSNNLDSKVGGNYNYLYRLFRKSNLKPFERDISTEIYQAGSTPCNGAEGFNCYFPLQSYGFQPTNGVGYQPYRVVVLSFELLHAPATVCGPKKSTNLVKNKCVNFNFNGLTGTGVLTESNKKFLPFQQFGRDIADTTDAVRDPQTLEILDITPCSFGGVSVITPGTNTSNQVAVLYQDVNCTEVPVAIHADQLTPTWRVYSTGSNVFQTRAGCLIGAEHVNNSYECDIPIGAGICASYQTQTNSPRRARSVASQSIIAYTMSLGAENSVAYSNNSCAIPTNFTISVTTEILPVSMTKTSVDCTMYICGDSTECSNLLLQYGSFCTQLNRALTGIAVEQDKNTQEVFAQVKQIYKTPPIKDFGGFNFSQILPDPSKPSKRSFIEDLLFNKVTLADAGFIKQYGDCLGDIAARDLICAQKFNGLTVLPPLLTDEMIAQYTSALLAGTITSGWTFGAGAALQIPFAMQMAYRFNGIGVTQNVLYENQKLIANQFNSAIGKIQDSLSSTASALGKLQDVVNQNAQALNTLVKQLSSNFGAISSVLNDILSRLDKVEAEVQIDRLITGRLQSLQTYVTQQLIRAAEIRASANLAATKMSECVLGQSKRVDFCGKGYHLMSFPQSAPHGVVFLHVTYVPAQEKNFTCAPAICHDGKAHFPREGVFVSNGTHWFVTQRNFYEPQIITTDNTFVSGNCDVVIGIVNNTVYDPLQPELDSFKEELDKYFKNHTSPDVDLGDISGINASVVNIQKEIDRLNEVAKNLNESLIDLQELGKYEQYIKGGGGSDIDPYKEFGSSYQLLNFLPLDFFPDLNALVDTATALYEEELTGREHCSPHHTAIRQALVCWDELTKLIAWMSSNITSEQVRTIIVNHVNDTWGLKVRQSLWFHLSCLTFGQHTVQEFLVSFGVWIRTPAPYRPPNAPILSTLPEHTVIC

SEQ ID NO: 7009 - protein, 1365 aa, Artificial Sequence
  SARS-CoV-2/South Korea/SNU01/2020__EPI_ISL_411929 spike protein (1-1211)(I712C_T1077C) WhcAg construct
MFVFLVLLPLVSSQCVNLTTRTQLPPAYTNSFTRGVYYPDKVFRSSVLHSTQDLFLPFFSNVTWFHAIHVSGTNGTKRFDNPVLPFNDGVYFASTEKSNIIRGWIFGTTLDSKTQSLLIVNNATNVVIKVCEFQFCNDPFLGVYYHKNNKSWMESEFRVYSSANNCTFEYVSQPFLMDLEGKQGNFKNLREFVFKNIDGYFKIYSKHTPINLVRDLPQGFWALEPLVDLPIGINITRFQTLLALHRSYLTPGDSSSGWTAGAAAYYVGYLQPRTFLLKYNENGTITDAVDCALDPLSETKCTLKSFTVEKGIYQTSNFRVQPTESIVRFPNITNLCPFGEVFNATRFASVYAWNRKRISNCVADYSVLYNSASFSTFKCYGVSPTKLNDLCFTNVYADSFVIRGDEVRQIAPGQTGKIADYNYKLPDDFTGCVIAWNSNNLDSKVGGNYNYLYRLFRKSNLKPFERDISTEIYQAGSTPCNGVEGFNCYFPLQSYGFQPTNGVGYQPYRVVVLSFELLHAPATVCGPKKSTNLVKNKCVNFNFNGLTGTGVLTESNKKFLPFQQFGRDIADTTDAVRDPQTLEILDITPCSFGGVSVITPGTNTSNQVAVLYQDVNCTEVPVAIHADQLTPTWRVYSTGSNVFQTRAGCLIGAEHVNNSYECDIPIGAGICASYQTQTNSPRRARSVASQSIIAYTMSLGAENSVAYSNNSCAIPTNFTISVTTEILPVSMTKTSVDCTMYICGDSTECSNLLLQYGSFCTQLNRALTGIAVEQDKNTQEVFAQVKQIYKTPPIKDFGGFNFSQILPDPSKPSKRSFIEDLLFNKVTLADAGFIKQYGDCLGDIAARDLICAQKFNGLTVLPPLLTDEMIAQYTSALLAGTITSGWTFGAGAALQIPFAMQMAYRFNGIGVTQNVLYENQKLIANQFNSAIGKIQDSLSSTASALGKLQDVVNQNAQALNTLVKQLSSNFGAISSVLNDILSRLDKVEAEVQIDRLITGRLQSLQTYVTQQLIRAAEIRASANLAATKMSECVLGQSKRVDFCGKGYHLMSFPQSAPHGVVFLHVTYVPAQEKNFTCAPAICHDGKAHFPREGVFVSNGTHWFVTQRNFYEPQIITTDNTFVSGNCDVVIGIVNNTVYDPLQPELDSFKEELDKYFKNHTSPDVDLGDISGINASVVNIQKEIDRLNEVAKNLNESLIDLQELGKYEQYIKGGGGSDIDPYKEFGSSYQLLNFLPLDFFPDLNALVDTATALYEEELTGREHCSPHHTAIRQALVCWDELTKLIAWMSSNITSEQVRTIIVNHVNDTWGLKVRQSLWFHLSCLTFGQHTVQEFLVSFGVWIRTPAPYRPPNAPILSTLPEHTVIC

SEQ ID NO: 7010 - protein, 1365 aa, Artificial Sequence
  SARS-CoV-2/China/WF0004/2020__EPI_ISL_413694 spike protein (1-1211)(I712C_T1077C) WhcAg construct
MFVFLVLLPLVSSQCVNLTTRTQLPPAYTNSFTRGVYYPDKVFRSSVLHSTQDLFLPFFSNVTWFHAIHVSGTNGTKRFDNPVLPFNDGVYFASTEKSNIIRGWIFGTTLDSKTQSLLIVNNATNVVIKVCEFQFCNDPFLGVYYHKNNKSWTESEFRVYSSANNCTFEYVSQPFLMDLEGKQGNFKNLREFVFKNIDGYFKIYSKHTPINLVRDLPQGFSALEPLVDLPIGINITRFQTLLALHRSYLTPGDSSSGWTAGAAAYYVGYLQPRTFLLKYNENGTITDAVDCALDPLSETKCTLKSFTVEKGIYQTSNFRVQPTESIVRFPNITNLCPFGEVFNATRFASVYAWNRKRISNCVADYSVLYNSASFSTFKCYGVSPTKLNDLCFTNVYADSFVIRGDEVRQIAPGQTGKIADYNYKLPDDFTGCVIAWNSNNLDSKVGGNYNYLYRLFRKSNLKPFERDISTEIYQAGSTPCNGVEGFNCYFPLQSYGFQPTNGVGYQPYRVVVLSFELLHAPATVCGPKKSTNLVKNKCVNFNFNGLTGTGVLTESNKKFLPFQQFGRDIADTTDAVRDPQTLEILDITPCSFGGVSVITPGTNTSNQVAVLYQDVNCTEVPVAIHADQLTPTWRVYSTGSNVFQTRAGCLIGAEHVNNSYECDIPIGAGICASYQTQTNSPRRARSVASQSIIAYTMSLGAENSVAYSNNSCAIPTNFTISVTTEILPVSMTKTSVDCTMYICGDSTECSNLLLQYGSFCTQLNRALTGIAVEQDKNTQEVFAQVKQIYKTPPIKDFGGFNFSQILPDPSKPSKRSFIEDLLFNKVTLADAGFIKQYGDCLGDIAARDLICAQKFNGLTVLPPLLTDEMIAQYTSALLAGTITSGWTFGAGAALQIPFAMQMAYRFNGIGVTQNVLYENQKLIANQFNSAIGKIQDSLSSTASALGKLQDVVNQNAQALNTLVKQLSSNFGAISSVLNDILSRLDKVEAEVQIDRLITGRLQSLQTYVTQQLIRAAEIRASANLAATKMSECVLGQSKRFDFCGKGYHLMSFPQSAPHGVVFLHVTYVPAQEKNFTCAPAICHDGKAHFPREGVFVSNGTHWFVTQRNFYEPQIITTDNTFVSGNCDVVIGIVNNTVYDPLQPELDSFKEELDKYFKNHTSPDVDLGDISGINASVVNIQKEIDRLNEVAKNLNESLIDLQELGKYEQYIKGGGGSDIDPYKEFGSSYQLLNFLPLDFFPDLNALVDTATALYEEELTGREHCSPHHTAIRQALVCWDELTKLIAWMSSNITSEQVRTIIVNHVNDTWGLKVRQSLWFHLSCLTFGQHTVQEFLVSFGVWIRTPAPYRPPNAPILSTLPEHTVIC

SEQ ID NO: 7011 - protein, 1365 aa, Artificial Sequence
  SARS-CoV-2/China/WF0028/2020__EPI_ISL_413791 spike protein (1-1211)(I712C_T1077C) WhcAg construct
MFVFLVLLPLVSSQCVNLTTRTQLPPAYTNSFTRGVYYPDKVFRSSVLHSTQDLFLPFFSNVTWFHAIHVSGTNGTKRFDNPVLPFNDGVYFASTEKSNIIRGWIFGTTLDSKTQSLLIVNNATNVVIKVCEFQFCNDPFLGVYYHKNNKSWMESEFRVYSSANNCTFEYVSQPFLMDLEGKQGNFKNLREFVFKNIDGYFKIYSKHTPINLVRDLPQGFSALEPLVDLPIGINITRFQTLLALHRSYLTPGDSSSGWTAGAAAYYVGYLQPRTFLLKYNENGTITDAVDCALDPLSETKCTLKSFTVEKGIYQTSNFRVQPTESIVRFPNITNLCPFGEVFNATRFASVYAWNRKRISNCVADYSVLYNSASFSTFKCYGVSPTKLNDLCFTNVYADSFVIRGDEVRQIAPGQTGKIADYNYKLPDDFTGCVIAWNSNNLDSKVGGNYNYLYRLFRKSNLKPFERDISTEIYQAGSTPCNGVEGFNCYFPLQSYGFQPTNGVGYQPYRVVVLSFELLHAPATVCGPKKSTNLVKNKCVNFNFNGLTGTGVLTESNKKFLPFQQFGRDIADTTDAVRDPQTLEILDITPCSFGGVSVITPGTNTSNQVAVLYQDVNCTEVPVAIHADQLTPTWRVYSTGSNVFQTRAGCLIGAEHVNNSYECDIPIGAGICASYQTQTNSPRRARSVASQSIIAYTMSLGAENSVAYSNNSCAIPTNFTISVTTEILPVSMTKTSVDCTMYICGDSTECSNLLLQYGSFCTQLNRALTGIAVEQDKNTQEVFAQVKQIYKTPPIKDFGGFNFSQILPDPSKPSKRSFIEDLLFNKVTLADAGFIKQYGDCLGDIAARDLICAQKFNGLTVLPPLLTDEMIAQYTSALLAGTITSGWTFGAGAALQIPFAMQMAYRFNGIGVTQNVLYENQKLIANQFNSAIGKIQDSLSSTASALGKLQDVVNQNAQALNTLVKQLSSNFGAISSVLNDILSRLDKVEAEVQIDRLITGRLQSLQTYVTQQLIRAAEIRASANLAATKMSECVLGQSKRVDFCGKGYHLMSFPQSAPHGVVFLHVTYVPAQEKNFTCAPAICHDGKAHFPREGVFVSNGTHWFVTQRNFYEPQIITTDNTFVSGNCDVVIGIVNNTVYDPLQPELESFKEELDKYFKNHTSPDVDLGDISGINASVVNIQKEIDRLNEVAKNLNESLIDLQELGKYEQYIKGGGGSDIDPYKEFGSSYQLLNFLPLDFFPDLNALVDTATALYEEELTGREHCSPHHTAIRQALVCWDELTKLIAWMSSNITSEQVRTIIVNHVNDTWGLKVRQSLWFHLSCLTFGQHTVQEFLVSFGVWIRTPAPYRPPNAPILSTLPEHTVIC

SEQ ID NO: 7012 - protein, 1365 aa, Artificial Sequence
  SARS-CoV-2/2019-nCoV/USA-CruiseA-18/2020__MT159716.1 spike protein (1-1211)(I712C_T1077C) WhcAg construct
MFVFLVLLPLVSSQCVNLTTRTQLPPAYTNSFTRGVYYPDKVFRSSVLHSTQDLFLPFFSNVTWFHAIHVSGTNGTKRFDNPVLPFNDGVYFASTEKSNIIRGWIFGTTLDSKTQSLLIVNNATNVVIKVCEFQFCNDPFLGVYYHKNNKSWMESELRVYSSANNCTFEYVSQPFLMDLEGKQGNFKNLREFVFKNIDGYFKIYSKHTPINLVRDLPQGFSALEPLVDLPIGINITRFQTLLALHRSYLTPGDSSSGWTAGAAAYYVGYLQPRTFLLKYNENGTITDAVDCALDPLSETKCTLKSFTVEKGIYQTSNFRVQPTESIVRFPNITNLCPFGEVFNATRFASVYAWNRKRISNCVADYSVLYNSASFSTFKCYGVSPTKLNDLCFTNVYADSFVIRGDEVRQIAPGQTGKIADYNYKLPDDFTGCVIAWNSNNLDSKVGGNYNYLYRLFRKSNLKPFERDISTEIYQAGSTPCNGVEGFNCYFPLQSYGFQPTNGVGYQPYRVVVLSFELLHAPATVCGPKKSTNLVKNKCVNFNFNGLTGTGVLTESNKKFLPFQQFGRDIADTTDAVRDPQTLEILDITPCSFGGVSVITPGTNTSNQVAVLYQDVNCTEVPVAIHADQLTPTWRVYSTGSNVFQTRAGCLIGAEHVNNSYECDIPIGAGICASYQTQTNSPRRARSVASQSIIAYTMSLGAENSVAYSNNSCAIPTNFTISVTTEILPVSMTKTSVDCTMYICGDSTECSNLLLQYGSFCTQLNRALTGIAVEQDKNTQEVFAQVKQIYKTPPIKDFGGFNFSQILPDPSKPSKRSFIEDLLFNKVTLADAGFIKQYGDCLGDIAARDLICAQKFNGLTVLPPLLTDEMIAQYTSALLAGTITSGWTFGAGAALQIPFAMQMAYRFNGIGVTQNVLYENQKLIANQFNSAIGKIQDSLSSTASALGKLQDVVNQNAQALNTLVKQLSSNFGAISSVLNDILSRLDKVEAEVQIDRLITGRLQSLQTYVTQQLIRAAEIRASANLAATKMSECVLGQSKRVDFCGKGYHLMSFPQSAPHGVVFLHVTYVPAQEKNFTCAPAICHDGKAHFPREGVFVSNGTHWFVTQRNFYEPQIITTDNTFVSGNCDVVIGIVNNTVYDPLQPELDSFKEELDKYFKNHTSPDVDLGDISGINASVVNIQKEIDRLNEVAKNLNESLIDLQELGKYEQYIKGGGGSDIDPYKEFGSSYQLLNFLPLDFFPDLNALVDTATALYEEELTGREHCSPHHTAIRQALVCWDELTKLIAWMSSNITSEQVRTIIVNHVNDTWGLKVRQSLWFHLSCLTFGQHTVQEFLVSFGVWIRTPAPYRPPNAPILSTLPEHTVIC

SEQ ID NO: 7013 - protein, 1365 aa, Artificial Sequence
  SARS-CoV-2/SARS-CoV-2/Yunnan-01/human/2020/CHN__MT049951.1 spike protein (1-1211)(I712C_T1077C) WhcAg construct
MFVFLVLLPLVSSQCVNLTTRTQLPPANTNSFTRGVYYPDKVFRSSVLHSTQDLFLPFFSNVTWFHAIHVSGTNGTKRFDNPVLPFNDGVYFASTEKSNIIRGWIFGTTLDSKTQSLLIVNNATNVVIKVCEFQFCNDPFLGVYYHKNNKSWMESEFRVYSSANNCTFEYVSQPFLMDLEGKQGNFKNLREFVFKNIDGYFKIYSKHTPINLVRDLPQGFSALEPLVDLPIGINITRFQTLLALHRSYLTPGDSSSGWTAGAAAYYVGYLQPRTFLLKYNENGTITDAVDCALDPLSETKCTLKSFTVEKGIYQTSNFRVQPTESIVRFPNITNLCPFGEVFNATRFASVYAWNRKRISNCVADYSVLYNSASFSTFKCYGVSPTKLNDLCFTNVYADSFVIRGDEVRQIAPGQTGKIADYNYKLPDDFTGCVIAWNSNNLDSKVGGNYNYLYRLFRKSNLKPFERDISTEIYQAGSTPCNGVEGFNCYFPLQSYGFQPTNGVGYQPYRVVVLSFELLHAPATVCGPKKSTNLVKNKCVNFNFNGLTGTGVLTESNKKFLPFQQFGRDIADTTDAVRDPQTLEILDITPCSFGGVSVITPGTNTSNQVAVLYQDVNCTEVPVAIHADQLTPTWRVYSTGSNVFQTRAGCLIGAEHVNNSYECDIPIGAGICASYQTQTNSPRRARSVASQSIIAYTMSLGAENSVAYSNNSCAIPTNFTISVTTEILPVSMTKTSVDCTMYICGDSTECSNLLLQYGSFCTQLNRALTGIAVEQDKNTQEVFAQVKQIYKTPPIKDFGGFNFSQILPDPSKPSKRSFIEDLLFNKVTLADAGFIKQYGDCLGDIAARDLICAQKFNGLTVLPPLLTDEMIAQYTSALLAGTITSGWTFGAGAALQIPFAMQMAYRFNGIGVTQNVLYENQKLIANQFNSAIGKIQDSLSSTASALGKLQDVVNQNAQALNTLVKQLSSNFGAISSVLNDILSRLDKVEAEVQIDRLITGRLQSLQTYVTQQLIRAAEIRASANLAATKMSECVLGQSKRVDFCGKGYHLMSFPQSAPHGVVFLHVTYVPAQEKNFTCAPAICHDGKAHFPREGVFVSNGTHWFVTQRNFYEPQIITTDNTFVSGNCDVVIGIVNNTVYDPLQPELDSFKEELDKYFKNHTSPDVDLGDISGINASVVNIQKEIDRLNEVAKNLNESLIDLQELGKYEQYIKGGGGSDIDPYKEFGSSYQLLNFLPLDFFPDLNALVDTATALYEEELTGREHCSPHHTAIRQALVCWDELTKLIAWMSSNITSEQVRTIIVNHVNDTWGLKVRQSLWFHLSCLTFGQHTVQEFLVSFGVWIRTPAPYRPPNAPILSTLPEHTVIC

SEQ ID NO: 7014 - protein, 1365 aa, Artificial Sequence
  SARS-CoV-2/USA/WA-UW292/2020__EPI_ISL_418077 spike protein (1-1211)(I712C_T1077C) WhcAg construct
MFVFLVLLPLVSSQCVNLTTRTQLPPAYTNSFTRGVYYPDKVFRSSVLHSTQDLFLPFFSNVTWFHAIHVSGTNGTKRFDNPVLPFNDGVYFASTEKSNIIRGWIFGTTLDSKTQSLLIVNNATNVVIKVCEFQFCNDPFLGVYYHKNNKSWMESEFRVYSSANNCTFEYVSQPFLMDLEGKQGNFKNLREFVFKNIDGYFKIYSKHTPINLVRDLPQGFSALEPLVDLPIGINITRFQTLLALHRSYLTPGDSSSGWTAGAAAYYVGYLQPRTFLLKYNENGTITDAVDCALDPLSETKCTLKSFTVEKGIYQTSNFRVQPTESIVRFPNITNLCPFGEVFNATRFASVYAWNRKRISNCVADYSVLYNSASFSTFKCYGVSPTKLNDLCFTNVYADSFVIRGDEVRQIAPGQTGKIADYNYKLPDDFTGCVIAWNSNNLDSKVGGNYNYLYRLFRKSNLKPFERDISTEIYQASSTPCNGVEGFNCYFPLQSYGFQPTNGVGYQPYRVVVLSFELLHAPATVCGPKKSTNLVKNKCVNFNFNGLTGTGVLTESNKKFLPFQQFGRDIADTTDAVRDPQTLEILDITPCSFGGVSVITPGTNTSNQVAVLYQDVNCTEVPVAIHADQLTPTWRVYSTGSNVFQTRAGCLIGAEHVNNSYECDIPIGAGICASYQTQTNSPRRARSVASQSIIAYTMSLGAENSVAYSNNSCAIPTNFTISVTTEILPVSMTKTSVDCTMYICGDSTECSNLLLQYGSFCTQLNRALTGIAVEQDKNTQEVFAQVKQIYKTPPIKDFGGFNFSQILPDPSKPSKRSFIEDLLFNKVTLADAGFIKQYGDCLGDIAARDLICAQKFNGLTVLPPLLTDEMIAQYTSALLAGTITSGWTFGAGAALQIPFAMQMAYRFNGIGVTQNVLYENQKLIANQFNSAIGKIQDSLSSTASALGKLQDVVNQNAQALNTLVKQLSSNFGAISSVLNDILSRLDKVEAEVQIDRLITGRLQSLQTYVTQQLIRAAEIRASANLAATKMSECVLGQSKRVDFCGKGYHLMSFPQSAPHGVVFLHVTYVPAQEKNFTCAPAICHDGKAHFPREGVFVSNGTHWFVTQRNFYEPQIITTDNTFVSGNCDVVIGIVNNTVYDPLQPELDSFKEELDKYFKNHTSPDVDLGDISGINASVVNIQKEIDRLNEVAKNLNESLIDLQELGKYEQYIKGGGGSDIDPYKEFGSSYQLLNFLPLDFFPDLNALVDTATALYEEELTGREHCSPHHTAIRQALVCWDELTKLIAWMSSNITSEQVRTIIVNHVNDTWGLKVRQSLWFHLSCLTFGQHTVQEFLVSFGVWIRTPAPYRPPNAPILSTLPEHTVIC

SEQ ID NO: 7015 - protein, 1365 aa, Artificial Sequence
  SARS-CoV-2/Iceland/192/2020__EPI_ISL_417819 spike protein (1-1211)(I712C_T1077C) WhcAg construct
MFVFFVLLPLVSSQCVNLTTRTQLPPAYTNSFTRGVYYPDKVFRSSVLHSTQDLFLPFFSNVTWFHAIHVSGTNGTKRFDNPVLPFNDGVYFASTEKSNIIRGWIFGTTLDSKTQSLLIVNNATNVVIKVCEFQFCNDPFLGVYYHKNNKSWMESEFRVYSSANNCTFEYVSQPFLMDLEGKQGNFKNLREFVFKNIDGYFKIYSKHTPINLVRDLPQGFSALEPLVDLPIGINITRFQTLLALHRSYLTPGDSSSGWTAGAAAYYVGYLQPRTFLLKYNENGTITDAVDCALDPLSETKCTLKSFTVEKGIYQTSNFRVQPTESIVRFPNITNLCPFGEVFNATRFASVYAWNRKRISNCVADYSVLYNSASFSTFKCYGVSPTKLNDLCFTNVYADSFVIRGDEVRQIAPGQTGKIADYNYKLPDDFTGCVIAWNSNNLDSKVGGNYNYLYRLFRKSNLKPFERDISTEIYQAGSTPCNGVEGFNCYFPLQSYGFQPTNGVGYQPYRVVVLSFELLHAPATVCGPKKSTNLVKNKCVNFNFNGLTGTGVLTESNKKFLPFQQFGRDIADTTDAVRDPQTLEILDITPCSFGGVSVITPGTNTSNQVAVLYQGVNCTEVPVAIHADQLTPTWRVYSTGSNVFQTRAGCLIGAEHVNNSYECDIPIGAGICASYQTQTNSPRRARSVASQSIIAYTMSLGAENSVAYSNNSCAIPTNFTISVTTEILPVSMTKTSVDCTMYICGDSTECSNLLLQYGSFCTQLNRALTGIAVEQDKNTQEVFAQVKQIYKTPPIKDFGGFNFSQILPDPSKPSKRSFIEDLLFNKVTLADAGFIKQYGDCLGDIAARDLICAQKFNGLTVLPPLLTDEMIAQYTSALLAGTITSGWTFGAGAALQIPFAMQMAYRFNGIGVTQNVLYENQKLIANQFNSAIGKIQDSLSSTASALGKLQDVVNQNAQALNTLVKQLSSNFGAISSVLNDILSRLDKVEAEVQIDRLITGRLQSLQTYVTQQLIRAAEIRASANLAATKMSECVLGQSKRVDFCGKGYHLMSFPQSAPHGVVFLHVTYVPAQEKNFTCAPAICHDGKAHFPREGVFVSNGTHWFVTQRNFYEPQIITTDNTFVSGNCDVVIGIVNNTVYDPLQPELDSFKEELDKYFKNHTSPDVDLGDISGINASVVNIQKEIDRLNEVAKNLNESLIDLQELGKYEQYIKGGGGSDIDPYKEFGSSYQLLNFLPLDFFPDLNALVDTATALYEEELTGREHCSPHHTAIRQALVCWDELTKLIAWMSSNITSEQVRTIIVNHVNDTWGLKVRQSLWFHLSCLTFGQHTVQEFLVSFGVWIRTPAPYRPPNAPILSTLPEHTVIC

SEQ ID NO: 7016 - protein, 1365 aa, Artificial Sequence
  SARS-CoV-2/Belgium/ULG-6939/2020__EPI_ISL_417020 spike protein (1-1211)(I712C_T1077C) WhcAg construct
MFVFLVLLPLVSSQCVNLTTRTQLPPAYTNSFTRGVYYPDKVFRSSVLHSTQDLFLPFFSNVTWFHAIHVSGTNGTKRFDNPVLPFNDGVYFASTEKSNIIRGWIFGTTLDSKTQSLLIVNNATNVVIKVCEFQFCNDPFLGVYYHKNNKSWMESEFRVYSSANNCTFEYVSQPFLMDLEGKQGNFKNLREFVFKNIDGYFKIYSKHTPINLVRDLPQGFSALEPLVDLPIGINITRFQTLLALHRSYLTPGDSSSGWTAGAAAYYVGYLQPRTFLLKYNENGTITDAVDCALDPLSETKCTLKSFTVEKGIYQTSNFRVQPTESIVRFPNITNLCPFGEVFNATRFASVYAWNRKRISNCVADYSVLYNSASFSTFKCYGVSPTKLNDLCFTNVYADSFVIRGDEVRQIAPGQTGKIADYNYKLPDDFTGCVIAWNSNNLDSKVGGNYNYLYRLFRKSNLKPFERDISTEIYQAGSTPCNGVEGFNCYFPLQSYGFQPTNGVGYQPYRVVVLSFELLHAPATVCGPKKSTNLVKNKCVNFNFNGLTGTGVLTESNKKFLPFQQFGRDIADTTDAVRDPQTLEILDITPCSFGGVSVITPGTNTSNQVAVLYQGVNCTEVPVAIHADQLTPTWRVYSTGSNVFQTRAGCLIGAEHVNNSYECDIPIGAGICASYQTQTNSPRRARSVASQSIIAYTMSLGAENSVVYSNNSCAIPTNFTISVTTEILPVSMTKTSVDCTMYICGDSTECSNLLLQYGSFCTQLNRALTGIAVEQDKNTQEVFAQVKQIYKTPPIKDFGGFNFSQILPDPSKPSKRSFIEDLLFNKVTLADAGFIKQYGDCLGDIAARDLICAQKFNGLTVLPPLLTDEMIAQYTSALLAGTITSGWTFGAGAALQIPFAMQMAYRFNGIGVTQNVLYENQKLIANQFNSAIGKIQDSLSSTASALGKLQDVVNQNAQALNTLVKQLSSNFGAISSVLNDILSRLDKVEAEVQIDRLITGRLQSLQTYVTQQLIRAAEIRASANLAATKMSECVLGQSKRVDFCGKGYHLMSFPQSAPHGVVFLHVTYVPAQEKNFTCAPAICHDGKAHFPREGVFVSNGTHWFVTQRNFYEPQIITTDNTFVSGNCDVVIGIVNNTVYDPLQPELDSFKEELDKYFKNHTSPDVDLGDISGINASVVNIQKEIDRLNEVAKNLNESLIDLQELGKYEQYIKGGGGSDIDPYKEFGSSYQLLNFLPLDFFPDLNALVDTATALYEEELTGREHCSPHHTAIRQALVCWDELTKLIAWMSSNITSEQVRTIIVNHVNDTWGLKVRQSLWFHLSCLTFGQHTVQEFLVSFGVWIRTPAPYRPPNAPILSTLPEHTVIC

SEQ ID NO: 7017 - protein, 1365 aa, Artificial Sequence
  SARS-CoV-2/France/HF2496/2020__EPI_ISL_418231 spike protein (1-1211)(I712C_T1077C) WhcAg construct
MFVFLVLLPLVSSQCVNLTTRTQLPPAYTNSFTRGVYYPDKVFRSSVLHSTQDLFLPFFSNVTWFHAIHVSGTNGTKRFDNPVLPFNDGVYFASTEKSNIIRGWIFGTTLDSKTQSLLIVNNATNVVIKVCEFQFCNDPFLGVYYHKNNKSWMESEFRVYSSANNCTFEYVSQPFLMDLEGKQGNFKNLREFVFKNIDGYFKIYSKHTPINLVRDLPQGFSALEPLVDLPIGINITRFQTLLALHRSYLTPGDSSSGWTAGAAAYYVGYLQPRTFLLKYNENGTITDAVDCALDPLSETKCTLKSFTVEKGIYQTSNFRVQPTESIVRFPNITNLCPFGEVFNATRFASVYAWNRKRISNCVADYSVLYNSASFSTFKCYGVSPTKLNDLCFTNVYADSFVIRGDEVRQIAPGQTGKIADYNYKLPDDFTGCVIAWNSNNLDSKVGGNYNYLYRLFRKSNLKPFERDISTEIYQAGSTPCNGVEGFNCYFPLQSYGFQPTNGVGYQPYRVVVLSFELLHAPATVCGPKKSTNLVKNKCVNFNFNGLTGTGVLTESNKKFLPFQQFGRDIADTTDAVRDPQTLEILDITPCSFGGVSVITPGTNTSNQVAVLYQGVNCTEVPVAIHADQLTPTWRVYSTGSNVFQTRAGCLIGAEHVNNSYECDIPIGAGICASYQTQTNSPRRARSVASQSIIAYTMSLGAENSVAYSNNSCAIPTNFTISVTTEILPVSMTKTSVDCTMYICGDSTECSNLLLQYGSFCTQLNRALTGIAVEQDKNTQEVFAQVKQIYKTPPIKDFGGFNFSQILPDPSKPSKRSFIEDLLFNKVTLADAGFIKQYGDCLGDIVARDLICAQKFNGLTVLPPLLTDEMIAQYTSALLAGTITSGWTFGAGAALQIPFAMQMAYRFNGIGVTQNVLYENQKLIANQFNSAIGKIQDSLSSTASALGKLQDVVNQNAQALNTLVKQLSSNFGAISSVLNDILSRLDKVEAEVQIDRLITGRLQSLQTYVTQQLIRAAEIRASANLAATKMSECVLGQSKRVDFCGKGYHLMSFPQSAPHGVVFLHVTYVPAQEKNFTCAPAICHDGKAHFPREGVFVSNGTHWFVTQRNFYEPQIITTDNTFVSGNCDVVIGIVNNTVYDPLQPELDSFKEELDKYFKNHTSPDVDLGDISGINASVVNIQKEIDRLNEVAKNLNESLIDLQELGKYEQYIKGGGGSDIDPYKEFGSSYQLLNFLPLDFFPDLNALVDTATALYEEELTGREHCSPHHTAIRQALVCWDELTKLIAWMSSNITSEQVRTIIVNHVNDTWGLKVRQSLWFHLSCLTFGQHTVQEFLVSFGVWIRTPAPYRPPNAPILSTLPEHTVIC

SEQ ID NO: 7018 - protein, 1365 aa, Artificial Sequence
  SARS-CoV-2/USA/WA-UW291/2020__EPI_ISL_418076 spike protein (1-1211)(I712C_T1077C) WhcAg construct
MFVFLVLLPLVSSQCVNLTTRTQLPPAYTNSFTRGVYYPDKVFRSSVLHSTQDLFLPFFSNVTWFHAIHVSGTNGTKRFDNPVLPFNDGVYFASTEKSNIIRGWIFGTTLDSKTQSLLIVNNATNVVIKVCEFQFCNDPFLGVYYHKNNKSWMESEFRVYSSANNCTFEYVSQPFLMDLEGKQGNFKNLREFVFKNIDGYFKIYSKHTPINLVRDLPQGFSALEPLVDLPIGINITRFQTLLALHRSYLTPGDSSSGWTAGAAAYYVGYLQPRTFLLKYNENGTITDAVDCALDPLSETKCTLKSFTVEKGIYQTSNFRVQPTESIVRFPNITNLCPFGEVFNATRFASVYAWNRKRISNCVADYSVLYNSASFSTFKCYGVSPTKLNDLCFTNVYADSFVIRGDEVRQIAPGQTGKIADYNYKLPDDFTGCVIAWNSNNLDSKVGGNYNYLYRLFRKSNLKPFERDISTEIYQAGSTPCNGVEGFNCYFPLQSYGFQPTNGVGYQPYRVVVLSFELLHAPATVCGPKKSTNLVKNKCVNFNFNGLTGTGVLTESNKKFLPFQQFGRDIADTTDAVRDPQTLEILDITPCSFGGVSVITPGTNTSNQVAVLYQGVNCTEVPVAIHADQLTPTWRVYSTGSNVFQTRAGCLIGAEHVNNSYECDIPIGAGICASYQTQTNSPRRARSVASQSIIAYTMSLGAENSVAYSNNSCAIPTNFTISVTTEILPVSMTKTSVDCTMYICGDSTECSNLLLQYGSFCTQLNRALTGIAVEQDKNTQEVFAQVKQIYKTPPIKDFGGFNFSQILPDPSKPSKRSFIEDLLFNKVTLADAGFIKQYGDCLGDIAARDLICAQKFNGLTVLPPLLTDEMIAQYTSALLAGTITSGWTFGAGAALQIPFAMQMAYRFNGIGVTQNVLYENQKLIANQFNSAIGKIQYSLSSTASALGKLQDVVNQNAQALNTLVKQLSSNFGAISSVLNDILSRLDKVEAEVQIDRLITGRLQSLQTYVTQQLIRAAEIRASANLAATKMSECVLGQSKRVDFCGKGYHLMSFPQSAPHGVVFLHVTYVPAQEKNFTCAPAICHDGKAHFPREGVFVSNGTHWFVTQRNFYEPQIITTDNTFVSGNCDVVIGIVNNTVYDPLQPELDSFKEELDKYFKNHTSPDVDLGDISGINASVVNIQKEIDRLNEVAKNLNESLIDLQELGKYEQYIKGGGGSDIDPYKEFGSSYQLLNFLPLDFFPDLNALVDTATALYEEELTGREHCSPHHTAIRQALVCWDELTKLIAWMSSNITSEQVRTIIVNHVNDTWGLKVRQSLWFHLSCLTFGQHTVQEFLVSFGVWIRTPAPYRPPNAPILSTLPEHTVIC

SEQ ID NO: 7019 - protein, 1365 aa, Artificial Sequence; identical to SEQ ID NO: 6982
  SARS-CoV-2/Portugal/PT0034/2020__EPI_ISL_418019 spike protein (1-1211)(I712C_T1077C) WhcAg construct

SEQ ID NO: 7020 - protein, 1365 aa, Artificial Sequence
  SARS-CoV-2/Iceland/202/2020__EPI_ISL_417750 spike protein (1-1211)(I712C_T1077C) WhcAg construct
MFVFLVLLPLVSSQCVNLTTRTQLPPAYTNSFTRGVYYPDKVFRSSVLHSTQDLFLPFFSNVTWFHAIHVSGTNGTKRFDNPVLPFNDGVYFASTEKSNIIRGWIFGTTLDSKTQSLLIVNNATNVVIKVCEFQFCNDPFLGVYYHKNNKSWMESEFRVYSSANNCTFEYVSQPFLMDLEGKQGNFKNLREFVFKNIDGYFKIYSKHTPINLVRDLPQGFSALEPLVDLPIGINITRFQTLLALHRSYLTPGDSSSGWTAGAAAYYVGYLQPRTFLLKYNENGTITDAVDCALDPLSETKCTLKSFTVEKGIYQTSNFRVQPTESIVRFPNITNLCPFGEVFNATRFASVYAWNRKRISNCVADYSVLYNSASFSTFKCYGVSPTKLNDLCFTNVYADSFVIRGDEVRQIAPGQTGKIADYNYKLPDDFTGCVIAWNSNNLDSKVGGNYNYLYRLFRKSNLKPFERDISTEIYQAGSTPCNGVEGFNCYFPLQSYGFQPTNGVGYQPYRVVVLSFELLHAPATVCGPKKSTNLVKNKCVNFNFNGLTGTGVLTESNKKFLPFQQFGRDIADTTDAVRDPQTLEILDITPCSFGGVSVITPGTNTSNQVAVLYQDVNCTEVPVAIHADQLTPTWRVYSTGSNVFQTRAGCLIGAEHVNNSYECDIPIGAGICASYQTQTNSPRRARSVASQSIIAYTMSLGAENSVAYSNNSCAIPTNFTISVTTEILPVSMTKTSVDCTMYICGDSTECSNLLLQYGSFCTQLNRALTGIAVEQDKNTQEVFAQVKQIYKTPPIKDFGGFNFSQILPDPSKPSKRSFIEDLLFNKVTLADAGFIKQYGDCLGDIAARDLICAQKFNGLTVLPPLLTDEMIAQYTSALLAGTITSGWTFGAGAALQIPFAMQMAYRFNGIGVTQNVLYENQKLIANQFNSAIGKIQDSLSSTASALGKLQDVVNQNAQALNTLVKQLSSNFGAISSVLNDILSRLDKVEAEVQIDRLITGRLQSLQTYVTQQLIRAAEIRASANLAATKMSECVLGQSKRVDFCGKGYHLMSFPQSAPHGVVFLHVTYVPAQEKNFTCAPAICHDGKAHFPREGVFVSNGTHWFVTQRNFYEPQIITTDNTFVSGNCDVVIGIVNNTVYDPLQPELDSFKEELDKYFKNHTSPDVDLGDIPGINASVVNIQKEIDRLNEVAKNLNESLIDLQELGKYEQYIKGGGGSDIDPYKEFGSSYQLLNFLPLDFFPDLNALVDTATALYEEELTGREHCSPHHTAIRQALVCWDELTKLIAWMSSNITSEQVRTIIVNHVNDTWGLKVRQSLWFHLSCLTFGQHTVQEFLVSFGVWIRTPAPYRPPNAPILSTLPEHTVIC

SEQ ID NO: 7021 - protein, 1365 aa, Artificial Sequence
  SARS-CoV-2/USA/WA-UW261/2020__EPI_ISL_418046 spike protein (1-1211)(I712C_T1077C) WhcAg construct
MFVFLVLLPLVSSQCVNLTTRTQLPPAYTNSFTRGVYYPDKVFRSSVLHSTQDLFLPFFSNVTWFHAIHVSGTNGTKRFDNPVLPFNDGVYFASTEKSNIIRGWIFGTTLDSKTQSLLIVNNATNVVIKVCEFQFCNDPFLGVYYHKNNKSWMESEFRVYSSANNCTFEYVSQPFLMDLEGKQGNFKNLREFVFKNIDGYFKIYSKHTPINLVRDLPQGFSALEPLVDLPIGINITRFQTLLALHRSYLTPGDSSSGWTAGAAAYYVGYLQPRTFLLKYNENGTITDAVDCALDPLSETKCTLKSFTVEKGIYQTSNFRVQPTESIVRFPNITNLCPFGEVFNATRFTSVYAWNRKRISNCVADYSVLYNSASFSTFKCYGVSPTKLNDLCFTNVYADSFVIRGDEVRQIAPGQTGKIADYNYKLPDDFTGCVIAWNSNNLDSKVGGNYNYLYRLFRKSNLKPFERDISTEIYQAGSTPCNGVEGFNCYFPLQSYGFQPTNGVGYQPYRVVVLSFELLHAPATVCGPKKSTNLVKNKCVNFNFNGLTGTGVLTESNKKFLPFQQFGRDIADTTDAVRDPQTLEILDITPCSFGGVSVITPGTNTSNQVAVLYQDVNCTEVPVAIHADQLTPTWRVYSTGSNVFQTRAGCLIGAEHVNNSYECDIPIGAGICASYQTQTNSPRRARSVASQSIIAYTMSLGAENSVAYSNNSCAIPTNFTISVTTEILPVSMTKTSVDCTMYICGDSTECSNLLLQYGSFCTQLNRALTGIAVEQDKNTQEVFAQVKQIYKTPPIKDFGGFNFSQILPDPSKPSKRSFIEDLLFNKVTLADAGFIKQYGDCLGDIAARDLICAQKFNGLTVLPPLLTDEMIAQYTSALLAGTITSGWTFGAGAALQIPFAMQMAYRFNGIGVTQNVLYENQKLIANQFNSAIGKIQDSLSSTASALGKLQDVVNQNAQALNTLVKQLSSNFGAISSVLNDILSRLDKVEAEVQIDRLITGRLQSLQTYVTQQLIRAAEIRASANLAATKMSECVLGQSKRVDFCGKGYHLMSFPQSAPHGVVFLHVTYVPAQEKNFTCAPAICHDGKAHFPREGVFVSNGTHWFVTQRNFYEPQIITTDNTFVSGNCDVVIGIVNNTVYDPLQPELDSFKEELDKYFKNHTSPDVDLGDISGINASVVNIQKEIDRLNEVAKNLNESLIDLQELGKYEQYIKGGGGSDIDPYKEFGSSYQLLNFLPLDFFPDLNALVDTATALYEEELTGREHCSPHHTAIRQALVCWDELTKLIAWMSSNITSEQVRTIIVNHVNDTWGLKVRQSLWFHLSCLTFGQHTVQEFLVSFGVWIRTPAPYRPPNAPILSTLPEHTVIC

SEQ ID NO: 7022 - protein, 1365 aa, Artificial Sequence
  SARS-CoV-2/Portugal/PT0035/2020__EPI_ISL_418020 spike protein (1-1211)(I712C_T1077C) WhcAg construct
MFVFLVLLPLVSSQCVNLTTRTQLPPAYTNSFTRGVYYPDKVFRSSVLHSTQDLFLPFFSNVTWFHAIHVSGTNGTKRFDNPVLPFNDGVYFASTEKSNIIRGWIFGTTLDSKTQSLLIVNNATNVVIKVCEFQFCNDPFLGVYYHKNNKSWMESEFRVYSSANNCTFEYVSQPFLMDLEGKQGNFKNLREFVFKNIDGYFKIYSKHTPINLVRDLPQGFSALEPLVDLPIGINITRFQTLLALHRSYLTPGDSSSGWTAGAAAYYVGYLQPRTFLLKYNENGTITDAVDCALDPLSETKCTLKSFTVEKGIYQTSNFRVQPTESIVRFPNITNLCPFGEVFNATRFASVYAWNRKRISNCVADYSVLYNSASFSTFKCYGVSPTKLNDLCFTNVYADSFVIRGDEVRQIAPGQTGKIADYNYKLPDDFTGCVIAWNSNNLDSKVGGNYNYLYRLFRKSNLKPFERDISTEIYQAGSTPCNGVEGFNCYFPLQSYGFQPTNGVGYQPYRVVVLSFELLHAPATVCGPKKSTNLVKNKCVNFNFNGLTGTGVLTESNKKFLPFQQFGRDIADTTDAVRDPQTLEILDITPCSFGGVSVITPGTNTSNQVAVLYQDVNCTEVPVAIHADQLTPTWRVYSTGSNVFQTRAGCLIGAEHVNNSYECDIPIGAGICASYQTQTNSPRRARSVASQSIIAYTMSLGAENSVAYSNNSCAIPTNFTISVTTEILPVSMTKTSVDCTMYICGDSTECSNLLLQYGSFCTQLNRALTGIAVEQDKNTQEVFAQVKQIYKTPPIKDFGGFNFSQILPDPSKPSKRSFIEDLLFNKVTLADAGFIKQYGDCLGDISARDLICAQKFNGLTVLPPLLTDEMIAQYTSALLAGTITSGWTFGAGAALQIPFAMQMAYRFNGIGVTQNVLYENQKLIANQFNSAIGKIQDSLSSTASALGKLQDVVNQNAQALNTLVKQLSSNFGAISSVLNDILSRLDKVEAEVQIDRLITGRLQSLQTYVTQQLIRAAEIRASANLAATKMSECVLGQSKRVDFCGKGYHLMSFPQSAPHGVVFLHVTYVPAQEKNFTCAPAICHDGKAHFPREGVFVSNGTHWFVTQRNFYEPQIITTDNTFVSGNCDVVIGIVNNTVYDPLQPELDSFKEELDKYFKNHTSPDVDLGDISGINASVVNIQKEIDRLNEVAKNLNESLIDLQELGKYEQYIKGGGGSDIDPYKEFGSSYQLLNFLPLDFFPDLNALVDTATALYEEELTGREHCSPHHTAIRQALVCWDELTKLIAWMSSNITSEQVRTIIVNHVNDTWGLKVRQSLWFHLSCLTFGQHTVQEFLVSFGVWIRTPAPYRPPNAPILSTLPEHTVIC

SEQ ID NO: 7023 - protein, 1365 aa, Artificial Sequence
  SARS-CoV-2/USA/NY-NYUMC7/2020__EPI_ISL_418192 spike protein (1-1211)(I712C_T1077C) WhcAg construct
MFVFLVLLPLVSSQCVNLTTRTQLPPAYTNSFTRGVYYPDKVFRSSVLHSTQDLFLPFFSNVTWFHAIHVSGTNGTKRFDNPVLPFNDGVYFASTEKSNIIRGWIFGTTLDSKTQSLLIVNNATNVVIKVCEFQFCNDPFLGVYHHKNNKSWMESEFRVYSSANNCTFEYVSQPFLMDLEGKQGNFKNLREFVFKNIDGYFKIYSKHTPINLVRDLPQGFSALEPLVDLPIGINITRFQTLLALHRSYLTPGDSSSGWTAGAAAYYVGYLQPRTFLLKYNENGTITDAVDCALDPLSETKCTLKSFTVEKGIYQTSNFRVQPTESIVRFPNITNLCPFGEVFNATRFASVYAWNRKRISNCVADYSVLYNSASFSTFKCYGVSPTKLNDLCFTNVYADSFVIRGDEVRQIAPGQTGKIADYNYKLPDDFTGCVIAWNSNNLDSKVGGNYNYLYRLFRKSNLKPFERDISTEIYQAGSTPCNGVEGFNCYFPLQSYGFQPTNGVGYQPYRVVVLSFELLHAPATVCGPKKSTNLVKNKCVNFNFNGLTGTGVLTESNKKFLPFQQFGRDIADTTDAVRDPQTLEILDITPCSFGGVSVITPGTNTSNQVAVLYQGVNCTEVPVAIHADQLTPTWRVYSTGSNVFQTRAGCLIGAEHVNNSYECDIPIGAGICASYQTQTNSPRRARSVASQSIIAYTMSLGAENSVAYSNNSCAIPTNFTISVTTEILPVSMTKTSVDCTMYICGDSTECSNLLLQYGSFCTQLNRALTGIAVEQDKNTQEVFAQVKQIYKTPPIKDFGGFNFSQILPDPSKPSKRSFIEDLLFNKVTLADAGFIKQYGDCLGDIAARDLICAQKFNGLTVLPPLLTDEMIAQYTSALLAGTITSGWTFGAGAALQIPFAMQMAYRFNGIGVTQNVLYENQKLIANQFNSAIGKIQDSLSSTASALGKLQDVVNQNAQALNTLVKQLSSNFGAISSVLNDILSRLDKVEAEVQIDRLITGRLQSLQTYVTQQLIRAAEIRASANLAATKMSECVLGQSKRVDFCGKGYHLMSFPQSAPHGVVFLHVTYVPAQEKNFTCAPAICHDGKAHFPREGVFVSNGTHWFVTQRNFYEPQIITTDNTFVSGNCDVVIGIVNNTVYDPLQPELDSFKEELDKYFKNHTSPDVDLGDISGINASVVNIQKEIDRLNEVAKNLNESLIDLQELGKYEQYIKGGGGSDIDPYKEFGSSYQLLNFLPLDFFPDLNALVDTATALYEEELTGREHCSPHHTAIRQALVCWDELTKLIAWMSSNITSEQVRTIIVNHVNDTWGLKVRQSLWFHLSCLTFGQHTVQEFLVSFGVWIRTPAPYRPPNAPILSTLPEHTVIC

SEQ ID NO: 7024 - protein, 1365 aa, Artificial Sequence
  SARS-CoV-2/Iceland/189/2020__EPI_ISL_417709 spike protein (1-1211)(I712C_T1077C) WhcAg construct
MFVFLVLLPLVSSQCVNLTTRTQLPPAYTNSFTRGVYYPDKVFRSSVLHSTQDLFLPFFSNVTWFHAIHVSGTNGTKRFDNPVLPFNDGVYFASTEKSNIIRGWIFGTTLDSKTQSLLIVNNATNVVIKVCEFQFCNDPFLGVYYHKNNKSWMESEFRVYSSANNCTFEYVSQPFLMDLEGKQGNFKNLREFVFKNIDGYFKIYSKHTPINLVRDLPQGFSALEPLVDLPIGINITRFQTLLALHRSYLTPGDSSSGWTAGAAAYYVGYLQPRTFLLKYNENGTITDAVDCALDPLSETKCTLKSFTVEKGIYQTSNFRVQPTESIVRFPNITNLCPFGEVFNATRFASVYAWNRKRISNCVADYSVLYNSASFSTFKCYGVSPTKLNDLCFTNVYADSFVIRGDEVRQIAPGQTGKIADYNYKLPDDFTGCVIAWNSNNLDSKVGGNYNYLYRLFRKSNLKPFERDISTEIYQAGSTPCNGVEGFNCYFPLQSYGFQPTNGVGYQPYRVVVLSFELLHAPATVCGPKKSTNLVKNKCVNFNFNGLTGTGVLTESNKKFLPFQQFGRDIADTTDAVRDPQTLEILDITPCSFGGVSVITPGTNTSNQVAVLYQGVNCTEVPVAIHADQLTPTWRVYSTGSNVFQTRAGCLIGAEHVNNSYECDIPIGAGICASYQTQTNSPRRARSVASQSIIAYTMSLGAENSVAYSNNSCAIPTNFTISVTTEILPVSMTKTSVDCTMYICGDSTECSNLLLQYGSFCTQLNRALTGIAVEQDKNTQEVFAQVKQIYKTPPIKDFGGFNFSQILPDPSKPSKRSFIEDLLFNKVTLADAGFTKQYGDCLGDIAARDLICAQKFNGLTVLPPLLTDEMIAQYTSALLAGTITSGWTFGAGAALQIPFAMQMAYRFNGIGVTQNVLYENQKLIANQFNSAIGKIQDSLSSTASALGKLQDVVNQNAQALNTLVKQLSSNFGAISSVLNDILSRLDKVEAEVQIDRLITGRLQSLQTYVTQQLIRAAEIRASANLAATKMSECVLGQSKRVDFCGKGYHLMSFPQSAPHGVVFLHVTYVPAQEKNFTCAPAICHDGKAHFPREGVFVSNGTHWFVTQRNFYEPQIITTDNTFVSGNCDVVIGIVNNTVYDPLQPELDSFKEELDKYFKNHTSPDVDLGDISGINASVVNIQKEIDRLNEVAKNLNESLIDLQELGKYEQYIKGGGGSDIDPYKEFGSSYQLLNFLPLDFFPDLNALVDTATALYEEELTGREHCSPHHTAIRQALVCWDELTKLIAWMSSNITSEQVRTIIVNHVNDTWGLKVRQSLWFHLSCLTFGQHTVQEFLVSFGVWIRTPAPYRPPNAPILSTLPEHTVIC

SEQ ID NO: 7025 - protein, 1365 aa, Artificial Sequence
  SARS-CoV-2/Australia/NSW56/2020__EPI_ISL_417408 spike protein (1-1211)(I712C_T1077C) WhcAg construct
MFVFLVLLPLVSSQCVNLTTRTQLPPAYTNSFTRGVYYPDKVFRSSVLHSTQDLFLPFFSNVTWFHAIHVSGTNGTKRFDNPVLPFNDGVYFASTEKSNIIRGWIFGTTLDSKTQSLLIVNNATNVVIKVCEFQFCNDPFLGVYYHKNNKSWMESEFRVYSSANNCTFEYVSQPFLMDLEGKQGNFKNLREFVFKNIDGYFKIYSKHTPINLVRDLPQGFSALEPLVDLPIGINITRFQTLLALHRSYLTPGDSSSGWTAGAAAYYVGYLQPRTFLLKYNENGTITDAVDCALDPLSETKCTLKSFTVEKGIYQTSNFRVQPTESIVRFPNITNLCPFGEVFNATRFASVYAWNRKRISNCVADYSVLYNSASFSTFKCYGVSPTKLNDLCFTNVYADSFVIRGDEVRQIAPGQTGKIADYNYKLPDDFTGCVIAWNSNNLDSKVGGNYNYLYRLFRKSNLKPFERDISTEIYQAGSTPCNGVEGFNCYFPLQSYGFQPTNGVGYQPYRVVVLSFELLHAPATVCGPKKSTNLVKNKCVNFNFNGLTGTGVLTESNKKFLPFQQFGRDIADTTDAVRDPQTLEILDITPCSFGGVSVITPGTNTSNQVAVLYQDVNCTEVPVAIHADQLTPTWRVYSTGSNVFQTRAGCLIGAEHVNNSYECDIPIGAGICASYQTQTNSPRRARSVASQSIIAYTMSLGAENSVAYSNNSCAIPTNFTISVTTEILPVSMTKTSVDCTMYICGDSTECSNLLLQYGSFCTQLNRALTGIAVEQDKNTQEVFAQVKQIYKTPPIKDFGGFNFSQILPDSSKPSKRSFIEDLLFNKVTLADAGFIKQYGDCLGDIAARDLICAQKFNGLTVLPPLLTDEMIAQYTSALLAGTITSGWTFGAGAALQIPFAMQMAYRFNGIGVTQNVLYENQKLIANQFNSAIGKIQDSLSSTASALGKLQDVVNQNAQALNTLVKQLSSNFGAISSVLNDILSRLDKVEAEVQIDRLITGRLQSLQTYVTQQLIRAAEIRASANLAATKMSECVLGQSKRVDFCGKGYHLMSFPQSAPHGVVFLHVTYVPAQEKNFTCAPAICHDGKAHFPREGVFVSNGTHWFVTQRNFYEPQIITTDNTFVSGNCDVVIGIVNNTVYDPLQPELDSFKEELDKYFKNHTSPDVDLGDISGINASVVNIQKEIDRLNEVAKNLNESLIDLQELGKYEQYIKGGGGSDIDPYKEFGSSYQLLNFLPLDFFPDLNALVDTATALYEEELTGREHCSPHHTAIRQALVCWDELTKLIAWMSSNITSEQVRTIIVNHVNDTWGLKVRQSLWFHLSCLTFGQHTVQEFLVSFGVWIRTPAPYRPPNAPILSTLPEHTVIC

SEQ ID NO: 7026 - protein, 1365 aa, Artificial Sequence
  SARS-CoV-2/Iceland/280/2020__EPI_ISL_417608 spike protein (1-1211)(I712C_T1077C) WhcAg construct
MFVFLVLLPLVSSQCVNLTTRTQLPPAYTNSFTRGVYYPDKVFRSSVLHSTQDLFLPFFSNVTWFHAIHVSGTNGTKRFDNPVLPFNDGVYFASTEKSNIIRGWIFGTTLDSKTQSLLIVNNATNVVIKVCEFQFCNDPFLGVYYHKNNKSWMESEFRVYSSANNCTFEYVSQPFLMDLEGKQGNFKNLREFVFKNIDGYFKIYSKHTPINLVRDLPQGFSALEPLVDLPIGINITRFQTLLALHRSYLTPGDSSSGWTAGAAAYYVGYLQPRTFLLKYNENGTITDAVDCALDPLSETKCTLKSFTVEKGIYQTSNFRVQPTESIVRFPNITNLCPFGEVFNATRFASVYAWNRKRISNCVADYSVLYNSASFSTFKCYGVSPTKLNDLCFTNVYADSFVIRGDEVRQIAPGQTGKIADYNYKLPDDFTGCVIAWNSNNLDSKVGGNYNYLYRLFRKSNLKPFERDISTEIYQAGSTPCNGVEGFNCYFPLQSYGFQPTNGVGYQPYRVVVLSFELLHAPATVCGPKKSTNLVKNKCVNFNFNGLTGTGVLTESNKKFLPFQQFGRDIADTTDAVRDPQTLEILDITPCSFGGVSVITPGTNTSNQVAVLYQGVNCTEVPVAIHADQLTPTWRVYSTGSNVFQTRAGCLIGAEHVNNSYECDIPIGAGICASYHTQTNSPRRARSVASQSIIAYTMSLGAENSVAYSNNSCAIPTNFTISVTTEILPVSMTKTSVDCTMYICGDSTECSNLLLQYGSFCTQLNRALTGIAVEQDKNTQEVFAQVKQIYKTPPIKDFGGFNFSQILPDPSKPSKRSFIEDLLFNKVTLADAGFIKQYGDCLGDIAARDLICAQKFNGLTVLPPLLTDEMIAQYTSALLAGTITSGWTFGAGAALQIPFAMQMAYRFNGIGVTQNVLYENQKLIANQFNSAIGKIQDSLSSTASALGKLQDVVNQNAQALNTLVKQLSSNFGAISSVLNDILSRLDKVEAEVQIDRLITGRLQSLQTYVTQQLIRAAEIRASANLAATKMSECVLGQSKRVDFCGKGYHLMSFPQSAPHGVVFLHVTYVPAQEKNFTCAPAICHDGKAHFPREGVFVSNGTHWFVTQRNFYEPQIITTDNTFVSGNCDVVIGIVNNTVYDPLQPELDSFKEELDKYFKNHTSPDVDLGDISGINASVVNIQKEIDRLNEVAKNLNESLIDLQELGKYEQYIKGGGGSDIDPYKEFGSSYQLLNFLPLDFFPDLNALVDTATALYEEELTGREHCSPHHTAIRQALVCWDELTKLIAWMSSNITSEQVRTIIVNHVNDTWGLKVRQSLWFHLSCLTFGQHTVQEFLVSFGVWIRTPAPYRPPNAPILSTLPEHTVIC

SEQ ID NO: 7027 - protein, 1365 aa, Artificial Sequence; identical to SEQ ID NO: 6982
  SARS-CoV-2/Iceland/247/2020__EPI_ISL_417575 spike protein (1-1211)(I712C_T1077C) WhcAg construct

SEQ ID NO: 7028 - protein, 1365 aa, Artificial Sequence
  SARS-CoV-2/Iceland/238/2020__EPI_ISL_417566 spike protein (1-1211)(I712C_T1077C) WhcAg construct
MFVFLVLLPLVSSQCVNLTTRTQLPPAYTNSFTRGVYYPDKVFRSSVLHSTQDLFLPFFSNVTWFHAIHVSGTNGTKRFDNPVLPFNDGVYFASTEKSNIIRGWIFGTTLDSKTQSLLIVNNATNVVIKVCEFQFCNDPFLGVYYHKNNKSWMESEFRVYSSANNCTFEYVSQPFLMDLEGKQGNFKNLREFVFKNIDGYFKIYSKHTPINLVRDLPQGFSALEPLVDLPIGINITRFQTLLALHRSYLTPGDSSSGWTAGAAAYYVGYLQPRTFLLKYNENGTITDAVDCALDPLSETKCTLKSFTVEKGIYQTSNFRVQPTESIVRFPNITNLCPFGEVFNATRFASVYAWNRKRISNCVADYSVLYNSASFSTFKCYGVSPTKLNDLCFTNVYADSFVIRGDEVRQIAPGQTGKIADYNYKLPDDFTGCVIAWNSNNLDSKVGGNYNYLYRLFRKSNLKPFERDISTEIYQAGSTPCNGVEGFNCYFPLQSYGFQPTNGVGYQPYRVVVLSFELLHAPATVCGPKKSTNLVKNKCVNFNFNGLTGTGVLTESNKKFLPFQQFGRDIADTTDAVRDPQTLEILDITPCSFGGVSVITPGTNTSNQVAVLYQGVNCTEVPVAIHADQLTPTWRVYSTGSNVFQTRAGCLIGAEHVNNSYECDIPIGAGICASYQTQTNSPRRARSVASQSIIAYTMSLGAENSVAYSNNSCAIPTNFTISVTTEILPVSMTKTSVDCTMYICGDSTECSNLLLQYGSFCTQLNRALTGIAVEQDKNTQEVFAQVKQIYKTPPIKDFGGFNFSQILPDPSKPSKRSFIEDLLFNKVTLADVGFIKQYGDCLGDIAARDLICAQKFNGLTVLPPLLTDEMIAQYTSALLAGTITSGWTFGAGAALQIPFAMQMAYRFNGIGVTQNVLYENQKLIANQFNSAIGKIQDSLSSTASALGKLQDVVNQNAQALNTLVKQLSSNFGAISSVLNDILSRLDKVEAEVQIDRLITGRLQSLQTYVTQQLIRAAEIRASANLAATKMSECVLGQSKRVDFCGKGYHLMSFPQSAPHGVVFLHVTYVPAQEKNFTCAPAICHDGKAHFPREGVFVSNGTHWFVTQRNFYEPQIITTDNTFVSGNCDVVIGIVNNTVYDPLQPELDSFKEELDKYFKNHTSPDVDLGDISGINASVVNIQKEIDRLNEVAKNLNESLIDLQELGKYEQYIKGGGGSDIDPYKEFGSSYQLLNFLPLDFFPDLNALVDTATALYEEELTGREHCSPHHTAIRQALVCWDELTKLIAWMSSNITSEQVRTIIVNHVNDTWGLKVRQSLWFHLSCLTFGQHTVQEFLVSFGVWIRTPAPYRPPNAPILSTLPEHTVIC

SEQ ID NO: 7029 - protein, 1365 aa, Artificial Sequence
  SARS-CoV-2/Greece/16/2020__EPI_ISL_418265 spike protein (1-1211)(I712C_T1077C) WhcAg construct
MFVFLVLLPLVSSQCVNLTTRTQLPPAYTNSFTRGVYYPDKVFRSSVLHSTQDLFLPFFSNVTWFHAIHVSGTNGTKRFDNPVLPFNDGVYFASTEKSNIIRGWIFGTTLDSKTQSLLIVNNATNVVIKVCEFQFCNDPFLGVYYHKNNKSWMESEFRVYSSANNCTFEYVSQPFLMDLEGKQGNFKNLREFVFKNVDGYFKIYSKHTPINLVRDLPQGFSALEPLVDLPIGINITRFQTLLALHRSYLTPGDSSSGWTAGAAAYYVGYLQPRTFLLKYNENGTITDAVDCALDPLSETKCTLKSFTVEKGIYQTSNFRVQPTESIVRFPNITNLCPFGEVFNATRFASVYAWNRKRISNCVADYSVLYNSASFSTFKCYGVSPTKLNDLCFTNVYADSFVIRGDEVRQIAPGQTGKIADYNYKLPDDFTGCVIAWNSNNLDSKVGGNYNYLYRLFRKSNLKPFERDISTEIYQAGSTPCNGVEGFNCYFPLQSYGFQPTNGVGYQPYRVVVLSFELLHAPATVCGPKKSTNLVKNKCVNFNFNGLTGTGVLTESNKKFLPFQQFGRDIADTTDAVRDPQTLEILDITPCSFGGVSVITPGTNTSNQVAVLYQDVNCTEVPVAIHADQLTPTWRVYSTGSNVFQTRAGCLIGAEHVNNSYECDIPIGAGICASYQTQTNSPRRARSVASQSIIAYTMSLGAENSVAYSNNSCAIPTNFTISVTTEILPVSMTKTSVDCTMYICGDSTECSNLLLQYGSFCTQLNRALTGIAVEQDKNTQEVFAQVKQIYKTPPIKDFGGFNFSQILPDPSKPSKRSFIEDLLFNKVTLADAGFIKQYGDCLGDIAARDLICAQKFNGLTVLPPLLTDEMIAQYTSALLAGTITSGWTFGAGAALQIPFAMQMAYRFNGIGVTQNVLYENQKLIANQFNSAIGKIQDSLSSTASALGKLQDVVNQNAQALNTLVKQLSSNFGAISSVLNDILSRLDKVEAEVQIDRLITGRLQSLQTYVTQQLIRAAEIRASANLAATKMSECVLGQSKRVDFCGKGYHLMSFPQSAPHGVVFLHVTYVPAQEKNFTCAPAICHDGKAHFPREGVFVSNGTHWFVTQRNFYEPQIITTDNTFVSGNCDVVIGIVNNTVYDPLQPELDSFKEELDKYFKNHTSPDVDLGDISGINASVVNIQKEIDRLNEVAKNLNESLIDLQELGKYEQYIKGGGGSDIDPYKEFGSSYQLLNFLPLDFFPDLNALVDTATALYEEELTGREHCSPHHTAIRQALVCWDELTKLIAWMSSNITSEQVRTIIVNHVNDTWGLKVRQSLWFHLSCLTFGQHTVQEFLVSFGVWIRTPAPYRPPNAPILSTLPEHTVIC

SEQ ID NO: 7030 - protein, 1365 aa, Artificial Sequence
  SARS-CoV-2/Iceland/319/2020__EPI_ISL_417648 spike protein (1-1211)(I712C_T1077C) WhcAg construct
MFVFLVLLPLVSSQCVNLTTRTQLPPAYTNSFTRGVYYPDKVFRSSVLHSTQDLFLPFFSNVTWFHAIHVSGTNGTKRFDNPVLPFNDGVYFASTEKSNIIRGWIFGTTLDSKTQSLLIVNNATNVVIKVCEFQFCNDPFLGVYYHKNNKSWMESEFRVYSSANNCTFEYVSQPFLIDLEGKQGNFKNLREFVFKNIDGYFKIYSKHTPINLVRDLPQGFSALEPLVDLPIGINITRFQTLLALHRSYLTPGDSSSGWTAGAAAYYVGYLQPRTFLLKYNENGTITDAVDCALDPLSETKCTLKSFTVEKGIYQTSNFRVQPTESIVRFPNITNLCPFGEVFNATRFASVYAWNRKRISNCVADYSVLYNSASFSTFKCYGVSPTKLNDLCFTNVYADSFVIRGDEVRQIAPGQTGKIADYNYKLPDDFTGCVIAWNSNNLDSKVGGNYNYLYRLFRKSNLKPFERDISTEIYQAGSTPCNGVEGFNCYFPLQSYGFQPTNGVGYQPYRVVVLSFELLHAPATVCGPKKSTNLVKNKCVNFNFNGLTGTGVLTESNKKFLPFQQFGRDIADTTDAVRDPQTLEILDITPCSFGGVSVITPGTNTSNQVAVLYQGVNCTEVPVAIHADQLTPTWRVYSTGSNVFQTRAGCLIGAEHVNNSYECDIPIGAGICASYQTQTNSPRRARSVASQSIIAYTMSLGAENSVAYSNNSCAIPTNFTISVTTEILPVSMTKTSVDCTMYICGDSTECSNLLLQYGSFCTQLNRALTGIAVEQDKNTQEVFAQVKQIYKTPPIKDFGGFNFSQILPDPSKPSKRSFIEDLLFNKVTLADAGFIKQYGDCLGDIAARDLICAQKFNGLTVLPPLLTDEMIAQYTSALLAGTITSGWTFGAGAALQIPFAMQMAYRFNGIGVTQNVLYENQKLIANQFNSAIGKIQDSLSSTASALGKLQDVVNQNAQALNTLVKQLSSNFGAISSVLNDILSRLDKVEAEVQIDRLITGRLQSLQTYVTQQLIRAAEIRASANLAATKMSECVLGQSKRVDFCGKGYHLMSFPQSAPHGVVFLHVTYVPAQEKNFTCAPAICHDGKAHFPREGVFVSNGTHWFVTQRNFYEPQIITTDNTFVSGNCDVVIGIVNNTVYDPLQPELDSFKEELDKYFKNHTSPDVDLGDISGINASVVNIQKEIDRLNEVAKNLNESLIDLQELGKYEQYIKGGGGSDIDPYKEFGSSYQLLNFLPLDFFPDLNALVDTATALYEEELTGREHCSPHHTAIRQALVCWDELTKLIAWMSSNITSEQVRTIIVNHVNDTWGLKVRQSLWFHLSCLTFGQHTVQEFLVSFGVWIRTPAPYRPPNAPILSTLPEHTVIC

SEQ ID NO: 7031 - protein, 1365 aa, Artificial Sequence
  SARS-CoV-2/Congo/94/2020__EPI_ISL_417947 spike protein (1-1211)(I712C_T1077C) WhcAg construct
MFVFLVLLPLVSSQCVNLTTRTQLPPAYTNSFTRGVYYPDKVFRSSVLHSTQDLFLPFFSNVTWFHAIHVSGTNGTKRFDNPVLPFNDGVYFASTEKSNIIRGWIFGTTLDSKTQSLLIVNNATNVVIKVCEFQFCNDPFLGVYYHKNNKSWMESEFRVYSSANNCTFEYVSQPFLMDLEGKQGNFKNLREFVFKNIDGYFKIYSKHTPINLVRDLPQGFSALEPLVDLPIGINITRFQTLLALHRSYLTPGDSSSGWTAGAAAYYVGYLQPRTFLLKYNENGTITDAVDCALDPLSETKCTLKSFTVEKGIYQTSNFRVQPTESIVRFPNITNLCPFGEVFNATRFASVYAWNRKRISNCVADYSVLYNSASFSTFKCYGVSPTKLNDLCFTNVYADSFVIRGDEVRQIAPGQTGKIADYNYKLPDDFTGCVIAWNSNNLDSKVGGNYNYLYRLFRKSNLKPFERDISTEIYQAGSTPCNGVEGFNCYFPLQSYGFQPTNGVGYQPYRVVVLSFELLHAPATVCGPKKSTNLVKNKCVNFNFNGLTGTGVLTESNKKFLPFQQFGRDIADTTDAVRDPQTLEILDITPCSFGGVSVITPGTNTSNQVAVLYQGVNCTEVPVAIHADQLTPTWRVYSTGSNVFQTRAGCLIGAEHVNNSYECDIPIGAGICASYQTQTNSPRRARSVASQSIIAYTMSLGAENSVAYSNNSCAIPTNFTISVTTEILPVSMTKTSVDCTMYICGDSTECSNLLLQYGSFCTQLNRALTGIAVEQDKNTQEVFAQVKQIYKTPPIKDFGGFNFSQILPDPSKPSKRSFIEDILFNKVTLADAGFIKQYGDCLGDIAARDLICAQKFNGLTVLPPLLTDEMIAQYTSALLAGTITSGWTFGAGAALQIPFAMQMAYRFNGIGVTQNVLYENQKLIANQFNSAIGKIQDSLSSTASALGKLQDVVNQNAQALNTLVKQLSSNFGAISSVLNDILSRLDKVEAEVQIDRLITGRLQSLQTYVTQQLIRAAEIRASANLAATKMSECVLGQSKRVDFCGKGYHLMSFPQSAPHGVVFLHVTYVPAQEKNFTCAPAICHDGKAHFPREGVFVSNGTHWFVTQRNFYEPQIITTDNTFVSGNCDVVIGIVNNTVYDPLQPELDSFKEELDKYFKNHTSPDVDLGDISGINASVVNIQKEIDRLNEVAKNLNESLIDLQELGKYEQYIKGGGGSDIDPYKEFGSSYQLLNFLPLDFFPDLNALVDTATALYEEELTGREHCSPHHTAIRQALVCWDELTKLIAWMSSNITSEQVRTIIVNHVNDTWGLKVRQSLWFHLSCLTFGQHTVQEFLVSFGVWIRTPAPYRPPNAPILSTLPEHTVIC

SEQ ID NO: 7032 - protein, 1365 aa, Artificial Sequence
  SARS-CoV-2/Congo/158/2020__EPI_ISL_417950 spike protein (1-1211)(I712C_T1077C) WhcAg construct
MFVFLVLLPLVSSQCVNLTTRTQLPPAYTNSFTRGVYYPDKVFRSSVLHSTQDLFLPFFSNVTWFHAIHVSGTNGTKRFDNPVLPFNDGVYFASTEKSNIIRGWIFGTTLDSKTQSLLIVNNATNVVIKVCEFQFCNDPFLGVYYHKNNKSWMESEFRVYSSANNCTFEYVSQPFLMDLEGKQGNFKNLREFVFKNIDGYFKIYSKHTPINLVRDLPQGFSALEPLVDLPIGINITRFQTLLALHRSYLTPGDSSSGWTAGAAAYYVGYLQPRTFLLKYNENGTITDAVDCALDPLSETKCTLKSFTVEKGIYQTSNFRVQPTESIVRFPNITNLCPFGEVFNATRFASVYAWNRKRISNCVADYSVLYNSASFSTFKCYGVSPTKLNDLCFTNVYADSFVIRGDEVRQIAPGQTGKIADYNYKLPDDFTGCVIAWNSNNLDSKVGGNYNYLYRLFRKSNLKPFERDISTEIYQAGSTPCNGVEGFNCYFPLQSYGFQPTNGVGYQPYRVVVLSFELLHAPATVCGPKKSTNLVKNKCVNFNFNGLTGTGVLTESNKKFLPFQQFGRDIADTTDAVRDPQTLEILDITPCSFGGVSVITPGTNTSNQVAVLYQDVNCTEVPVAIHADQLTPTWRVYSTGSNVFQTRAGCLIGAEHVNNSYECDIPIGAGICASYQTQTNSPRRARSVASQSIIAYTMSLGAENSVAYSNNSCAIPTNFTISVTTEILPVSMTKTSVDCTMYICGDSTECSNLLLQYGSFCTQLNRALTGIAVEQDKNTQEVFAQVKQIYKTPPIKDFGGFNFSQILPDPSKPSKRSFIEDLLFNKVTLADAGFIKQYGDCLGDIAARDLICAQKFNGLTVLPPLLTDEMIAQYTSALLAGTITSGWTFGAGAALQIPFAMQMAYRFNGIGVTQNVLYENQKLIANQFNSAIGKIQDSLSSTASALGKLQDVVNQNAQALNTLVKQLSSNFGAISSVLNDILSRLDKVEAEVQIDRLITGRLQSLQTYVTQQLIRAAEIRASANLAATKMSECVLGQSKRVDFCGKGYHLMSFPQSAPHGVVFLHVTYVPAQEKNFTCAPAICHDGKAHFPREGVFVSNGTHWFVTQRNFYEPQIITTDNTFLSGNCDVVIGIVNNTVYDPLQPELDSFKEELDKYFKNHTSPDVDLGDISGINASVVNIQKEIDRLNEVAKNLNESLIDLQELGKYEQYIKGGGGSDIDPYKEFGSSYQLLNFLPLDFFPDLNALVDTATALYEEELTGREHCSPHHTAIRQALVCWDELTKLIAWMSSNITSEQVRTIIVNHVNDTWGLKVRQSLWFHLSCLTFGQHTVQEFLVSFGVWIRTPAPYRPPNAPILSTLPEHTVIC

SEQ ID NO: 7033 - protein, 1365 aa, Artificial Sequence
  SARS-CoV-2/USA/UT-00034/2020__EPI_ISL_417977 spike protein (1-1211)(I712C_T1077C) WhcAg construct
MFVFLVLLPLVSSQCVNLTTRTQLPPAYTNSFTRGVYYPDKVFRSSVLHSTQDLFLPFFSNVTWFHAIHVSGTNGTKRFDNPVLPFNDGVYFASTEKSNIIRGWIFGTTLDSKTQSLLIVNNATNVVIKVCEFQFCNDPFLGVYYYKNNKSWMESEFRVYSSANNCTFEYVSQPFLMDLEGKQGNFKNLREFVFKNIDGYFKIYSKHTPINLVRDLPQGFSALEPLVDLPIGINITRFQTLLALHRSYLTPGDSSSGWTAGAAAYYVGYLQPRTFLLKYNENGTITDAVDCALDPLSETKCTLKSFTVEKGIYQTSNFRVQPTESIVRFPNITNLCPFGEVFNATRFASVYAWNRKRISNCVADYSVLYNSASFSTFKCYGVSPTKLNDLCFTNVYADSFVIRGDEVRQIAPGQTGKIADYNYKLPDDFTGCVIAWNSNNLDSKVGGNYNYLYRLFRKSNLKPFERDISTEIYQAGSTPCNGVEGFNCYFPLQSYGFQPTNGVGYQPYRVVVLSFELLHAPATVCGPKKSTNLVKNKCVNFNFNGLTGTGVLTESNKKFLPFQQFGRDIADTTDAVRDPQTLEILDITPCSFGGVSVITPGTNTSNQVAVLYQGVNCTEVPVAIHADQLTPTWRVYSTGSNVFQTRAGCLIGAEHVNNSYECDIPIGAGICASYQTQTNSPRRARSVASQSIIAYTMSLGAENSVAYSNNSCAIPTNFTISVTTEILPVSMTKTSVDCTMYICGDSTECSNLLLQYGSFCTQLNRALTGIAVEQDKNTQEVFAQVKQIYKTPPIKDFGGFNFSQILPDPSKPSKRSFIEDLLFNKVTLADAGFIKQYGDCLGDIAARDLICAQKFNGLTVLPPLLTDEMIAQYTSALLAGTITSGWTFGAGAALQIPFAMQMAYRFNGIGVTQNVLYENQKLIANQFNSAIGKIQDSLSSTASALGKLQDVVNQNAQALNTLVKQLSSNFGAISSVLNDILSRLDKVEAEVQIDRLITGRLQSLQTYVTQQLIRAAEIRASANLAATKMSECVLGQSKRVDFCGKGYHLMSFPQSAPHGVVFLHVTYVPAQEKNFTCAPAICHDGKAHFPREGVFVSNGTHWFVTQRNFYEPQIITTDNTFVSGNCDVVIGIVNNTVYDPLQPELDSFKEELDKYFKNHTSPDVDLGDISGINASVVNIQKEIDRLNEVAKNLNESLIDLQELGKYEQYIKGGGGSDIDPYKEFGSSYQLLNFLPLDFFPDLNALVDTATALYEEELTGREHCSPHHTAIRQALVCWDELTKLIAWMSSNITSEQVRTIIVNHVNDTWGLKVRQSLWFHLSCLTFGQHTVQEFLVSFGVWIRTPAPYRPPNAPILSTLPEHTVIC

SEQ ID NO: 7034 - protein, 1365 aa, Artificial Sequence
  SARS-CoV-2/USA/UT-00033/2020__EPI_ISL_417976 spike protein (1-1211)(I712C_T1077C) WhcAg construct
MFVFLVLLPLVSSQCVNLTTRTQLPPAYTNSFTRGVYYPDKVFRSSVLHSTQDLFLPFFSNVTWFHAIHVSGTNGTKRFDNPVLPFNDGVYFASTEKSNIIRGWIFGTTLDSKTQSLLIVNNATNVVIKVCEFQFCNDPFLGVYYHKNNKSWMESEFRVYSSANNCTFEYVSQPFLMDLEGKQGNFKNLREFVFKNIDGYFKIYSKHTPINLVRDLPQGFSALEPLVDLPIGINITRFQTLLALHRSYLTPGDSSSGLTAGAAAYYVGYLQPRTFLLKYNENGTITDAVDCALDPLSETKCTLKSFTVEKGIYQTSNFRVQPTESIVRFPNITNLCPFGEVFNATRFASVYAWNRKRISNCVADYSVLYNSASFSTFKCYGVSPTKLNDLCFTNVYADSFVIRGDEVRQIAPGQTGKIADYNYKLPDDFTGCVIAWNSNNLDSKVGGNYNYLYRLFRKSNLKPFERDISTEIYQAGSTPCNGVEGFNCYFPLQSYGFQPTNGVGYQPYRVVVLSFELLHAPATVCGPKKSTNLVKNKCVNFNFNGLTGTGVLTESNKKFLPFQQFGRDIADTTDAVRDPQTLEILDITPCSFGGVSVITPGTNTSNQVAVLYQGVNCTEVPVAIHADQLTPTWRVYSTGSNVFQTRAGCLIGAEHVNNSYECDIPIGAGICASYQTQTNSPRRARSVASQSIIAYTMSLGAENSVAYSNNSCAIPTNFTISVTTEILPVSMTKTSVDCTMYICGDSTECSNLLLQYGSFCTQLNRALTGIAVEQDKNTQEVFAQVKQIYKTPPIKDFGGFNFSQILPDPSKPSKRSFIEDLLFNKVTLADAGFIKQYGDCLGDIAARDLICAQKFNGLTVLPPLLTDEMIAQYTSALLAGTITSGWTFGAGAALQIPFAMQMAYRFNGIGVTQNVLYENQKLIANQFNSAIGKIQDSLSSTASALGKLQDVVNQNAQALNTLVKQLSSNFGAISSVLNDILSRLDKVEAEVQIDRLITGRLQSLQTYVTQQLIRAAEIRASANLAATKMSECVLGQSKRVDFCGKGYHLMSFPQSAPHGVVFLHVTYVPAQEKNFTCAPAICHDGKAHFPREGVFVSNGTHWFVTQRNFYEPQIITTDNTFVSGNCDVVIGIVNNTVYDPLQPELDSFKEELDKYFKNHTSPDVDLGDISGINASVVNIQKEIDRLNEVAKNLNESLIDLQELGKYEQYIKGGGGSDIDPYKEFGSSYQLLNFLPLDFFPDLNALVDTATALYEEELTGREHCSPHHTAIRQALVCWDELTKLIAWMSSNITSEQVRTIIVNHVNDTWGLKVRQSLWFHLSCLTFGQHTVQEFLVSFGVWIRTPAPYRPPNAPILSTLPEHTVIC

SEQ ID NO: 7035 - protein, 1365 aa, Artificial Sequence
  SARS-CoV-2/USA/WI-13/2020__EPI_ISL_417516 spike protein (1-1211)(I712C_T1077C) WhcAg construct
MFVFLVLLPLVSSQCVNLTTRTQLPPAYTNSFTRGVYYPDKVFRSSVLHSTQDLFLPFFSNVTWFHAIHVSGTNGTKRFDNPVLPFNDGVYFASTEKSNIIRGWIFGTTLDSKTQSLLIVNNATNVVIKVCEFQFCNDPFLGVYYHKNNKSWMESEFRVYSSANNCTFEYVSQPFLMDLEGKQGNFKNLREFVFKNIDGYFKIYSKHTPINLVRDLPQGFSALEPLVDLPIGINITRFQTLLALHRSYLTPGDSSSGWTAGAAAYYVGYLQPRTFLLKYNENGTITDAVDCALDPLSETKCTLKSFTVEKGIYQTSNFRVLPTESIVRFPNITNLCPFGEVFNATRFASVYAWNRKRISNCVADYSVLYNSASFSTFKCYGVSPTKLNDLCFTNVYADSFVIRGDEVRQIAPGQTGKIADYNYKLPDDFTGCVIAWNSNNLDSKVGGNYNYLYRLFRKSNLKPFERDISTEIYQAGSTPCNGVEGFNCYFPLQSYGFQPTNGVGYQPYRVVVLSFELLHAPATVCGPKKSTNLVKNKCVNFNFNGLTGTGVLTESNKKFLPFQQFGRDIADTTDAVRDPQTLEILDITPCSFGGVSVITPGTNTSNQVAVLYQGVNCTEVPVAIHADQLTPTWRVYSTGSNVFQTRAGCLIGAEHVNNSYECDIPIGAGICASYQTQTNSPRRARSVASQSIIAYTMSLGAENSVAYSNNSCAIPTNFTISVTTEILPVSMTKTSVDCTMYICGDSTECSNLLLQYGSFCTQLNRALTGIAVEQDKNTQEVFAQVKQIYKTPPIKDFGGFNFSQILPDPSKPSKRSFIEDLLFNKVTLADAGFIKQYGDCLGDIAARDLICAQKFNGLTVLPPLLTDEMIAQYTSALLAGTITSGWTFGAGAALQIPFAMQMAYRFNGIGVTQNVLYENQKLIANQFNSAIGKIQDSLSSTASALGKLQDVVNQNAQALNTLVKQLSSNFGAISSVLNDILSRLDKVEAEVQIDRLITGRLQSLQTYVTQQLIRAAEIRASANLAATKMSECVLGQSKRVDFCGKGYHLMSFPQSAPHGVVFLHVTYVPAQEKNFTCAPAICHDGKAHFPREGVFVSNGTHWFVTQRNFYEPQIITTDNTFVSGNCDVVIGIVNNTVYDPLQPELDSFKEELDKYFKNHTSPDVDLGDISGINASVVNIQKEIDRLNEVAKNLNESLIDLQELGKYEQYIKGGGGSDIDPYKEFGSSYQLLNFLPLDFFPDLNALVDTATALYEEELTGREHCSPHHTAIRQALVCWDELTKLIAWMSSNITSEQVRTIIVNHVNDTWGLKVRQSLWFHLSCLTFGQHTVQEFLVSFGVWIRTPAPYRPPNAPILSTLPEHTVIC

SEQ ID NO: 7036 - protein, 1364 aa, Artificial Sequence
  SARS-CoV-2/India/1-27/2020__EPI_ISL_413522 spike protein (1-1210)(I711C_T1076C) WhcAg construct
MFVFLVLLPLVSSQCVNLTTRTQLPPAYTNSFTRGVYYPDKVFRSSVLHSTQDLFLPFFSNVTWFHAIHVSGTNGTKRFDNPVLPFNDGVYFASTEKSNIIRGWIFGTTLDSKTQSLLIVNNATNVVIKVCEFQFCNDPFLGVYHKNNKSWMESEFRVYSSANNCTFEYVSQPFLMDLEGKQGNFKNLREFVFKNIDGYFKIYSKHTPINLVRDLPQGFSALEPLVDLPIGINITRFQTLLALHRSYLTPGDSSSGWTAGAAAYYVGYLQPRTFLLKYNENGTITDAVDCALDPLSETKCTLKSFTVEKGIYQTSNFRVQPTESIVRFPNITNLCPFGEVFNATRFASVYAWNRKRISNCVADYSVLYNSASFSTFKCYGVSPTKLNDLCFTNVYADSFVIRGDEVIQIAPGQTGKIADYNYKLPDDFTGCVIAWNSNNLDSKVGGNYNYLYRLFRKSNLKPFERDISTEIYQAGSTPCNGVEGFNCYFPLQSYGFQPTNGVGYQPYRVVVLSFELLHAPATVCGPKKSTNLVKNKCVNFNFNGLTGTGVLTESNKKFLPFQQFGRDIADTTDAVRDPQTLEILDITPCSFGGVSVITPGTNTSNQVAVLYQDVNCTEVPVAIHADQLTPTWRVYSTGSNVFQTRAGCLIGAEHVNNSYECDIPIGAGICASYQTQTNSPRRARSVASQSIIAYTMSLGAENSVAYSNNSCAIPTNFTISVTTEILPVSMTKTSVDCTMYICGDSTECSNLLLQYGSFCTQLNRALTGIAVEQDKNTQEVFAQVKQIYKTPPIKDFGGFNFSQILPDPSKPSKRSFIEDLLFNKVTLADAGFIKQYGDCLGDIAARDLICAQKFNGLTVLPPLLTDEMIAQYTSALLAGTITSGWTFGAGAALQIPFAMQMAYRFNGIGVTQNVLYENQKLIANQFNSAIGKIQDSLSSTASALGKLQDVVNQNAQALNTLVKQLSSNFGAISSVLNDILSRLDKVEAEVQIDRLITGRLQSLQTYVTQQLIRAAEIRASANLAATKMSECVLGQSKRVDFCGKGYHLMSFPQSAPHGVVFLHVTYVPAQEKNFTCAPAICHDGKAHFPREGVFVSNGTHWFVTQRNFYEPQIITTDNTFVSGNCDVVIGIVNNTVYDPLQPELDSFKEELDKYFKNHTSPDVDLGDISGINASVVNIQKEIDRLNEVAKNLNESLIDLQELGKYEQYIKGGGGSDIDPYKEFGSSYQLLNFLPLDFFPDLNALVDTATALYEEELTGREHCSPHHTAIRQALVCWDELTKLIAWMSSNITSEQVRTIIVNHVNDTWGLKVRQSLWFHLSCLTFGQHTVQEFLVSFGVWIRTPAPYRPPNAPILSTLPEHTVIC

SEQ ID NO: 7037 - protein, 1359 aa, Artificial Sequence
  SARS-CoV-2/pangolin/Guangxi/P4L/2017__EPI_ISL_410538 spike protein (1-1205)(I706C_T1071C) WhcAg construct
MFVFLFVLPLVSSQCVNLTTRTGIPPGYTNSSTRGVYYPDKVFRSSILHLTQDLFLPFFSNVTWFNTINYQGGFKKFDNPVLPFNDGVYFASTEKSNIIRGWIFGTTLDARTQSLLIVNNATNVVIKVCEFQFCTDPFLGVYYHNNNKTWVENEFRVYSSANNCTFEYISQPFLMDLEGKQGNFKNLREFVFKNVDGYFKIYSKHTPIDLVRDLPRGFAALEPLVDLPIGINITRFQTLLALHRSYLTPGNLESGWTTGAAAYYVGYLQQRTFLLSYNQNGTITDAVDCSLDPLSETKCTLKSLTVEKGIYQTSNFRVQPTISIVRFPNITNLCPFGEVFNASKFASVYAWNRKRISNCVADYSVLYNSTSFSTFKCYGVSPTKLNDLCFTNVYADSFVVKGDEVRQIAPGQTGVIADYNYKLPDDFTGCVIAWNSVKQDALTGGNYGYLYRLFRKSKLKPFERDISTEIYQAGSTPCNGQVGLNCYYPLERYGFHPTTGVNYQPFRVVVLSFELLNGPATVCGPKLSTTLVKDKCVNFNFNGLTGTGVLTTSKKQFLPFQQFGRDISDTTDAVRDPQTLEILDITPCSFGGVSVITPGTNTSNQVAVLYQDVNCTEVPMAIHAEQLTPAWRVYSAGANVFQTRAGCLVGAEHVNNSYECDIPVGAGICASYHSMSSLRSVNQRSIIAYTMSLGAENSVAYSNNSCAIPTNFTISVTTEILPVSMTKTSVDCTMYICGDSIECSNLLLQYGSFCTQLNRALTGIAVEQDKNTQEVFAQVKQIYKTPPIKDFGGFNFSQILPDPSKPSKRSFIEDLLFNKVTLADAGFIKQYGDCLGDIAARDLICAQKFNGLTVLPPLLTDEMIAQYTSALLAGTITSGWTFGAGAALQIPFAMQMAYRFNGIGVTQNVLYENQKLIANQFNSAIGKIQDSLSSTASALGKLQDVVNQNAQALNTLVKQLSSNFGAISSVLNDILSRLDKVEAEVQIDRLITGRLQSLQTYVTQQLIRAAEIRASANLAATKMSECVLGQSKRVDFCGKGYHLMSFPQSAPHGVVFLHVTYVPAQEKNFTCAPAICHEGKAHFPREGVFVSNGTHWFITQRNFYEPQIITTDNTFVSGSCDVVIGIVNNTVYDPLQPELDSFKEELDKYFKNHTSPDVDLGDISGINASVVNIQKEIDRLNEVAKNLNESPIDLQELGKYEQYIKGGGGSDIDPYKEFGSSYQLLNFLPLDFFPDLNALVDTATALYEEELTGREHCSPHHTAIRQALVCWDELTKLIAWMSSNITSEQVRTIIVNHVNDTWGLKVRQSLWFHLSCLTFGQHTVQEFLVSFGVWIRTPAPYRPPNAPILSTLPEHTVIC

SEQ ID NO: 7038 - protein, 1359 aa, Artificial Sequence
  SARS-CoV-2/pangolin/Guangxi/P5L/2017__EPI_ISL_410540 spike protein (1-1205)(I706C_T1071C) WhcAg construct
MFVFLFVLPLVSSQCVNLTTRTGIPPGYTNSSTRGVYYPDKVFRSSILHLTQDLFLPFFSNVTWFNTINYQGGFKKFDNPVLPFNDGVYFASTEKSNIIRGWIFGTTLDARTQSLLIVNNATNVVIKVCEFQFCTDPFLGVYYHNNNKTWVENEFRVYSSANNCTFEYISQPFLMDLEGKQGNFKNLREFVFKNVDGYFKIYSKHTPIDLVRDLPRGFAALEPLVDLPIGINITRFQTLLALHRSYLTPGKLESGWTTGAAAYYVGYLQQRTFLLSYNQNGTITDAVDCSLDPLSETKCTLKSLTVEKGIYQTSNFRVQPTISIVRFPNITNLCPFGEVFNASKFASVYAWNRKRISNCVADYSVLYNSTSFSTFKCYGVSPTKLNDLCFTNVYADSFVVKGDEVRQIAPGQTGVIADYNYKLPDDFTGCVIAWNSVKQDALTGGNYGYLYRLFRKSKLKPFERDISTEIYQAGSTPCNGQVGLNCYYPLERYGFHPTTGVNYQPFRVVVLSFELLNGPATVCGPKLSTTLVKDKCVNFNFNGLTGTGVLTTSKKQFLPFQQFGRDISDTTDAVRDPQTLEILDITPCSFGGVSVITPGTNTSNQVAVLYQDVNCTEVPMAIHAEQLTPAWRVYSAGANVFQTRAGCLVGAEHVNNSYECDIPVGAGICASYHSMSSFRSVNQRSIIAYTMSLGAENSVAYSNNSCAIPTNFTISVTTEILPVSMTKTSVDCTMYICGDSIECSNLLLQYGSFCTQLNRALTGIAVEQDKNTQEVFAQVKQIYKTPPIKDFGGFNFSQILPDPSKPSKRSFIEDLLFNKVTLADAGFIKQYGDCLGDIAARDLICAQKFNGLTVLPPLLTDEMIAQYTSALLAGTITSGWTFGAGAALQIPFAMQMAYRFNGIGVTQNVLYENQKLIANQFNSAIGKIQDSLSSTASALGKLQDVVNQNAQALNTLVKQLSSNFGAISSVLNDILSRLDKVEAEVQIDRLITGRLQSLQTYVTQQLIRAAEIRASANLAATKMSECVLGQSKRVDFCGKGYHLMSFPQSAPHGVVFLHVTYVPAQEKNFTCAPAICHEGKAHFPREGVFVSNGTHWFITQRNFYEPQIITTDNTFVSGSCDVVIGIVNNTVYDPLQPELDSFKEELDKYFKNHTSPDVDLGDISGINASVVNIQKEIDRLNEVAKNLNESLIDLQELGKYEQYIKGGGGSDIDPYKEFGSSYQLLNFLPLDFFPDLNALVDTATALYEEELTGREHCSPHHTAIRQALVCWDELTKLIAWMSSNITSEQVRTIIVNHVNDTWGLKVRQSLWFHLSCLTFGQHTVQEFLVSFGVWIRTPAPYRPPNAPILSTLPEHTVIC

SEQ ID NO: 7039 - protein, 1359 aa, Artificial Sequence
  SARS-CoV-2/pangolin/Guangxi/P5E/2017__EPI_ISL_410541 spike protein (1-1205)(I706C_T1071C) WhcAg construct
MFVFLFVLPLVSSQCVNLTTRTGIPPGYTNSSTRGVYYPDKVFRSSILHLTQDLFLPFFSNVTWFNTITYQGGSKKFDNPVLPFNDGVYFASTEKSNIIRGWIFGTTLDARTQSLLIVNNATNVVIKVCEFQFCTDPFLGVYYHNNNKTWVENEFRVYSSANNCTFEYISQPFLMDLEGKQGNFKNLREFVFKNVDGYFKIYSKHTPIDLVRDLPRGFAALEPLVDLPIGINITRFQTLLALHRSYLTPGKLESGWTTGAAAYYVGYLQQRTFLLSYNQNGTITDAVDCSLDPLSETKCTLKSLTVEKGIYQTSNFRVQPTISIVRFPNITNLCPFGEVFNASKFASVYAWNRKRISNCVADYSVLYNSTSFSTFKCYGVSPTKLNDLCFTNVYADSFVVKGDEVRQIAPGQTGVIADYNYKLPDDFTGCVIAWNSVKQDALTGDNYGYLYRLFRKSKLKPFERDISTEIYQAGSTPCNGQVGLNCYYPLERYGFHPTTGVNYQPFRVVVLSFELLNGPATVCGPKLSTTLVKDKCVNFNFNGLTGTGVLTTSKKQFLPFQQFGRDISDTTDAVRDPQTLEILDITPCSFGGVSVITPGTNTSNQVAVLYQDVNCTEVPMAIHAEQLTPAWRVYSAGANVFQTRAGCLVGAEHVNNSYECDIPVGAGICASYHSMSSFRSVNQRSIIAYTMSLGAENSVAYSNNSCAIPTNFTISVTTEILPVSMTKTSVDCTMYICGDSIECSNLLLQYGSFCTQLNRALTGIAVEQDKNTQEVFAQVKQIYKTPPIKDFGGFNFSQILPDPSKPSKRSFIEDLLFNKVTLADAGFIKQYGDCLGDIAARDLICAQKFNGLTVLPPLLTDEMIAQYTSALLAGTITSGWTFGAGAALQIPFAMQMAYRFNGIGVTQNVLYENQKLIANQFNSAIGKIQDSLSSTASALGKLQDVVNQNAQALNTLVKQLSSNFGAISSVLNDILSRLDKVEAEVQIDRLITGRLQSLQTYVTQQLIRAAEIRASANLAATKMSECVLGQSKRVDFCGKGYHLMSFPQSAPHGVVFLHVTYVPAQEKNFTCAPAICHEGKAHFPREGVFVSNGTHWFITQRNFYEPQIITTDNTFVSGSCDVVIGIVNNTVYDPLQPELDSFKEELDKYFKNHTSPDVDLGDISGINASVVNIQKEIDRLNEVAKNLNESLIDLQELGKYEQYIKGGGGSDIDPYKEFGSSYQLLNFLPLDFFPDLNALVDTATALYEEELTGREHCSPHHTAIRQALVCWDELTKLIAWMSSNITSEQVRTIIVNHVNDTWGLKVRQSLWFHLSCLTFGQHTVQEFLVSFGVWIRTPAPYRPPNAPILSTLPEHTVIC

SEQ ID NO: 7040 - protein, 1357 aa, Artificial Sequence
  SARS-CoV-2/pangolin/Guangxi/P1E/2017__EPI_ISL_410539 spike protein (1-1203)(I704C_T1069C) WhcAg construct
MFVFLFVLPLVSSQCVNLTTRTGIQPGYTNSSTRGVYYPDKVFRSSILHLTQDLFLPFFSNVTWFNTINYQGGFKKFDNPVLPFNDGVYFASTEKSNIIRGWIFGTTLDARTQSLLIVNNATNVVIKVCEFQFCTDPFLGVYYHNNNKTWVENEFRVYSSANNCTFEYISQPFLMDLEGKQGNFKNLREFVFKNVDGYFKIYSKHTPIDLVRDLPRGFAALEPLVDLPIGINITRFQTLLALHRSYLTPGKLESGWTTGAAAYYVGYLQQRTFLLSYNQNGTITDAVDCSLDPLSETKCTLKSLTVEKGIYQTSNFRVQPTISIVRFPNITNLCPFGEVFNASKFASVYAWNRKRISNCVADYSVLYNSTSFSTFKCYGVSPTKLNDLCFTNVYADSFVVKGDEVRQIAPGQTGVIADYNYKLPDDFTGCVIAWNSVKQDALTGGNYLYRLFRKSKLKPFERDISTEIYQAGSTPCNGQVGLNCYYPLERYGFHPTTGVNYQPFRVVVLSFELLNGPATVCGPKLSTTLVKDKCVNFNFNGLTGTGVLTTSKKQFLPFQQFGRDISDTTDAVRDPQTLEILDITPCSFGGVSVITPGTNTSNQVAVLYQDVNCTEVPMAIHAEQLTPAWRVYSAGANVFQTRAGCLVGAEHVNNSYECDIPVGAGICASYHSMSSLRSVNQRSIIAYTMSLGAENSVAYSNNSCAIPTNFTISVTTEILPVSMTKTSVDCTMYICGDSIECSNLLLQYGSFCTQLNRALTGIAVEQDKNTQEVFAQVKQIYKTPPIKDFGGFNFSQILPDPSKPSKRSFIEDLLFNKVTLADAGFIKQYGDCLGDIAARDLICAQKFNGLTVLPPLLTDEMIAQYTSALLAGTITSGWTFGAGAALQIPFAMQMAYRFNGIGVTQNVLYENQKLIANQFNSAIGKIQDSLSSTASALGKLQDVVNQNAQALNTLVKQLSSNFGAISSVLNDILSRLDKVEAEVQIDRLITGRLQSLQTYVTQQLIRAAEIRASANLAATKMSECVLGQSKRVDFCGKGYHLMSFPQSAPHGVVFLHVTYVPAQEKNFTCAPAICHEGKAHFPREGVFVSNGTHWFITQRNFYEPQIITTDNTFVSGSCDVVIGIVNNTVYDPLQPELDSFKEELDKYFKNHTSPDVDLGDISGINASVVNIQKEIDRLNEVAKNLNESLIDLQELGKYEQYIKGGGGSDIDPYKEFGSSYQLLNFLPLDFFPDLNALVDTATALYEEELTGREHCSPHHTAIRQALVCWDELTKLIAWMSSNITSEQVRTIIVNHVNDTWGLKVRQSLWFHLSCLTFGQHTVQEFLVSFGVWIRTPAPYRPPNAPILSTLPEHTVIC

SEQ ID NO: 7041 - protein, 1365 aa, Artificial Sequence
  SARS-CoV-2/Wuhan/WIV05/2019__EPI_ISL_402128 spike protein (1-1211)(I714C_Y1110C) WhcAg construct
MFVFLVLLPLVSSQCVNLTTRTQLPPAYTNSFTRGVYYPDKVFRSSVLHSTQDLFLPFFSNVTWFHAIHVSGTNGTKRFDNPVLPFNDGVYFASTEKSNIIRGWIFGTTLDSKTQSLLIVNNATNVVIKVCEFQFCNDPFLGVYYHKNNKSWMESEFRVYSSANNCTFEYVSQPFLMDLEGKQGNFKNLREFVFKNIDGYFKIYSKHTPINLVRDLPQGFSALEPLVDLPIGINITRFQTLLALHRSYLTPGDSSSGWTAGAAAYYVGYLQPRTFLLKYNENGTITDAVDCALDPLSETKCTLKSFTVEKGIYQTSNFRVQPTESIVRFPNITNLCPFGEVFNATRFASVYAWNRKRISNCVADYSVLYNSASFSTFKCYGVSPTKLNDLCFTNVYADSFVIRGDEVRQIAPGQTGKIADYNYKLPDDFTGCVIAWNSNNLDSKVGGNYNYLYRLFRKSNLKPFERDISTEIYQAGSTPCNGVEGFNCYFPLQSYGFQPTNGVGYQPYRVVVLSFELLHAPATVCGPKKSTNLVKNKCVNFNFNGLTGTGVLTESNKKFLPFQQFGRDIADTTDAVRDPQTLEILDITPCSFGGVSVITPGTNTSNQVAVLYQDVNCTEVPVAIHADQLTPTWRVYSTGSNVFQTRAGCLIGAEHVNNSYECDIPIGAGICASYQTQTNSPRRARSVASQSIIAYTMSLGAENSVAYSNNSIACPTNFTISVTTEILPVSMTKTSVDCTMYICGDSTECSNLLLQYGSFCTQLNRALTGIAVEQDKNTQEVFAQVKQIYKTPPIKDFGGFNFSQILPDPSKPSKRSFIEDLLFNKVTLADAGFIKQYGDCLGDIAARDLICAQKFNGLTVLPPLLTDEMIAQYTSALLAGTITSGWTFGAGAALQIPFAMQMAYRFNGIGVTQNVLYENQKLIANQFNSAIGKIQDSLSSTASALGKLQDVVNQNAQALNTLVKQLSSNFGAISSVLNDILSRLDKVEAEVQIDRLITGRLQSLQTYVTQQLIRAAEIRASANLAATKMSECVLGQSKRVDFCGKGYHLMSFPQSAPHGVVFLHVTYVPAQEKNFTTAPAICHDGKAHFPREGVFVSNGTHWFVTQRNFCEPQIITTDNTFVSGNCDVVIGIVNNTVYDPLQPELDSFKEELDKYFKNHTSPDVDLGDISGINASVVNIQKEIDRLNEVAKNLNESLIDLQELGKYEQYIKGGGGSDIDPYKEFGSSYQLLNFLPLDFFPDLNALVDTATALYEEELTGREHCSPHHTAIRQALVCWDELTKLIAWMSSNITSEQVRTIIVNHVNDTWGLKVRQSLWFHLSCLTFGQHTVQEFLVSFGVWIRTPAPYRPPNAPILSTLPEHTVIC

SEQ ID NO: 7042 - protein, 1361 aa, Artificial Sequence
  SARS-CoV-2/bat/Yunnan/RaTG13/2013__EPI_ISL_402131 spike protein (1-1207)(I710C_Y1106C) WhcAg construct
MFVFLVLLPLVSSQCVNLTTRTQLPPAYTNSSTRGVYYPDKVFRSSVLHLTQDLFLPFFSNVTWFHAIHVSGTNGIKRFDNPVLPFNDGVYFASTEKSNIIRGWIFGTTLDSKTQSLLIVNNATNVVIKVCEFQFCNDPFLGVYYHKNNKSWMESEFRVYSSANNCTFEYVSQPFLMDLEGKQGNFKNLREFVFKNIDGYFKIYSKHTPINLVRDLPPGFSALEPLVDLPIGINITRFQTLLALHRSYLTPGDSSSGWTAGAAAYYVGYLQPRTFLLKYNENGTITDAVDCALDPLSETKCTLKSFTVEKGIYQTSNFRVQPTDSIVRFPNITNLCPFGEVFNATTFASVYAWNRKRISNCVADYSVLYNSTSFSTFKCYGVSPTKLNDLCFTNVYADSFVITGDEVRQIAPGQTGKIADYNYKLPDDFTGCVIAWNSKHIDAKEGGNFNYLYRLFRKANLKPFERDISTEIYQAGSKPCNGQTGLNCYYPLYRYGFYPTDGVGHQPYRVVVLSFELLNAPATVCGPKKSTNLVKNKCVNFNFNGLTGTGVLTESNKKFLPFQQFGRDIADTTDAVRDPQTLEILDITPCSFGGVSVITPGTNASNQVAVLYQDVNCTEVPVAIHADQLTPTWRVYSTGSNVFQTRAGCLIGAEHVNNSYECDIPIGAGICASYQTQTNSRSVASQSIIAYTMSLGAENSVAYSNNSIACPTNFTISVTTEILPVSMTKTSVDCTMYICGDSTECSNLLLQYGSFCTQLNRALTGIAVEQDKNTQEVFAQVKQIYKTPPIKDFGGFNFSQILPDPSKPSKRSFIEDLLFNKVTLADAGFIKQYGDCLGDIAARDLICAQKFNGLTVLPPLLTDEMIAQYTSALLAGTITSGWTFGAGAALQIPFAMQMAYRFNGIGVTQNVLYENQKLIANQFNSAIGKIQDSLSSTASALGKLQDVVNQNAQALNTLVKQLSSNFGAISSVLNDILSRLDKVEAEVQIDRLITGRLQSLQTYVTQQLIRAAEIRASANLAATKMSECVLGQSKRVDFCGKGYHLMSFPQSAPHGVVFLHVTYVPAQEKNFTTAPAICHDGKAHFPREGVFVSNGTHWFVTQRNFCEPQIITTDNTFVSGSCDVVIGIVNNTVYDPLQPELDSFKEELDKYFKNHTSPDVDLGDISGINASVVNIQKEIDRLNEVAKNLNESLIDLQELGKYEQYIKGGGGSDIDPYKEFGSSYQLLNFLPLDFFPDLNALVDTATALYEEELTGREHCSPHHTAIRQALVCWDELTKLIAWMSSNITSEQVRTIIVNHVNDTWGLKVRQSLWFHLSCLTFGQHTVQEFLVSFGVWIRTPAPYRPPNAPILSTLPEHTVIC

SEQ ID NO: 7043 - protein, 1365 aa, Artificial Sequence
  SARS-CoV-2/Wuhan/HBCDC-HB-01/2019__EPI_ISL_402132 spike protein (1-1211)(I714C_Y1110C) WhcAg construct
MFVFLVLLPLVSSQCVNLTTRTQLPPAYTNSITRGVYYPDKVFRSSVLHSTQDLFLPFFSNVTWFHAIHVSGTNGTKRFDNPVLPFNDGVYFASTEKSNIIRGWIFGTTLDSKTQSLLIVNNATNVVIKVCEFQFCNDPFLGVYYHKNNKSWMESEFRVYSSANNCTFEYVSQPFLMDLEGKQGNFKNLREFVFKNIDGYFKIYSKHTPINLVRDLPQGFSALEPLVDLPIGINITRFQTLLALHRSYLTPGDSSSGWTAGAAAYYVGYLQPRTFLLKYNENGTITDAVDCALDPLSETKCTLKSFTVEKGIYQTSNFRVQPTESIVRFPNITNLCPFGEVFNATRFASVYAWNRKRISNCVADYSVLYNSASFSTFKCYGVSPTKLNDLCFTNVYADSFVIRGDEVRQIAPGQTGKIADYNYKLPDDFTGCVIAWNSNNLDSKVGGNYNYLYRLFRKSNLKPFERDISTEIYQAGSTPCNGVEGFNCYFPLQSYGFQPTNGVGYQPYRVVVLSFELLHAPATVCGPKKSTNLVKNKCVNFNFNGLTGTGVLTESNKKFLPFQQFGRDIADTTDAVRDPQTLEILDITPCSFGGVSVITPGTNTSNQVAVLYQDVNCTEVPVAIHADQLTPTWRVYSTGSNVFQTRAGCLIGAEHVNNSYECDIPIGAGICASYQTQTNSPRRARSVASQSIIAYTMSLGAENSVAYSNNSIACPTNFTISVTTEILPVSMTKTSVDCTMYICGDSTECSNLLLQYGSFCTQLNRALTGIAVEQDKNTQEVFAQVKQIYKTPPIKDFGGFNFSQILPDPSKPSKRSFIEDLLFNKVTLADAGFIKQYGDCLGDIAARDLICAQKFNGLTVLPPLLTDEMIAQYTSALLAGTITSGWTFGAGAALQIPFAMQMAYRFNGIGVTQNVLYENQKLIANQFNSAIGKIQDSLSSTASALGKLQDVVNQNAQALNTLVKQLSSNFGAISSVLNDILSRLDKVEAEVQIDRLITGRLQSLQTYVTQQLIRAAEIRASANLAATKMSECVLGQSKRVDFCGKGYHLMSFPQSAPHGVVFLHVTYVPAQEKNFTTAPAICHDGKAHFPREGVFVSNGTHWFVTQRNFCEPQIITTDNTFVSGNCDVVIGIVNNTVYDPLQPELDSFKEELDKYFKNHTSPDVDLGDISGINASVVNIQKEIDRLNEVAKNLNESLIDLQELGKYEQYIKGGGGSDIDPYKEFGSSYQLLNFLPLDFFPDLNALVDTATALYEEELTGREHCSPHHTAIRQALVCWDELTKLIAWMSSNITSEQVRTIIVNHVNDTWGLKVRQSLWFHLSCLTFGQHTVQEFLVSFGVWIRTPAPYRPPNAPILSTLPEHTVIC

SEQ ID NO: 7044 - protein, 1365 aa, Artificial Sequence
  SARS-CoV-2/Guangdong/20SF028/2020__EPI_ISL_403936 spike protein (1-1211)(I714C_Y1110C) WhcAg construct
MFVFLVLLPLVSSQCVNLTTRTQLPPAYTNSFTRGVYYPDKVFRSSVLYSTQDLFLPFFSNVTWFHAIHVSGTNGTKRFDNPVLPFNDGVYFASTEKSNIIRGWIFGTTLDSKTQSLLIVNNATNVVIKVCEFQFCNDPFLGVYYHKNNKSWMESEFRVYSSANNCTFEYVSQPFLMDLEGKQGNFKNLREFVFKNIDGYFKIYSKHTPINLVRDLPQGFSALEPLVDLPIGINITRFQTLLALHRSYLTPGDSSSGWTAGAAAYYVGYLQPRTFLLKYNENGTITDAVDCALDPLSETKCTLKSFTVEKGIYQTSNFRVQPTESIVRFPNITNLCPFGEVFNATRFASVYAWNRKRISNCVADYSVLYNSASFSTFKCYGVSPTKLNDLCFTNVYADSFVIRGDEVRQIAPGQTGKIADYNYKLPDDFTGCVIAWNSNNLDSKVGGNYNYLYRLFRKSNLKPFERDISTEIYQAGSTPCNGVEGFNCYFPLQSYGFQPTNGVGYQPYRVVVLSFELLHAPATVCGPKKSTNLVKNKCVNFNFNGLTGTGVLTESNKKFLPFQQFGRDIADTTDAVRDPQTLEILDITPCSFGGVSVITPGTNTSNQVAVLYQDVNCTEVPVAIHADQLTPTWRVYSTGSNVFQTRAGCLIGAEHVNNSYECDIPIGAGICASYQTQTNSPRRARSVASQSIIAYTMSLGAENSVAYSNNSIACPTNFTISVTTEILPVSMTKTSVDCTMYICGDSTECSNLLLQYGSFCTQLNRALTGIAVEQDKNTQEVFAQVKQIYKTPPIKDFGGFNFSQILPDPSKPSKRSFIEDLLFNKVTLADAGFIKQYGDCLGDIAARDLICAQKFNGLTVLPPLLTDEMIAQYTSALLAGTITSGWTFGAGAALQIPFAMQMAYRFNGIGVTQNVLYENQKLIANQFNSAIGKIQDSLSSTASALGKLQDVVNQNAQALNTLVKQLSSNFGAISSVLNDILSRLDKVEAEVQIDRLITGRLQSLQTYVTQQLIRAAEIRASANLAATKMSECVLGQSKRVDFCGKGYHLMSFPQSAPHGVVFLHVTYVPAQEKNFTTAPAICHDGKAHFPREGVFVSNGTHWFVTQRNFCEPQIITTDNTFVSGNCDVVIGIVNNTVYDPLQPELDSFKEELDKYFKNHTSPDVDLGDISGINASVVNIQKEIDRLNEVAKNLNESLIDLQELGKYEQYIKGGGGSDIDPYKEFGSSYQLLNFLPLDFFPDLNALVDTATALYEEELTGREHCSPHHTAIRQALVCWDELTKLIAWMSSNITSEQVRTIIVNHVNDTWGLKVRQSLWFHLSCLTFGQHTVQEFLVSFGVWIRTPAPYRPPNAPILSTLPEHTVIC

SEQ ID NO: 7045 - protein, 1365 aa, Artificial Sequence
  SARS-CoV-2/Shenzhen/SZTH-001/2020__EPI_ISL_406592 spike protein (1-1211)(I714C_Y1110C) WhcAg construct
MFVFLVLLPLVSSQCVNLTTRTQLPPAYTNSFTRGVYYPDKVFRSSVLHSTQDLFLPFFSNVTWFHAIHVSGTNGTKRFDNPVLPFNDGVYFASTEKSNIIRGWIFGTTLDSKTQSLLIVNNATNVVIKVCEFQFCNDPFLGVYYHKNNKSWMESEFRVYSSANNCTFEYVSQPFLMDLEGKQGNFKNLREFVFKNIDGYFKIYSKHTPINLVRDLPQGFSALEPLVDLPIGINITRFQTLLALHRSYLTPGDSSSGWTAGAAAYYVGYLQPRTFLLKYNENGTITDAVDCALDPLSETKCTLKSFTVEKGIYQTSNFRVQPTESIVRFPNITNLCPFGEVFNATRFASVYAWNRKRISNCVADYSVLYNSASFSTFKCYGVSPTKLNDLCFTNVYADSFVIRGDEVRQIAPGQTGKIADYNYKLPDDFTGCVIAWNSNNLDSKVGGNYNYLYRLFRKSNLKPFERDISTEIYQAGSTPCNGVEGFNCYFPLQSYGFQPTNGVGYQPYRVVVLSFELLHAPATVCGPKKSTNLVKNKCVNFNFNGLTGTGVLTESNKKFLPFQQFGRDIADTTDAVRDPQTLEILDITPCSFGGVSVITPGTNTSNQVAVLYQDVNCTEVPVAIHADQLTPTWRVYSTGSNVFQTRAGCLIGAEHVNNSYECDIPIGAGICASYQTQTNSPRRARSVASQSIIAYTMSLGAENSVAYSNNSIACPTNFTISVTTEILPVSMTKTSVDCTMYICGDSTECSNLLLQYGSFCTQLNRALTGIAVEQDKNTQEVFAQVKQIYKTPPIKDFGGFNFSQILPDPSKPSKRSFIEDLLFNKVTLADAGFIKQYGDCLGDIAARDLICAQKFNGLTVLPPLLTDEMIAQYTSALLAGTITSGWTFGAGAALQIPFAMQMAYRFNGIGVTQNVLYENQKLIANQFNSAIGKIQDSLSSTASALGKLQDVVNQNAQALNTLVKQLSSNFGAISSVLNDILSRLDKVEAEVQIDRLITGRLQSLQTYVTQQLIRAAEIRASANLAATKMSECVLGQSKRVDFCGKGYHLMSFPQSAPHGVVFLHVTYVPAQEKNFTTAPAICHDGKAHFPREGVFVSNGTHWFVTQRNFCEPQIITTDNTFVSGNCDVLIGIVNNTVYDPLQPELDSFKEELDKYFKNHTSPDVDLGDISGINASVVNIQKEIDRLNEVAKNLNESLIDLQELGKYEQYIKGGGGSDIDPYKEFGSSYQLLNFLPLDFFPDLNALVDTATALYEEELTGREHCSPHHTAIRQALVCWDELTKLIAWMSSNITSEQVRTIIVNHVNDTWGLKVRQSLWFHLSCLTFGQHTVQEFLVSFGVWIRTPAPYRPPNAPILSTLPEHTVIC

SEQ ID NO: 7046 - protein, 1365 aa, Artificial Sequence
  SARS-CoV-2/Shenzhen/SZTH-004/2020__EPI_ISL_406595 spike protein (1-1211)(I714C_Y1110C) WhcAg construct
MFVFLVLLPLVSSQCVNLTTRTQLPPAYTNSFTRGVYYPDKVFRSSVLHSTQDLFLPFFSNVTWFHAIHVSGTNGTKRFDNPVLPFNDGVYFASTEKSNIIRGWIFGTTLDSKTQSLLIVNNATNVVIKVCEFQFCNDPFLGVYYHKNNKSWMESEFRVYSSANNCTFEYVSQPFLMDLEGKQGNFKNLREFVFKNIDGYFKIYSKHTPINLVRDLPQGFSALEPLVDLPIGINITRFQTLLALHRSYLTPGDSSSGWTAGAAAYYVGYLQPRTFLLKYNENGTITDAVDCALDPLSETKCTLKSFTVEKGIYQTSNFRVQPTESIVRFPNITNLCPFGEVFNATRFASVYAWDRKRISNCVAYYSVLYNSASFSTFKCYGVSPTKLNDLCFTNVYADSFVIRGDEVRQIAPGQTGKIADYNYKLPDDFTGCVIAWNSNNLDSKVGGNYNYLYRLFRKSNLKPFERDISTEIYQAGSTPCNGVEGFNCYFPLQSYGFQPTNGVGYQPYRVVVLSFELLHAPATVCGPKKSTNLVKNKCVNFNFNGLTGTGVLTESNKKFLPFQQFGRDIADTTDAVRDPQTLEILDITPCSFGGVSVITPGTNTSNQVAVLYQDVNCTEVPVAIHADQLTPTWRVYSTGSNVFQTRAGCLIGAEHVNNSYECDIPIGAGICASYQTQTNSPRRARSVASQSIIAYTMSLGAENSVAYSNNSIACPTNFTISVTTEILPVSMTKTSVDCTMYICGDSTECSNLLLQYGSFCTQLNRALTGIAVEQDKNTQEVFAQVKQIYKTPPIKDFGGFNFSQILPDPSKPSKRSFIEDLLFNKVTLADAGFIKQYGDCLGDIAARDLICAQKFNGLTVLPPLLTDEMIAQYTSALLAGTITSGWTFGAGAALQIPFAMQMAYRFNGIGVTQNVLYENQKLIANQFNSAIGKIQDSLSSTASALGKLQDVVNQNAQALNTLVKQLSSNFGAISSVLNDILSRLDKVEAEVQIDRLITGRLQSLQTYVTQQLIRAAEIRASANLAATKMSECVLGQSKRVDFCGKGYHLMSFPQSAPHGVVFLHVTYVPAQEKNFTTAPAICHDGKAHFPREGVFVSNGTHWFVTQRNFCEPQIITTDNTFVSGNCDVVIGIVNNTVYDPLQPELDSFKEELDKYFKNHTSPDVDLGDISGINASVVNIQKEIDRLNEVAKNLNESLIDLQELGKYEQYIKGGGGSDIDPYKEFGSSYQLLNFLPLDFFPDLNALVDTATALYEEELTGREHCSPHHTAIRQALVCWDELTKLIAWMSSNITSEQVRTIIVNHVNDTWGLKVRQSLWFHLSCLTFGQHTVQEFLVSFGVWIRTPAPYRPPNAPILSTLPEHTVIC

SEQ ID NO: 7047 - protein, 1365 aa, Artificial Sequence
  SARS-CoV-2/France/IDF0372/2020__EPI_ISL_406596 spike protein (1-1211)(I714C_Y1110C) WhcAg construct
MFVFLVLLPLVSSQCVNLTTRTQLPPAYTNSFTRGVYYPDKVFRSSVLHSTQDLFLPFFSNVTWFHAIHVSGTNGTKRFDNPVLPFNDGVYFASTEKSNIIRGWIFGTTLDSKTQSLLIVNNATNVVIKVCEFQFCNDPFLGVYYHKNNKSWMESEFRVYSSANNCTFEYVSQPFLMDLEGKQGNFKNLREFVFKNIDGYFKIYSKHTPINLVRDLPQGFSALEPLVDLPIGINITRFQTLLALHRSYLTPGDSSSGWTAGAAAYYVGYLQPRTFLLKYNENGTITDAVDCALDPLSETKCTLKSFTVEKGIYQTSNFRVQPTESIVRFPNITNLCPFGEVFNATRFASVYAWNRKRISNCVADYSFLYNSASFSTFKCYGVSPTKLNDLCFTNVYADSFVIRGDEVRQIAPGQTGKIADYNYKLPDDFTGCVIAWNSNNLDSKVGGNYNYLYRLFRKSNLKPFERDISTEIYQAGSTPCNGVEGFNCYFPLQSYGFQPTNGVGYQPYRVVVLSFELLHAPATVCGPKKSTNLVKNKCVNFNFNGLTGTGVLTESNKKFLPFQQFGRDIADTTDAVRDPQTLEILDITPCSFGGVSVITPGTNTSNQVAVLYQDVNCTEVPVAIHADQLTPTWRVYSTGSNVFQTRAGCLIGAEHVNNSYECDIPIGAGICASYQTQTNSPRRARSVASQSIIAYTMSLGAENSVAYSNNSIACPTNFTISVTTEILPVSMTKTSVDCTMYICGDSTECSNLLLQYGSFCTQLNRALTGIAVEQDKNTQEVFAQVKQIYKTPPIKDFGGFNFSQILPDPSKPSKRSFIEDLLFNKVTLADAGFIKQYGDCLGDIAARDLICAQKFNGLTVLPPLLTDEMIAQYTSALLAGTITSGWTFGAGAALQIPFAMQMAYRFNGIGVTQNVLYENQKLIANQFNSAIGKIQDSLSSTASALGKLQDVVNQNAQALNTLVKQLSSNFGAISSVLNDILSRLDKVEAEVQIDRLITGRLQSLQTYVTQQLIRAAEIRASANLAATKMSECVLGQSKRVDFCGKGYHLMSFPQSAPHGVVFLHVTYVPAQEKNFTTAPAICHDGKAHFPREGVFVSNGTHWFVTQRNFCEPQIITTDNTFVSGNCDVVIGIVNNTVYDPLQPELDSFKEELDKYFKNHTSPDVDLGDISGINASVVNIQKEIDRLNEVAKNLNESLIDLQELGKYEQYIKGGGGSDIDPYKEFGSSYQLLNFLPLDFFPDLNALVDTATALYEEELTGREHCSPHHTAIRQALVCWDELTKLIAWMSSNITSEQVRTIIVNHVNDTWGLKVRQSLWFHLSCLTFGQHTVQEFLVSFGVWIRTPAPYRPPNAPILSTLPEHTVIC

SEQ ID NO: 7048 - protein, 1365 aa, Artificial Sequence
  SARS-CoV-2/Australia/VIC01/2020__EPI_ISL_406844 spike protein (1-1211)(I714C_Y1110C) WhcAg construct
MFVFLVLLPLVSSQCVNLTTRTQLPPAYTNSFTRGVYYPDKVFRSSVLHSTQDLFLPFFSNVTWFHAIHVSGTNGTKRFDNPVLPFNDGVYFASTEKSNIIRGWIFGTTLDSKTQSLLIVNNATNVVIKVCEFQFCNDPFLGVYYHKNNKSWMESEFRVYSSANNCTFEYVSQPFLMDLEGKQGNFKNLREFVFKNIDGYFKIYSKHTPINLVRDLPQGFSALEPLVDLPIGINITRFQTLLALHRRYLTPGDSSSGWTAGAAAYYVGYLQPRTFLLKYNENGTITDAVDCALDPLSETKCTLKSFTVEKGIYQTSNFRVQPTESIVRFPNITNLCPFGEVFNATRFASVYAWNRKRISNCVADYSVLYNSASFSTFKCYGVSPTKLNDLCFTNVYADSFVIRGDEVRQIAPGQTGKIADYNYKLPDDFTGCVIAWNSNNLDSKVGGNYNYLYRLFRKSNLKPFERDISTEIYQAGSTPCNGVEGFNCYFPLQSYGFQPTNGVGYQPYRVVVLSFELLHAPATVCGPKKSTNLVKNKCVNFNFNGLTGTGVLTESNKKFLPFQQFGRDIADTTDAVRDPQTLEILDITPCSFGGVSVITPGTNTSNQVAVLYQDVNCTEVPVAIHADQLTPTWRVYSTGSNVFQTRAGCLIGAEHVNNSYECDIPIGAGICASYQTQTNSPRRARSVASQSIIAYTMSLGAENSVAYSNNSIACPTNFTISVTTEILPVSMTKTSVDCTMYICGDSTECSNLLLQYGSFCTQLNRALTGIAVEQDKNTQEVFAQVKQIYKTPPIKDFGGFNFSQILPDPSKPSKRSFIEDLLFNKVTLADAGFIKQYGDCLGDIAARDLICAQKFNGLTVLPPLLTDEMIAQYTSALLAGTITSGWTFGAGAALQIPFAMQMAYRFNGIGVTQNVLYENQKLIANQFNSAIGKIQDSLSSTASALGKLQDVVNQNAQALNTLVKQLSSNFGAISSVLNDILSRLDKVEAEVQIDRLITGRLQSLQTYVTQQLIRAAEIRASANLAATKMSECVLGQSKRVDFCGKGYHLMSFPQSAPHGVVFLHVTYVPAQEKNFTTAPAICHDGKAHFPREGVFVSNGTHWFVTQRNFCEPQIITTDNTFVSGNCDVVIGIVNNTVYDPLQPELDSFKEELDKYFKNHTSPDVDLGDISGINASVVNIQKEIDRLNEVAKNLNESLIDLQELGKYEQYIKGGGGSDIDPYKEFGSSYQLLNFLPLDFFPDLNALVDTATALYEEELTGREHCSPHHTAIRQALVCWDELTKLIAWMSSNITSEQVRTIIVNHVNDTWGLKVRQSLWFHLSCLTFGQHTVQEFLVSFGVWIRTPAPYRPPNAPILSTLPEHTVIC

SEQ ID NO: 7049 - protein, 1365 aa, Artificial Sequence
  SARS-CoV-2/Germany/BavPat1/2020__EPI_ISL_406862 spike protein (1-1211)(I714C_Y1110C) WhcAg construct
MFVFLVLLPLVSSQCVNLTTRTQLPPAYTNSFTRGVYYPDKVFRSSVLHSTQDLFLPFFSNVTWFHAIHVSGTNGTKRFDNPVLPFNDGVYFASTEKSNIIRGWIFGTTLDSKTQSLLIVNNATNVVIKVCEFQFCNDPFLGVYYHKNNKSWMESEFRVYSSANNCTFEYVSQPFLMDLEGKQGNFKNLREFVFKNIDGYFKIYSKHTPINLVRDLPQGFSALEPLVDLPIGINITRFQTLLALHRSYLTPGDSSSGWTAGAAAYYVGYLQPRTFLLKYNENGTITDAVDCALDPLSETKCTLKSFTVEKGIYQTSNFRVQPTESIVRFPNITNLCPFGEVFNATRFASVYAWNRKRISNCVADYSVLYNSASFSTFKCYGVSPTKLNDLCFTNVYADSFVIRGDEVRQIAPGQTGKIADYNYKLPDDFTGCVIAWNSNNLDSKVGGNYNYLYRLFRKSNLKPFERDISTEIYQAGSTPCNGVEGFNCYFPLQSYGFQPTNGVGYQPYRVVVLSFELLHAPATVCGPKKSTNLVKNKCVNFNFNGLTGTGVLTESNKKFLPFQQFGRDIADTTDAVRDPQTLEILDITPCSFGGVSVITPGTNTSNQVAVLYQGVNCTEVPVAIHADQLTPTWRVYSTGSNVFQTRAGCLIGAEHVNNSYECDIPIGAGICASYQTQTNSPRRARSVASQSIIAYTMSLGAENSVAYSNNSIACPTNFTISVTTEILPVSMTKTSVDCTMYICGDSTECSNLLLQYGSFCTQLNRALTGIAVEQDKNTQEVFAQVKQIYKTPPIKDFGGFNFSQILPDPSKPSKRSFIEDLLFNKVTLADAGFIKQYGDCLGDIAARDLICAQKFNGLTVLPPLLTDEMIAQYTSALLAGTITSGWTFGAGAALQIPFAMQMAYRFNGIGVTQNVLYENQKLIANQFNSAIGKIQDSLSSTASALGKLQDVVNQNAQALNTLVKQLSSNFGAISSVLNDILSRLDKVEAEVQIDRLITGRLQSLQTYVTQQLIRAAEIRASANLAATKMSECVLGQSKRVDFCGKGYHLMSFPQSAPHGVVFLHVTYVPAQEKNFTTAPAICHDGKAHFPREGVFVSNGTHWFVTQRNFCEPQIITTDNTFVSGNCDVVIGIVNNTVYDPLQPELDSFKEELDKYFKNHTSPDVDLGDISGINASVVNIQKEIDRLNEVAKNLNESLIDLQELGKYEQYIKGGGGSDIDPYKEFGSSYQLLNFLPLDFFPDLNALVDTATALYEEELTGREHCSPHHTAIRQALVCWDELTKLIAWMSSNITSEQVRTIIVNHVNDTWGLKVRQSLWFHLSCLTFGQHTVQEFLVSFGVWIRTPAPYRPPNAPILSTLPEHTVIC

SEQ ID NO: 7050 - protein, 1365 aa, Artificial Sequence
  SARS-CoV-2/Wuhan/HBCDC-HB-02/2020__EPI_ISL_412978 spike protein (1-1211)(I714C_Y1110C) WhcAg construct
MFVFLVLLPLVSSQCVNLTTRTQLPPAYTNSFTRGVYYPDKVFRSSVLHSTQDLFLPFFSNVTWFHAIHVSGTNGTKRFDNPVLPFNDGVYFASTEKSNIIRGWIFGTTLDSKTQSLLIVNNATNVVIKVCEFQFCNDPFLGVYYHKNNKSWMESEFRVYSSANNCTFEYVSQPFLMDLEGKQGNFKNLREFVFKNIDGYFKIYSKHTPINLVRDLPQGFSALEPLVDLPIGINITRFQTLLALHRSYLTPGDSSSGWTAGAAAYYVGYLQPRTFLLKYNENGTITDAVDCALDPLSETKCTLKSFTVEKGIYQTSNFRVQPTESIVRFPNITNLCPFGEVFNATRFASVYAWNRKRISNCVADYSVLYNSASFSTFKCYGVSPTKLNDLCFTNVYADSFVIRGDEVRQIAPGQTGKIADYNYKLPDDFTGCVIAWNSNNLDSKVGGNYNYLYRLFRKSNLKPFERDISTEIYQAGSTPCNGVEGFNCYFPLQSYGFQPTNGVGYQPYRVVVLSFELLHAPATVCGPKKSTNLVKNKCVNFNFNGLTGTGVLTESNKKFLPFQQFGRDIADTTDAVRDPQTLEILDITPCSFGGVSVITPGTNTSNQVAVLYQDVNCTEVPVAIHADQLTPTWRVYSTGSNVFQTRAGCLIGAEHVNNSYECDIPIGAGICASYQTQTNSPRRARSVASQSIIAYTMSLGAENSVAYSNNSIACPTNFTISVTTEILPVSMTKTSVDCTMYICGDSTECSNFLLQYGSFCTQLNRALTGIAVEQDKNTQEVFAQVKQIYKTPPIKDFGGFNFSQILPDPSKPSKRSFIEDLLFNKVTLADAGFIKQYGDCLGDIAARDLICAQKFNGLTVLPPLLTDEMIAQYTSALLAGTITSGWTFGAGAALQIPFAMQMAYRFNGIGVTQNVLYENQKLIANQFNSAIGKIQDSLSSTASALGKLQDVVNQNAQALNTLVKQLSSNFGAISSVLNDILSRLDKVEAEVQIDRLITGRLQSLQTYVTQQLIRAAEIRASANLAATKMSECVLGQSKRVDFCGKGYHLMSFPQSAPHGVVFLHVTYVPAQEKNFTTAPAICHDGKAHFPREGVFVSNGTHWFVTQRNFCEPQIITTDNTFVSGNCDVVIGIVNNTVYDPLQPELDSFKEELDKYFKNHTSPDVDLGDISGINASVVNIQKEIDRLNEVAKNLNESLIDLQELGKYEQYIKGGGGSDIDPYKEFGSSYQLLNFLPLDFFPDLNALVDTATALYEEELTGREHCSPHHTAIRQALVCWDELTKLIAWMSSNITSEQVRTIIVNHVNDTWGLKVRQSLWFHLSCLTFGQHTVQEFLVSFGVWIRTPAPYRPPNAPILSTLPEHTVIC

SEQ ID NO: 7051 - protein, 1365 aa, Artificial Sequence
  SARS-CoV-2/Australia/QLD02/2020__EPI_ISL_407896 spike protein (1-1211)(I714C_Y1110C) WhcAg construct
MFVFLVLLPLVSSQCVNLTTRTQLPPAYTNSFTRGVYYPDKVFRSSVLHSTQDLFLPFFSNVTWFHAIHVSGTNGTKRFDNPVLPFNDGVYFASTEKSNIIRGWIFGTTLDSKTQSLLIVNNATNVVIKVCEFQFCNDPFLGVYYHKNNKSWMESEFRVYSSANNCTFEYVSQPFLMDLEGKQGNFKNLREFVFKNIDGYFKIYSKHTPINLVRDLPQGFSALEPLVDLPIGINITRFQTLLALHRSYLTPGDSSSGWTAGAAAYYVGYLQPRTFLLKYNENGTITDAVDCALDPLSETKCTLKSFTVEKGIYQTSNFRVQPTESIVRFPNITNLCPFGEVFNATRFASVYAWNRKRISNCVADYSVLYNSASFSTFKCYGVSPTKLNDLCFTNVYADSFVIRGDEVRQIAPGQTGKIADYNYKLPDDFTGCVIAWNSNNLDSKVGGNYNYLYRLFRKSNLKPFERDISTEIYQAGSTPCNGVEGFNCYFPLQSYGFQPTNGVGYQPYRVVVLSFELLHAPATVCGPKKSTNLVKNKCVNFNFNGLTGTGVLTESNKKFLPFQQFGRDIADTTDAVRDPQTLEILDITPCSFGGVSVITPGTNTSNQVAVLYQDVNCTEVPVAIHADQLTPTWRVYSTGSNVFQTRAGCLIGAEHVNNSYECDIPIGAGICASYQTQTNSPRRARSVASQSIIAYTMSLGAENSVAYSNNSIACPTNFTISVTTEILPVSMTKTSVDCTMYICGDSTECSNLLLQYGSFCTQLNRALTGIAVEQDKNTQEVFAQVKQIYKTPPIKDFGGFNFSQILPDPSKPSKRSFIEDLLFNKVTLADAGFIKQYGDCLGDIAARDLICAQKFNGLTVLPPLLTDEMIAQYTSALLAGTITSGWTFGAGAALQIPFAMQMAYRFNGIGVTQNVLYENQKLIANQFNSAIGKIQDSLSSTASALGKLQDVVNQNAQALNTLVKQLSSNFGAISSVLNDILSRLDKVEAEVQIDRLITGRLQSLQTYVTQQLIRAAEIRASANLAATKMSECVLGQSKRVDFCGKGYHLMSFPQSAPHGVVFLHVTYVPAQEKNFTTAPAICHDGKAHFPREGVFVSNGTHWFVTQRNFCEPQIITTDNTFVSGNCDVVIGIVNNTVYDPLQLELDSFKEELDKYFKNHTSPDVDLGDISGINASVVNIQKEIDRLNEVAKNLNESLIDLQELGKYEQYIKGGGGSDIDPYKEFGSSYQLLNFLPLDFFPDLNALVDTATALYEEELTGREHCSPHHTAIRQALVCWDELTKLIAWMSSNITSEQVRTIIVNHVNDTWGLKVRQSLWFHLSCLTFGQHTVQEFLVSFGVWIRTPAPYRPPNAPILSTLPEHTVIC

SEQ ID NO: 7052 - protein, 1365 aa, Artificial Sequence
  SARS-CoV-2/India/1-31/2020__EPI_ISL_413523 spike protein (1-1211)(I714C_Y1110C) WhcAg construct
MFVFLVLLPLVSSQCVNLTTRTQLPPAYTNSFTRGVYYPDKVFRSSVLHSTQDLFLPFFSNVTWFHAIHVSGTNGTKRFDNPVLPFNDGVYFASTEKSNIIRGWIFGTTLDSKTQSLLIVNNATNVVIKVCEFQFCNDPFLGVYYHKNNKSWMESEFRVYSSANNCTFEYVSQPFLMDLEGKQGNFKNLREFVFKNIDGYFKIYSKHTPINLVRDLPQGFSALEPLVDLPIGINITRFQTLLALHRSYLTPGDSSSGWTAGAAAYYVGYLQPRTFLLKYNENGTITDAVDCALDPLSETKCTLKSFTVEKGIYQTSNFRVQPTESIVRFPNITNLCPFGEVFNATRFASVYAWNRKRISNCVADYSVLYNSASFSTFKCYGVSPTKLNDLCFTNVYADSFVIRGDEVRQIAPGQTGKIADYNYKLPDDFTGCVIAWNSNNLDSKVGGNYNYLYRLFRKSNLKPFERDISTEIYQAGSTPCNGVEGFNCYFPLQSYGFQPTNGVGYQPYRVVVLSFELLHAPATVCGPKKSTNLVKNKCVNFNFNGLTGTGVLTESNKKFLPFQQFGRDIADTTDAVRDPQTLEILDITPCSFGGVSVITPGTNTSNQVAVLYQDVNCTEVPVAIHADQLTPTWRVYSTGSNVFQTRAGCLIGAEHVNNSYECDIPIGAGICASYQTQTNSPRRARSVASQSIIAYTMSLGAENSVAYSNNSIACPTNFTISVTTEILPVSMTKTSVDCTMYICGDSTECSNLLLQYGSFCTQLNRALTGIAVEQDKNTQEVFAQVKQIYKTPPIKDFGGFNFSQILPDPSKPSKRSFIEDLLFNKVTLADAGFIKQYGDCLGDIAARDLICAQKFNGLTVLPPLLTDEMIAQYTSALLAGTITSGWTFGAGAALQIPFAMQMAYRFNGIGVTQNVLYENQKLIANQFNSVIGKIQDSLSSTASALGKLQDVVNQNAQALNTLVKQLSSNFGAISSVLNDILSRLDKVEAEVQIDRLITGRLQSLQTYVTQQLIRAAEIRASANLAATKMSECVLGQSKRVDFCGKGYHLMSFPQSAPHGVVFLHVTYVPAQEKNFTTAPAICHDGKAHFPREGVFVSNGTHWFVTQRNFCEPQIITTDNTFVSGNCDVVIGIVNNTVYDPLQPELDSFKEELDKYFKNHTSPDVDLGDISGINASVVNIQKEIDRLNEVAKNLNESLIDLQELGKYEQYIKGGGGSDIDPYKEFGSSYQLLNFLPLDFFPDLNALVDTATALYEEELTGREHCSPHHTAIRQALVCWDELTKLIAWMSSNITSEQVRTIIVNHVNDTWGLKVRQSLWFHLSCLTFGQHTVQEFLVSFGVWIRTPAPYRPPNAPILSTLPEHTVIC

SEQ ID NO: 7053 - protein, 1365 aa, Artificial Sequence
  SARS-CoV-2/Guangdong/GD2020087-P0008/2020__EPI_ISL_413863 spike protein (1-1211)(I714C_Y1110C) WhcAg construct
MFVFLVLLPLVSSQCVNLTTRTQLPPAYTNSFTRGVYYPDKVFRSSVLHSTQDLFLPFFSNVTWFHAIHVSGTNGTKRFDNPVLPFNDGVYFASTEKSNIIRGWIFGTTLDSKTQSLLIVNNATNVVIKVCEFQFCNDPFLGVYYHKNNKSWMESEFRVYSSANNCTFEYVSQPFLMDLEGKQGNFKNLREFVFKNIDGYFKIYSKHTPINLVRDLPQGFSALEPLVDLPIGINITRFQTLLALHRSYLTPGDSSSGWTAGAAAYYVGYLQPRTFLLKYNENGTITDAVDCALDPLSETKCTLKSFTVEKGIYQTSNFRVQPTESIVRFPNITNLCPFGEVFNATRFASVYAWNRKRISNCVADYSVLYNSASFSTFKCYGVSPTKLNDLCFTNVYADSFVIRGDEVREIAPGQTGKIADYNYKLPDDFTGCVIAWNSNNLDSKVGGNYNYLYRLFRKSNLKPFERDISTEIYQAGSTPCNGVEGFNCYFPLQSYGFQPTNGVGYQPYRVVVLSFELLHAPATVCGPKKSTNLVKNKCVNFNFNGLTGTGVLTESNKKFLPFQQFGRDIADTTDAVRDPQTLEILDITPCSFGGVSVITPGTNTSNQVAVLYQDVNCTEVPVAIHADQLTPTWRVYSTGSNVFQTRAGCLIGAEHVNNSYECDIPIGAGICASYQTQTNSPRRARSVASQSIIAYTMSLGAENSVAYSNNSIACPTNFTISVTTEILPVSMTKTSVDCTMYICGDSTECSNLLLQYGSFCTQLNRALTGIAVEQDKNTQEVFAQVKQIYKTPPIKDFGGFNFSQILPDPSKPSKRSFIEDLLFNKVTLADAGFIKQYGDCLGDIAARDLICAQKFNGLTVLPPLLTDEMIAQYTSALLAGTITSGWTFGAGAALQIPFAMQMAYRFNGIGVTQNVLYENQKLIANQFNSAIGKIQDSLSSTASALGKLQDVVNQNAQALNTLVKQLSSNFGAISSVLNDILSRLDKVEAEVQIDRLITGRLQSLQTYVTQQLIRAAEIRASANLAATKMSECVLGQSKRVDFCGKGYHLMSFPQSAPHGVVFLHVTYVPAQEKNFTTAPAICHDGKAHFPREGVFVSNGTHWFVTQRNFCEPQIITTDNTFVSGNCDVVIGIVNNTVYDPLQPELDSFKEELDKYFKNHTSPDVDLGDISGINASVVNIQKEIDRLNEVAKNLNESLIDLQELGKYEQYIKGGGGSDIDPYKEFGSSYQLLNFLPLDFFPDLNALVDTATALYEEELTGREHCSPHHTAIRQALVCWDELTKLIAWMSSNITSEQVRTIIVNHVNDTWGLKVRQSLWFHLSCLTFGQHTVQEFLVSFGVWIRTPAPYRPPNAPILSTLPEHTVIC

SEQ ID NO: 7054 - protein, 1365 aa, Artificial Sequence
  SARS-CoV-2/Sweden/01/2020__EPI_ISL_411951 spike protein (1-1211)(I714C_Y1110C) WhcAg construct
MFVFLVLLPLVSSQCVNLTTRTQLPPAYTNSFTRGVYYPDKVFRSSVLHSTQDLFLPFFSNVTWFHAIHVSGTNGTKRFDNPVLPFNDGVYFASTEKSNIIRGWIFGTTLDSKTQSLLIVNNATNVVIKVCEFQFCNDPFLGVYYHKNNKSWMESEFRVYSSANNCTFEYVSQPFLMDLEGKQGNFKNLREFVFKNIDGYFKIYSKHTPINLVRDLPQGFSALEPLVDLPIGINITRFQTLLALHRSYLTPGDSSSGWTAGAAAYYVGYLQPRTFLLKYNENGTITDAVDCALDPLSETKCTLKSFTVEKGIYQTSNFRVQPTESIVRFPNITNLCPFGEVFNATRFASVYAWNRKRISNCVADYSVLYNSASFSTFKCYGVSPTKLNDLCFTNVYADSFVIRGDEVRQIAPGQTGKIADYNYKLPDDFTGCVIAWNSNNLDSKVGGNYNYLYRLFRKSNLKPFERDISTEIYQAGSTPCNGVEGFNCYFPLQSYGFQPTNGVGYQPYRVVVLSFELLHAPATVCGPKKSTNLVKNKCVNFNFNGLTGTGVLTESNKKFLPFQQFGRDIADTTDAVRDPQTLEILDITPCSFGGVSVITPGTNTSNQVAVLYQDVNCTEVPVAIHADQLTPTWRVYSTGSNVFQTRAGCLIGAEHVNNSYECDIPIGAGICASYQTQTNSPRRARSVASQSIIAYTMSLGAENSVAYSNNSIACPTNFTISVTTEILPVSMTKTSVDCTMYICGDSTECSNLLLQYGSFCTQLNRALTGIAVEQDKNTQEVFAQVKQIYKTPPIKDCGGFNFSQILPDPSKPSKRSFIEDLLFNKVTLADAGFIKQYGDCLGDIAARDLICAQKFNGLTVLPPLLTDEMIAQYTSALLAGTITSGWTFGAGAALQIPFAMQMAYRFNGIGVTQNVLYENQKLIANQFNSAIGKIQDSLSSTASALGKLQDVVNQNAQALNTLVKQLSSNFGAISSVLNDILSRLDKVEAEVQIDRLITGRLQSLQTYVTQQLIRAAEIRASANLAATKMSECVLGQSKRVDFCGKGYHLMSFPQSAPHGVVFLHVTYVPAQEKNFTTAPAICHDGKAHFPREGVFVSNGTHWFVTQRNFCEPQIITTDNTFVSGNCDVVIGIVNNTVYDPLQPELDSFKEELDKYFKNHTSPDVDLGDISGINASVVNIQKEIDRLNEVAKNLNESLIDLQELGKYEQYIKGGGGSDIDPYKEFGSSYQLLNFLPLDFFPDLNALVDTATALYEEELTGREHCSPHHTAIRQALVCWDELTKLIAWMSSNITSEQVRTIIVNHVNDTWGLKVRQSLWFHLSCLTFGQHTVQEFLVSFGVWIRTPAPYRPPNAPILSTLPEHTVIC

SEQ ID NO: 7055 - protein, 1365 aa, Artificial Sequence
  SARS-CoV-2/Tianmen/HBCDC-HB-07/2020__EPI_ISL_412983 spike protein (1-1211)(I714C_Y1110C) WhcAg construct
MFVFLVLLPLVSSQCVNLTTRTQLPPAYTNSFTRGVYYPDKVFRSSVLHSTQDLFLPFFSNVTWFHAIHVSGTNGTKRFDNPVLPFNDGVYFASTEKSNIIRGWIFGTTLDSKTQSLLIVNNATNVVIKVCEFQFCNDPFLGVYYHKNNKSWMESEFRVYSSANNCTFEYVSQPFLMDLEGKQGNFKNLREFVFKNIDGYFKIYSKHTPINLVRDLPQGFSALEPLVDLPIGINITRFQTLLALHRSYLTPGDSSSGWTAGAAAYYVGYLQPRTFLLKYNENGTITDAVDCALDPLSETKCTLKSFTVEKGIYQTSNFRVQPTESIVRFPNITNLCPFGEVFNATRFASVYAWNRKRISNCVADYSVLYNSASFSTFKCYGVSPTKLNDLCFTNVYADSFVIRGDEVRQIAPGQTGKIADYNYKLPDDFTGCVIAWNSNNLDSKVGGNYNYLYRLFRKSNLKPFERDISTEIYQAGSTPCNGVEGFNCYFPLQSYGFQPTNGVGYQPYRVVVLSFELLHAPATVCGPKKSTNLVKNKCVNFNFNGLTGTGVLTESNKKFLPFQQFGRDIADTTDAVRDPQTLEILDITPCSFGGVSVITPGTNTSNQVAVLYQDLNCTEVPVAIHADQLTPTWRVYSTGSNVFQTRAGCLIGAEHVNNSYECDIPIGAGICASYQTQTNSPRRARSVASQSIIAYTMSLGAENSVAYSNNSIACPTNFTISVTTEILPVSMTKTSVDCTMYICGDSTECSNLLLQYGSFCTQLNRALTGIAVEQDKNTQEVFAQVKQIYKTPPIKDFGGFNFSQILPDPSKPSKRSFIEDLLFNKVTLADAGFIKQYGDCLGDIAARDLICAQKFNGLTVLPPLLTDEMIAQYTSALLAGTITSGWTFGAGAALQIPFAMQMAYRFNGIGVTQNVLYENQKLIANQFNSAIGKIQDSLSSTASALGKLQDVVNQNAQALNTLVKQLSSNFGAISSVLNDILSRLDKVEAEVQIDRLITGRLQSLQTYVTQQLIRAAEIRASANLAATKMSECVLGQSKRVDFCGKGYHLMSFPQSAPHGVVFLHVTYVPAQEKNFTTAPAICHDGKAHFPREGVFVSNGTHWFVTQRNFCEPQIITTDNTFVSGNCDVVIGIVNNTVYDPLQPELDSFKEELDKYFKNHTSPDVDLGDISGINASVVNIQKEIDRLNEVAKNLNESLIDLQELGKYEQYIKGGGGSDIDPYKEFGSSYQLLNFLPLDFFPDLNALVDTATALYEEELTGREHCSPHHTAIRQALVCWDELTKLIAWMSSNITSEQVRTIIVNHVNDTWGLKVRQSLWFHLSCLTFGQHTVQEFLVSFGVWIRTPAPYRPPNAPILSTLPEHTVIC

SEQ ID NO: 7056 - protein, 1365 aa, Artificial Sequence
  SARS-CoV-2/Hong Kong/case42_VM20002493/2020__EPI_ISL_414527 spike protein (1-1211)(I714C_Y1110C) WhcAg construct
MFVFLVLLPLVSSQCVNLTTRTQLPPAYTNSFTRGVYYPDKVFRSSVLHSTQDLFLPFFSNVTWFHAIHVSGTNGTKRFDNPVLPFNDGVYFASTEKSNIIRGWIFGTTLDSKTQSLLIVNNATNVVIKVCEFQFCNDPFLGVYYHKNNKSWMESEFRVYSSANNCTFEYVSQPFLMDLEGKQGNFKNLREFVFKNIDGYFKIYSKHTPINLVRDLPQGFSALEPLVDLPIGINITRFQTLLALHRSYLTPGDSSSGWTAGAAAYYVGYLQPRTFLLKYNENGTITDAVDCALDPLSETKCTLKSFTVEKGIYQTSNFRVQPTESIVRFPNITNLCPFGEVFNATRFASVYAWNRKRISNCVADYSVLYNSASFSTFKCYGVSPTKLNDLCFTNVYADSFVIRGDEVRQIAPGQTGKIADYNYKLPDDFTGCVIAWNSNNLDSKVGGNYNYLYRLFRKSNLKPFERDISTEIYQAGSTPCNGVEGFNCYFPLQSYGFQPTNGVGYQPYRVVVLSFELLHAPATVCGPKKSTNLVKNKCVNFNFNGLTGTGVLTESNKKFLPFQQFGRDIADTTDAVRDPQTLEILDITPCSFGGVSVITPGTNTSNQVAVLYQDVNCTEVPVAIHADQLTPTWRVYSTGSNVFQTRAGCLIGAEHVNNSYECDIPIGAGICASYQTQTNSPRRARSVASQSIIAYTMSLGAENSVAYSNNSIACPTNFAISVTTEILPVSMTKTSVDCTMYICGDSTECSNLLLQYGSFCTQLNRALTGIAVEQDKNTQEVFAQVKQIYKTPPIKDFGGFNFSQILPDPSKPSKRSFIEDLLFNKVTLADAGFIKQYGDCLGDIAARDLICAQKFNGLTVLPPLLTDEMIAQYTSALLAGTITSGWTFGAGAALQIPFAMQMAYRFNGIGVTQNVLYENQKLIANQFNSAIGKIQDSLSSTASALGKLQDVVNQNAQALNTLVKQLSSNFGAISSVLNDILSRLDKVEAEVQIDRLITGRLQSLQTYVTQQLIRAAEIRASANLAATKMSECVLGQSKRVDFCGKGYHLMSFPQSAPHGVVFLHVTYVPAQEKNFTTAPAICHDGKAHFPREGVFVSNGTHWFVTQRNFCEPQIITTDNTFVSGNCDVVIGIVNNTVYDPLQPELDSFKEELDKYFKNHTSPDVDLGDISGINASVVNIQKEIDRLNEVAKNLNESLIDLQELGKYEQYIKGGGGSDIDPYKEFGSSYQLLNFLPLDFFPDLNALVDTATALYEEELTGREHCSPHHTAIRQALVCWDELTKLIAWMSSNITSEQVRTIIVNHVNDTWGLKVRQSLWFHLSCLTFGQHTVQEFLVSFGVWIRTPAPYRPPNAPILSTLPEHTVIC

SEQ ID NO: 7057 - protein, 1365 aa, Artificial Sequence
  SARS-CoV-2/USA/CruiseA-23/2020__EPI_ISL_414482 spike protein (1-1211)(I714C_Y1110C) WhcAg construct
MFVFLVLLPLVSSQCVNLTTRTQLPPAYTNSFTRGVYYPDKVFRSSVLHSTQDLFLPFFSNVTWFHAIHVSGTNGTKRFDNPVLPFNDGVYFASTEKSNIIRGWIFGTTLDSKTQSLLIVNNATNVVIKVCEFQFCNDPFLGVYYHKNNKSWMESEFRVYSSANNCTFEYVSQPFLMDLEVKQGNFKNLREFVFKNIDGYFKIYSKHTPINLVRDLPQGFSALEPLVDLPIGINITRFQTLLALHRSYLTPGDSSSGWTAGAAAYYVGYLQPRTFLLKYNENGTITDAVDCALDPLSETKCTLKSFTVEKGIYQTSNFRVQPTESIVRFPNITNLCPFGEVFNATRFASVYAWNRKRISNCVADYSVLYNSASFSTFKCYGVSPTKLNDLCFTNVYADSFVIRGDEVRQIAPGQTGKIADYNYKLPDDFTGCVIAWNSNNLDSKVGGNYNYLYRLFRKSNLKPFERDISTEIYQAGSTPCNGVEGFNCYFPLQSYGFQPTNGVGYQPYRVVVLSFELLHAPATVCGPKKSTNLVKNKCVNFNFNGLTGTGVLTESNKKFLPFQQFGRDIADTTDAVRDPQTLEILDITPCSFGGVSVITPGTNTSNQVAVLYQDVNCTEVPVAIHADQLTPTWRVYSTGSNVFQTRAGCLIGAEHVNNSYECDIPIGAGICASYQTQTNSPRRARSVASQSIIAYTMSLGAENSVAYSNNSIACPTNFTISVTTEILPVSMTKTSVDCTMYICGDSTECSNLLLQYGSFCTQLNRALTGIAVEQDKNTQEVFAQVKQIYKTPPIKDFGGFNFSQILPDPSKPSKRSFIEDLLFNKVTLADAGFIKQYGDCLGDIAARDLICAQKFNGLTVLPPLLTDEMIAQYTSALLAGTITSGWTFGAGAALQIPFAMQMAYRFNGIGVTQNVLYENQKLIANQFNSAIGKIQDSLSSTASALGKLQDVVNQNAQALNTLVKQLSSNFGAISSVLNDILSRLDKVEAEVQIDRLITGRLQSLQTYVTQQLIRAAEIRASANLAATKMSECVLGQSKRVDFCGKGYHLMSFPQSAPHGVVFLHVTYVPAQEKNFTTAPAICHDGKAHFPREGVFVSNGTHWFVTQRNFCEPQIITTDNTFVSGNCDVVIGIVNNTVYDPLQPELDSFKEELDKYFKNHTSPDVDLGDISGINASVVNIQKEIDRLNEVAKNLNESLIDLQELGKYEQYIKGGGGSDIDPYKEFGSSYQLLNFLPLDFFPDLNALVDTATALYEEELTGREHCSPHHTAIRQALVCWDELTKLIAWMSSNITSEQVRTIIVNHVNDTWGLKVRQSLWFHLSCLTFGQHTVQEFLVSFGVWIRTPAPYRPPNAPILSTLPEHTVIC

SEQ ID NO: 7058 - protein, 1365 aa, Artificial Sequence
  SARS-CoV-2/Hong Kong/case85_VM20002868/2020__EPI_ISL_414519 spike protein (1-1211)(I714C_Y1110C) WhcAg construct
MFVFLVLVPLVSSQCVNLTTRTQLPPAYTNSFTRGVYYPDKVFRSSVLHSTQDLFLPFFSNVTWFHAIHVSGTNGTKRFDNPVLPFNDGVYFASTEKSNIIRGWIFGTTLDSKTQSLLIVNNATNVVIKVCEFQFCNDPFLGVYYHKNNKSWMESEFRVYSSANNCTFEYVSQPFLMDLEGKQGNFKNLREFVFKNIDGYFKIYSKHTPINLVRDLPQGFSALEPLVDLPIGINITRFQTLLALHRSYLTPGDSSSGWTAGAAAYYVGYLQPRTFLLKYNENGTITDAVDCALDPLSETKCTLKSFTVEKGIYQTSNFRVQPTESIVRFPNITNLCPFGEVFNATRFASVYAWNRKRISNCVADYSVLYNSASFSTFKCYGVSPTKLNDLCFTNVYADSFVIRGDEVRQIAPGQTGKIADYNYKLPDDFTGCVIAWNSNNLDSKVGGNYNYLYRLFRKSNLKPFERDISTEIYQAGSTPCNGVEGFNCYFPLQSYGFQPTNGVGYQPYRVVVLSFELLHAPATVCGPKKSTNLVKNKCVNFNFNGLTGTGVLTESNKKFLPFQQFGRDIADTTDAVRDPQTLEILDITPCSFGGVSVITPGTNTSNQVAVLYQDVNCTEVPVAIHADQLTPTWRVYSTGSNVFQTRAGCLIGAEHVNNSYECDIPIGAGICASYQTQTNSPRRARSVASQSIIAYTMSLGAENSVAYSNNSIACPTNFTISVTTEILPVSMTKTSVDCTMYICGDSTECSNLLLQYGSFCTQLNRALTGIAVEQDKNTQEVFAQVKQIYKTPPIKDFGGFNFSQILPDPSKPSKRSFIEDLLFNKVTLADAGFIKQYGDCLGDIAARDLICAQKFNGLTVLPPLLTDEMIAQYTSALLAGTITSGWTFGAGAALQIPFAMQMAYRFNGIGVTQNVLYENQKLIANQFNSAIGKIQDSLSSTASALGKLQDVVNQNAQALNTLVKQLSSNFGAISSVLNDILSRLDKVEAEVQIDRLITGRLQSLQTYVTQQLIRAAEIRASANLAATKMSECVLGQSKRVDFCGKGYHLMSFPQSAPHGVVFLHVTYVPAQEKNFTTAPAICHDGKAHFPREGVFVSNGTHWFVTQRNFCEPQIITTDNTFVSGNCDVVIGIVNNTVYDPLQPELDSFKEELDKYFKNHTSPDVDLGDISGINASVVNIQKEIDRLNEVAKNLNESLIDLQELGKYEQYIKGGGGSDIDPYKEFGSSYQLLNFLPLDFFPDLNALVDTATALYEEELTGREHCSPHHTAIRQALVCWDELTKLIAWMSSNITSEQVRTIIVNHVNDTWGLKVRQSLWFHLSCLTFGQHTVQEFLVSFGVWIRTPAPYRPPNAPILSTLPEHTVIC

SEQ ID NO: 7059 - protein, 1365 aa, Artificial Sequence; identical to SEQ ID NO: 7049
  SARS-CoV-2/England/200990660/2020__EPI_ISL_414523 spike protein (1-1211)(I714C_Y1110C) WhcAg construct

SEQ ID NO: 7060 - protein, 1365 aa, Artificial Sequence
  SARS-CoV-2/Australia/NSW09/2020__EPI_ISL_413595 spike protein (1-1211)(I714C_Y1110C) WhcAg construct
MFVFLVLLPLVSSQCVNLTTRTQLPPAYTNSFTRGVYYPDKVFRSSVLHSTQDLFLPFFSNVTWFHAIHVSGTNGTKRFDNPVLPFNDGVYFASTEKSNIIRGWIFGTTLDSKTQSLLIVNNATNVVIKVCEFQFCNDPFLGVYYHKNNKSWMESEFRVYSSANNCTFEYVSQPFLMDLEGKQGNFKNLREFVFKNIDGYFKIYSKHTPINLVRDLPQGFSALEPLVDLPIGINITRFQTLLALHRSYLTPGDSSSGWTAGAAAYYVGYLQPRTFLLKYNENGTITDAVDCALDPLSETKCTLKSFTVEKGIYQTSNFRVQPTESIVRFPNITNLCPFGEVFNATRFASVYAWNRKRISNCVADYSVLYNSASFSTFKCYGVSPTKLNDLCFTNVYADSFVIRGDEVRQIAPGQTGKIADYNYKLPDDFTGCVIAWNSNNLDSKVGGNYNYLYRLFRKSNLKPFERDISTEIYQAGSTPCNGVEGFNCYFPLQSYGFQPTNGVGYQPYRVVVLSFELLHAPATVCGPKKSTNLVKNKCVNFNFNGLTGTGVLTESNKKFLPFQQFGRDIADTTDAVRDPQTLEILDITPCSFGGVSVITPGTNTSNQVAVLYQDVNCTEVPVAIHADQLTPTWRVYSTGSNVFQTRAGCLIGAEHVNNSYECDIPIGAGICASYQTQTNSPRRARSVASQSIIAYTMSLGAENSVAYSNNSIACPTNFTISVTTEILPVSMTKTSVDCTMYICGDSTECSNLLLQYGSFCTQLNRALTGIAVEQDKNTQEVFAQVKQIYKTPPIKDFGGFNFSQILPDPSKPSKRSFIEDLLFNKVTLADAGFIKQYGDCLGDIAARDLICAQKFNGLTVLPPLLTDEMIAQYTSALLAGTITSGWTFGAGAALQIPFAMQMAYRFNGIGVTQNVLYENQKLIANQFNSAIGKIQDSLSFTASALGKLQDVVNQNAQALNTLVKQLSSNFGAISSVLNDILSRLDKVEAEVQIDRLITGRLQSLQTYVTQQLIRAAEIRASANLAATKMSECVLGQSKRVDFCGKGYHLMSFPQSAPHGVVFLHVTYVPAQEKNFTTAPAICHDGKAHFPREGVFVSNGTHWFVTQRNFCEPQIITTDNTFVSGNCDVVIGIVNNTVYDPLQPELDSFKEELDKYFKNHTSPDVDLGDISGINASVVNIQKEIDRLNEVAKNLNESLIDLQELGKYEQYIKGGGGSDIDPYKEFGSSYQLLNFLPLDFFPDLNALVDTATALYEEELTGREHCSPHHTAIRQALVCWDELTKLIAWMSSNITSEQVRTIIVNHVNDTWGLKVRQSLWFHLSCLTFGQHTVQEFLVSFGVWIRTPAPYRPPNAPILSTLPEHTVIC

SEQ ID NO: 7061 - protein, 1365 aa, Artificial Sequence; identical to SEQ ID NO: 7041
  SARS-CoV-2/Australia/NSW10/2020__EPI_ISL_413596 spike protein (1-1211)(I714C_Y1110C) WhcAg construct

SEQ ID NO: 7062 - protein, 1365 aa, Artificial Sequence
  SARS-CoV-2/Switzerland/1000477797/2020__EPI_ISL_413023 spike protein (1-1211)(I714C_Y1110C) WhcAg construct
MFVFLVLLPLVSSQCVNLTTRTQLPPAYTNSFTRGVYYPDKVFRSSVLHSTQDLFLPFFSNVTWFHAIHVSGTNGTKRFDNPVLPFNDGVYFASTEKSNIIRGWIFGTTLDSKTQSLLIVNNATNVVIKVCEFQFCNDPFLGVYYHKNNKSWMESEFRVYSSANNCTFEYVSQPFLMDLEGKQGNFKNLREFVFKNIDGYFNIYSKHTPINLVRDLPQGFSALEPLVDLPIGINITRFQTLLALHRSYLTPGDSSSGWTAGAAAYYVGYLQPRTFLLKYNENGTITDAVDCALDPLSETKCTLKSFTVEKGIYQTSNFRVQPTESIVRFPNITNLCPFGEVFNATRFASVYAWNRKRISNCVADYSVLYNSASFSTFKCYGVSPTKLNDLCFTNVYADSFVIRGDEVRQIAPGQTGKIADYNYKLPDDFTGCVIAWNSNNLDSKVGGNYNYLYRLFRKSNLKPFERDISTEIYQAGSTPCNGVEGFNCYFPLQSYGFQPTNGVGYQPYRVVVLSFELLHAPATVCGPKKSTNLVKNKCVNFNFNGLTGTGVLTESNKKFLPFQQFGRDIADTTDAVRDPQTLEILDITPCSFGGVSVITPGTNTSNQVAVLYQGVNCTEVPVAIHADQLTPTWRVYSTGSNVFQTRAGCLIGAEHVNNSYECDIPIGAGICASYQTQTNSPRRARSVASQSIIAYTMSLGAENSVAYSNNSIACPTNFTISVTTEILPVSMTKTSVDCTMYICGDSTECSNLLLQYGSFCTQLNRALTGIAVEQDKNTQEVFAQVKQIYKTPPIKDFGGFNFSQILPDPSKPSKRSFIEDLLFNKVTLADAGFIKQYGDCLGDIAARDLICAQKFNGLTVLPPLLTDEMIAQYTSALLAGTITSGWTFGAGAALQIPFAMQMAYRFNGIGVTQNVLYENQKLIANQFNSAIGKIQDSLSSTASALGKLQDVVNQNAQALNTLVKQLSSNFGAISSVLNDILSRLDKVEAEVQIDRLITGRLQSLQTYVTQQLIRAAEIRASANLAATKMSECVLGQSKRVDFCGKGYHLMSFPQSAPHGVVFLHVTYVPAQEKNFTTAPAICHDGKAHFPREGVFVSNGTHWFVTQRNFCEPQIITTDNTFVSGNCDVVIGIVNNTVYDPLQPELDSFKEELDKYFKNHTSPDVDLGDISGINASVVNIQKEIDRLNEVAKNLNESLIDLQELGKYEQYIKGGGGSDIDPYKEFGSSYQLLNFLPLDFFPDLNALVDTATALYEEELTGREHCSPHHTAIRQALVCWDELTKLIAWMSSNITSEQVRTIIVNHVNDTWGLKVRQSLWFHLSCLTFGQHTVQEFLVSFGVWIRTPAPYRPPNAPILSTLPEHTVIC

SEQ ID NO: 7063 - protein, 1365 aa, Artificial Sequence
  SARS-CoV-2/Belgium/BA-02291/2020__EPI_ISL_415159 spike protein (1-1211)(I714C_Y1110C) WhcAg construct
MFVFLVLLPLVSSQCVNLTTRTQLPPAYTNSFTRGVYYPDKVFRSSVLHSTQDLFLPFFSNVTWFHAIHVSGTNGTKRFDNPVLPFNDGVYFASTEKSNIIRGWIFGTTLDSKTQSLLIVNNATNVVIKVCEFQFCNDPFLGVYYHKNNKSWMESEFRVYSSANNCTFEYVSQPFLMDLEGKQGNFKNLREFVFKNIDGYFKIYSKHTPINLVRDLPQGFSALEPLVDLPIGINITRFQTLLALHRSYLTPGDSSSGWTAGAAAYYVGYLQPRTFLLKYNENGTITDAVDCALDPLSETKCTLKSFTVEKGIYQTSNFRVQPTESIVRFPNITNLCPFGEVFNATRFASVYAWNRKRISNCVADYSVLYNSASFSTFKCYGVSPTKLNDLCFTNVYADSFVIRGDEVRQIAPGQTGKIADYNYKLPDDFTGCVIAWNSNNLDSKVGGNYNYLYRLFRRSNLKPFERDISTEIYQAGSTPCNGVEGFNCYFPLQSYGFQPTNGVGYQPYRVVVLSFELLPAPATVCGPKKSTNLVKNKCVNFNFNGLTGTGVLTESNKKFLPFQQFGRDIADTTDAVRDPQTLEILDITPCSFGGVSVITPGTNTSNQVAVLYQGVNCTEVPVAIHADQLTPTWRVYSTGSNVFQTRAGCLIGAEHVNNSYECDIPIGAGICASYQTQTNSPRRARSVASQSIIAYTMSLGAENSVAYSNNSIACPTNFTISVTTEILPVSMTKTSVDCTMYICGDSTECSNLLLQYGSFCTQLNRALTGIAVEQDKNTQEVFAQVKQIYKTPPIKDFGGFNFSQILPDPSKPSKRSFIEDLLFNKVTLADAGFIKQYGDCLGDIAARDLICAQKFNGLTVLPPLLTDEMIAQYTSALLAGTITSGWTFGAGAALQIPFAMQMAYRFNGIGVTQNVLYENQKLIANQFNSAIGKIQDSLSSAAPALGKLQDVVNQNAQALNTLVKQLSSNFGAISSVLNDILSRLDKVEAEVQIDRLITGRLQSLQTYVTQQLIRAAEIRASANLAATKMSECVLGQSKRVDFCGKGYHLMSFPQSAPHGVVFLHVTYVPAQEKNFTTAPAICHDGKAHFPREGVFVSNGTHWFVTQRNFCEPQIITTDNTFVSGNCDVVIGIVNNTVYDPLQPELDSFKEELDKYFKNHTSPDVDLGDISGINASVVNIQKEIDRLNEVAKNLNESLIDLQELGKYEQYIKGGGGSDIDPYKEFGSSYQLLNFLPLDFFPDLNALVDTATALYEEELTGREHCSPHHTAIRQALVCWDELTKLIAWMSSNITSEQVRTIIVNHVNDTWGLKVRQSLWFHLSCLTFGQHTVQEFLVSFGVWIRTPAPYRPPNAPILSTLPEHTVIC

SEQ ID NO: 7064 - protein, 1365 aa, Artificial Sequence
  SARS-CoV-2/USA/WA8-UW5/2020__EPI_ISL_413486 spike protein (1-1211)(I714C_Y1110C) WhcAg construct
MFVFLVLLPLVSSQCVNLTTRTQLPPAYTNSFTRGVYYPDKVFRSSVLHSTQDLFLPFFSNVTWFHAIHVSGTNGTKRFDNPVLPFNDGVYFASTEKSNIIRGWIFGTTLDSKTQSLLIVNNATNVVIKVCEFQFCNDPFLGVYYHKNNKSWMESEFRVYSSANNCTFEYVSQPFLMDLEGKQGNFKNLREFVFKNIDGYFKIYSKHTPINLVRDLPQGFSALEPLVDLPIGINITRFQTLLALHRSYLTPGDSSSGWTAGAAAYYVGYLQPRTFLLKYNENGTITDAVDCALDPLSETKCTLKSFTVEKGIYQTSNFRVQPTESIVRFPNITNLCPFGEVFNATRFASVYAWNRKRISNCVADYSVLYNSASFSTFKCYGVSPTKLNDLCFTNVYADSFVIRGDEVRQIAPGQTGKIADYNYKLPDDFTGCVIAWNSNNLDSKVGGNYNYLYRLFRKSNLKPFERDISTEIYQAGSTPCNGVEGFNCYFPLQSYGFQPTNGVGYQPYRVVVLSFELLHAPATVCGPKKSTNLVKNKCVNFNFNGLTGTGVLTESNKKFLPFQQFGRDIADTTDAVRDPQTLEILDITPCSFGGVSVITPGTNTSNQVAVLYQDVNCTEVPVAIHADQLTPTWRVYSTGSNVFQTRAGCLIGAEYVNNSYECDIPIGAGICASYQTQTNSPRRARSVASQSIIAYTMSLGAENSVAYSNNSIACPTNFTISVTTEILPVSMTKTSVDCTMYICGDSTECSNLLLQYGSFCTQLNRALTGIAVEQDKNTQEVFAQVKQIYKTPPIKDFGGFNFSQILPDPSKPSKRSFIEDLLFNKVTLADAGFIKQYGDCLGDIAARDLICAQKFNGLTVLPPLLTDEMIAQYTSALLAGTITSGWTFGAGAALQIPFAMQMAYRFNGIGVTQNVLYENQKLIANQFNSAIGKIQDSLSSTASALGKLQDVVNQNAQALNTLVKQLSSNFGAISSVLNDILSRLDKVEAEVQIDRLITGRLQSLQTYVTQQLIRAAEIRASANLAATKMSECVLGQSKRVDFCGKGYHLMSFPQSAPHGVVFLHVTYVPAQEKNFTTAPAICHDGKAHFPREGVFVSNGTHWFVTQRNFCEPQIITTDNTFVSGNCDVVIGIVNNTVYDPLQPELDSFKEELDKYFKNHTSPDVDLGDISGINASVVNIQKEIDRLNEVAKNLNESLIDLQELGKYEQYIKGGGGSDIDPYKEFGSSYQLLNFLPLDFFPDLNALVDTATALYEEELTGREHCSPHHTAIRQALVCWDELTKLIAWMSSNITSEQVRTIIVNHVNDTWGLKVRQSLWFHLSCLTFGQHTVQEFLVSFGVWIRTPAPYRPPNAPILSTLPEHTVIC

SEQ ID NO: 7065 - protein, 1365 aa, Artificial Sequence
  SARS-CoV-2/England/20102000506/2020__EPI_ISL_415147 spike protein (1-1211)(I714C_Y1110C) WhcAg construct
MFVFLVLLPLVSSQCVNLTTRTQLPPAYTNSFTRGVYYPDKVFRSSVLHSTQDLFLPFFSNVTWFHAIHVSGTNGTKRFDNPVLPFNDGVYFASTEKSNIIRGWIFGTTLDSKTQSLLIVNNATNVVIKVCEFQFCNDPFLGVYYHKNNKSWMESEFRVYSSANNCTFEYVSQPFLMDLEGKQGNFKNLREFVFKNIDGYFKIYSKHTPINLVRDLPQGFSALEPLVDLPIGINITRFQTLLALHRSYLTPGDSSSGWTAGAAAYYVGYLQPRTFLLKYNENGTITDAVDCALDPLSETKCTLKSFTVEKGIYQTSNFRVQPTESIVRFPNITNLCPFGEVFNATRFASVYAWNRKRISNCVADYSVLYNSASFSTFKCYGVSPTKLNDLCFTNVYADSFVIRGDEVRQIAPGQTGKIADYNYKLPDDFTGCVIAWNSNNLDSKVGGNYNYLYRLFRKSNLKPFERDISTEIYQAGSTPCNGVEGFNCYFPLQSYGFQPTNGVGYQPYRVVVLSFELLHAPATVCGPKKSTNLVKNKCVNFNFNGLTGTGVLTESNKKFLPFQQFGRDIADTTDAVRDPQTLEILDITPCSFGGVSVITPGTNTSNQVAVLYQGVNCTEVPVAIHADQLTPTWRVYSTGSNVFQTRAGCLIGAEHVNNSYECDIPIGAGICASYQTQTNSPRRARSVASQSIIAYTMSLGAENSVAYSNNSIACPTNFTISVTTEILPVSMTKTSVDCTMYICGDSTECSNLLLQYGSFCTQLNRALTGIAVEQDKNTQEVFAQVKQIYKTPPIKDFGGFNFSQILPDPSKPSKRSFIEDLLFNKVTLADAGFIKQYGYCLGDIAARDLICAQKFNGLTVLPPLLTDEMIAQYTSALLAGTITSGWTFGAGAALQIPFAMQMAYRFNGIGVTQNVLYENQKLIANQFNSAIGKIQDSLSSTASALGKLQDVVNQNAQALNTLVKQLSSNFGAISSVLNDILSRLDKVEAEVQIDRLITGRLQSLQTYVTQQLIRAAEIRASANLAATKMSECVLGQSKRVDFCGKGYHLMSFPQSAPHGVVFLHVTYVPAQEKNFTTAPAICHDGKAHFPREGVFVSNGTHWFVTQRNFCEPQIITTDNTFVSGNCDVVIGIVNNTVYDPLQPELDSFKEELDKYFKNHTSPDVDLGDISGINASVVNIQKEIDRLNEVAKNLNESLIDLQELGKYEQYIKGGGGSDIDPYKEFGSSYQLLNFLPLDFFPDLNALVDTATALYEEELTGREHCSPHHTAIRQALVCWDELTKLIAWMSSNITSEQVRTIIVNHVNDTWGLKVRQSLWFHLSCLTFGQHTVQEFLVSFGVWIRTPAPYRPPNAPILSTLPEHTVIC

SEQ ID NO: 7066 - protein, 1365 aa, Artificial Sequence
  SARS-CoV-2/Belgium/VAG-03013/2020__EPI_ISL_415155 spike protein (1-1211)(I714C_Y1110C) WhcAg construct
MFVFLVLLPLVSSQCVNLTTRTQLPPAYTNSFTRGVYYPDKVFRSSVLHSTQDLFLPFFSNVTWFHAIHVSGTNGTKRFDNPVLPFNDGVYFASTEKSNIIRGWIFGTTLDSKTQSLLIVNNATNVVIKVCEFQFCNDPFLGVYYHKNNKSWMESEFRVYSSANNCTFEYVSQPFLMDLEGKQGNFKNLREFVFKNIDGYFKIYSKHTPINLVRDLPQGFSALEPLVDLPIGINITRFQTLLALHRSYLTPGDSSSGWTAGAAAYYVGYLQPRTFLLKYNENGTITDAVDCALDPLSETKCTLKSFTVEKGIYQTSNFRVQPTESIVRFPNITNLCPFGEVFNATRFASVYAWNRKRISNCVADYSVLYNSASFSTFKCYGVSPTKLNDLCFTNVYADSFVIRGDEVRQIAPGQTGKIADYNYKLPDDFTGCVIAWNSNNLDSKVGGNYNYLYRLFRKSNLKPFERDISTEIYQAGSTPCNGVEGFNCYFPLQSYGFQPTNGVGYQPYRVVVLSFELLHAPATVCGPKKSTNLVKNKCVNFNFNGLTGTGVLTESNKKFLPFQQFGRDIADTTDAVRDPQTLEILDITPCSFGGVSVITPGTNTSNQVAVLYQGVNCTEVPVAIHADQLTPTWRVYSTGSNVFQTRAGCLIGAEHVNNSYECDIPIGAGICASYQTQTNSPRRARSVASQSIIAYTMSLGAENSVAYSNNSIACPTNFTISVTTEILPVSMTKTSVDCTMYICGDSTECSNLLLQYGSFCTQLNRALTGIAVEQDKNTQEVFAQVKQIYKTPPIKDFGGFNFSQILPDPSKPSKRSFIEDLLFNKVTLADAGFIKQYGDCLGDIAARDLICAQKFNGLTVLPPLLTDEMIAQYTSALLAGTITSGWTFGAGAALQIPFAMQMAYRFNGIGVTQNVLYENQKLIANQFNSAIGKIQDSLSSTATALGKLQDVVNQNAQALNTLVKQLSSNFGAISSVLNDILSRLDKVEAEVQIDRLITGRLQSLQTYVTQQLIRAAEIRASANLAATKMSECVLGQSKRVDFCGKGYHLMSFPQSAPHGVVFLHVTYVPAQEKNFTTAPAICHDGKAHFPREGVFVSNGTHWFVTQRNFCEPQIITTDNTFVSGNCDVVIGIVNNTVYDPLQPELDSFKEELDKYFKNHTSPDVDLGDISGINASVVNIQKEIDRLNEVAKNLNESLIDLQELGKYEQYIKGGGGSDIDPYKEFGSSYQLLNFLPLDFFPDLNALVDTATALYEEELTGREHCSPHHTAIRQALVCWDELTKLIAWMSSNITSEQVRTIIVNHVNDTWGLKVRQSLWFHLSCLTFGQHTVQEFLVSFGVWIRTPAPYRPPNAPILSTLPEHTVIC

SEQ ID NO: 7067 - protein, 1365 aa, Artificial Sequence
  SARS-CoV-2/Belgium/BC-03016/2020__EPI_ISL_415157 spike protein (1-1211)(I714C_Y1110C) WhcAg construct
MFVFLVLLPLVSSQCVNLTTRTQLPPAYTNSFTRGVYYPDKVFRSSVLHSTQDLFLPFFSNVTWFHAIHVSGTNGTKRFDNPVLPFNDGVYFASTEKSNIIRGWIFGTTLDSKTQSLLIVNNATNVVIKVCEFQFCNDPFLGVYYHKNNKSWMESEFRVYSSANNCTFEYVSQPFLMDLEGKQGNFKNLREFVFKNIDGYFKIYSKHTPINLVRDLPQGFSALEPLVDLPIGINITRFQTLLALHRSYLTPGDSSSGWTAGAAAYYVGYLQPRTFLLKYNENGTITDAVDCALDPLSETKCTLKSFTVEKGIYQTSNFRVQPTESIVRFPNITNLCPFGEVFNATRFASVYAWNRKRISNCVADYSVLYNSASFSTFKCYGVSPTKLNDLCFTNVYADSFVIRGDEVRQIAPGQTGKIADYNYKLPDDFTGCVIAWNSNNLDSKVGGNYNYLYRLFRKSNLKPFERDISTEIYQAGSTPCNGVEGFNCYFPLQSYGFQPTNGVGYQPYRVVVLSFELLHAPATVCGPKKSTNLVKNKCVNFNFNGLTGTGVLTESNKKFLPFQQFGRDIADTTDAVRDPQTLEILDITPCSFGGVSVITPGTNTSNQVAVLYQGVNCTEVPVAIHADQLTPTWRVYSTGSNVFQTRAGCLIGAEHVNNSYECDIPIGAGICASYQTQTNSPRRARSVASQSIIAYTMSLGAENSVAYSNNSIACPTNFTISVTTEILPVSMTKTSVDCTMYICGDSTECSNLLLQYGSFCTQLNRALTGIAVEQDKNTQEVFAQVKQIYKTPPIKDFGGFNFSQILPDPSKPSKRSFIEDLLFNKVTLADAGFIKQYGDCLGDIAARDLICAQKFNGLTVLPPLLTDEMIAQYTSALLAGTITSGWTFGAGAALQIPFAMQMAYRFNGIGVTQNVLYENQKLIANQFNSAIGKIQDSLSSTAPALGKLQDVVNQNAQALNTLVKQLSSNFGAISSVLNDILSRLDKVEAEVQIDRLITGRLQSLQTYVTQQLIRAAEIRASANLAATKMSECVLGQSKRVDFCGKGYHLMSFPQSAPHGVVFLHVTYVPAQEKNFTTAPAICHDGKAHFPREGVFVSNGTHWFVTQRNFCEPQIITTDNTFVSGNCDVVIGIVNNTVYDPLQPELDSFKEELDKYFKNHTSPDVDLGDISGINASVVNIQKEIDRLNEVAKNLNESLIDLQELGKYEQYIKGGGGSDIDPYKEFGSSYQLLNFLPLDFFPDLNALVDTATALYEEELTGREHCSPHHTAIRQALVCWDELTKLIAWMSSNITSEQVRTIIVNHVNDTWGLKVRQSLWFHLSCLTFGQHTVQEFLVSFGVWIRTPAPYRPPNAPILSTLPEHTVIC

SEQ ID NO: 7068 - protein, 1365 aa, Artificial Sequence
  SARS-CoV-2/Germany/BavPat3/2020__EPI_ISL_414521 spike protein (1-1211)(I714C_Y1110C) WhcAg construct
MFVFLVLLPLVSSQCVNLTTRTQLPPAYTNSFTRGVYYPDKVFRSSVLHSTQDLFLPFFSNVTWFHAIHVSGTNGTKRFDNPVLPFNDGVYFASTEKSNIIRGWIFGTTLDSKTQSLLIVNNATNVVIKVCEFQFCNDPFLGVYYHKNNKSWMESEFRVYSSANNCTFEYVSQPFLMDLEGKQGNFKNLREFVFKNIDGYFKIYSKHTPINLVRDLPQGFSALEPLVDLPIGINITRFQTLLALHRSYLTPGDSSSGWTAGAAAYYVGYLQPRTFLLKYNENGTITDAVDCALDPLSETKCTLKSFTVEKGIYQTSNFRVQPTESIVRFPNITNLCPFGEVFNATRFASVYAWNRKRISNCVADYSVLYNSASFSTFKCYGVSPTKLNDLCFTNVYADSFVIRGDEVRQIAPGQTGKIADYNYKLPDDFTGCVIAWNSNNLDSKVGGNYNYLYRLFRKSNLKPFERDISTEIYQAGSTPCNGVEGFNCYFPLQSYGFQPTNGVGYQPYRVVVLSFELLHAPATVCGPKKSTNLVKNKCVNFNFNGLTGTGVLTESNKKFLPFQQFGRDIADTTDAVRDPQTLEILDITPCSFGGVSVITPGTNTSNQVAVLYQDVNCTEVPVAIHADQLTPTWRVYSTGSNVFQTRAGCLIGAEHVNNSYECDIPIGAGICASYQTQTNSPRRARSVASQSIIAYTMSLGAENSVAYSNNSIACPTNFTISVTTEILPVSMTKTSVDCTMYICGDSTECSNLLLQYGSFCTQLNRALTGIAVEQDKNTQQVFAQVKQIYKTPPIKDFGGFNFSQILPDPSKPSKRSFIEDLLFNKVTLADAGFIKQYGDCLGDIAARDLICAQKFNGLTVLPPLLTDEMIAQYTSALLAGTITSGWTFGAGAALQIPFAMQMAYRFNGIGVTQNVLYENQKLIANQFNSAIGKIQDSLSSTASALGKLQDVVNQNAQALNTLVKQLSSNFGAISSVLNDILSRLDKVEAEVQIDRLITGRLQSLQTYVTQQLIRAAEIRASANLAATKMSECVLGQSKRVDFCGKGYHLMSFPQSAPHGVVFLHVTYVPAQEKNFTTAPAICHDGKAHFPREGVFVSNGTHWFVTQRNFCEPQIITTDNTFVSGNCDVVIGIVNNTVYDPLQPELDSFKEELDKYFKNHTSPDVDLGDISGINASVVNIQKEIDRLNEVAKNLNESLIDLQELGKYEQYIKGGGGSDIDPYKEFGSSYQLLNFLPLDFFPDLNALVDTATALYEEELTGREHCSPHHTAIRQALVCWDELTKLIAWMSSNITSEQVRTIIVNHVNDTWGLKVRQSLWFHLSCLTFGQHTVQEFLVSFGVWIRTPAPYRPPNAPILSTLPEHTVIC

SEQ ID NO: 7069 - protein, 1365 aa, Artificial Sequence
  SARS-CoV-2/France/HF1805/2020__EPI_ISL_414628 spike protein (1-1211)(I714C_Y1110C) WhcAg construct
MFVFLVLLPLVSSQCVNLTTRTQLPPAYTNSFTRGVYYPDKVFRSSVLHSTQDLFLPFFSNVTWFHAIHVSGTNGTKRFDNPVLPFNDGVYFASTEKSNIIRGWIFGTTLDSKTQSLLIVNNATNVVIKVCEFQFCNDPFLGVYYHKNNKSWMESEFRVYSSANNCTFEYVSQPFLMDLEGKQGNFKNLREFVFKNIDGYFKIYSKHTPINLVRDLPQGFSALEPLVDLPIGINITRFQTLLALHRSYLTPGDSSSGWTAGAAAYYVGYLQPRTFLLKYNENGTITDAVDCALDPLSETKCTLKSFTVEKGIYQTSNFRVQPTESIVRFPNITNLCPFGEVFNATRFASVYAWNRKRISNCVADYSVLYNSASFSTFKCYGVSPTKLNDLCFTNVYADSFVIRGDEVRQIAPGQTGKIADYNYKLPDDFTGCVIAWNSNNLDSKVGGNYNYLYRLFRKSNLKPFERDISTEIYQAGSTPCNGVEGFNCYFPLQSYGFQPTNGVGYQPYRVVVLSFELLHAPATVCGPKKSTNLVKNKCVNFNFNGLTGTGVLTESNKKFLPFQQFGRDIADTTDAVRDPQTLEILDITPCSFGGVSVITPGTNTSNQVAVLYQGVNCTEVPVAIHADQLTPTWRVYSTGSNVFQTRAGCLIGAEHVNNSYECDIPIGAGICASYQTQTNSPRRARSVASQSIIAYTMSLGAENSVAYSNNSIACPTNFTISVTTEILPVSMTKTSVDCTMYICGDSTECSNLLLQYGSFCTQLNRALTGIAVEQDKNTQEVFAQVKQIYKTPPIKDFGGFNFSQILPDPSKPSKRSFIEDLLFNKVTLADAGFIKQYGDCLGDIAARDLICAQKFNGLTVLPPLLTDEMIAQYTSALLAGTITSGWTFGAGAALQIPFAMQMAYRFNGIGVTQNVLYENQKLIANQFNSAIGKIQDSLSSTASALGKLQDVVNQNAQALNTLVKQLSSNFGAISSVLNDILSRLDKVEAEVQIDRLITGRLQSLQTYVTQQLIRAAEIRASANLAATKMSECVLGQSKRVDFCGKGYHLMSFPQSAPHGVVFLHVTYVPAQEKNFTTAPAICHDGKAHFPREGVFVSNGTHWFVTQRNFCEPQIITTDNTFVSGNCDVVIGVVNNTVYDPLQPELDSFKEELDKYFKNHTSPDVDLGDISGINASVVNIQKEIDRLNEVAKNLNESLIDLQELGKYEQYIKGGGGSDIDPYKEFGSSYQLLNFLPLDFFPDLNALVDTATALYEEELTGREHCSPHHTAIRQALVCWDELTKLIAWMSSNITSEQVRTIIVNHVNDTWGLKVRQSLWFHLSCLTFGQHTVQEFLVSFGVWIRTPAPYRPPNAPILSTLPEHTVIC

SEQ ID NO: 7070 - protein, 1365 aa, Artificial Sequence
  SARS-CoV-2/Netherlands/ZuidHolland_9/2020__EPI_ISL_414445 spike protein (1-1211)(I714C_Y1110C) WhcAg construct
MFVFLVLLPLVSSQCVNLTTRTQLPPAYTNSFTRGVYYPDKVFRSSVLHSTQDLFLPFFSNVTWFHAIHVSGTNGTKRFDNPVLPFNDGVYFASTEKSNIIRGWIFGTTLDSKTQSLLIVNNATNVVIKVCEFQFCNDPFLGVYYHKNNKSWMESEFRVYSSANNCTFEYVSQPFLMDLEGKQGNFKNLREFVFKNIDGYFKIYSKHTPINLVRDLPQGFSALEPLVDLPIGINITRFQTLLALHRSYLTPGDSSSGWTAGAAAYYVGYLQPRTFLLKYNENGTITDAVDCALDPLSETKCTLKSFTVEKGIYQTSNFRVQPTESIVRFPNITNLCPFGEVFNATRFASVYAWNRKRISNCVADYSVLYNSASFSTFKCYGVSPTKLNDLCFTNVYADSFVIRGDEVRQIAPGQTGKIADYNYKLPDDFTGCVIAWNSNNLDSKVGGNYNYLYRLFRKSNLKPFERDISTEIYQAGSTPCNGVEGFNCYFPLQSYGFQPTNGVGYQPYRVVVLSFELLHAPATVCGPKKSTNLVKNKCVNFNFNGLTGTGVLTESNKKFLPFQQFGRDIADTTDAVRDPQTLEILDITPCSFGGVSVITPGTNTSNQVAVLYQGVNCTEVPVAIHADQLTPTWRVYSTGSNVFQTRAGCLIGAEHVNNSYECDIPIGAGICASYQTQTNSPRRARSVASQSIIAYTMSLGAENSVAYSNNSIACPTNFTISVTTEILPVSMTKTSVDCTMYICGDSTECSNLLLQYGSFCTQLNRALTGIAVEQDKNTQEVFAQVKQIYKTPPIKDFGGFNFSQILPDPSKPSKRSFIEDLLFNKVTLADAGFIKQYGDCLGDIAARDLICVQKFNGLTVLPPLLTDEMIAQYTSALLAGTITSGWTFGAGAALQIPFAMQMAYRFNGIGVTQNVLYENQKLIANQFNSAIGKIQDSLSSTASALGKLQDVVNQNAQALNTLVKQLSSNFGAISSVLNDILSRLDKVEAEVQIDRLITGRLQSLQTYVTQQLIRAAEIRASANLAATKMSECVLGQSKRVDFCGKGYHLMSFPQSAPHGVVFLHVTYVPAQEKNFTTAPAICHDGKAHFPREGVFVSNGTHWFVTQRNFCEPQIITTDNTFVSGNCDVVIGIVNNTVYDPLQPELDSFKEELDKYFKNHTSPDVDLGDISGINASVVNIQKEIDRLNEVAKNLNESLIDLQELGKYEQYIKGGGGSDIDPYKEFGSSYQLLNFLPLDFFPDLNALVDTATALYEEELTGREHCSPHHTAIRQALVCWDELTKLIAWMSSNITSEQVRTIIVNHVNDTWGLKVRQSLWFHLSCLTFGQHTVQEFLVSFGVWIRTPAPYRPPNAPILSTLPEHTVIC

SEQ ID NO: 7071 - protein, 1365 aa, Artificial Sequence
  SARS-CoV-2/Finland/FIN03032020A/2020__EPI_ISL_413602 spike protein (1-1211)(I714C_Y1110C) WhcAg construct
MFVFLVLLPLVSSQCVNLTTRTQLPPAYTNSFTRGVYYPDKVFRSSVLHSTQDLFLPFFSNVTWFHAIHVSGTNGTKRFDNPVLPFNDGVYFASTEKSNIIRGWIFGTTLDSKTQSLLIVNNATNVVIKVCEFQFCNDPFLGVYYHKNNKSWMESEFRVYSSANNCTFEYVSQPFLMDLEGKQGNFKNLREFVFKNIDGYFKIYSKHTPINLVRDLPQGFSALEPLVDLPIGINITRFQTLLALHRSYLTPGDSSSGWTAGAAAYYVGYLQPRTFLLKYNENGTITDAVDCALDPLSETKCTLKSFTVEKGIYQTSNFRVQPTESIVRFPNITNLCPFGEVFNATRFASVYAWNRKRISNCVADYSVLYNSASFSTFKCYGVSPTKLNDLCFTNVYADSFVIRGDEVRQIAPGQTGKIADYNYKLPDDFTGCVISWNSNNLDSKVGGNYNYLYRLFRKSNLKPFERDISTEIYQAGSTPCNGVEGFNCYFPLQSYGFQPTNGVGYQPYRVVVLSFELLHAPATVCGPKKSTNLVKNKCVNFNFNGLTGTGVLTESNKKFLPFQQFGRDIADTTDAVRDPQTLEILDITPCSFGGVSVITPGTNTSNQVAVLYQGVNCTEVPVAIHADQLTPTWRVYSTGSNVFQTRAGCLIGAEHVNNSYECDIPIGAGICASYQTQTNSPRRARSVASQSIIAYTMSLGAENSVAYSNNSIACPTNFTISVTTEILPVSMTKTSVDCTMYICGDSTECSNLLLQYGSFCTQLNRALTGIAVEQDKNTQEVFAQVKQIYKTPPIKDFGGFNFSQILPDPSKPSKRSFIEDLLFNKVTLADAGFIKQYGDCLGDIAARDLICAQKFNGLTVLPPLLTDEMIAQYTSALLAGTITSGWTFGAGAALQIPFAMQMAYRFNGIGVTQNVLYENQKLIANQFNSAIGKIQDSLSSTASALGKLQDVVNQNAQALNTLVKQLSSNFGAISSVLNDILSRLDKVEAEVQIDRLITGRLQSLQTYVTQQLIRAAEIRASANLAATKMSECVLGQSKRVDFCGKGYHLMSFPQSAPHGVVFLHVTYVPAQEKNFTTAPAICHDGKAHFPREGVFVSNGTHWFVTQRNFCEPQIITTDNTFVSGNCDVVIGIVNNTVYDPLQPELDSFKEELDKYFKNHTSPDVDLGDISGINASVVNIQKEIDRLNEVAKNLNESLIDLQELGKYEQYIKGGGGSDIDPYKEFGSSYQLLNFLPLDFFPDLNALVDTATALYEEELTGREHCSPHHTAIRQALVCWDELTKLIAWMSSNITSEQVRTIIVNHVNDTWGLKVRQSLWFHLSCLTFGQHTVQEFLVSFGVWIRTPAPYRPPNAPILSTLPEHTVIC

SEQ ID NO: 7072 - protein, 1365 aa, Artificial Sequence
  SARS-CoV-2/France/GE1977/2020__EPI_ISL_414632 spike protein (1-1211)(I714C_Y1110C) WhcAg construct
MFVFLVLLPLVSSQCVNLTTRTQLPPAYTNSFTRGVYYPDKVFRSSVLHSTQDLFLPFFSNVTWFHAIHVSGTNGTKRFDNPVLPFNDGVYFASTEKSNIIRGWIFGTTLDSKTQSLLIVNNATNVVIKVCEFQFCNDPFLGVYYHKNNKSWMESEFRVYSSANNCTFEYVSQPFLMDLEGKQGNFKNLREFVFKNIDGYFKIYSKHTPINLVRDLPQGFSALEPLVDLPIGINITRFQTLLALHRSYLTPGDSSSGWTAGAAAYYVGYLQPRTFLLKYNENGTITDAVDCALDPLSETKCTLKSFTVEKGIYQTSNFRVQPTESIVRFPNITNLCPFGEVFNATRFASVYAWNRKRISNCVADYSVLYNSASFSTFKCYGVSPTKLNDLCFTNVYADSFVIRGDEVRQIAPGQTGKIADYNYKLPDDFTGCVIAWNSNNLDSKVGGNYNYLYRLFRKSNLKPFERDISTEIYQAGSTPCNGVEGFNCYFPLQSYGFQPTNGVGYQPYRVVVLSFELLHAPATVCGPKKSTNLVKNKCVNFNFNGLTGTGVLTESNKKFLPFQQFGRDIADTTDAVRDPQTLEILDITPCSFGGVSVITPGTNTSNQVAVLYQGVNCTEVPVAIHADQLTPTWRVYSTGSNVFQTRAGCLIGAEHVNNSYECDIPIGAGICASYQTQTNSPRRARSVASQSIIAYTMSLGAENSVAYSNNSIACPTNFTISVTTEILPVSMTKTSVDCTMYICGDSTECSNLLLQYGSFCTQLNRALTGIAVEQDKNTQEVFAQVKQIYKTPPIKDFGGFNFSQILPDPSKPSKRSFIEDLLFNKVTLADAGFIKQYGDCLGDIAARDLICAQKFNGLTVLPPLLTDEMIAQYTSALLAGTITSGWTFGAGAALQIPFAMQMAYRFNGIGVTQNVLYENQKLIANQFNSAIGKIQDSLFSTASALGKLQDVVNQNAQALNTLVKQLSSNFGAISSVLNDILSRLDKVEAEVQIDRLITGRLQSLQTYVTQQLIRAAEIRASANLAATKMSECVLGQSKRVDFCGKGYHLMSFPQSAPHGVVFLHVTYVPAQEKNFTTAPAICHDGKAHFPREGVFVSNGTHWFVTQRNFCEPQIITTDNTFVSGNCDVVIGIVNNTVYDPLQPELDSFKEELDKYFKNHTSPDVDLGDISGINASVVNIQKEIDRLNEVAKNLNESLIDLQELGKYEQYIKGGGGSDIDPYKEFGSSYQLLNFLPLDFFPDLNALVDTATALYEEELTGREHCSPHHTAIRQALVCWDELTKLIAWMSSNITSEQVRTIIVNHVNDTWGLKVRQSLWFHLSCLTFGQHTVQEFLVSFGVWIRTPAPYRPPNAPILSTLPEHTVIC

SEQ ID NO: 7073 - protein, 1365 aa, Artificial Sequence
  SARS-CoV-2/Finland/FIN-313/2020__EPI_ISL_414641 spike protein (1-1211)(I714C_Y1110C) WhcAg construct
MFVFLVLLPLVSSQCVNLTTRTQLPPAYTNSFTRGVYYPDKVFRSSVLHSTQDLFLPFFSNVTWFHAIHVSGTNGTKRFDNPVLPFNDGVYFASTEKSNIIRGWIFGTTLDSKTQSLLIVNNATNVVIKVCEFQFCNDPFLGVYYHKNNKSWMESEFRVYSSANNCTFEYVSQPFLMDLEGKQGNFKNLREFVFKNIDGYFKIYSKHTPINLVRDLPQGFSALEPLVDLPIGINITRFKTLLALHRSYLTPGDSSSGWTAGAAAYYVGYLQPRTFLLKYNENGTITDAVDCALDPLSETKCTLKSFTVEKGIYQTSNFRVQPTESIVRFPNITNLCPFGEVFNATRFASVYAWNRKRISNCVADYSVLYNSASFSTFKCYGVSPTKLNDLCFTNVYADSFVIRGDEVRQIAPGQTGKIADYNYKLPDDFTGCVIAWNSNNLDSKVGGNYNYLYRLFRKSNLKPFERDISTEIYQAGSTPCNGVEGFNCYFPLQSYGFQPTNGVGYQPYRVVVLSFELLHAPATVCGPKKSTNLVKNKCVNFNFNGLTGTGVLTESNKKFLPFQQFGRDIADTTDAVRDPQTLEILDITPCSFGGVSVITPGTNTSNQVAVLYQGVNCTEVPVAIHADQLTPTWRVYSTGSNVFQTRAGCLIGAEHVNNSYECDIPIGAGICASYQTQTNSPRRARSVASQSIIAYTMSLGAENSVAYSNNSIACPTNFTISVTTEILPVSMTKTSVDCTMYICGDSTECSNLLLQYGSFCTQLNRALTGIAVEQDKNTQEVFAQVKQIYKTPPIKDFGGFNFSQILPDPSKPSKRSFIEDLLFNKVTLADAGFIKQYGDCLGDIAARDLICAQKFNGLTVLPPLLTDEMIAQYTSALLAGTITSGWTFGAGAALQIPFAMQMAYRFNGIGVTQNVLYENQKLIANQFNSAIGKIQDSLSSTASALGKLQDVVNQNAQALNTLVKQLSSNFGAISSVLNDILSRLDKVEAEVQIDRLITGRLQSLQTYVTQQLIRAAEIRASANLAATKMSECVLGQSKRVDFCGKGYHLMSFPQSAPHGVVFLHVTYVPAQEKNFTTAPAICHDGKAHFPREGVFVSNGTHWFVTQRNFCEPQIITTDNTFVSGNCDVVIGIVNNTVYDPLQPELDSFKEELDKYFKNHTSPDVDLGDISGINASVVNIQKEIDRLNEVAKNLNESLIDLQELGKYEQYIKGGGGSDIDPYKEFGSSYQLLNFLPLDFFPDLNALVDTATALYEEELTGREHCSPHHTAIRQALVCWDELTKLIAWMSSNITSEQVRTIIVNHVNDTWGLKVRQSLWFHLSCLTFGQHTVQEFLVSFGVWIRTPAPYRPPNAPILSTLPEHTVIC

SEQ ID NO: 7074 - protein, 1365 aa, Artificial Sequence
  SARS-CoV-2/Netherlands/ZuidHolland_2/2020__EPI_ISL_414556 spike protein (1-1211)(I714C_Y1110C) WhcAg construct
MFVFLVLLPLVSSQCVNLTTRTQLPPAYTNSFTRGVYYPDKVFRSSVLHSTQDLFLPFFSNVTWFHAIHVSGTNGTKRFDNPVLPFNDGVYFASTEKSNIIRGWIFGTTLDSKTQSLLIVNNATNVVIKVCEFQFCNDPFLGVYYHKNNKSWMESEFRVYSSANNCTFEYVSQPFLMDLEGKQGNFKNLREFVFKNIDGYFKIYSKHTPINLVRDLPQGFSALEPLVDLPIGINITRFQTLLALHRSYLTPGDSSSGWTAGAAAYYVGYLQPRTFLLKYNENGTITDAVDCALDPLSETKCTLKSFTVEKGIYQTSNFRVQPTESIVRFPNITNLCPFGEVFNATRFASVYAWNRKRISNCVADYSVLYNSASFSTFKCYGVSPTKLNDLCFTNVYADSFVIRGDEVRQIAPGQTGKIADYNYKLPDDFTGCVIAWNSNNLDSKVGGNYNYLYRLFRKSNLKPFERDISTEIYQAGSTPCNGVEGFNCYFPLQSYGFQPTNGVGYQPYRVVVLSFELLHAPATVCGPKKSTNLVKNKCVNFNFNGLTGTGVLTESNKKFLPFQQFGRDIADTTDAVRDPQTLEILDITPCSFGGVSVITPGTNTSNQVAVLYQGVNCTEVPVAIHADQLTPTWRVYSTGSNVFQTRAGCLIGAEHVNNSYECDIPIGAGICASYQTQTNSPRRARSVASQSIIAYTMSLGAENSVAYSNNSIACPTNFTISVTTEILPVSMTKTSVDCTMYICGDSTECSNLLLQYGSFCTQLNRALTGIALEQDKNTQEVFAQVKQIYKTPPIKDFGGFNFSQILPDPSKPSKRSFIEDLLFNKVTLADAGFIKQYGDCLGDIAARDLICAQKFNGLTVLPPLLTDEMIAQYTSALLAGTITSGWTFGAGAALQIPFAMQMAYRFNGIGVTQNVLYENQKLIANQFNSAIGKIQDSLSSTASALGKLQDVVNQNAQALNTLVKQLSSNFGAISSVLNDILSRLDKVEAEVQIDRLITGRLQSLQTYVTQQLIRAAEIRASANLAATKMSECVLGQSKRVDFCGKGYHLMSFPQSAPHGVVFLHVTYVPAQEKNFTTAPAICHDGKAHFPREGVFVSNGTHWFVTQRNFCEPQIITTDNTFVSGNCDVVIGIVNNTVYDPLQPELDSFKEELDKYFKNHTSPDVDLGDISGINASVVNIQKEIDRLNEVAKNLNESLIDLQELGKYEQYIKGGGGSDIDPYKEFGSSYQLLNFLPLDFFPDLNALVDTATALYEEELTGREHCSPHHTAIRQALVCWDELTKLIAWMSSNITSEQVRTIIVNHVNDTWGLKVRQSLWFHLSCLTFGQHTVQEFLVSFGVWIRTPAPYRPPNAPILSTLPEHTVIC

SEQ ID NO: 7075 - protein, 1365 aa, Artificial Sequence
  SARS-CoV-2/USA/WA-UW31/2020__EPI_ISL_414618 spike protein (1-1211)(I714C_Y1110C) WhcAg construct
MFVFLVLLPLVSSQCVNLTTRTQLPPAYTNSFTRGVYYPDKVFRSSVLHSTQDLFLPFFSNVTWFHAIHVSGTNGTKRFDNPVLPFNDGVYFASTEKSNIIRGWIFGTTLDSKTQSLLIVNNATNVVIKVCEFQFCNDPFLGVYYHKNNKSWMESEFRVYSSANNCTFEYVSQPFLMDLEGKQGNFKNLREFVFKNIDGYFKIYSKHTPINLVRDLPQGFSALEPLVDLPIGINITRFQTLLALHRSYLTPGDSSSGWTAGAAAYYVGYLQPRTFLLKYNENGTITDAVDCALDPLSETKCTLKSFTVEKGIYQTSNFRVQPTESIVRFPNITNLCPFGEVFNATRFASVYAWNRKRISNCVADYSVLYNSASFSTFKCYGVSPTKLNDLCFTNVYADSFVIRGDEVRQIAPGQTGKIADYNYKLPDDFTGCVIAWNSNNLDSKVGGNYNYLYRLFRKSNLKPFERDISTEIYQAGSTPCNGAEGFNCYFPLQSYGFQPTNGVGYQPYRVVVLSFELLHAPATVCGPKKSTNLVKNKCVNFNFNGLTGTGVLTESNKKFLPFQQFGRDIADTTDAVRDPQTLEILDITPCSFGGVSVITPGTNTSNQVAVLYQDVNCTEVPVAIHADQLTPTWRVYSTGSNVFQTRAGCLIGAEHVNNSYECDIPIGAGICASYQTQTNSPRRARSVASQSIIAYTMSLGAENSVAYSNNSIACPTNFTISVTTEILPVSMTKTSVDCTMYICGDSTECSNLLLQYGSFCTQLNRALTGIAVEQDKNTQEVFAQVKQIYKTPPIKDFGGFNFSQILPDPSKPSKRSFIEDLLFNKVTLADAGFIKQYGDCLGDIAARDLICAQKFNGLTVLPPLLTDEMIAQYTSALLAGTITSGWTFGAGAALQIPFAMQMAYRFNGIGVTQNVLYENQKLIANQFNSAIGKIQDSLSSTASALGKLQDVVNQNAQALNTLVKQLSSNFGAISSVLNDILSRLDKVEAEVQIDRLITGRLQSLQTYVTQQLIRAAEIRASANLAATKMSECVLGQSKRVDFCGKGYHLMSFPQSAPHGVVFLHVTYVPAQEKNFTTAPAICHDGKAHFPREGVFVSNGTHWFVTQRNFCEPQIITTDNTFVSGNCDVVIGIVNNTVYDPLQPELDSFKEELDKYFKNHTSPDVDLGDISGINASVVNIQKEIDRLNEVAKNLNESLIDLQELGKYEQYIKGGGGSDIDPYKEFGSSYQLLNFLPLDFFPDLNALVDTATALYEEELTGREHCSPHHTAIRQALVCWDELTKLIAWMSSNITSEQVRTIIVNHVNDTWGLKVRQSLWFHLSCLTFGQHTVQEFLVSFGVWIRTPAPYRPPNAPILSTLPEHTVIC

SEQ ID NO: 7076 - protein, 1365 aa, Artificial Sequence
  SARS-CoV-2/South Korea/SNU01/2020__EPI_ISL_411929 spike protein (1-1211)(I714C_Y1110C) WhcAg construct
MFVFLVLLPLVSSQCVNLTTRTQLPPAYTNSFTRGVYYPDKVFRSSVLHSTQDLFLPFFSNVTWFHAIHVSGTNGTKRFDNPVLPFNDGVYFASTEKSNIIRGWIFGTTLDSKTQSLLIVNNATNVVIKVCEFQFCNDPFLGVYYHKNNKSWMESEFRVYSSANNCTFEYVSQPFLMDLEGKQGNFKNLREFVFKNIDGYFKIYSKHTPINLVRDLPQGFWALEPLVDLPIGINITRFQTLLALHRSYLTPGDSSSGWTAGAAAYYVGYLQPRTFLLKYNENGTITDAVDCALDPLSETKCTLKSFTVEKGIYQTSNFRVQPTESIVRFPNITNLCPFGEVFNATRFASVYAWNRKRISNCVADYSVLYNSASFSTFKCYGVSPTKLNDLCFTNVYADSFVIRGDEVRQIAPGQTGKIADYNYKLPDDFTGCVIAWNSNNLDSKVGGNYNYLYRLFRKSNLKPFERDISTEIYQAGSTPCNGVEGFNCYFPLQSYGFQPTNGVGYQPYRVVVLSFELLHAPATVCGPKKSTNLVKNKCVNFNFNGLTGTGVLTESNKKFLPFQQFGRDIADTTDAVRDPQTLEILDITPCSFGGVSVITPGTNTSNQVAVLYQDVNCTEVPVAIHADQLTPTWRVYSTGSNVFQTRAGCLIGAEHVNNSYECDIPIGAGICASYQTQTNSPRRARSVASQSIIAYTMSLGAENSVAYSNNSIACPTNFTISVTTEILPVSMTKTSVDCTMYICGDSTECSNLLLQYGSFCTQLNRALTGIAVEQDKNTQEVFAQVKQIYKTPPIKDFGGFNFSQILPDPSKPSKRSFIEDLLFNKVTLADAGFIKQYGDCLGDIAARDLICAQKFNGLTVLPPLLTDEMIAQYTSALLAGTITSGWTFGAGAALQIPFAMQMAYRFNGIGVTQNVLYENQKLIANQFNSAIGKIQDSLSSTASALGKLQDVVNQNAQALNTLVKQLSSNFGAISSVLNDILSRLDKVEAEVQIDRLITGRLQSLQTYVTQQLIRAAEIRASANLAATKMSECVLGQSKRVDFCGKGYHLMSFPQSAPHGVVFLHVTYVPAQEKNFTTAPAICHDGKAHFPREGVFVSNGTHWFVTQRNFCEPQIITTDNTFVSGNCDVVIGIVNNTVYDPLQPELDSFKEELDKYFKNHTSPDVDLGDISGINASVVNIQKEIDRLNEVAKNLNESLIDLQELGKYEQYIKGGGGSDIDPYKEFGSSYQLLNFLPLDFFPDLNALVDTATALYEEELTGREHCSPHHTAIRQALVCWDELTKLIAWMSSNITSEQVRTIIVNHVNDTWGLKVRQSLWFHLSCLTFGQHTVQEFLVSFGVWIRTPAPYRPPNAPILSTLPEHTVIC

SEQ ID NO: 7077 - protein, 1365 aa, Artificial Sequence
  SARS-CoV-2/China/WF0004/2020__EPI_ISL_413694 spike protein (1-1211)(I714C_Y1110C) WhcAg construct
MFVFLVLLPLVSSQCVNLTTRTQLPPAYTNSFTRGVYYPDKVFRSSVLHSTQDLFLPFFSNVTWFHAIHVSGTNGTKRFDNPVLPFNDGVYFASTEKSNIIRGWIFGTTLDSKTQSLLIVNNATNVVIKVCEFQFCNDPFLGVYYHKNNKSWTESEFRVYSSANNCTFEYVSQPFLMDLEGKQGNFKNLREFVFKNIDGYFKIYSKHTPINLVRDLPQGFSALEPLVDLPIGINITRFQTLLALHRSYLTPGDSSSGWTAGAAAYYVGYLQPRTFLLKYNENGTITDAVDCALDPLSETKCTLKSFTVEKGIYQTSNFRVQPTESIVRFPNITNLCPFGEVFNATRFASVYAWNRKRISNCVADYSVLYNSASFSTFKCYGVSPTKLNDLCFTNVYADSFVIRGDEVRQIAPGQTGKIADYNYKLPDDFTGCVIAWNSNNLDSKVGGNYNYLYRLFRKSNLKPFERDISTEIYQAGSTPCNGVEGFNCYFPLQSYGFQPTNGVGYQPYRVVVLSFELLHAPATVCGPKKSTNLVKNKCVNFNFNGLTGTGVLTESNKKFLPFQQFGRDIADTTDAVRDPQTLEILDITPCSFGGVSVITPGTNTSNQVAVLYQDVNCTEVPVAIHADQLTPTWRVYSTGSNVFQTRAGCLIGAEHVNNSYECDIPIGAGICASYQTQTNSPRRARSVASQSIIAYTMSLGAENSVAYSNNSIACPTNFTISVTTEILPVSMTKTSVDCTMYICGDSTECSNLLLQYGSFCTQLNRALTGIAVEQDKNTQEVFAQVKQIYKTPPIKDFGGFNFSQILPDPSKPSKRSFIEDLLFNKVTLADAGFIKQYGDCLGDIAARDLICAQKFNGLTVLPPLLTDEMIAQYTSALLAGTITSGWTFGAGAALQIPFAMQMAYRFNGIGVTQNVLYENQKLIANQFNSAIGKIQDSLSSTASALGKLQDVVNQNAQALNTLVKQLSSNFGAISSVLNDILSRLDKVEAEVQIDRLITGRLQSLQTYVTQQLIRAAEIRASANLAATKMSECVLGQSKRFDFCGKGYHLMSFPQSAPHGVVFLHVTYVPAQEKNFTTAPAICHDGKAHFPREGVFVSNGTHWFVTQRNFCEPQIITTDNTFVSGNCDVVIGIVNNTVYDPLQPELDSFKEELDKYFKNHTSPDVDLGDISGINASVVNIQKEIDRLNEVAKNLNESLIDLQELGKYEQYIKGGGGSDIDPYKEFGSSYQLLNFLPLDFFPDLNALVDTATALYEEELTGREHCSPHHTAIRQALVCWDELTKLIAWMSSNITSEQVRTIIVNHVNDTWGLKVRQSLWFHLSCLTFGQHTVQEFLVSFGVWIRTPAPYRPPNAPILSTLPEHTVIC

SEQ ID NO: 7078 - protein, 1365 aa, Artificial Sequence
  SARS-CoV-2/China/WF0028/2020__EPI_ISL_413791 spike protein (1-1211)(I714C_Y1110C) WhcAg construct
MFVFLVLLPLVSSQCVNLTTRTQLPPAYTNSFTRGVYYPDKVFRSSVLHSTQDLFLPFFSNVTWFHAIHVSGTNGTKRFDNPVLPFNDGVYFASTEKSNIIRGWIFGTTLDSKTQSLLIVNNATNVVIKVCEFQFCNDPFLGVYYHKNNKSWMESEFRVYSSANNCTFEYVSQPFLMDLEGKQGNFKNLREFVFKNIDGYFKIYSKHTPINLVRDLPQGFSALEPLVDLPIGINITRFQTLLALHRSYLTPGDSSSGWTAGAAAYYVGYLQPRTFLLKYNENGTITDAVDCALDPLSETKCTLKSFTVEKGIYQTSNFRVQPTESIVRFPNITNLCPFGEVFNATRFASVYAWNRKRISNCVADYSVLYNSASFSTFKCYGVSPTKLNDLCFTNVYADSFVIRGDEVRQIAPGQTGKIADYNYKLPDDFTGCVIAWNSNNLDSKVGGNYNYLYRLFRKSNLKPFERDISTEIYQAGSTPCNGVEGFNCYFPLQSYGFQPTNGVGYQPYRVVVLSFELLHAPATVCGPKKSTNLVKNKCVNFNFNGLTGTGVLTESNKKFLPFQQFGRDIADTTDAVRDPQTLEILDITPCSFGGVSVITPGTNTSNQVAVLYQDVNCTEVPVAIHADQLTPTWRVYSTGSNVFQTRAGCLIGAEHVNNSYECDIPIGAGICASYQTQTNSPRRARSVASQSIIAYTMSLGAENSVAYSNNSIACPTNFTISVTTEILPVSMTKTSVDCTMYICGDSTECSNLLLQYGSFCTQLNRALTGIAVEQDKNTQEVFAQVKQIYKTPPIKDFGGFNFSQILPDPSKPSKRSFIEDLLFNKVTLADAGFIKQYGDCLGDIAARDLICAQKFNGLTVLPPLLTDEMIAQYTSALLAGTITSGWTFGAGAALQIPFAMQMAYRFNGIGVTQNVLYENQKLIANQFNSAIGKIQDSLSSTASALGKLQDVVNQNAQALNTLVKQLSSNFGAISSVLNDILSRLDKVEAEVQIDRLITGRLQSLQTYVTQQLIRAAEIRASANLAATKMSECVLGQSKRVDFCGKGYHLMSFPQSAPHGVVFLHVTYVPAQEKNFTTAPAICHDGKAHFPREGVFVSNGTHWFVTQRNFCEPQIITTDNTFVSGNCDVVIGIVNNTVYDPLQPELESFKEELDKYFKNHTSPDVDLGDISGINASVVNIQKEIDRLNEVAKNLNESLIDLQELGKYEQYIKGGGGSDIDPYKEFGSSYQLLNFLPLDFFPDLNALVDTATALYEEELTGREHCSPHHTAIRQALVCWDELTKLIAWMSSNITSEQVRTIIVNHVNDTWGLKVRQSLWFHLSCLTFGQHTVQEFLVSFGVWIRTPAPYRPPNAPILSTLPEHTVIC

SEQ ID NO: 7079 - protein, 1365 aa, Artificial Sequence
  SARS-CoV-2/2019-nCoV/USA-CruiseA-18/2020__MT159716.1 spike protein (1-1211)(I714C_Y1110C) WhcAg construct
MFVFLVLLPLVSSQCVNLTTRTQLPPAYTNSFTRGVYYPDKVFRSSVLHSTQDLFLPFFSNVTWFHAIHVSGTNGTKRFDNPVLPFNDGVYFASTEKSNIIRGWIFGTTLDSKTQSLLIVNNATNVVIKVCEFQFCNDPFLGVYYHKNNKSWMESELRVYSSANNCTFEYVSQPFLMDLEGKQGNFKNLREFVFKNIDGYFKIYSKHTPINLVRDLPQGFSALEPLVDLPIGINITRFQTLLALHRSYLTPGDSSSGWTAGAAAYYVGYLQPRTFLLKYNENGTITDAVDCALDPLSETKCTLKSFTVEKGIYQTSNFRVQPTESIVRFPNITNLCPFGEVFNATRFASVYAWNRKRISNCVADYSVLYNSASFSTFKCYGVSPTKLNDLCFTNVYADSFVIRGDEVRQIAPGQTGKIADYNYKLPDDFTGCVIAWNSNNLDSKVGGNYNYLYRLFRKSNLKPFERDISTEIYQAGSTPCNGVEGFNCYFPLQSYGFQPTNGVGYQPYRVVVLSFELLHAPATVCGPKKSTNLVKNKCVNFNFNGLTGTGVLTESNKKFLPFQQFGRDIADTTDAVRDPQTLEILDITPCSFGGVSVITPGTNTSNQVAVLYQDVNCTEVPVAIHADQLTPTWRVYSTGSNVFQTRAGCLIGAEHVNNSYECDIPIGAGICASYQTQTNSPRRARSVASQSIIAYTMSLGAENSVAYSNNSIACPTNFTISVTTEILPVSMTKTSVDCTMYICGDSTECSNLLLQYGSFCTQLNRALTGIAVEQDKNTQEVFAQVKQIYKTPPIKDFGGFNFSQILPDPSKPSKRSFIEDLLFNKVTLADAGFIKQYGDCLGDIAARDLICAQKFNGLTVLPPLLTDEMIAQYTSALLAGTITSGWTFGAGAALQIPFAMQMAYRFNGIGVTQNVLYENQKLIANQFNSAIGKIQDSLSSTASALGKLQDVVNQNAQALNTLVKQLSSNFGAISSVLNDILSRLDKVEAEVQIDRLITGRLQSLQTYVTQQLIRAAEIRASANLAATKMSECVLGQSKRVDFCGKGYHLMSFPQSAPHGVVFLHVTYVPAQEKNFTTAPAICHDGKAHFPREGVFVSNGTHWFVTQRNFCEPQIITTDNTFVSGNCDVVIGIVNNTVYDPLQPELDSFKEELDKYFKNHTSPDVDLGDISGINASVVNIQKEIDRLNEVAKNLNESLIDLQELGKYEQYIKGGGGSDIDPYKEFGSSYQLLNFLPLDFFPDLNALVDTATALYEEELTGREHCSPHHTAIRQALVCWDELTKLIAWMSSNITSEQVRTIIVNHVNDTWGLKVRQSLWFHLSCLTFGQHTVQEFLVSFGVWIRTPAPYRPPNAPILSTLPEHTVIC

SEQ ID NO: 7080 - protein, 1365 aa, Artificial Sequence
  SARS-CoV-2/SARS-CoV-2/Yunnan-01/human/2020/CHN__MT049951.1 spike protein (1-1211)(I714C_Y1110C) WhcAg construct
MFVFLVLLPLVSSQCVNLTTRTQLPPANTNSFTRGVYYPDKVFRSSVLHSTQDLFLPFFSNVTWFHAIHVSGTNGTKRFDNPVLPFNDGVYFASTEKSNIIRGWIFGTTLDSKTQSLLIVNNATNVVIKVCEFQFCNDPFLGVYYHKNNKSWMESEFRVYSSANNCTFEYVSQPFLMDLEGKQGNFKNLREFVFKNIDGYFKIYSKHTPINLVRDLPQGFSALEPLVDLPIGINITRFQTLLALHRSYLTPGDSSSGWTAGAAAYYVGYLQPRTFLLKYNENGTITDAVDCALDPLSETKCTLKSFTVEKGIYQTSNFRVQPTESIVRFPNITNLCPFGEVFNATRFASVYAWNRKRISNCVADYSVLYNSASFSTFKCYGVSPTKLNDLCFTNVYADSFVIRGDEVRQIAPGQTGKIADYNYKLPDDFTGCVIAWNSNNLDSKVGGNYNYLYRLFRKSNLKPFERDISTEIYQAGSTPCNGVEGFNCYFPLQSYGFQPTNGVGYQPYRVVVLSFELLHAPATVCGPKKSTNLVKNKCVNFNFNGLTGTGVLTESNKKFLPFQQFGRDIADTTDAVRDPQTLEILDITPCSFGGVSVITPGTNTSNQVAVLYQDVNCTEVPVAIHADQLTPTWRVYSTGSNVFQTRAGCLIGAEHVNNSYECDIPIGAGICASYQTQTNSPRRARSVASQSIIAYTMSLGAENSVAYSNNSIACPTNFTISVTTEILPVSMTKTSVDCTMYICGDSTECSNLLLQYGSFCTQLNRALTGIAVEQDKNTQEVFAQVKQIYKTPPIKDFGGFNFSQILPDPSKPSKRSFIEDLLFNKVTLADAGFIKQYGDCLGDIAARDLICAQKFNGLTVLPPLLTDEMIAQYTSALLAGTITSGWTFGAGAALQIPFAMQMAYRFNGIGVTQNVLYENQKLIANQFNSAIGKIQDSLSSTASALGKLQDVVNQNAQALNTLVKQLSSNFGAISSVLNDILSRLDKVEAEVQIDRLITGRLQSLQTYVTQQLIRAAEIRASANLAATKMSECVLGQSKRVDFCGKGYHLMSFPQSAPHGVVFLHVTYVPAQEKNFTTAPAICHDGKAHFPREGVFVSNGTHWFVTQRNFCEPQIITTDNTFVSGNCDVVIGIVNNTVYDPLQPELDSFKEELDKYFKNHTSPDVDLGDISGINASVVNIQKEIDRLNEVAKNLNESLIDLQELGKYEQYIKGGGGSDIDPYKEFGSSYQLLNFLPLDFFPDLNALVDTATALYEEELTGREHCSPHHTAIRQALVCWDELTKLIAWMSSNITSEQVRTIIVNHVNDTWGLKVRQSLWFHLSCLTFGQHTVQEFLVSFGVWIRTPAPYRPPNAPILSTLPEHTVIC

SEQ ID NO: 7081 - protein, 1365 aa, Artificial Sequence
  SARS-CoV-2/USA/WA-UW292/2020__EPI_ISL_418077 spike protein (1-1211)(I714C_Y1110C) WhcAg construct
MFVFLVLLPLVSSQCVNLTTRTQLPPAYTNSFTRGVYYPDKVFRSSVLHSTQDLFLPFFSNVTWFHAIHVSGTNGTKRFDNPVLPFNDGVYFASTEKSNIIRGWIFGTTLDSKTQSLLIVNNATNVVIKVCEFQFCNDPFLGVYYHKNNKSWMESEFRVYSSANNCTFEYVSQPFLMDLEGKQGNFKNLREFVFKNIDGYFKIYSKHTPINLVRDLPQGFSALEPLVDLPIGINITRFQTLLALHRSYLTPGDSSSGWTAGAAAYYVGYLQPRTFLLKYNENGTITDAVDCALDPLSETKCTLKSFTVEKGIYQTSNFRVQPTESIVRFPNITNLCPFGEVFNATRFASVYAWNRKRISNCVADYSVLYNSASFSTFKCYGVSPTKLNDLCFTNVYADSFVIRGDEVRQIAPGQTGKIADYNYKLPDDFTGCVIAWNSNNLDSKVGGNYNYLYRLFRKSNLKPFERDISTEIYQASSTPCNGVEGFNCYFPLQSYGFQPTNGVGYQPYRVVVLSFELLHAPATVCGPKKSTNLVKNKCVNFNFNGLTGTGVLTESNKKFLPFQQFGRDIADTTDAVRDPQTLEILDITPCSFGGVSVITPGTNTSNQVAVLYQDVNCTEVPVAIHADQLTPTWRVYSTGSNVFQTRAGCLIGAEHVNNSYECDIPIGAGICASYQTQTNSPRRARSVASQSIIAYTMSLGAENSVAYSNNSIACPTNFTISVTTEILPVSMTKTSVDCTMYICGDSTECSNLLLQYGSFCTQLNRALTGIAVEQDKNTQEVFAQVKQIYKTPPIKDFGGFNFSQILPDPSKPSKRSFIEDLLFNKVTLADAGFIKQYGDCLGDIAARDLICAQKFNGLTVLPPLLTDEMIAQYTSALLAGTITSGWTFGAGAALQIPFAMQMAYRFNGIGVTQNVLYENQKLIANQFNSAIGKIQDSLSSTASALGKLQDVVNQNAQALNTLVKQLSSNFGAISSVLNDILSRLDKVEAEVQIDRLITGRLQSLQTYVTQQLIRAAEIRASANLAATKMSECVLGQSKRVDFCGKGYHLMSFPQSAPHGVVFLHVTYVPAQEKNFTTAPAICHDGKAHFPREGVFVSNGTHWFVTQRNFCEPQIITTDNTFVSGNCDVVIGIVNNTVYDPLQPELDSFKEELDKYFKNHTSPDVDLGDISGINASVVNIQKEIDRLNEVAKNLNESLIDLQELGKYEQYIKGGGGSDIDPYKEFGSSYQLLNFLPLDFFPDLNALVDTATALYEEELTGREHCSPHHTAIRQALVCWDELTKLIAWMSSNITSEQVRTIIVNHVNDTWGLKVRQSLWFHLSCLTFGQHTVQEFLVSFGVWIRTPAPYRPPNAPILSTLPEHTVIC

SEQ ID NO: 7082 - protein, 1365 aa, Artificial Sequence
  SARS-CoV-2/Iceland/192/2020__EPI_ISL_417819 spike protein (1-1211)(I714C_Y1110C) WhcAg construct
MFVFFVLLPLVSSQCVNLTTRTQLPPAYTNSFTRGVYYPDKVFRSSVLHSTQDLFLPFFSNVTWFHAIHVSGTNGTKRFDNPVLPFNDGVYFASTEKSNIIRGWIFGTTLDSKTQSLLIVNNATNVVIKVCEFQFCNDPFLGVYYHKNNKSWMESEFRVYSSANNCTFEYVSQPFLMDLEGKQGNFKNLREFVFKNIDGYFKIYSKHTPINLVRDLPQGFSALEPLVDLPIGINITRFQTLLALHRSYLTPGDSSSGWTAGAAAYYVGYLQPRTFLLKYNENGTITDAVDCALDPLSETKCTLKSFTVEKGIYQTSNFRVQPTESIVRFPNITNLCPFGEVFNATRFASVYAWNRKRISNCVADYSVLYNSASFSTFKCYGVSPTKLNDLCFTNVYADSFVIRGDEVRQIAPGQTGKIADYNYKLPDDFTGCVIAWNSNNLDSKVGGNYNYLYRLFRKSNLKPFERDISTEIYQAGSTPCNGVEGFNCYFPLQSYGFQPTNGVGYQPYRVVVLSFELLHAPATVCGPKKSTNLVKNKCVNFNFNGLTGTGVLTESNKKFLPFQQFGRDIADTTDAVRDPQTLEILDITPCSFGGVSVITPGTNTSNQVAVLYQGVNCTEVPVAIHADQLTPTWRVYSTGSNVFQTRAGCLIGAEHVNNSYECDIPIGAGICASYQTQTNSPRRARSVASQSIIAYTMSLGAENSVAYSNNSIACPTNFTISVTTEILPVSMTKTSVDCTMYICGDSTECSNLLLQYGSFCTQLNRALTGIAVEQDKNTQEVFAQVKQIYKTPPIKDFGGFNFSQILPDPSKPSKRSFIEDLLFNKVTLADAGFIKQYGDCLGDIAARDLICAQKFNGLTVLPPLLTDEMIAQYTSALLAGTITSGWTFGAGAALQIPFAMQMAYRFNGIGVTQNVLYENQKLIANQFNSAIGKIQDSLSSTASALGKLQDVVNQNAQALNTLVKQLSSNFGAISSVLNDILSRLDKVEAEVQIDRLITGRLQSLQTYVTQQLIRAAEIRASANLAATKMSECVLGQSKRVDFCGKGYHLMSFPQSAPHGVVFLHVTYVPAQEKNFTTAPAICHDGKAHFPREGVFVSNGTHWFVTQRNFCEPQIITTDNTFVSGNCDVVIGIVNNTVYDPLQPELDSFKEELDKYFKNHTSPDVDLGDISGINASVVNIQKEIDRLNEVAKNLNESLIDLQELGKYEQYIKGGGGSDIDPYKEFGSSYQLLNFLPLDFFPDLNALVDTATALYEEELTGREHCSPHHTAIRQALVCWDELTKLIAWMSSNITSEQVRTIIVNHVNDTWGLKVRQSLWFHLSCLTFGQHTVQEFLVSFGVWIRTPAPYRPPNAPILSTLPEHTVIC

SEQ ID NO: 7083 - protein, 1365 aa, Artificial Sequence
  SARS-CoV-2/Belgium/ULG-6939/2020__EPI_ISL_417020 spike protein (1-1211)(I714C_Y1110C) WhcAg construct
MFVFLVLLPLVSSQCVNLTTRTQLPPAYTNSFTRGVYYPDKVFRSSVLHSTQDLFLPFFSNVTWFHAIHVSGTNGTKRFDNPVLPFNDGVYFASTEKSNIIRGWIFGTTLDSKTQSLLIVNNATNVVIKVCEFQFCNDPFLGVYYHKNNKSWMESEFRVYSSANNCTFEYVSQPFLMDLEGKQGNFKNLREFVFKNIDGYFKIYSKHTPINLVRDLPQGFSALEPLVDLPIGINITRFQTLLALHRSYLTPGDSSSGWTAGAAAYYVGYLQPRTFLLKYNENGTITDAVDCALDPLSETKCTLKSFTVEKGIYQTSNFRVQPTESIVRFPNITNLCPFGEVFNATRFASVYAWNRKRISNCVADYSVLYNSASFSTFKCYGVSPTKLNDLCFTNVYADSFVIRGDEVRQIAPGQTGKIADYNYKLPDDFTGCVIAWNSNNLDSKVGGNYNYLYRLFRKSNLKPFERDISTEIYQAGSTPCNGVEGFNCYFPLQSYGFQPTNGVGYQPYRVVVLSFELLHAPATVCGPKKSTNLVKNKCVNFNFNGLTGTGVLTESNKKFLPFQQFGRDIADTTDAVRDPQTLEILDITPCSFGGVSVITPGTNTSNQVAVLYQGVNCTEVPVAIHADQLTPTWRVYSTGSNVFQTRAGCLIGAEHVNNSYECDIPIGAGICASYQTQTNSPRRARSVASQSIIAYTMSLGAENSVVYSNNSIACPTNFTISVTTEILPVSMTKTSVDCTMYICGDSTECSNLLLQYGSFCTQLNRALTGIAVEQDKNTQEVFAQVKQIYKTPPIKDFGGFNFSQILPDPSKPSKRSFIEDLLFNKVTLADAGFIKQYGDCLGDIAARDLICAQKFNGLTVLPPLLTDEMIAQYTSALLAGTITSGWTFGAGAALQIPFAMQMAYRFNGIGVTQNVLYENQKLIANQFNSAIGKIQDSLSSTASALGKLQDVVNQNAQALNTLVKQLSSNFGAISSVLNDILSRLDKVEAEVQIDRLITGRLQSLQTYVTQQLIRAAEIRASANLAATKMSECVLGQSKRVDFCGKGYHLMSFPQSAPHGVVFLHVTYVPAQEKNFTTAPAICHDGKAHFPREGVFVSNGTHWFVTQRNFCEPQIITTDNTFVSGNCDVVIGIVNNTVYDPLQPELDSFKEELDKYFKNHTSPDVDLGDISGINASVVNIQKEIDRLNEVAKNLNESLIDLQELGKYEQYIKGGGGSDIDPYKEFGSSYQLLNFLPLDFFPDLNALVDTATALYEEELTGREHCSPHHTAIRQALVCWDELTKLIAWMSSNITSEQVRTIIVNHVNDTWGLKVRQSLWFHLSCLTFGQHTVQEFLVSFGVWIRTPAPYRPPNAPILSTLPEHTVIC

SEQ ID NO: 7084 - protein, 1365 aa, Artificial Sequence
  SARS-CoV-2/France/HF2496/2020__EPI_ISL_418231 spike protein (1-1211)(I714C_Y1110C) WhcAg construct
MFVFLVLLPLVSSQCVNLTTRTQLPPAYTNSFTRGVYYPDKVFRSSVLHSTQDLFLPFFSNVTWFHAIHVSGTNGTKRFDNPVLPFNDGVYFASTEKSNIIRGWIFGTTLDSKTQSLLIVNNATNVVIKVCEFQFCNDPFLGVYYHKNNKSWMESEFRVYSSANNCTFEYVSQPFLMDLEGKQGNFKNLREFVFKNIDGYFKIYSKHTPINLVRDLPQGFSALEPLVDLPIGINITRFQTLLALHRSYLTPGDSSSGWTAGAAAYYVGYLQPRTFLLKYNENGTITDAVDCALDPLSETKCTLKSFTVEKGIYQTSNFRVQPTESIVRFPNITNLCPFGEVFNATRFASVYAWNRKRISNCVADYSVLYNSASFSTFKCYGVSPTKLNDLCFTNVYADSFVIRGDEVRQIAPGQTGKIADYNYKLPDDFTGCVIAWNSNNLDSKVGGNYNYLYRLFRKSNLKPFERDISTEIYQAGSTPCNGVEGFNCYFPLQSYGFQPTNGVGYQPYRVVVLSFELLHAPATVCGPKKSTNLVKNKCVNFNFNGLTGTGVLTESNKKFLPFQQFGRDIADTTDAVRDPQTLEILDITPCSFGGVSVITPGTNTSNQVAVLYQGVNCTEVPVAIHADQLTPTWRVYSTGSNVFQTRAGCLIGAEHVNNSYECDIPIGAGICASYQTQTNSPRRARSVASQSIIAYTMSLGAENSVAYSNNSIACPTNFTISVTTEILPVSMTKTSVDCTMYICGDSTECSNLLLQYGSFCTQLNRALTGIAVEQDKNTQEVFAQVKQIYKTPPIKDFGGFNFSQILPDPSKPSKRSFIEDLLFNKVTLADAGFIKQYGDCLGDIVARDLICAQKFNGLTVLPPLLTDEMIAQYTSALLAGTITSGWTFGAGAALQIPFAMQMAYRFNGIGVTQNVLYENQKLIANQFNSAIGKIQDSLSSTASALGKLQDVVNQNAQALNTLVKQLSSNFGAISSVLNDILSRLDKVEAEVQIDRLITGRLQSLQTYVTQQLIRAAEIRASANLAATKMSECVLGQSKRVDFCGKGYHLMSFPQSAPHGVVFLHVTYVPAQEKNFTTAPAICHDGKAHFPREGVFVSNGTHWFVTQRNFCEPQIITTDNTFVSGNCDVVIGIVNNTVYDPLQPELDSFKEELDKYFKNHTSPDVDLGDISGINASVVNIQKEIDRLNEVAKNLNESLIDLQELGKYEQYIKGGGGSDIDPYKEFGSSYQLLNFLPLDFFPDLNALVDTATALYEEELTGREHCSPHHTAIRQALVCWDELTKLIAWMSSNITSEQVRTIIVNHVNDTWGLKVRQSLWFHLSCLTFGQHTVQEFLVSFGVWIRTPAPYRPPNAPILSTLPEHTVIC

SEQ ID NO: 7085 - protein, 1365 aa, Artificial Sequence
  SARS-CoV-2/USA/WA-UW291/2020__EPI_ISL_418076 spike protein (1-1211)(I714C_Y1110C) WhcAg construct
MFVFLVLLPLVSSQCVNLTTRTQLPPAYTNSFTRGVYYPDKVFRSSVLHSTQDLFLPFFSNVTWFHAIHVSGTNGTKRFDNPVLPFNDGVYFASTEKSNIIRGWIFGTTLDSKTQSLLIVNNATNVVIKVCEFQFCNDPFLGVYYHKNNKSWMESEFRVYSSANNCTFEYVSQPFLMDLEGKQGNFKNLREFVFKNIDGYFKIYSKHTPINLVRDLPQGFSALEPLVDLPIGINITRFQTLLALHRSYLTPGDSSSGWTAGAAAYYVGYLQPRTFLLKYNENGTITDAVDCALDPLSETKCTLKSFTVEKGIYQTSNFRVQPTESIVRFPNITNLCPFGEVFNATRFASVYAWNRKRISNCVADYSVLYNSASFSTFKCYGVSPTKLNDLCFTNVYADSFVIRGDEVRQIAPGQTGKIADYNYKLPDDFTGCVIAWNSNNLDSKVGGNYNYLYRLFRKSNLKPFERDISTEIYQAGSTPCNGVEGFNCYFPLQSYGFQPTNGVGYQPYRVVVLSFELLHAPATVCGPKKSTNLVKNKCVNFNFNGLTGTGVLTESNKKFLPFQQFGRDIADTTDAVRDPQTLEILDITPCSFGGVSVITPGTNTSNQVAVLYQGVNCTEVPVAIHADQLTPTWRVYSTGSNVFQTRAGCLIGAEHVNNSYECDIPIGAGICASYQTQTNSPRRARSVASQSIIAYTMSLGAENSVAYSNNSIACPTNFTISVTTEILPVSMTKTSVDCTMYICGDSTECSNLLLQYGSFCTQLNRALTGIAVEQDKNTQEVFAQVKQIYKTPPIKDFGGFNFSQILPDPSKPSKRSFIEDLLFNKVTLADAGFIKQYGDCLGDIAARDLICAQKFNGLTVLPPLLTDEMIAQYTSALLAGTITSGWTFGAGAALQIPFAMQMAYRFNGIGVTQNVLYENQKLIANQFNSAIGKIQYSLSSTASALGKLQDVVNQNAQALNTLVKQLSSNFGAISSVLNDILSRLDKVEAEVQIDRLITGRLQSLQTYVTQQLIRAAEIRASANLAATKMSECVLGQSKRVDFCGKGYHLMSFPQSAPHGVVFLHVTYVPAQEKNFTTAPAICHDGKAHFPREGVFVSNGTHWFVTQRNFCEPQIITTDNTFVSGNCDVVIGIVNNTVYDPLQPELDSFKEELDKYFKNHTSPDVDLGDISGINASVVNIQKEIDRLNEVAKNLNESLIDLQELGKYEQYIKGGGGSDIDPYKEFGSSYQLLNFLPLDFFPDLNALVDTATALYEEELTGREHCSPHHTAIRQALVCWDELTKLIAWMSSNITSEQVRTIIVNHVNDTWGLKVRQSLWFHLSCLTFGQHTVQEFLVSFGVWIRTPAPYRPPNAPILSTLPEHTVIC

SEQ ID NO: 7086 - protein, 1365 aa, Artificial Sequence; identical to SEQ ID NO: 7049
  SARS-CoV-2/Portugal/PT0034/2020__EPI_ISL_418019 spike protein (1-1211)(I714C_Y1110C) WhcAg construct

SEQ ID NO: 7087 - protein, 1365 aa, Artificial Sequence
  SARS-CoV-2/Iceland/202/2020__EPI_ISL_417750 spike protein (1-1211)(I714C_Y1110C) WhcAg construct
MFVFLVLLPLVSSQCVNLTTRTQLPPAYTNSFTRGVYYPDKVFRSSVLHSTQDLFLPFFSNVTWFHAIHVSGTNGTKRFDNPVLPFNDGVYFASTEKSNIIRGWIFGTTLDSKTQSLLIVNNATNVVIKVCEFQFCNDPFLGVYYHKNNKSWMESEFRVYSSANNCTFEYVSQPFLMDLEGKQGNFKNLREFVFKNIDGYFKIYSKHTPINLVRDLPQGFSALEPLVDLPIGINITRFQTLLALHRSYLTPGDSSSGWTAGAAAYYVGYLQPRTFLLKYNENGTITDAVDCALDPLSETKCTLKSFTVEKGIYQTSNFRVQPTESIVRFPNITNLCPFGEVFNATRFASVYAWNRKRISNCVADYSVLYNSASFSTFKCYGVSPTKLNDLCFTNVYADSFVIRGDEVRQIAPGQTGKIADYNYKLPDDFTGCVIAWNSNNLDSKVGGNYNYLYRLFRKSNLKPFERDISTEIYQAGSTPCNGVEGFNCYFPLQSYGFQPTNGVGYQPYRVVVLSFELLHAPATVCGPKKSTNLVKNKCVNFNFNGLTGTGVLTESNKKFLPFQQFGRDIADTTDAVRDPQTLEILDITPCSFGGVSVITPGTNTSNQVAVLYQDVNCTEVPVAIHADQLTPTWRVYSTGSNVFQTRAGCLIGAEHVNNSYECDIPIGAGICASYQTQTNSPRRARSVASQSIIAYTMSLGAENSVAYSNNSIACPTNFTISVTTEILPVSMTKTSVDCTMYICGDSTECSNLLLQYGSFCTQLNRALTGIAVEQDKNTQEVFAQVKQIYKTPPIKDFGGFNFSQILPDPSKPSKRSFIEDLLFNKVTLADAGFIKQYGDCLGDIAARDLICAQKFNGLTVLPPLLTDEMIAQYTSALLAGTITSGWTFGAGAALQIPFAMQMAYRFNGIGVTQNVLYENQKLIANQFNSAIGKIQDSLSSTASALGKLQDVVNQNAQALNTLVKQLSSNFGAISSVLNDILSRLDKVEAEVQIDRLITGRLQSLQTYVTQQLIRAAEIRASANLAATKMSECVLGQSKRVDFCGKGYHLMSFPQSAPHGVVFLHVTYVPAQEKNFTTAPAICHDGKAHFPREGVFVSNGTHWFVTQRNFCEPQIITTDNTFVSGNCDVVIGIVNNTVYDPLQPELDSFKEELDKYFKNHTSPDVDLGDIPGINASVVNIQKEIDRLNEVAKNLNESLIDLQELGKYEQYIKGGGGSDIDPYKEFGSSYQLLNFLPLDFFPDLNALVDTATALYEEELTGREHCSPHHTAIRQALVCWDELTKLIAWMSSNITSEQVRTIIVNHVNDTWGLKVRQSLWFHLSCLTFGQHTVQEFLVSFGVWIRTPAPYRPPNAPILSTLPEHTVIC

SEQ ID NO: 7088 - protein, 1365 aa, Artificial Sequence
  SARS-CoV-2/USA/WA-UW261/2020__EPI_ISL_418046 spike protein (1-1211)(I714C_Y1110C) WhcAg construct
MFVFLVLLPLVSSQCVNLTTRTQLPPAYTNSFTRGVYYPDKVFRSSVLHSTQDLFLPFFSNVTWFHAIHVSGTNGTKRFDNPVLPFNDGVYFASTEKSNIIRGWIFGTTLDSKTQSLLIVNNATNVVIKVCEFQFCNDPFLGVYYHKNNKSWMESEFRVYSSANNCTFEYVSQPFLMDLEGKQGNFKNLREFVFKNIDGYFKIYSKHTPINLVRDLPQGFSALEPLVDLPIGINITRFQTLLALHRSYLTPGDSSSGWTAGAAAYYVGYLQPRTFLLKYNENGTITDAVDCALDPLSETKCTLKSFTVEKGIYQTSNFRVQPTESIVRFPNITNLCPFGEVFNATRFTSVYAWNRKRISNCVADYSVLYNSASFSTFKCYGVSPTKLNDLCFTNVYADSFVIRGDEVRQIAPGQTGKIADYNYKLPDDFTGCVIAWNSNNLDSKVGGNYNYLYRLFRKSNLKPFERDISTEIYQAGSTPCNGVEGFNCYFPLQSYGFQPTNGVGYQPYRVVVLSFELLHAPATVCGPKKSTNLVKNKCVNFNFNGLTGTGVLTESNKKFLPFQQFGRDIADTTDAVRDPQTLEILDITPCSFGGVSVITPGTNTSNQVAVLYQDVNCTEVPVAIHADQLTPTWRVYSTGSNVFQTRAGCLIGAEHVNNSYECDIPIGAGICASYQTQTNSPRRARSVASQSIIAYTMSLGAENSVAYSNNSIACPTNFTISVTTEILPVSMTKTSVDCTMYICGDSTECSNLLLQYGSFCTQLNRALTGIAVEQDKNTQEVFAQVKQIYKTPPIKDFGGFNFSQILPDPSKPSKRSFIEDLLFNKVTLADAGFIKQYGDCLGDIAARDLICAQKFNGLTVLPPLLTDEMIAQYTSALLAGTITSGWTFGAGAALQIPFAMQMAYRFNGIGVTQNVLYENQKLIANQFNSAIGKIQDSLSSTASALGKLQDVVNQNAQALNTLVKQLSSNFGAISSVLNDILSRLDKVEAEVQIDRLITGRLQSLQTYVTQQLIRAAEIRASANLAATKMSECVLGQSKRVDFCGKGYHLMSFPQSAPHGVVFLHVTYVPAQEKNFTTAPAICHDGKAHFPREGVFVSNGTHWFVTQRNFCEPQIITTDNTFVSGNCDVVIGIVNNTVYDPLQPELDSFKEELDKYFKNHTSPDVDLGDISGINASVVNIQKEIDRLNEVAKNLNESLIDLQELGKYEQYIKGGGGSDIDPYKEFGSSYQLLNFLPLDFFPDLNALVDTATALYEEELTGREHCSPHHTAIRQALVCWDELTKLIAWMSSNITSEQVRTIIVNHVNDTWGLKVRQSLWFHLSCLTFGQHTVQEFLVSFGVWIRTPAPYRPPNAPILSTLPEHTVIC

SEQ ID NO: 7089 - protein, 1365 aa, Artificial Sequence
  SARS-CoV-2/Portugal/PT0035/2020__EPI_ISL_418020 spike protein (1-1211)(I714C_Y1110C) WhcAg construct
MFVFLVLLPLVSSQCVNLTTRTQLPPAYTNSFTRGVYYPDKVFRSSVLHSTQDLFLPFFSNVTWFHAIHVSGTNGTKRFDNPVLPFNDGVYFASTEKSNIIRGWIFGTTLDSKTQSLLIVNNATNVVIKVCEFQFCNDPFLGVYYHKNNKSWMESEFRVYSSANNCTFEYVSQPFLMDLEGKQGNFKNLREFVFKNIDGYFKIYSKHTPINLVRDLPQGFSALEPLVDLPIGINITRFQTLLALHRSYLTPGDSSSGWTAGAAAYYVGYLQPRTFLLKYNENGTITDAVDCALDPLSETKCTLKSFTVEKGIYQTSNFRVQPTESIVRFPNITNLCPFGEVFNATRFASVYAWNRKRISNCVADYSVLYNSASFSTFKCYGVSPTKLNDLCFTNVYADSFVIRGDEVRQIAPGQTGKIADYNYKLPDDFTGCVIAWNSNNLDSKVGGNYNYLYRLFRKSNLKPFERDISTEIYQAGSTPCNGVEGFNCYFPLQSYGFQPTNGVGYQPYRVVVLSFELLHAPATVCGPKKSTNLVKNKCVNFNFNGLTGTGVLTESNKKFLPFQQFGRDIADTTDAVRDPQTLEILDITPCSFGGVSVITPGTNTSNQVAVLYQDVNCTEVPVAIHADQLTPTWRVYSTGSNVFQTRAGCLIGAEHVNNSYECDIPIGAGICASYQTQTNSPRRARSVASQSIIAYTMSLGAENSVAYSNNSIACPTNFTISVTTEILPVSMTKTSVDCTMYICGDSTECSNLLLQYGSFCTQLNRALTGIAVEQDKNTQEVFAQVKQIYKTPPIKDFGGFNFSQILPDPSKPSKRSFIEDLLFNKVTLADAGFIKQYGDCLGDISARDLICAQKFNGLTVLPPLLTDEMIAQYTSALLAGTITSGWTFGAGAALQIPFAMQMAYRFNGIGVTQNVLYENQKLIANQFNSAIGKIQDSLSSTASALGKLQDVVNQNAQALNTLVKQLSSNFGAISSVLNDILSRLDKVEAEVQIDRLITGRLQSLQTYVTQQLIRAAEIRASANLAATKMSECVLGQSKRVDFCGKGYHLMSFPQSAPHGVVFLHVTYVPAQEKNFTTAPAICHDGKAHFPREGVFVSNGTHWFVTQRNFCEPQIITTDNTFVSGNCDVVIGIVNNTVYDPLQPELDSFKEELDKYFKNHTSPDVDLGDISGINASVVNIQKEIDRLNEVAKNLNESLIDLQELGKYEQYIKGGGGSDIDPYKEFGSSYQLLNFLPLDFFPDLNALVDTATALYEEELTGREHCSPHHTAIRQALVCWDELTKLIAWMSSNITSEQVRTIIVNHVNDTWGLKVRQSLWFHLSCLTFGQHTVQEFLVSFGVWIRTPAPYRPPNAPILSTLPEHTVIC

SEQ ID NO: 7090 - protein, 1365 aa, Artificial Sequence
  SARS-CoV-2/USA/NY-NYUMC7/2020__EPI_ISL_418192 spike protein (1-1211)(I714C_Y1110C) WhcAg construct
MFVFLVLLPLVSSQCVNLTTRTQLPPAYTNSFTRGVYYPDKVFRSSVLHSTQDLFLPFFSNVTWFHAIHVSGTNGTKRFDNPVLPFNDGVYFASTEKSNIIRGWIFGTTLDSKTQSLLIVNNATNVVIKVCEFQFCNDPFLGVYHHKNNKSWMESEFRVYSSANNCTFEYVSQPFLMDLEGKQGNFKNLREFVFKNIDGYFKIYSKHTPINLVRDLPQGFSALEPLVDLPIGINITRFQTLLALHRSYLTPGDSSSGWTAGAAAYYVGYLQPRTFLLKYNENGTITDAVDCALDPLSETKCTLKSFTVEKGIYQTSNFRVQPTESIVRFPNITNLCPFGEVFNATRFASVYAWNRKRISNCVADYSVLYNSASFSTFKCYGVSPTKLNDLCFTNVYADSFVIRGDEVRQIAPGQTGKIADYNYKLPDDFTGCVIAWNSNNLDSKVGGNYNYLYRLFRKSNLKPFERDISTEIYQAGSTPCNGVEGFNCYFPLQSYGFQPTNGVGYQPYRVVVLSFELLHAPATVCGPKKSTNLVKNKCVNFNFNGLTGTGVLTESNKKFLPFQQFGRDIADTTDAVRDPQTLEILDITPCSFGGVSVITPGTNTSNQVAVLYQGVNCTEVPVAIHADQLTPTWRVYSTGSNVFQTRAGCLIGAEHVNNSYECDIPIGAGICASYQTQTNSPRRARSVASQSIIAYTMSLGAENSVAYSNNSIACPTNFTISVTTEILPVSMTKTSVDCTMYICGDSTECSNLLLQYGSFCTQLNRALTGIAVEQDKNTQEVFAQVKQIYKTPPIKDFGGFNFSQILPDPSKPSKRSFIEDLLFNKVTLADAGFIKQYGDCLGDIAARDLICAQKFNGLTVLPPLLTDEMIAQYTSALLAGTITSGWTFGAGAALQIPFAMQMAYRFNGIGVTQNVLYENQKLIANQFNSAIGKIQDSLSSTASALGKLQDVVNQNAQALNTLVKQLSSNFGAISSVLNDILSRLDKVEAEVQIDRLITGRLQSLQTYVTQQLIRAAEIRASANLAATKMSECVLGQSKRVDFCGKGYHLMSFPQSAPHGVVFLHVTYVPAQEKNFTTAPAICHDGKAHFPREGVFVSNGTHWFVTQRNFCEPQIITTDNTFVSGNCDVVIGIVNNTVYDPLQPELDSFKEELDKYFKNHTSPDVDLGDISGINASVVNIQKEIDRLNEVAKNLNESLIDLQELGKYEQYIKGGGGSDIDPYKEFGSSYQLLNFLPLDFFPDLNALVDTATALYEEELTGREHCSPHHTAIRQALVCWDELTKLIAWMSSNITSEQVRTIIVNHVNDTWGLKVRQSLWFHLSCLTFGQHTVQEFLVSFGVWIRTPAPYRPPNAPILSTLPEHTVIC

SEQ ID NO: 7091 - protein, 1365 aa, Artificial Sequence
  SARS-CoV-2/Iceland/189/2020__EPI_ISL_417709 spike protein (1-1211)(I714C_Y1110C) WhcAg construct
MFVFLVLLPLVSSQCVNLTTRTQLPPAYTNSFTRGVYYPDKVFRSSVLHSTQDLFLPFFSNVTWFHAIHVSGTNGTKRFDNPVLPFNDGVYFASTEKSNIIRGWIFGTTLDSKTQSLLIVNNATNVVIKVCEFQFCNDPFLGVYYHKNNKSWMESEFRVYSSANNCTFEYVSQPFLMDLEGKQGNFKNLREFVFKNIDGYFKIYSKHTPINLVRDLPQGFSALEPLVDLPIGINITRFQTLLALHRSYLTPGDSSSGWTAGAAAYYVGYLQPRTFLLKYNENGTITDAVDCALDPLSETKCTLKSFTVEKGIYQTSNFRVQPTESIVRFPNITNLCPFGEVFNATRFASVYAWNRKRISNCVADYSVLYNSASFSTFKCYGVSPTKLNDLCFTNVYADSFVIRGDEVRQIAPGQTGKIADYNYKLPDDFTGCVIAWNSNNLDSKVGGNYNYLYRLFRKSNLKPFERDISTEIYQAGSTPCNGVEGFNCYFPLQSYGFQPTNGVGYQPYRVVVLSFELLHAPATVCGPKKSTNLVKNKCVNFNFNGLTGTGVLTESNKKFLPFQQFGRDIADTTDAVRDPQTLEILDITPCSFGGVSVITPGTNTSNQVAVLYQGVNCTEVPVAIHADQLTPTWRVYSTGSNVFQTRAGCLIGAEHVNNSYECDIPIGAGICASYQTQTNSPRRARSVASQSIIAYTMSLGAENSVAYSNNSIACPTNFTISVTTEILPVSMTKTSVDCTMYICGDSTECSNLLLQYGSFCTQLNRALTGIAVEQDKNTQEVFAQVKQIYKTPPIKDFGGFNFSQILPDPSKPSKRSFIEDLLFNKVTLADAGFTKQYGDCLGDIAARDLICAQKFNGLTVLPPLLTDEMIAQYTSALLAGTITSGWTFGAGAALQIPFAMQMAYRFNGIGVTQNVLYENQKLIANQFNSAIGKIQDSLSSTASALGKLQDVVNQNAQALNTLVKQLSSNFGAISSVLNDILSRLDKVEAEVQIDRLITGRLQSLQTYVTQQLIRAAEIRASANLAATKMSECVLGQSKRVDFCGKGYHLMSFPQSAPHGVVFLHVTYVPAQEKNFTTAPAICHDGKAHFPREGVFVSNGTHWFVTQRNFCEPQIITTDNTFVSGNCDVVIGIVNNTVYDPLQPELDSFKEELDKYFKNHTSPDVDLGDISGINASVVNIQKEIDRLNEVAKNLNESLIDLQELGKYEQYIKGGGGSDIDPYKEFGSSYQLLNFLPLDFFPDLNALVDTATALYEEELTGREHCSPHHTAIRQALVCWDELTKLIAWMSSNITSEQVRTIIVNHVNDTWGLKVRQSLWFHLSCLTFGQHTVQEFLVSFGVWIRTPAPYRPPNAPILSTLPEHTVIC

SEQ ID NO: 7092 - protein, 1365 aa, Artificial Sequence
  SARS-CoV-2/Australia/NSW56/2020__EPI_ISL_417408 spike protein (1-1211)(I714C_Y1110C) WhcAg construct
MFVFLVLLPLVSSQCVNLTTRTQLPPAYTNSFTRGVYYPDKVFRSSVLHSTQDLFLPFFSNVTWFHAIHVSGTNGTKRFDNPVLPFNDGVYFASTEKSNIIRGWIFGTTLDSKTQSLLIVNNATNVVIKVCEFQFCNDPFLGVYYHKNNKSWMESEFRVYSSANNCTFEYVSQPFLMDLEGKQGNFKNLREFVFKNIDGYFKIYSKHTPINLVRDLPQGFSALEPLVDLPIGINITRFQTLLALHRSYLTPGDSSSGWTAGAAAYYVGYLQPRTFLLKYNENGTITDAVDCALDPLSETKCTLKSFTVEKGIYQTSNFRVQPTESIVRFPNITNLCPFGEVFNATRFASVYAWNRKRISNCVADYSVLYNSASFSTFKCYGVSPTKLNDLCFTNVYADSFVIRGDEVRQIAPGQTGKIADYNYKLPDDFTGCVIAWNSNNLDSKVGGNYNYLYRLFRKSNLKPFERDISTEIYQAGSTPCNGVEGFNCYFPLQSYGFQPTNGVGYQPYRVVVLSFELLHAPATVCGPKKSTNLVKNKCVNFNFNGLTGTGVLTESNKKFLPFQQFGRDIADTTDAVRDPQTLEILDITPCSFGGVSVITPGTNTSNQVAVLYQDVNCTEVPVAIHADQLTPTWRVYSTGSNVFQTRAGCLIGAEHVNNSYECDIPIGAGICASYQTQTNSPRRARSVASQSIIAYTMSLGAENSVAYSNNSIACPTNFTISVTTEILPVSMTKTSVDCTMYICGDSTECSNLLLQYGSFCTQLNRALTGIAVEQDKNTQEVFAQVKQIYKTPPIKDFGGFNFSQILPDSSKPSKRSFIEDLLFNKVTLADAGFIKQYGDCLGDIAARDLICAQKFNGLTVLPPLLTDEMIAQYTSALLAGTITSGWTFGAGAALQIPFAMQMAYRFNGIGVTQNVLYENQKLIANQFNSAIGKIQDSLSSTASALGKLQDVVNQNAQALNTLVKQLSSNFGAISSVLNDILSRLDKVEAEVQIDRLITGRLQSLQTYVTQQLIRAAEIRASANLAATKMSECVLGQSKRVDFCGKGYHLMSFPQSAPHGVVFLHVTYVPAQEKNFTTAPAICHDGKAHFPREGVFVSNGTHWFVTQRNFCEPQIITTDNTFVSGNCDVVIGIVNNTVYDPLQPELDSFKEELDKYFKNHTSPDVDLGDISGINASVVNIQKEIDRLNEVAKNLNESLIDLQELGKYEQYIKGGGGSDIDPYKEFGSSYQLLNFLPLDFFPDLNALVDTATALYEEELTGREHCSPHHTAIRQALVCWDELTKLIAWMSSNITSEQVRTIIVNHVNDTWGLKVRQSLWFHLSCLTFGQHTVQEFLVSFGVWIRTPAPYRPPNAPILSTLPEHTVIC

SEQ ID NO: 7093 - protein, 1365 aa, Artificial Sequence
  SARS-CoV-2/Iceland/280/2020__EPI_ISL_417608 spike protein (1-1211)(I714C_Y1110C) WhcAg construct
MFVFLVLLPLVSSQCVNLTTRTQLPPAYTNSFTRGVYYPDKVFRSSVLHSTQDLFLPFFSNVTWFHAIHVSGTNGTKRFDNPVLPFNDGVYFASTEKSNIIRGWIFGTTLDSKTQSLLIVNNATNVVIKVCEFQFCNDPFLGVYYHKNNKSWMESEFRVYSSANNCTFEYVSQPFLMDLEGKQGNFKNLREFVFKNIDGYFKIYSKHTPINLVRDLPQGFSALEPLVDLPIGINITRFQTLLALHRSYLTPGDSSSGWTAGAAAYYVGYLQPRTFLLKYNENGTITDAVDCALDPLSETKCTLKSFTVEKGIYQTSNFRVQPTESIVRFPNITNLCPFGEVFNATRFASVYAWNRKRISNCVADYSVLYNSASFSTFKCYGVSPTKLNDLCFTNVYADSFVIRGDEVRQIAPGQTGKIADYNYKLPDDFTGCVIAWNSNNLDSKVGGNYNYLYRLFRKSNLKPFERDISTEIYQAGSTPCNGVEGFNCYFPLQSYGFQPTNGVGYQPYRVVVLSFELLHAPATVCGPKKSTNLVKNKCVNFNFNGLTGTGVLTESNKKFLPFQQFGRDIADTTDAVRDPQTLEILDITPCSFGGVSVITPGTNTSNQVAVLYQGVNCTEVPVAIHADQLTPTWRVYSTGSNVFQTRAGCLIGAEHVNNSYECDIPIGAGICASYHTQTNSPRRARSVASQSIIAYTMSLGAENSVAYSNNSIACPTNFTISVTTEILPVSMTKTSVDCTMYICGDSTECSNLLLQYGSFCTQLNRALTGIAVEQDKNTQEVFAQVKQIYKTPPIKDFGGFNFSQILPDPSKPSKRSFIEDLLFNKVTLADAGFIKQYGDCLGDIAARDLICAQKFNGLTVLPPLLTDEMIAQYTSALLAGTITSGWTFGAGAALQIPFAMQMAYRFNGIGVTQNVLYENQKLIANQFNSAIGKIQDSLSSTASALGKLQDVVNQNAQALNTLVKQLSSNFGAISSVLNDILSRLDKVEAEVQIDRLITGRLQSLQTYVTQQLIRAAEIRASANLAATKMSECVLGQSKRVDFCGKGYHLMSFPQSAPHGVVFLHVTYVPAQEKNFTTAPAICHDGKAHFPREGVFVSNGTHWFVTQRNFCEPQIITTDNTFVSGNCDVVIGIVNNTVYDPLQPELDSFKEELDKYFKNHTSPDVDLGDISGINASVVNIQKEIDRLNEVAKNLNESLIDLQELGKYEQYIKGGGGSDIDPYKEFGSSYQLLNFLPLDFFPDLNALVDTATALYEEELTGREHCSPHHTAIRQALVCWDELTKLIAWMSSNITSEQVRTIIVNHVNDTWGLKVRQSLWFHLSCLTFGQHTVQEFLVSFGVWIRTPAPYRPPNAPILSTLPEHTVIC

SEQ ID NO: 7094 - protein, 1365 aa, Artificial Sequence; identical to SEQ ID NO: 7049
  SARS-CoV-2/Iceland/247/2020__EPI_ISL_417575 spike protein (1-1211)(I714C_Y1110C) WhcAg construct

SEQ ID NO: 7095 - protein, 1365 aa, Artificial Sequence
  SARS-CoV-2/Iceland/238/2020__EPI_ISL_417566 spike protein (1-1211)(I714C_Y1110C) WhcAg construct
MFVFLVLLPLVSSQCVNLTTRTQLPPAYTNSFTRGVYYPDKVFRSSVLHSTQDLFLPFFSNVTWFHAIHVSGTNGTKRFDNPVLPFNDGVYFASTEKSNIIRGWIFGTTLDSKTQSLLIVNNATNVVIKVCEFQFCNDPFLGVYYHKNNKSWMESEFRVYSSANNCTFEYVSQPFLMDLEGKQGNFKNLREFVFKNIDGYFKIYSKHTPINLVRDLPQGFSALEPLVDLPIGINITRFQTLLALHRSYLTPGDSSSGWTAGAAAYYVGYLQPRTFLLKYNENGTITDAVDCALDPLSETKCTLKSFTVEKGIYQTSNFRVQPTESIVRFPNITNLCPFGEVFNATRFASVYAWNRKRISNCVADYSVLYNSASFSTFKCYGVSPTKLNDLCFTNVYADSFVIRGDEVRQIAPGQTGKIADYNYKLPDDFTGCVIAWNSNNLDSKVGGNYNYLYRLFRKSNLKPFERDISTEIYQAGSTPCNGVEGFNCYFPLQSYGFQPTNGVGYQPYRVVVLSFELLHAPATVCGPKKSTNLVKNKCVNFNFNGLTGTGVLTESNKKFLPFQQFGRDIADTTDAVRDPQTLEILDITPCSFGGVSVITPGTNTSNQVAVLYQGVNCTEVPVAIHADQLTPTWRVYSTGSNVFQTRAGCLIGAEHVNNSYECDIPIGAGICASYQTQTNSPRRARSVASQSIIAYTMSLGAENSVAYSNNSIACPTNFTISVTTEILPVSMTKTSVDCTMYICGDSTECSNLLLQYGSFCTQLNRALTGIAVEQDKNTQEVFAQVKQIYKTPPIKDFGGFNFSQILPDPSKPSKRSFIEDLLFNKVTLADVGFIKQYGDCLGDIAARDLICAQKFNGLTVLPPLLTDEMIAQYTSALLAGTITSGWTFGAGAALQIPFAMQMAYRFNGIGVTQNVLYENQKLIANQFNSAIGKIQDSLSSTASALGKLQDVVNQNAQALNTLVKQLSSNFGAISSVLNDILSRLDKVEAEVQIDRLITGRLQSLQTYVTQQLIRAAEIRASANLAATKMSECVLGQSKRVDFCGKGYHLMSFPQSAPHGVVFLHVTYVPAQEKNFTTAPAICHDGKAHFPREGVFVSNGTHWFVTQRNFCEPQIITTDNTFVSGNCDVVIGIVNNTVYDPLQPELDSFKEELDKYFKNHTSPDVDLGDISGINASVVNIQKEIDRLNEVAKNLNESLIDLQELGKYEQYIKGGGGSDIDPYKEFGSSYQLLNFLPLDFFPDLNALVDTATALYEEELTGREHCSPHHTAIRQALVCWDELTKLIAWMSSNITSEQVRTIIVNHVNDTWGLKVRQSLWFHLSCLTFGQHTVQEFLVSFGVWIRTPAPYRPPNAPILSTLPEHTVIC

SEQ ID NO: 7096 - protein, 1365 aa, Artificial Sequence
  SARS-CoV-2/Greece/16/2020__EPI_ISL_418265 spike protein (1-1211)(I714C_Y1110C) WhcAg construct
MFVFLVLLPLVSSQCVNLTTRTQLPPAYTNSFTRGVYYPDKVFRSSVLHSTQDLFLPFFSNVTWFHAIHVSGTNGTKRFDNPVLPFNDGVYFASTEKSNIIRGWIFGTTLDSKTQSLLIVNNATNVVIKVCEFQFCNDPFLGVYYHKNNKSWMESEFRVYSSANNCTFEYVSQPFLMDLEGKQGNFKNLREFVFKNVDGYFKIYSKHTPINLVRDLPQGFSALEPLVDLPIGINITRFQTLLALHRSYLTPGDSSSGWTAGAAAYYVGYLQPRTFLLKYNENGTITDAVDCALDPLSETKCTLKSFTVEKGIYQTSNFRVQPTESIVRFPNITNLCPFGEVFNATRFASVYAWNRKRISNCVADYSVLYNSASFSTFKCYGVSPTKLNDLCFTNVYADSFVIRGDEVRQIAPGQTGKIADYNYKLPDDFTGCVIAWNSNNLDSKVGGNYNYLYRLFRKSNLKPFERDISTEIYQAGSTPCNGVEGFNCYFPLQSYGFQPTNGVGYQPYRVVVLSFELLHAPATVCGPKKSTNLVKNKCVNFNFNGLTGTGVLTESNKKFLPFQQFGRDIADTTDAVRDPQTLEILDITPCSFGGVSVITPGTNTSNQVAVLYQDVNCTEVPVAIHADQLTPTWRVYSTGSNVFQTRAGCLIGAEHVNNSYECDIPIGAGICASYQTQTNSPRRARSVASQSIIAYTMSLGAENSVAYSNNSIACPTNFTISVTTEILPVSMTKTSVDCTMYICGDSTECSNLLLQYGSFCTQLNRALTGIAVEQDKNTQEVFAQVKQIYKTPPIKDFGGFNFSQILPDPSKPSKRSFIEDLLFNKVTLADAGFIKQYGDCLGDIAARDLICAQKFNGLTVLPPLLTDEMIAQYTSALLAGTITSGWTFGAGAALQIPFAMQMAYRFNGIGVTQNVLYENQKLIANQFNSAIGKIQDSLSSTASALGKLQDVVNQNAQALNTLVKQLSSNFGAISSVLNDILSRLDKVEAEVQIDRLITGRLQSLQTYVTQQLIRAAEIRASANLAATKMSECVLGQSKRVDFCGKGYHLMSFPQSAPHGVVFLHVTYVPAQEKNFTTAPAICHDGKAHFPREGVFVSNGTHWFVTQRNFCEPQIITTDNTFVSGNCDVVIGIVNNTVYDPLQPELDSFKEELDKYFKNHTSPDVDLGDISGINASVVNIQKEIDRLNEVAKNLNESLIDLQELGKYEQYIKGGGGSDIDPYKEFGSSYQLLNFLPLDFFPDLNALVDTATALYEEELTGREHCSPHHTAIRQALVCWDELTKLIAWMSSNITSEQVRTIIVNHVNDTWGLKVRQSLWFHLSCLTFGQHTVQEFLVSFGVWIRTPAPYRPPNAPILSTLPEHTVIC

SEQ ID NO: 7097 - protein, 1365 aa, Artificial Sequence
  SARS-CoV-2/Iceland/319/2020__EPI_ISL_417648 spike protein (1-1211)(I714C_Y1110C) WhcAg construct
MFVFLVLLPLVSSQCVNLTTRTQLPPAYTNSFTRGVYYPDKVFRSSVLHSTQDLFLPFFSNVTWFHAIHVSGTNGTKRFDNPVLPFNDGVYFASTEKSNIIRGWIFGTTLDSKTQSLLIVNNATNVVIKVCEFQFCNDPFLGVYYHKNNKSWMESEFRVYSSANNCTFEYVSQPFLIDLEGKQGNFKNLREFVFKNIDGYFKIYSKHTPINLVRDLPQGFSALEPLVDLPIGINITRFQTLLALHRSYLTPGDSSSGWTAGAAAYYVGYLQPRTFLLKYNENGTITDAVDCALDPLSETKCTLKSFTVEKGIYQTSNFRVQPTESIVRFPNITNLCPFGEVFNATRFASVYAWNRKRISNCVADYSVLYNSASFSTFKCYGVSPTKLNDLCFTNVYADSFVIRGDEVRQIAPGQTGKIADYNYKLPDDFTGCVIAWNSNNLDSKVGGNYNYLYRLFRKSNLKPFERDISTEIYQAGSTPCNGVEGFNCYFPLQSYGFQPTNGVGYQPYRVVVLSFELLHAPATVCGPKKSTNLVKNKCVNFNFNGLTGTGVLTESNKKFLPFQQFGRDIADTTDAVRDPQTLEILDITPCSFGGVSVITPGTNTSNQVAVLYQGVNCTEVPVAIHADQLTPTWRVYSTGSNVFQTRAGCLIGAEHVNNSYECDIPIGAGICASYQTQTNSPRRARSVASQSIIAYTMSLGAENSVAYSNNSIACPTNFTISVTTEILPVSMTKTSVDCTMYICGDSTECSNLLLQYGSFCTQLNRALTGIAVEQDKNTQEVFAQVKQIYKTPPIKDFGGFNFSQILPDPSKPSKRSFIEDLLFNKVTLADAGFIKQYGDCLGDIAARDLICAQKFNGLTVLPPLLTDEMIAQYTSALLAGTITSGWTFGAGAALQIPFAMQMAYRFNGIGVTQNVLYENQKLIANQFNSAIGKIQDSLSSTASALGKLQDVVNQNAQALNTLVKQLSSNFGAISSVLNDILSRLDKVEAEVQIDRLITGRLQSLQTYVTQQLIRAAEIRASANLAATKMSECVLGQSKRVDFCGKGYHLMSFPQSAPHGVVFLHVTYVPAQEKNFTTAPAICHDGKAHFPREGVFVSNGTHWFVTQRNFCEPQIITTDNTFVSGNCDVVIGIVNNTVYDPLQPELDSFKEELDKYFKNHTSPDVDLGDISGINASVVNIQKEIDRLNEVAKNLNESLIDLQELGKYEQYIKGGGGSDIDPYKEFGSSYQLLNFLPLDFFPDLNALVDTATALYEEELTGREHCSPHHTAIRQALVCWDELTKLIAWMSSNITSEQVRTIIVNHVNDTWGLKVRQSLWFHLSCLTFGQHTVQEFLVSFGVWIRTPAPYRPPNAPILSTLPEHTVIC

SEQ ID NO: 7098 - protein, 1365 aa, Artificial Sequence
  SARS-CoV-2/Congo/94/2020__EPI_ISL_417947 spike protein (1-1211)(I714C_Y1110C) WhcAg construct
MFVFLVLLPLVSSQCVNLTTRTQLPPAYTNSFTRGVYYPDKVFRSSVLHSTQDLFLPFFSNVTWFHAIHVSGTNGTKRFDNPVLPFNDGVYFASTEKSNIIRGWIFGTTLDSKTQSLLIVNNATNVVIKVCEFQFCNDPFLGVYYHKNNKSWMESEFRVYSSANNCTFEYVSQPFLMDLEGKQGNFKNLREFVFKNIDGYFKIYSKHTPINLVRDLPQGFSALEPLVDLPIGINITRFQTLLALHRSYLTPGDSSSGWTAGAAAYYVGYLQPRTFLLKYNENGTITDAVDCALDPLSETKCTLKSFTVEKGIYQTSNFRVQPTESIVRFPNITNLCPFGEVFNATRFASVYAWNRKRISNCVADYSVLYNSASFSTFKCYGVSPTKLNDLCFTNVYADSFVIRGDEVRQIAPGQTGKIADYNYKLPDDFTGCVIAWNSNNLDSKVGGNYNYLYRLFRKSNLKPFERDISTEIYQAGSTPCNGVEGFNCYFPLQSYGFQPTNGVGYQPYRVVVLSFELLHAPATVCGPKKSTNLVKNKCVNFNFNGLTGTGVLTESNKKFLPFQQFGRDIADTTDAVRDPQTLEILDITPCSFGGVSVITPGTNTSNQVAVLYQGVNCTEVPVAIHADQLTPTWRVYSTGSNVFQTRAGCLIGAEHVNNSYECDIPIGAGICASYQTQTNSPRRARSVASQSIIAYTMSLGAENSVAYSNNSIACPTNFTISVTTEILPVSMTKTSVDCTMYICGDSTECSNLLLQYGSFCTQLNRALTGIAVEQDKNTQEVFAQVKQIYKTPPIKDFGGFNFSQILPDPSKPSKRSFIEDILFNKVTLADAGFIKQYGDCLGDIAARDLICAQKFNGLTVLPPLLTDEMIAQYTSALLAGTITSGWTFGAGAALQIPFAMQMAYRFNGIGVTQNVLYENQKLIANQFNSAIGKIQDSLSSTASALGKLQDVVNQNAQALNTLVKQLSSNFGAISSVLNDILSRLDKVEAEVQIDRLITGRLQSLQTYVTQQLIRAAEIRASANLAATKMSECVLGQSKRVDFCGKGYHLMSFPQSAPHGVVFLHVTYVPAQEKNFTTAPAICHDGKAHFPREGVFVSNGTHWFVTQRNFCEPQIITTDNTFVSGNCDVVIGIVNNTVYDPLQPELDSFKEELDKYFKNHTSPDVDLGDISGINASVVNIQKEIDRLNEVAKNLNESLIDLQELGKYEQYIKGGGGSDIDPYKEFGSSYQLLNFLPLDFFPDLNALVDTATALYEEELTGREHCSPHHTAIRQALVCWDELTKLIAWMSSNITSEQVRTIIVNHVNDTWGLKVRQSLWFHLSCLTFGQHTVQEFLVSFGVWIRTPAPYRPPNAPILSTLPEHTVIC

SEQ ID NO: 7099 - protein, 1365 aa, Artificial Sequence
  SARS-CoV-2/Congo/158/2020__EPI_ISL_417950 spike protein (1-1211)(I714C_Y1110C) WhcAg construct
MFVFLVLLPLVSSQCVNLTTRTQLPPAYTNSFTRGVYYPDKVFRSSVLHSTQDLFLPFFSNVTWFHAIHVSGTNGTKRFDNPVLPFNDGVYFASTEKSNIIRGWIFGTTLDSKTQSLLIVNNATNVVIKVCEFQFCNDPFLGVYYHKNNKSWMESEFRVYSSANNCTFEYVSQPFLMDLEGKQGNFKNLREFVFKNIDGYFKIYSKHTPINLVRDLPQGFSALEPLVDLPIGINITRFQTLLALHRSYLTPGDSSSGWTAGAAAYYVGYLQPRTFLLKYNENGTITDAVDCALDPLSETKCTLKSFTVEKGIYQTSNFRVQPTESIVRFPNITNLCPFGEVFNATRFASVYAWNRKRISNCVADYSVLYNSASFSTFKCYGVSPTKLNDLCFTNVYADSFVIRGDEVRQIAPGQTGKIADYNYKLPDDFTGCVIAWNSNNLDSKVGGNYNYLYRLFRKSNLKPFERDISTEIYQAGSTPCNGVEGFNCYFPLQSYGFQPTNGVGYQPYRVVVLSFELLHAPATVCGPKKSTNLVKNKCVNFNFNGLTGTGVLTESNKKFLPFQQFGRDIADTTDAVRDPQTLEILDITPCSFGGVSVITPGTNTSNQVAVLYQDVNCTEVPVAIHADQLTPTWRVYSTGSNVFQTRAGCLIGAEHVNNSYECDIPIGAGICASYQTQTNSPRRARSVASQSIIAYTMSLGAENSVAYSNNSIACPTNFTISVTTEILPVSMTKTSVDCTMYICGDSTECSNLLLQYGSFCTQLNRALTGIAVEQDKNTQEVFAQVKQIYKTPPIKDFGGFNFSQILPDPSKPSKRSFIEDLLFNKVTLADAGFIKQYGDCLGDIAARDLICAQKFNGLTVLPPLLTDEMIAQYTSALLAGTITSGWTFGAGAALQIPFAMQMAYRFNGIGVTQNVLYENQKLIANQFNSAIGKIQDSLSSTASALGKLQDVVNQNAQALNTLVKQLSSNFGAISSVLNDILSRLDKVEAEVQIDRLITGRLQSLQTYVTQQLIRAAEIRASANLAATKMSECVLGQSKRVDFCGKGYHLMSFPQSAPHGVVFLHVTYVPAQEKNFTTAPAICHDGKAHFPREGVFVSNGTHWFVTQRNFCEPQIITTDNTFLSGNCDVVIGIVNNTVYDPLQPELDSFKEELDKYFKNHTSPDVDLGDISGINASVVNIQKEIDRLNEVAKNLNESLIDLQELGKYEQYIKGGGGSDIDPYKEFGSSYQLLNFLPLDFFPDLNALVDTATALYEEELTGREHCSPHHTAIRQALVCWDELTKLIAWMSSNITSEQVRTIIVNHVNDTWGLKVRQSLWFHLSCLTFGQHTVQEFLVSFGVWIRTPAPYRPPNAPILSTLPEHTVIC

SEQ ID NO: 7100 - protein, 1365 aa, Artificial Sequence
  SARS-CoV-2/USA/UT-00034/2020__EPI_ISL_417977 spike protein (1-1211)(I714C_Y1110C) WhcAg construct
MFVFLVLLPLVSSQCVNLTTRTQLPPAYTNSFTRGVYYPDKVFRSSVLHSTQDLFLPFFSNVTWFHAIHVSGTNGTKRFDNPVLPFNDGVYFASTEKSNIIRGWIFGTTLDSKTQSLLIVNNATNVVIKVCEFQFCNDPFLGVYYYKNNKSWMESEFRVYSSANNCTFEYVSQPFLMDLEGKQGNFKNLREFVFKNIDGYFKIYSKHTPINLVRDLPQGFSALEPLVDLPIGINITRFQTLLALHRSYLTPGDSSSGWTAGAAAYYVGYLQPRTFLLKYNENGTITDAVDCALDPLSETKCTLKSFTVEKGIYQTSNFRVQPTESIVRFPNITNLCPFGEVFNATRFASVYAWNRKRISNCVADYSVLYNSASFSTFKCYGVSPTKLNDLCFTNVYADSFVIRGDEVRQIAPGQTGKIADYNYKLPDDFTGCVIAWNSNNLDSKVGGNYNYLYRLFRKSNLKPFERDISTEIYQAGSTPCNGVEGFNCYFPLQSYGFQPTNGVGYQPYRVVVLSFELLHAPATVCGPKKSTNLVKNKCVNFNFNGLTGTGVLTESNKKFLPFQQFGRDIADTTDAVRDPQTLEILDITPCSFGGVSVITPGTNTSNQVAVLYQGVNCTEVPVAIHADQLTPTWRVYSTGSNVFQTRAGCLIGAEHVNNSYECDIPIGAGICASYQTQTNSPRRARSVASQSIIAYTMSLGAENSVAYSNNSIACPTNFTISVTTEILPVSMTKTSVDCTMYICGDSTECSNLLLQYGSFCTQLNRALTGIAVEQDKNTQEVFAQVKQIYKTPPIKDFGGFNFSQILPDPSKPSKRSFIEDLLFNKVTLADAGFIKQYGDCLGDIAARDLICAQKFNGLTVLPPLLTDEMIAQYTSALLAGTITSGWTFGAGAALQIPFAMQMAYRFNGIGVTQNVLYENQKLIANQFNSAIGKIQDSLSSTASALGKLQDVVNQNAQALNTLVKQLSSNFGAISSVLNDILSRLDKVEAEVQIDRLITGRLQSLQTYVTQQLIRAAEIRASANLAATKMSECVLGQSKRVDFCGKGYHLMSFPQSAPHGVVFLHVTYVPAQEKNFTTAPAICHDGKAHFPREGVFVSNGTHWFVTQRNFCEPQIITTDNTFVSGNCDVVIGIVNNTVYDPLQPELDSFKEELDKYFKNHTSPDVDLGDISGINASVVNIQKEIDRLNEVAKNLNESLIDLQELGKYEQYIKGGGGSDIDPYKEFGSSYQLLNFLPLDFFPDLNALVDTATALYEEELTGREHCSPHHTAIRQALVCWDELTKLIAWMSSNITSEQVRTIIVNHVNDTWGLKVRQSLWFHLSCLTFGQHTVQEFLVSFGVWIRTPAPYRPPNAPILSTLPEHTVIC

SEQ ID NO: 7101 - protein, 1365 aa, Artificial Sequence
  SARS-CoV-2/USA/UT-00033/2020__EPI_ISL_417976 spike protein (1-1211)(I714C_Y1110C) WhcAg construct
MFVFLVLLPLVSSQCVNLTTRTQLPPAYTNSFTRGVYYPDKVFRSSVLHSTQDLFLPFFSNVTWFHAIHVSGTNGTKRFDNPVLPFNDGVYFASTEKSNIIRGWIFGTTLDSKTQSLLIVNNATNVVIKVCEFQFCNDPFLGVYYHKNNKSWMESEFRVYSSANNCTFEYVSQPFLMDLEGKQGNFKNLREFVFKNIDGYFKIYSKHTPINLVRDLPQGFSALEPLVDLPIGINITRFQTLLALHRSYLTPGDSSSGLTAGAAAYYVGYLQPRTFLLKYNENGTITDAVDCALDPLSETKCTLKSFTVEKGIYQTSNFRVQPTESIVRFPNITNLCPFGEVFNATRFASVYAWNRKRISNCVADYSVLYNSASFSTFKCYGVSPTKLNDLCFTNVYADSFVIRGDEVRQIAPGQTGKIADYNYKLPDDFTGCVIAWNSNNLDSKVGGNYNYLYRLFRKSNLKPFERDISTEIYQAGSTPCNGVEGFNCYFPLQSYGFQPTNGVGYQPYRVVVLSFELLHAPATVCGPKKSTNLVKNKCVNFNFNGLTGTGVLTESNKKFLPFQQFGRDIADTTDAVRDPQTLEILDITPCSFGGVSVITPGTNTSNQVAVLYQGVNCTEVPVAIHADQLTPTWRVYSTGSNVFQTRAGCLIGAEHVNNSYECDIPIGAGICASYQTQTNSPRRARSVASQSIIAYTMSLGAENSVAYSNNSIACPTNFTISVTTEILPVSMTKTSVDCTMYICGDSTECSNLLLQYGSFCTQLNRALTGIAVEQDKNTQEVFAQVKQIYKTPPIKDFGGFNFSQILPDPSKPSKRSFIEDLLFNKVTLADAGFIKQYGDCLGDIAARDLICAQKFNGLTVLPPLLTDEMIAQYTSALLAGTITSGWTFGAGAALQIPFAMQMAYRFNGIGVTQNVLYENQKLIANQFNSAIGKIQDSLSSTASALGKLQDVVNQNAQALNTLVKQLSSNFGAISSVLNDILSRLDKVEAEVQIDRLITGRLQSLQTYVTQQLIRAAEIRASANLAATKMSECVLGQSKRVDFCGKGYHLMSFPQSAPHGVVFLHVTYVPAQEKNFTTAPAICHDGKAHFPREGVFVSNGTHWFVTQRNFCEPQIITTDNTFVSGNCDVVIGIVNNTVYDPLQPELDSFKEELDKYFKNHTSPDVDLGDISGINASVVNIQKEIDRLNEVAKNLNESLIDLQELGKYEQYIKGGGGSDIDPYKEFGSSYQLLNFLPLDFFPDLNALVDTATALYEEELTGREHCSPHHTAIRQALVCWDELTKLIAWMSSNITSEQVRTIIVNHVNDTWGLKVRQSLWFHLSCLTFGQHTVQEFLVSFGVWIRTPAPYRPPNAPILSTLPEHTVIC

SEQ ID NO: 7102 - protein, 1365 aa, Artificial Sequence
  SARS-CoV-2/USA/WI-13/2020__EPI_ISL_417516 spike protein (1-1211)(I714C_Y1110C) WhcAg construct
MFVFLVLLPLVSSQCVNLTTRTQLPPAYTNSFTRGVYYPDKVFRSSVLHSTQDLFLPFFSNVTWFHAIHVSGTNGTKRFDNPVLPFNDGVYFASTEKSNIIRGWIFGTTLDSKTQSLLIVNNATNVVIKVCEFQFCNDPFLGVYYHKNNKSWMESEFRVYSSANNCTFEYVSQPFLMDLEGKQGNFKNLREFVFKNIDGYFKIYSKHTPINLVRDLPQGFSALEPLVDLPIGINITRFQTLLALHRSYLTPGDSSSGWTAGAAAYYVGYLQPRTFLLKYNENGTITDAVDCALDPLSETKCTLKSFTVEKGIYQTSNFRVLPTESIVRFPNITNLCPFGEVFNATRFASVYAWNRKRISNCVADYSVLYNSASFSTFKCYGVSPTKLNDLCFTNVYADSFVIRGDEVRQIAPGQTGKIADYNYKLPDDFTGCVIAWNSNNLDSKVGGNYNYLYRLFRKSNLKPFERDISTEIYQAGSTPCNGVEGFNCYFPLQSYGFQPTNGVGYQPYRVVVLSFELLHAPATVCGPKKSTNLVKNKCVNFNFNGLTGTGVLTESNKKFLPFQQFGRDIADTTDAVRDPQTLEILDITPCSFGGVSVITPGTNTSNQVAVLYQGVNCTEVPVAIHADQLTPTWRVYSTGSNVFQTRAGCLIGAEHVNNSYECDIPIGAGICASYQTQTNSPRRARSVASQSIIAYTMSLGAENSVAYSNNSIACPTNFTISVTTEILPVSMTKTSVDCTMYICGDSTECSNLLLQYGSFCTQLNRALTGIAVEQDKNTQEVFAQVKQIYKTPPIKDFGGFNFSQILPDPSKPSKRSFIEDLLFNKVTLADAGFIKQYGDCLGDIAARDLICAQKFNGLTVLPPLLTDEMIAQYTSALLAGTITSGWTFGAGAALQIPFAMQMAYRFNGIGVTQNVLYENQKLIANQFNSAIGKIQDSLSSTASALGKLQDVVNQNAQALNTLVKQLSSNFGAISSVLNDILSRLDKVEAEVQIDRLITGRLQSLQTYVTQQLIRAAEIRASANLAATKMSECVLGQSKRVDFCGKGYHLMSFPQSAPHGVVFLHVTYVPAQEKNFTTAPAICHDGKAHFPREGVFVSNGTHWFVTQRNFCEPQIITTDNTFVSGNCDVVIGIVNNTVYDPLQPELDSFKEELDKYFKNHTSPDVDLGDISGINASVVNIQKEIDRLNEVAKNLNESLIDLQELGKYEQYIKGGGGSDIDPYKEFGSSYQLLNFLPLDFFPDLNALVDTATALYEEELTGREHCSPHHTAIRQALVCWDELTKLIAWMSSNITSEQVRTIIVNHVNDTWGLKVRQSLWFHLSCLTFGQHTVQEFLVSFGVWIRTPAPYRPPNAPILSTLPEHTVIC

SEQ ID NO: 7103 - protein, 1364 aa, Artificial Sequence
  SARS-CoV-2/India/1-27/2020__EPI_ISL_413522 spike protein (1-1210)(I713C_Y1109C) WhcAg construct
MFVFLVLLPLVSSQCVNLTTRTQLPPAYTNSFTRGVYYPDKVFRSSVLHSTQDLFLPFFSNVTWFHAIHVSGTNGTKRFDNPVLPFNDGVYFASTEKSNIIRGWIFGTTLDSKTQSLLIVNNATNVVIKVCEFQFCNDPFLGVYHKNNKSWMESEFRVYSSANNCTFEYVSQPFLMDLEGKQGNFKNLREFVFKNIDGYFKIYSKHTPINLVRDLPQGFSALEPLVDLPIGINITRFQTLLALHRSYLTPGDSSSGWTAGAAAYYVGYLQPRTFLLKYNENGTITDAVDCALDPLSETKCTLKSFTVEKGIYQTSNFRVQPTESIVRFPNITNLCPFGEVFNATRFASVYAWNRKRISNCVADYSVLYNSASFSTFKCYGVSPTKLNDLCFTNVYADSFVIRGDEVIQIAPGQTGKIADYNYKLPDDFTGCVIAWNSNNLDSKVGGNYNYLYRLFRKSNLKPFERDISTEIYQAGSTPCNGVEGFNCYFPLQSYGFQPTNGVGYQPYRVVVLSFELLHAPATVCGPKKSTNLVKNKCVNFNFNGLTGTGVLTESNKKFLPFQQFGRDIADTTDAVRDPQTLEILDITPCSFGGVSVITPGTNTSNQVAVLYQDVNCTEVPVAIHADQLTPTWRVYSTGSNVFQTRAGCLIGAEHVNNSYECDIPIGAGICASYQTQTNSPRRARSVASQSIIAYTMSLGAENSVAYSNNSIACPTNFTISVTTEILPVSMTKTSVDCTMYICGDSTECSNLLLQYGSFCTQLNRALTGIAVEQDKNTQEVFAQVKQIYKTPPIKDFGGFNFSQILPDPSKPSKRSFIEDLLFNKVTLADAGFIKQYGDCLGDIAARDLICAQKFNGLTVLPPLLTDEMIAQYTSALLAGTITSGWTFGAGAALQIPFAMQMAYRFNGIGVTQNVLYENQKLIANQFNSAIGKIQDSLSSTASALGKLQDVVNQNAQALNTLVKQLSSNFGAISSVLNDILSRLDKVEAEVQIDRLITGRLQSLQTYVTQQLIRAAEIRASANLAATKMSECVLGQSKRVDFCGKGYHLMSFPQSAPHGVVFLHVTYVPAQEKNFTTAPAICHDGKAHFPREGVFVSNGTHWFVTQRNFCEPQIITTDNTFVSGNCDVVIGIVNNTVYDPLQPELDSFKEELDKYFKNHTSPDVDLGDISGINASVVNIQKEIDRLNEVAKNLNESLIDLQELGKYEQYIKGGGGSDIDPYKEFGSSYQLLNFLPLDFFPDLNALVDTATALYEEELTGREHCSPHHTAIRQALVCWDELTKLIAWMSSNITSEQVRTIIVNHVNDTWGLKVRQSLWFHLSCLTFGQHTVQEFLVSFGVWIRTPAPYRPPNAPILSTLPEHTVIC

SEQ ID NO: 7104 - protein, 1359 aa, Artificial Sequence
  SARS-CoV-2/pangolin/Guangxi/P4L/2017__EPI_ISL_410538 spike protein (1-1205)(I708C_Y1104C) WhcAg construct
MFVFLFVLPLVSSQCVNLTTRTGIPPGYTNSSTRGVYYPDKVFRSSILHLTQDLFLPFFSNVTWFNTINYQGGFKKFDNPVLPFNDGVYFASTEKSNIIRGWIFGTTLDARTQSLLIVNNATNVVIKVCEFQFCTDPFLGVYYHNNNKTWVENEFRVYSSANNCTFEYISQPFLMDLEGKQGNFKNLREFVFKNVDGYFKIYSKHTPIDLVRDLPRGFAALEPLVDLPIGINITRFQTLLALHRSYLTPGNLESGWTTGAAAYYVGYLQQRTFLLSYNQNGTITDAVDCSLDPLSETKCTLKSLTVEKGIYQTSNFRVQPTISIVRFPNITNLCPFGEVFNASKFASVYAWNRKRISNCVADYSVLYNSTSFSTFKCYGVSPTKLNDLCFTNVYADSFVVKGDEVRQIAPGQTGVIADYNYKLPDDFTGCVIAWNSVKQDALTGGNYGYLYRLFRKSKLKPFERDISTEIYQAGSTPCNGQVGLNCYYPLERYGFHPTTGVNYQPFRVVVLSFELLNGPATVCGPKLSTTLVKDKCVNFNFNGLTGTGVLTTSKKQFLPFQQFGRDISDTTDAVRDPQTLEILDITPCSFGGVSVITPGTNTSNQVAVLYQDVNCTEVPMAIHAEQLTPAWRVYSAGANVFQTRAGCLVGAEHVNNSYECDIPVGAGICASYHSMSSLRSVNQRSIIAYTMSLGAENSVAYSNNSIACPTNFTISVTTEILPVSMTKTSVDCTMYICGDSIECSNLLLQYGSFCTQLNRALTGIAVEQDKNTQEVFAQVKQIYKTPPIKDFGGFNFSQILPDPSKPSKRSFIEDLLFNKVTLADAGFIKQYGDCLGDIAARDLICAQKFNGLTVLPPLLTDEMIAQYTSALLAGTITSGWTFGAGAALQIPFAMQMAYRFNGIGVTQNVLYENQKLIANQFNSAIGKIQDSLSSTASALGKLQDVVNQNAQALNTLVKQLSSNFGAISSVLNDILSRLDKVEAEVQIDRLITGRLQSLQTYVTQQLIRAAEIRASANLAATKMSECVLGQSKRVDFCGKGYHLMSFPQSAPHGVVFLHVTYVPAQEKNFTTAPAICHEGKAHFPREGVFVSNGTHWFITQRNFCEPQIITTDNTFVSGSCDVVIGIVNNTVYDPLQPELDSFKEELDKYFKNHTSPDVDLGDISGINASVVNIQKEIDRLNEVAKNLNESPIDLQELGKYEQYIKGGGGSDIDPYKEFGSSYQLLNFLPLDFFPDLNALVDTATALYEEELTGREHCSPHHTAIRQALVCWDELTKLIAWMSSNITSEQVRTIIVNHVNDTWGLKVRQSLWFHLSCLTFGQHTVQEFLVSFGVWIRTPAPYRPPNAPILSTLPEHTVIC

SEQ ID NO: 7105 - protein, 1359 aa, Artificial Sequence
  SARS-CoV-2/pangolin/Guangxi/P5L/2017__EPI_ISL_410540 spike protein (1-1205)(I708C_Y1104C) WhcAg construct
MFVFLFVLPLVSSQCVNLTTRTGIPPGYTNSSTRGVYYPDKVFRSSILHLTQDLFLPFFSNVTWFNTINYQGGFKKFDNPVLPFNDGVYFASTEKSNIIRGWIFGTTLDARTQSLLIVNNATNVVIKVCEFQFCTDPFLGVYYHNNNKTWVENEFRVYSSANNCTFEYISQPFLMDLEGKQGNFKNLREFVFKNVDGYFKIYSKHTPIDLVRDLPRGFAALEPLVDLPIGINITRFQTLLALHRSYLTPGKLESGWTTGAAAYYVGYLQQRTFLLSYNQNGTITDAVDCSLDPLSETKCTLKSLTVEKGIYQTSNFRVQPTISIVRFPNITNLCPFGEVFNASKFASVYAWNRKRISNCVADYSVLYNSTSFSTFKCYGVSPTKLNDLCFTNVYADSFVVKGDEVRQIAPGQTGVIADYNYKLPDDFTGCVIAWNSVKQDALTGGNYGYLYRLFRKSKLKPFERDISTEIYQAGSTPCNGQVGLNCYYPLERYGFHPTTGVNYQPFRVVVLSFELLNGPATVCGPKLSTTLVKDKCVNFNFNGLTGTGVLTTSKKQFLPFQQFGRDISDTTDAVRDPQTLEILDITPCSFGGVSVITPGTNTSNQVAVLYQDVNCTEVPMAIHAEQLTPAWRVYSAGANVFQTRAGCLVGAEHVNNSYECDIPVGAGICASYHSMSSFRSVNQRSIIAYTMSLGAENSVAYSNNSIACPTNFTISVTTEILPVSMTKTSVDCTMYICGDSIECSNLLLQYGSFCTQLNRALTGIAVEQDKNTQEVFAQVKQIYKTPPIKDFGGFNFSQILPDPSKPSKRSFIEDLLFNKVTLADAGFIKQYGDCLGDIAARDLICAQKFNGLTVLPPLLTDEMIAQYTSALLAGTITSGWTFGAGAALQIPFAMQMAYRFNGIGVTQNVLYENQKLIANQFNSAIGKIQDSLSSTASALGKLQDVVNQNAQALNTLVKQLSSNFGAISSVLNDILSRLDKVEAEVQIDRLITGRLQSLQTYVTQQLIRAAEIRASANLAATKMSECVLGQSKRVDFCGKGYHLMSFPQSAPHGVVFLHVTYVPAQEKNFTTAPAICHEGKAHFPREGVFVSNGTHWFITQRNFCEPQIITTDNTFVSGSCDVVIGIVNNTVYDPLQPELDSFKEELDKYFKNHTSPDVDLGDISGINASVVNIQKEIDRLNEVAKNLNESLIDLQELGKYEQYIKGGGGSDIDPYKEFGSSYQLLNFLPLDFFPDLNALVDTATALYEEELTGREHCSPHHTAIRQALVCWDELTKLIAWMSSNITSEQVRTIIVNHVNDTWGLKVRQSLWFHLSCLTFGQHTVQEFLVSFGVWIRTPAPYRPPNAPILSTLPEHTVIC

SEQ ID NO: 7106 - protein, 1359 aa, Artificial Sequence
  SARS-CoV-2/pangolin/Guangxi/P5E/2017__EPI_ISL_410541 spike protein (1-1205)(I708C_Y1104C) WhcAg construct
MFVFLFVLPLVSSQCVNLTTRTGIPPGYTNSSTRGVYYPDKVFRSSILHLTQDLFLPFFSNVTWFNTITYQGGSKKFDNPVLPFNDGVYFASTEKSNIIRGWIFGTTLDARTQSLLIVNNATNVVIKVCEFQFCTDPFLGVYYHNNNKTWVENEFRVYSSANNCTFEYISQPFLMDLEGKQGNFKNLREFVFKNVDGYFKIYSKHTPIDLVRDLPRGFAALEPLVDLPIGINITRFQTLLALHRSYLTPGKLESGWTTGAAAYYVGYLQQRTFLLSYNQNGTITDAVDCSLDPLSETKCTLKSLTVEKGIYQTSNFRVQPTISIVRFPNITNLCPFGEVFNASKFASVYAWNRKRISNCVADYSVLYNSTSFSTFKCYGVSPTKLNDLCFTNVYADSFVVKGDEVRQIAPGQTGVIADYNYKLPDDFTGCVIAWNSVKQDALTGDNYGYLYRLFRKSKLKPFERDISTEIYQAGSTPCNGQVGLNCYYPLERYGFHPTTGVNYQPFRVVVLSFELLNGPATVCGPKLSTTLVKDKCVNFNFNGLTGTGVLTTSKKQFLPFQQFGRDISDTTDAVRDPQTLEILDITPCSFGGVSVITPGTNTSNQVAVLYQDVNCTEVPMAIHAEQLTPAWRVYSAGANVFQTRAGCLVGAEHVNNSYECDIPVGAGICASYHSMSSFRSVNQRSIIAYTMSLGAENSVAYSNNSIACPTNFTISVTTEILPVSMTKTSVDCTMYICGDSIECSNLLLQYGSFCTQLNRALTGIAVEQDKNTQEVFAQVKQIYKTPPIKDFGGFNFSQILPDPSKPSKRSFIEDLLFNKVTLADAGFIKQYGDCLGDIAARDLICAQKFNGLTVLPPLLTDEMIAQYTSALLAGTITSGWTFGAGAALQIPFAMQMAYRFNGIGVTQNVLYENQKLIANQFNSAIGKIQDSLSSTASALGKLQDVVNQNAQALNTLVKQLSSNFGAISSVLNDILSRLDKVEAEVQIDRLITGRLQSLQTYVTQQLIRAAEIRASANLAATKMSECVLGQSKRVDFCGKGYHLMSFPQSAPHGVVFLHVTYVPAQEKNFTTAPAICHEGKAHFPREGVFVSNGTHWFITQRNFCEPQIITTDNTFVSGSCDVVIGIVNNTVYDPLQPELDSFKEELDKYFKNHTSPDVDLGDISGINASVVNIQKEIDRLNEVAKNLNESLIDLQELGKYEQYIKGGGGSDIDPYKEFGSSYQLLNFLPLDFFPDLNALVDTATALYEEELTGREHCSPHHTAIRQALVCWDELTKLIAWMSSNITSEQVRTIIVNHVNDTWGLKVRQSLWFHLSCLTFGQHTVQEFLVSFGVWIRTPAPYRPPNAPILSTLPEHTVIC

SEQ ID NO: 7107 - protein, 1357 aa, Artificial Sequence
  SARS-CoV-2/pangolin/Guangxi/P1E/2017__EPI_ISL_410539 spike protein (1-1203)(I706C_Y1102C) WhcAg construct
MFVFLFVLPLVSSQCVNLTTRTGIQPGYTNSSTRGVYYPDKVFRSSILHLTQDLFLPFFSNVTWFNTINYQGGFKKFDNPVLPFNDGVYFASTEKSNIIRGWIFGTTLDARTQSLLIVNNATNVVIKVCEFQFCTDPFLGVYYHNNNKTWVENEFRVYSSANNCTFEYISQPFLMDLEGKQGNFKNLREFVFKNVDGYFKIYSKHTPIDLVRDLPRGFAALEPLVDLPIGINITRFQTLLALHRSYLTPGKLESGWTTGAAAYYVGYLQQRTFLLSYNQNGTITDAVDCSLDPLSETKCTLKSLTVEKGIYQTSNFRVQPTISIVRFPNITNLCPFGEVFNASKFASVYAWNRKRISNCVADYSVLYNSTSFSTFKCYGVSPTKLNDLCFTNVYADSFVVKGDEVRQIAPGQTGVIADYNYKLPDDFTGCVIAWNSVKQDALTGGNYLYRLFRKSKLKPFERDISTEIYQAGSTPCNGQVGLNCYYPLERYGFHPTTGVNYQPFRVVVLSFELLNGPATVCGPKLSTTLVKDKCVNFNFNGLTGTGVLTTSKKQFLPFQQFGRDISDTTDAVRDPQTLEILDITPCSFGGVSVITPGTNTSNQVAVLYQDVNCTEVPMAIHAEQLTPAWRVYSAGANVFQTRAGCLVGAEHVNNSYECDIPVGAGICASYHSMSSLRSVNQRSIIAYTMSLGAENSVAYSNNSIACPTNFTISVTTEILPVSMTKTSVDCTMYICGDSIECSNLLLQYGSFCTQLNRALTGIAVEQDKNTQEVFAQVKQIYKTPPIKDFGGFNFSQILPDPSKPSKRSFIEDLLFNKVTLADAGFIKQYGDCLGDIAARDLICAQKFNGLTVLPPLLTDEMIAQYTSALLAGTITSGWTFGAGAALQIPFAMQMAYRFNGIGVTQNVLYENQKLIANQFNSAIGKIQDSLSSTASALGKLQDVVNQNAQALNTLVKQLSSNFGAISSVLNDILSRLDKVEAEVQIDRLITGRLQSLQTYVTQQLIRAAEIRASANLAATKMSECVLGQSKRVDFCGKGYHLMSFPQSAPHGVVFLHVTYVPAQEKNFTTAPAICHEGKAHFPREGVFVSNGTHWFITQRNFCEPQIITTDNTFVSGSCDVVIGIVNNTVYDPLQPELDSFKEELDKYFKNHTSPDVDLGDISGINASVVNIQKEIDRLNEVAKNLNESLIDLQELGKYEQYIKGGGGSDIDPYKEFGSSYQLLNFLPLDFFPDLNALVDTATALYEEELTGREHCSPHHTAIRQALVCWDELTKLIAWMSSNITSEQVRTIIVNHVNDTWGLKVRQSLWFHLSCLTFGQHTVQEFLVSFGVWIRTPAPYRPPNAPILSTLPEHTVIC

SEQ ID NO: 7108 - protein, 1365 aa, Artificial Sequence
  SARS-CoV-2/Wuhan/WIV05/2019__EPI_ISL_402128 spike protein (1-1211)(P715C_P1069C) WhcAg construct
MFVFLVLLPLVSSQCVNLTTRTQLPPAYTNSFTRGVYYPDKVFRSSVLHSTQDLFLPFFSNVTWFHAIHVSGTNGTKRFDNPVLPFNDGVYFASTEKSNIIRGWIFGTTLDSKTQSLLIVNNATNVVIKVCEFQFCNDPFLGVYYHKNNKSWMESEFRVYSSANNCTFEYVSQPFLMDLEGKQGNFKNLREFVFKNIDGYFKIYSKHTPINLVRDLPQGFSALEPLVDLPIGINITRFQTLLALHRSYLTPGDSSSGWTAGAAAYYVGYLQPRTFLLKYNENGTITDAVDCALDPLSETKCTLKSFTVEKGIYQTSNFRVQPTESIVRFPNITNLCPFGEVFNATRFASVYAWNRKRISNCVADYSVLYNSASFSTFKCYGVSPTKLNDLCFTNVYADSFVIRGDEVRQIAPGQTGKIADYNYKLPDDFTGCVIAWNSNNLDSKVGGNYNYLYRLFRKSNLKPFERDISTEIYQAGSTPCNGVEGFNCYFPLQSYGFQPTNGVGYQPYRVVVLSFELLHAPATVCGPKKSTNLVKNKCVNFNFNGLTGTGVLTESNKKFLPFQQFGRDIADTTDAVRDPQTLEILDITPCSFGGVSVITPGTNTSNQVAVLYQDVNCTEVPVAIHADQLTPTWRVYSTGSNVFQTRAGCLIGAEHVNNSYECDIPIGAGICASYQTQTNSPRRARSVASQSIIAYTMSLGAENSVAYSNNSIAICTNFTISVTTEILPVSMTKTSVDCTMYICGDSTECSNLLLQYGSFCTQLNRALTGIAVEQDKNTQEVFAQVKQIYKTPPIKDFGGFNFSQILPDPSKPSKRSFIEDLLFNKVTLADAGFIKQYGDCLGDIAARDLICAQKFNGLTVLPPLLTDEMIAQYTSALLAGTITSGWTFGAGAALQIPFAMQMAYRFNGIGVTQNVLYENQKLIANQFNSAIGKIQDSLSSTASALGKLQDVVNQNAQALNTLVKQLSSNFGAISSVLNDILSRLDKVEAEVQIDRLITGRLQSLQTYVTQQLIRAAEIRASANLAATKMSECVLGQSKRVDFCGKGYHLMSFPQSAPHGVVFLHVTYVCAQEKNFTTAPAICHDGKAHFPREGVFVSNGTHWFVTQRNFYEPQIITTDNTFVSGNCDVVIGIVNNTVYDPLQPELDSFKEELDKYFKNHTSPDVDLGDISGINASVVNIQKEIDRLNEVAKNLNESLIDLQELGKYEQYIKGGGGSDIDPYKEFGSSYQLLNFLPLDFFPDLNALVDTATALYEEELTGREHCSPHHTAIRQALVCWDELTKLIAWMSSNITSEQVRTIIVNHVNDTWGLKVRQSLWFHLSCLTFGQHTVQEFLVSFGVWIRTPAPYRPPNAPILSTLPEHTVIC

SEQ ID NO: 7109 - protein, 1361 aa, Artificial Sequence
  SARS-CoV-2/bat/Yunnan/RaTG13/2013__EPI_ISL_402131 spike protein (1-1207)(P711C_P1065C) WhcAg construct
MFVFLVLLPLVSSQCVNLTTRTQLPPAYTNSSTRGVYYPDKVFRSSVLHLTQDLFLPFFSNVTWFHAIHVSGTNGIKRFDNPVLPFNDGVYFASTEKSNIIRGWIFGTTLDSKTQSLLIVNNATNVVIKVCEFQFCNDPFLGVYYHKNNKSWMESEFRVYSSANNCTFEYVSQPFLMDLEGKQGNFKNLREFVFKNIDGYFKIYSKHTPINLVRDLPPGFSALEPLVDLPIGINITRFQTLLALHRSYLTPGDSSSGWTAGAAAYYVGYLQPRTFLLKYNENGTITDAVDCALDPLSETKCTLKSFTVEKGIYQTSNFRVQPTDSIVRFPNITNLCPFGEVFNATTFASVYAWNRKRISNCVADYSVLYNSTSFSTFKCYGVSPTKLNDLCFTNVYADSFVITGDEVRQIAPGQTGKIADYNYKLPDDFTGCVIAWNSKHIDAKEGGNFNYLYRLFRKANLKPFERDISTEIYQAGSKPCNGQTGLNCYYPLYRYGFYPTDGVGHQPYRVVVLSFELLNAPATVCGPKKSTNLVKNKCVNFNFNGLTGTGVLTESNKKFLPFQQFGRDIADTTDAVRDPQTLEILDITPCSFGGVSVITPGTNASNQVAVLYQDVNCTEVPVAIHADQLTPTWRVYSTGSNVFQTRAGCLIGAEHVNNSYECDIPIGAGICASYQTQTNSRSVASQSIIAYTMSLGAENSVAYSNNSIAICTNFTISVTTEILPVSMTKTSVDCTMYICGDSTECSNLLLQYGSFCTQLNRALTGIAVEQDKNTQEVFAQVKQIYKTPPIKDFGGFNFSQILPDPSKPSKRSFIEDLLFNKVTLADAGFIKQYGDCLGDIAARDLICAQKFNGLTVLPPLLTDEMIAQYTSALLAGTITSGWTFGAGAALQIPFAMQMAYRFNGIGVTQNVLYENQKLIANQFNSAIGKIQDSLSSTASALGKLQDVVNQNAQALNTLVKQLSSNFGAISSVLNDILSRLDKVEAEVQIDRLITGRLQSLQTYVTQQLIRAAEIRASANLAATKMSECVLGQSKRVDFCGKGYHLMSFPQSAPHGVVFLHVTYVCAQEKNFTTAPAICHDGKAHFPREGVFVSNGTHWFVTQRNFYEPQIITTDNTFVSGSCDVVIGIVNNTVYDPLQPELDSFKEELDKYFKNHTSPDVDLGDISGINASVVNIQKEIDRLNEVAKNLNESLIDLQELGKYEQYIKGGGGSDIDPYKEFGSSYQLLNFLPLDFFPDLNALVDTATALYEEELTGREHCSPHHTAIRQALVCWDELTKLIAWMSSNITSEQVRTIIVNHVNDTWGLKVRQSLWFHLSCLTFGQHTVQEFLVSFGVWIRTPAPYRPPNAPILSTLPEHTVIC

SEQ ID NO: 7110 - protein, 1365 aa, Artificial Sequence
  SARS-CoV-2/Wuhan/HBCDC-HB-01/2019__EPI_ISL_402132 spike protein (1-1211)(P715C_P1069C) WhcAg construct
MFVFLVLLPLVSSQCVNLTTRTQLPPAYTNSITRGVYYPDKVFRSSVLHSTQDLFLPFFSNVTWFHAIHVSGTNGTKRFDNPVLPFNDGVYFASTEKSNIIRGWIFGTTLDSKTQSLLIVNNATNVVIKVCEFQFCNDPFLGVYYHKNNKSWMESEFRVYSSANNCTFEYVSQPFLMDLEGKQGNFKNLREFVFKNIDGYFKIYSKHTPINLVRDLPQGFSALEPLVDLPIGINITRFQTLLALHRSYLTPGDSSSGWTAGAAAYYVGYLQPRTFLLKYNENGTITDAVDCALDPLSETKCTLKSFTVEKGIYQTSNFRVQPTESIVRFPNITNLCPFGEVFNATRFASVYAWNRKRISNCVADYSVLYNSASFSTFKCYGVSPTKLNDLCFTNVYADSFVIRGDEVRQIAPGQTGKIADYNYKLPDDFTGCVIAWNSNNLDSKVGGNYNYLYRLFRKSNLKPFERDISTEIYQAGSTPCNGVEGFNCYFPLQSYGFQPTNGVGYQPYRVVVLSFELLHAPATVCGPKKSTNLVKNKCVNFNFNGLTGTGVLTESNKKFLPFQQFGRDIADTTDAVRDPQTLEILDITPCSFGGVSVITPGTNTSNQVAVLYQDVNCTEVPVAIHADQLTPTWRVYSTGSNVFQTRAGCLIGAEHVNNSYECDIPIGAGICASYQTQTNSPRRARSVASQSIIAYTMSLGAENSVAYSNNSIAICTNFTISVTTEILPVSMTKTSVDCTMYICGDSTECSNLLLQYGSFCTQLNRALTGIAVEQDKNTQEVFAQVKQIYKTPPIKDFGGFNFSQILPDPSKPSKRSFIEDLLFNKVTLADAGFIKQYGDCLGDIAARDLICAQKFNGLTVLPPLLTDEMIAQYTSALLAGTITSGWTFGAGAALQIPFAMQMAYRFNGIGVTQNVLYENQKLIANQFNSAIGKIQDSLSSTASALGKLQDVVNQNAQALNTLVKQLSSNFGAISSVLNDILSRLDKVEAEVQIDRLITGRLQSLQTYVTQQLIRAAEIRASANLAATKMSECVLGQSKRVDFCGKGYHLMSFPQSAPHGVVFLHVTYVCAQEKNFTTAPAICHDGKAHFPREGVFVSNGTHWFVTQRNFYEPQIITTDNTFVSGNCDVVIGIVNNTVYDPLQPELDSFKEELDKYFKNHTSPDVDLGDISGINASVVNIQKEIDRLNEVAKNLNESLIDLQELGKYEQYIKGGGGSDIDPYKEFGSSYQLLNFLPLDFFPDLNALVDTATALYEEELTGREHCSPHHTAIRQALVCWDELTKLIAWMSSNITSEQVRTIIVNHVNDTWGLKVRQSLWFHLSCLTFGQHTVQEFLVSFGVWIRTPAPYRPPNAPILSTLPEHTVIC

SEQ ID NO: 7111 - protein, 1365 aa, Artificial Sequence
  SARS-CoV-2/Guangdong/20SF028/2020__EPI_ISL_403936 spike protein (1-1211)(P715C_P1069C) WhcAg construct
MFVFLVLLPLVSSQCVNLTTRTQLPPAYTNSFTRGVYYPDKVFRSSVLYSTQDLFLPFFSNVTWFHAIHVSGTNGTKRFDNPVLPFNDGVYFASTEKSNIIRGWIFGTTLDSKTQSLLIVNNATNVVIKVCEFQFCNDPFLGVYYHKNNKSWMESEFRVYSSANNCTFEYVSQPFLMDLEGKQGNFKNLREFVFKNIDGYFKIYSKHTPINLVRDLPQGFSALEPLVDLPIGINITRFQTLLALHRSYLTPGDSSSGWTAGAAAYYVGYLQPRTFLLKYNENGTITDAVDCALDPLSETKCTLKSFTVEKGIYQTSNFRVQPTESIVRFPNITNLCPFGEVFNATRFASVYAWNRKRISNCVADYSVLYNSASFSTFKCYGVSPTKLNDLCFTNVYADSFVIRGDEVRQIAPGQTGKIADYNYKLPDDFTGCVIAWNSNNLDSKVGGNYNYLYRLFRKSNLKPFERDISTEIYQAGSTPCNGVEGFNCYFPLQSYGFQPTNGVGYQPYRVVVLSFELLHAPATVCGPKKSTNLVKNKCVNFNFNGLTGTGVLTESNKKFLPFQQFGRDIADTTDAVRDPQTLEILDITPCSFGGVSVITPGTNTSNQVAVLYQDVNCTEVPVAIHADQLTPTWRVYSTGSNVFQTRAGCLIGAEHVNNSYECDIPIGAGICASYQTQTNSPRRARSVASQSIIAYTMSLGAENSVAYSNNSIAICTNFTISVTTEILPVSMTKTSVDCTMYICGDSTECSNLLLQYGSFCTQLNRALTGIAVEQDKNTQEVFAQVKQIYKTPPIKDFGGFNFSQILPDPSKPSKRSFIEDLLFNKVTLADAGFIKQYGDCLGDIAARDLICAQKFNGLTVLPPLLTDEMIAQYTSALLAGTITSGWTFGAGAALQIPFAMQMAYRFNGIGVTQNVLYENQKLIANQFNSAIGKIQDSLSSTASALGKLQDVVNQNAQALNTLVKQLSSNFGAISSVLNDILSRLDKVEAEVQIDRLITGRLQSLQTYVTQQLIRAAEIRASANLAATKMSECVLGQSKRVDFCGKGYHLMSFPQSAPHGVVFLHVTYVCAQEKNFTTAPAICHDGKAHFPREGVFVSNGTHWFVTQRNFYEPQIITTDNTFVSGNCDVVIGIVNNTVYDPLQPELDSFKEELDKYFKNHTSPDVDLGDISGINASVVNIQKEIDRLNEVAKNLNESLIDLQELGKYEQYIKGGGGSDIDPYKEFGSSYQLLNFLPLDFFPDLNALVDTATALYEEELTGREHCSPHHTAIRQALVCWDELTKLIAWMSSNITSEQVRTIIVNHVNDTWGLKVRQSLWFHLSCLTFGQHTVQEFLVSFGVWIRTPAPYRPPNAPILSTLPEHTVIC

SEQ ID NO: 7112 - protein, 1365 aa, Artificial Sequence
  SARS-CoV-2/Shenzhen/SZTH-001/2020__EPI_ISL_406592 spike protein (1-1211)(P715C_P1069C) WhcAg construct
MFVFLVLLPLVSSQCVNLTTRTQLPPAYTNSFTRGVYYPDKVFRSSVLHSTQDLFLPFFSNVTWFHAIHVSGTNGTKRFDNPVLPFNDGVYFASTEKSNIIRGWIFGTTLDSKTQSLLIVNNATNVVIKVCEFQFCNDPFLGVYYHKNNKSWMESEFRVYSSANNCTFEYVSQPFLMDLEGKQGNFKNLREFVFKNIDGYFKIYSKHTPINLVRDLPQGFSALEPLVDLPIGINITRFQTLLALHRSYLTPGDSSSGWTAGAAAYYVGYLQPRTFLLKYNENGTITDAVDCALDPLSETKCTLKSFTVEKGIYQTSNFRVQPTESIVRFPNITNLCPFGEVFNATRFASVYAWNRKRISNCVADYSVLYNSASFSTFKCYGVSPTKLNDLCFTNVYADSFVIRGDEVRQIAPGQTGKIADYNYKLPDDFTGCVIAWNSNNLDSKVGGNYNYLYRLFRKSNLKPFERDISTEIYQAGSTPCNGVEGFNCYFPLQSYGFQPTNGVGYQPYRVVVLSFELLHAPATVCGPKKSTNLVKNKCVNFNFNGLTGTGVLTESNKKFLPFQQFGRDIADTTDAVRDPQTLEILDITPCSFGGVSVITPGTNTSNQVAVLYQDVNCTEVPVAIHADQLTPTWRVYSTGSNVFQTRAGCLIGAEHVNNSYECDIPIGAGICASYQTQTNSPRRARSVASQSIIAYTMSLGAENSVAYSNNSIAICTNFTISVTTEILPVSMTKTSVDCTMYICGDSTECSNLLLQYGSFCTQLNRALTGIAVEQDKNTQEVFAQVKQIYKTPPIKDFGGFNFSQILPDPSKPSKRSFIEDLLFNKVTLADAGFIKQYGDCLGDIAARDLICAQKFNGLTVLPPLLTDEMIAQYTSALLAGTITSGWTFGAGAALQIPFAMQMAYRFNGIGVTQNVLYENQKLIANQFNSAIGKIQDSLSSTASALGKLQDVVNQNAQALNTLVKQLSSNFGAISSVLNDILSRLDKVEAEVQIDRLITGRLQSLQTYVTQQLIRAAEIRASANLAATKMSECVLGQSKRVDFCGKGYHLMSFPQSAPHGVVFLHVTYVCAQEKNFTTAPAICHDGKAHFPREGVFVSNGTHWFVTQRNFYEPQIITTDNTFVSGNCDVLIGIVNNTVYDPLQPELDSFKEELDKYFKNHTSPDVDLGDISGINASVVNIQKEIDRLNEVAKNLNESLIDLQELGKYEQYIKGGGGSDIDPYKEFGSSYQLLNFLPLDFFPDLNALVDTATALYEEELTGREHCSPHHTAIRQALVCWDELTKLIAWMSSNITSEQVRTIIVNHVNDTWGLKVRQSLWFHLSCLTFGQHTVQEFLVSFGVWIRTPAPYRPPNAPILSTLPEHTVIC

SEQ ID NO: 7113 - protein, 1365 aa, Artificial Sequence
  SARS-CoV-2/Shenzhen/SZTH-004/2020__EPI_ISL_406595 spike protein (1-1211)(P715C_P1069C) WhcAg construct
MFVFLVLLPLVSSQCVNLTTRTQLPPAYTNSFTRGVYYPDKVFRSSVLHSTQDLFLPFFSNVTWFHAIHVSGTNGTKRFDNPVLPFNDGVYFASTEKSNIIRGWIFGTTLDSKTQSLLIVNNATNVVIKVCEFQFCNDPFLGVYYHKNNKSWMESEFRVYSSANNCTFEYVSQPFLMDLEGKQGNFKNLREFVFKNIDGYFKIYSKHTPINLVRDLPQGFSALEPLVDLPIGINITRFQTLLALHRSYLTPGDSSSGWTAGAAAYYVGYLQPRTFLLKYNENGTITDAVDCALDPLSETKCTLKSFTVEKGIYQTSNFRVQPTESIVRFPNITNLCPFGEVFNATRFASVYAWDRKRISNCVAYYSVLYNSASFSTFKCYGVSPTKLNDLCFTNVYADSFVIRGDEVRQIAPGQTGKIADYNYKLPDDFTGCVIAWNSNNLDSKVGGNYNYLYRLFRKSNLKPFERDISTEIYQAGSTPCNGVEGFNCYFPLQSYGFQPTNGVGYQPYRVVVLSFELLHAPATVCGPKKSTNLVKNKCVNFNFNGLTGTGVLTESNKKFLPFQQFGRDIADTTDAVRDPQTLEILDITPCSFGGVSVITPGTNTSNQVAVLYQDVNCTEVPVAIHADQLTPTWRVYSTGSNVFQTRAGCLIGAEHVNNSYECDIPIGAGICASYQTQTNSPRRARSVASQSIIAYTMSLGAENSVAYSNNSIAICTNFTISVTTEILPVSMTKTSVDCTMYICGDSTECSNLLLQYGSFCTQLNRALTGIAVEQDKNTQEVFAQVKQIYKTPPIKDFGGFNFSQILPDPSKPSKRSFIEDLLFNKVTLADAGFIKQYGDCLGDIAARDLICAQKFNGLTVLPPLLTDEMIAQYTSALLAGTITSGWTFGAGAALQIPFAMQMAYRFNGIGVTQNVLYENQKLIANQFNSAIGKIQDSLSSTASALGKLQDVVNQNAQALNTLVKQLSSNFGAISSVLNDILSRLDKVEAEVQIDRLITGRLQSLQTYVTQQLIRAAEIRASANLAATKMSECVLGQSKRVDFCGKGYHLMSFPQSAPHGVVFLHVTYVCAQEKNFTTAPAICHDGKAHFPREGVFVSNGTHWFVTQRNFYEPQIITTDNTFVSGNCDVVIGIVNNTVYDPLQPELDSFKEELDKYFKNHTSPDVDLGDISGINASVVNIQKEIDRLNEVAKNLNESLIDLQELGKYEQYIKGGGGSDIDPYKEFGSSYQLLNFLPLDFFPDLNALVDTATALYEEELTGREHCSPHHTAIRQALVCWDELTKLIAWMSSNITSEQVRTIIVNHVNDTWGLKVRQSLWFHLSCLTFGQHTVQEFLVSFGVWIRTPAPYRPPNAPILSTLPEHTVIC

SEQ ID NO: 7114 - protein, 1365 aa, Artificial Sequence
  SARS-CoV-2/France/IDF0372/2020__EPI_ISL_406596 spike protein (1-1211)(P715C_P1069C) WhcAg construct
MFVFLVLLPLVSSQCVNLTTRTQLPPAYTNSFTRGVYYPDKVFRSSVLHSTQDLFLPFFSNVTWFHAIHVSGTNGTKRFDNPVLPFNDGVYFASTEKSNIIRGWIFGTTLDSKTQSLLIVNNATNVVIKVCEFQFCNDPFLGVYYHKNNKSWMESEFRVYSSANNCTFEYVSQPFLMDLEGKQGNFKNLREFVFKNIDGYFKIYSKHTPINLVRDLPQGFSALEPLVDLPIGINITRFQTLLALHRSYLTPGDSSSGWTAGAAAYYVGYLQPRTFLLKYNENGTITDAVDCALDPLSETKCTLKSFTVEKGIYQTSNFRVQPTESIVRFPNITNLCPFGEVFNATRFASVYAWNRKRISNCVADYSFLYNSASFSTFKCYGVSPTKLNDLCFTNVYADSFVIRGDEVRQIAPGQTGKIADYNYKLPDDFTGCVIAWNSNNLDSKVGGNYNYLYRLFRKSNLKPFERDISTEIYQAGSTPCNGVEGFNCYFPLQSYGFQPTNGVGYQPYRVVVLSFELLHAPATVCGPKKSTNLVKNKCVNFNFNGLTGTGVLTESNKKFLPFQQFGRDIADTTDAVRDPQTLEILDITPCSFGGVSVITPGTNTSNQVAVLYQDVNCTEVPVAIHADQLTPTWRVYSTGSNVFQTRAGCLIGAEHVNNSYECDIPIGAGICASYQTQTNSPRRARSVASQSIIAYTMSLGAENSVAYSNNSIAICTNFTISVTTEILPVSMTKTSVDCTMYICGDSTECSNLLLQYGSFCTQLNRALTGIAVEQDKNTQEVFAQVKQIYKTPPIKDFGGFNFSQILPDPSKPSKRSFIEDLLFNKVTLADAGFIKQYGDCLGDIAARDLICAQKFNGLTVLPPLLTDEMIAQYTSALLAGTITSGWTFGAGAALQIPFAMQMAYRFNGIGVTQNVLYENQKLIANQFNSAIGKIQDSLSSTASALGKLQDVVNQNAQALNTLVKQLSSNFGAISSVLNDILSRLDKVEAEVQIDRLITGRLQSLQTYVTQQLIRAAEIRASANLAATKMSECVLGQSKRVDFCGKGYHLMSFPQSAPHGVVFLHVTYVCAQEKNFTTAPAICHDGKAHFPREGVFVSNGTHWFVTQRNFYEPQIITTDNTFVSGNCDVVIGIVNNTVYDPLQPELDSFKEELDKYFKNHTSPDVDLGDISGINASVVNIQKEIDRLNEVAKNLNESLIDLQELGKYEQYIKGGGGSDIDPYKEFGSSYQLLNFLPLDFFPDLNALVDTATALYEEELTGREHCSPHHTAIRQALVCWDELTKLIAWMSSNITSEQVRTIIVNHVNDTWGLKVRQSLWFHLSCLTFGQHTVQEFLVSFGVWIRTPAPYRPPNAPILSTLPEHTVIC

SEQ ID NO: 7115 - protein, 1365 aa, Artificial Sequence
  SARS-CoV-2/Australia/VIC01/2020__EPI_ISL_406844 spike protein (1-1211)(P715C_P1069C) WhcAg construct
MFVFLVLLPLVSSQCVNLTTRTQLPPAYTNSFTRGVYYPDKVFRSSVLHSTQDLFLPFFSNVTWFHAIHVSGTNGTKRFDNPVLPFNDGVYFASTEKSNIIRGWIFGTTLDSKTQSLLIVNNATNVVIKVCEFQFCNDPFLGVYYHKNNKSWMESEFRVYSSANNCTFEYVSQPFLMDLEGKQGNFKNLREFVFKNIDGYFKIYSKHTPINLVRDLPQGFSALEPLVDLPIGINITRFQTLLALHRRYLTPGDSSSGWTAGAAAYYVGYLQPRTFLLKYNENGTITDAVDCALDPLSETKCTLKSFTVEKGIYQTSNFRVQPTESIVRFPNITNLCPFGEVFNATRFASVYAWNRKRISNCVADYSVLYNSASFSTFKCYGVSPTKLNDLCFTNVYADSFVIRGDEVRQIAPGQTGKIADYNYKLPDDFTGCVIAWNSNNLDSKVGGNYNYLYRLFRKSNLKPFERDISTEIYQAGSTPCNGVEGFNCYFPLQSYGFQPTNGVGYQPYRVVVLSFELLHAPATVCGPKKSTNLVKNKCVNFNFNGLTGTGVLTESNKKFLPFQQFGRDIADTTDAVRDPQTLEILDITPCSFGGVSVITPGTNTSNQVAVLYQDVNCTEVPVAIHADQLTPTWRVYSTGSNVFQTRAGCLIGAEHVNNSYECDIPIGAGICASYQTQTNSPRRARSVASQSIIAYTMSLGAENSVAYSNNSIAICTNFTISVTTEILPVSMTKTSVDCTMYICGDSTECSNLLLQYGSFCTQLNRALTGIAVEQDKNTQEVFAQVKQIYKTPPIKDFGGFNFSQILPDPSKPSKRSFIEDLLFNKVTLADAGFIKQYGDCLGDIAARDLICAQKFNGLTVLPPLLTDEMIAQYTSALLAGTITSGWTFGAGAALQIPFAMQMAYRFNGIGVTQNVLYENQKLIANQFNSAIGKIQDSLSSTASALGKLQDVVNQNAQALNTLVKQLSSNFGAISSVLNDILSRLDKVEAEVQIDRLITGRLQSLQTYVTQQLIRAAEIRASANLAATKMSECVLGQSKRVDFCGKGYHLMSFPQSAPHGVVFLHVTYVCAQEKNFTTAPAICHDGKAHFPREGVFVSNGTHWFVTQRNFYEPQIITTDNTFVSGNCDVVIGIVNNTVYDPLQPELDSFKEELDKYFKNHTSPDVDLGDISGINASVVNIQKEIDRLNEVAKNLNESLIDLQELGKYEQYIKGGGGSDIDPYKEFGSSYQLLNFLPLDFFPDLNALVDTATALYEEELTGREHCSPHHTAIRQALVCWDELTKLIAWMSSNITSEQVRTIIVNHVNDTWGLKVRQSLWFHLSCLTFGQHTVQEFLVSFGVWIRTPAPYRPPNAPILSTLPEHTVIC

SEQ ID NO: 7116 - protein, 1365 aa, Artificial Sequence
  SARS-CoV-2/Germany/BavPat1/2020__EPI_ISL_406862 spike protein (1-1211)(P715C_P1069C) WhcAg construct
MFVFLVLLPLVSSQCVNLTTRTQLPPAYTNSFTRGVYYPDKVFRSSVLHSTQDLFLPFFSNVTWFHAIHVSGTNGTKRFDNPVLPFNDGVYFASTEKSNIIRGWIFGTTLDSKTQSLLIVNNATNVVIKVCEFQFCNDPFLGVYYHKNNKSWMESEFRVYSSANNCTFEYVSQPFLMDLEGKQGNFKNLREFVFKNIDGYFKIYSKHTPINLVRDLPQGFSALEPLVDLPIGINITRFQTLLALHRSYLTPGDSSSGWTAGAAAYYVGYLQPRTFLLKYNENGTITDAVDCALDPLSETKCTLKSFTVEKGIYQTSNFRVQPTESIVRFPNITNLCPFGEVFNATRFASVYAWNRKRISNCVADYSVLYNSASFSTFKCYGVSPTKLNDLCFTNVYADSFVIRGDEVRQIAPGQTGKIADYNYKLPDDFTGCVIAWNSNNLDSKVGGNYNYLYRLFRKSNLKPFERDISTEIYQAGSTPCNGVEGFNCYFPLQSYGFQPTNGVGYQPYRVVVLSFELLHAPATVCGPKKSTNLVKNKCVNFNFNGLTGTGVLTESNKKFLPFQQFGRDIADTTDAVRDPQTLEILDITPCSFGGVSVITPGTNTSNQVAVLYQGVNCTEVPVAIHADQLTPTWRVYSTGSNVFQTRAGCLIGAEHVNNSYECDIPIGAGICASYQTQTNSPRRARSVASQSIIAYTMSLGAENSVAYSNNSIAICTNFTISVTTEILPVSMTKTSVDCTMYICGDSTECSNLLLQYGSFCTQLNRALTGIAVEQDKNTQEVFAQVKQIYKTPPIKDFGGFNFSQILPDPSKPSKRSFIEDLLFNKVTLADAGFIKQYGDCLGDIAARDLICAQKFNGLTVLPPLLTDEMIAQYTSALLAGTITSGWTFGAGAALQIPFAMQMAYRFNGIGVTQNVLYENQKLIANQFNSAIGKIQDSLSSTASALGKLQDVVNQNAQALNTLVKQLSSNFGAISSVLNDILSRLDKVEAEVQIDRLITGRLQSLQTYVTQQLIRAAEIRASANLAATKMSECVLGQSKRVDFCGKGYHLMSFPQSAPHGVVFLHVTYVCAQEKNFTTAPAICHDGKAHFPREGVFVSNGTHWFVTQRNFYEPQIITTDNTFVSGNCDVVIGIVNNTVYDPLQPELDSFKEELDKYFKNHTSPDVDLGDISGINASVVNIQKEIDRLNEVAKNLNESLIDLQELGKYEQYIKGGGGSDIDPYKEFGSSYQLLNFLPLDFFPDLNALVDTATALYEEELTGREHCSPHHTAIRQALVCWDELTKLIAWMSSNITSEQVRTIIVNHVNDTWGLKVRQSLWFHLSCLTFGQHTVQEFLVSFGVWIRTPAPYRPPNAPILSTLPEHTVIC

SEQ ID NO: 7117 - protein, 1365 aa, Artificial Sequence
  SARS-CoV-2/Wuhan/HBCDC-HB-02/2020__EPI_ISL_412978 spike protein (1-1211)(P715C_P1069C) WhcAg construct
MFVFLVLLPLVSSQCVNLTTRTQLPPAYTNSFTRGVYYPDKVFRSSVLHSTQDLFLPFFSNVTWFHAIHVSGTNGTKRFDNPVLPFNDGVYFASTEKSNIIRGWIFGTTLDSKTQSLLIVNNATNVVIKVCEFQFCNDPFLGVYYHKNNKSWMESEFRVYSSANNCTFEYVSQPFLMDLEGKQGNFKNLREFVFKNIDGYFKIYSKHTPINLVRDLPQGFSALEPLVDLPIGINITRFQTLLALHRSYLTPGDSSSGWTAGAAAYYVGYLQPRTFLLKYNENGTITDAVDCALDPLSETKCTLKSFTVEKGIYQTSNFRVQPTESIVRFPNITNLCPFGEVFNATRFASVYAWNRKRISNCVADYSVLYNSASFSTFKCYGVSPTKLNDLCFTNVYADSFVIRGDEVRQIAPGQTGKIADYNYKLPDDFTGCVIAWNSNNLDSKVGGNYNYLYRLFRKSNLKPFERDISTEIYQAGSTPCNGVEGFNCYFPLQSYGFQPTNGVGYQPYRVVVLSFELLHAPATVCGPKKSTNLVKNKCVNFNFNGLTGTGVLTESNKKFLPFQQFGRDIADTTDAVRDPQTLEILDITPCSFGGVSVITPGTNTSNQVAVLYQDVNCTEVPVAIHADQLTPTWRVYSTGSNVFQTRAGCLIGAEHVNNSYECDIPIGAGICASYQTQTNSPRRARSVASQSIIAYTMSLGAENSVAYSNNSIAICTNFTISVTTEILPVSMTKTSVDCTMYICGDSTECSNFLLQYGSFCTQLNRALTGIAVEQDKNTQEVFAQVKQIYKTPPIKDFGGFNFSQILPDPSKPSKRSFIEDLLFNKVTLADAGFIKQYGDCLGDIAARDLICAQKFNGLTVLPPLLTDEMIAQYTSALLAGTITSGWTFGAGAALQIPFAMQMAYRFNGIGVTQNVLYENQKLIANQFNSAIGKIQDSLSSTASALGKLQDVVNQNAQALNTLVKQLSSNFGAISSVLNDILSRLDKVEAEVQIDRLITGRLQSLQTYVTQQLIRAAEIRASANLAATKMSECVLGQSKRVDFCGKGYHLMSFPQSAPHGVVFLHVTYVCAQEKNFTTAPAICHDGKAHFPREGVFVSNGTHWFVTQRNFYEPQIITTDNTFVSGNCDVVIGIVNNTVYDPLQPELDSFKEELDKYFKNHTSPDVDLGDISGINASVVNIQKEIDRLNEVAKNLNESLIDLQELGKYEQYIKGGGGSDIDPYKEFGSSYQLLNFLPLDFFPDLNALVDTATALYEEELTGREHCSPHHTAIRQALVCWDELTKLIAWMSSNITSEQVRTIIVNHVNDTWGLKVRQSLWFHLSCLTFGQHTVQEFLVSFGVWIRTPAPYRPPNAPILSTLPEHTVIC

SEQ ID NO: 7118 - protein, 1365 aa, Artificial Sequence
  SARS-CoV-2/Australia/QLD02/2020__EPI_ISL_407896 spike protein (1-1211)(P715C_P1069C) WhcAg construct
MFVFLVLLPLVSSQCVNLTTRTQLPPAYTNSFTRGVYYPDKVFRSSVLHSTQDLFLPFFSNVTWFHAIHVSGTNGTKRFDNPVLPFNDGVYFASTEKSNIIRGWIFGTTLDSKTQSLLIVNNATNVVIKVCEFQFCNDPFLGVYYHKNNKSWMESEFRVYSSANNCTFEYVSQPFLMDLEGKQGNFKNLREFVFKNIDGYFKIYSKHTPINLVRDLPQGFSALEPLVDLPIGINITRFQTLLALHRSYLTPGDSSSGWTAGAAAYYVGYLQPRTFLLKYNENGTITDAVDCALDPLSETKCTLKSFTVEKGIYQTSNFRVQPTESIVRFPNITNLCPFGEVFNATRFASVYAWNRKRISNCVADYSVLYNSASFSTFKCYGVSPTKLNDLCFTNVYADSFVIRGDEVRQIAPGQTGKIADYNYKLPDDFTGCVIAWNSNNLDSKVGGNYNYLYRLFRKSNLKPFERDISTEIYQAGSTPCNGVEGFNCYFPLQSYGFQPTNGVGYQPYRVVVLSFELLHAPATVCGPKKSTNLVKNKCVNFNFNGLTGTGVLTESNKKFLPFQQFGRDIADTTDAVRDPQTLEILDITPCSFGGVSVITPGTNTSNQVAVLYQDVNCTEVPVAIHADQLTPTWRVYSTGSNVFQTRAGCLIGAEHVNNSYECDIPIGAGICASYQTQTNSPRRARSVASQSIIAYTMSLGAENSVAYSNNSIAICTNFTISVTTEILPVSMTKTSVDCTMYICGDSTECSNLLLQYGSFCTQLNRALTGIAVEQDKNTQEVFAQVKQIYKTPPIKDFGGFNFSQILPDPSKPSKRSFIEDLLFNKVTLADAGFIKQYGDCLGDIAARDLICAQKFNGLTVLPPLLTDEMIAQYTSALLAGTITSGWTFGAGAALQIPFAMQMAYRFNGIGVTQNVLYENQKLIANQFNSAIGKIQDSLSSTASALGKLQDVVNQNAQALNTLVKQLSSNFGAISSVLNDILSRLDKVEAEVQIDRLITGRLQSLQTYVTQQLIRAAEIRASANLAATKMSECVLGQSKRVDFCGKGYHLMSFPQSAPHGVVFLHVTYVCAQEKNFTTAPAICHDGKAHFPREGVFVSNGTHWFVTQRNFYEPQIITTDNTFVSGNCDVVIGIVNNTVYDPLQLELDSFKEELDKYFKNHTSPDVDLGDISGINASVVNIQKEIDRLNEVAKNLNESLIDLQELGKYEQYIKGGGGSDIDPYKEFGSSYQLLNFLPLDFFPDLNALVDTATALYEEELTGREHCSPHHTAIRQALVCWDELTKLIAWMSSNITSEQVRTIIVNHVNDTWGLKVRQSLWFHLSCLTFGQHTVQEFLVSFGVWIRTPAPYRPPNAPILSTLPEHTVIC

SEQ ID NO: 7119 - protein, 1365 aa, Artificial Sequence
  SARS-CoV-2/India/1-31/2020__EPI_ISL_413523 spike protein (1-1211)(P715C_P1069C) WhcAg construct
MFVFLVLLPLVSSQCVNLTTRTQLPPAYTNSFTRGVYYPDKVFRSSVLHSTQDLFLPFFSNVTWFHAIHVSGTNGTKRFDNPVLPFNDGVYFASTEKSNIIRGWIFGTTLDSKTQSLLIVNNATNVVIKVCEFQFCNDPFLGVYYHKNNKSWMESEFRVYSSANNCTFEYVSQPFLMDLEGKQGNFKNLREFVFKNIDGYFKIYSKHTPINLVRDLPQGFSALEPLVDLPIGINITRFQTLLALHRSYLTPGDSSSGWTAGAAAYYVGYLQPRTFLLKYNENGTITDAVDCALDPLSETKCTLKSFTVEKGIYQTSNFRVQPTESIVRFPNITNLCPFGEVFNATRFASVYAWNRKRISNCVADYSVLYNSASFSTFKCYGVSPTKLNDLCFTNVYADSFVIRGDEVRQIAPGQTGKIADYNYKLPDDFTGCVIAWNSNNLDSKVGGNYNYLYRLFRKSNLKPFERDISTEIYQAGSTPCNGVEGFNCYFPLQSYGFQPTNGVGYQPYRVVVLSFELLHAPATVCGPKKSTNLVKNKCVNFNFNGLTGTGVLTESNKKFLPFQQFGRDIADTTDAVRDPQTLEILDITPCSFGGVSVITPGTNTSNQVAVLYQDVNCTEVPVAIHADQLTPTWRVYSTGSNVFQTRAGCLIGAEHVNNSYECDIPIGAGICASYQTQTNSPRRARSVASQSIIAYTMSLGAENSVAYSNNSIAICTNFTISVTTEILPVSMTKTSVDCTMYICGDSTECSNLLLQYGSFCTQLNRALTGIAVEQDKNTQEVFAQVKQIYKTPPIKDFGGFNFSQILPDPSKPSKRSFIEDLLFNKVTLADAGFIKQYGDCLGDIAARDLICAQKFNGLTVLPPLLTDEMIAQYTSALLAGTITSGWTFGAGAALQIPFAMQMAYRFNGIGVTQNVLYENQKLIANQFNSVIGKIQDSLSSTASALGKLQDVVNQNAQALNTLVKQLSSNFGAISSVLNDILSRLDKVEAEVQIDRLITGRLQSLQTYVTQQLIRAAEIRASANLAATKMSECVLGQSKRVDFCGKGYHLMSFPQSAPHGVVFLHVTYVCAQEKNFTTAPAICHDGKAHFPREGVFVSNGTHWFVTQRNFYEPQIITTDNTFVSGNCDVVIGIVNNTVYDPLQPELDSFKEELDKYFKNHTSPDVDLGDISGINASVVNIQKEIDRLNEVAKNLNESLIDLQELGKYEQYIKGGGGSDIDPYKEFGSSYQLLNFLPLDFFPDLNALVDTATALYEEELTGREHCSPHHTAIRQALVCWDELTKLIAWMSSNITSEQVRTIIVNHVNDTWGLKVRQSLWFHLSCLTFGQHTVQEFLVSFGVWIRTPAPYRPPNAPILSTLPEHTVIC

SEQ ID NO: 7120 - protein, 1365 aa, Artificial Sequence
  SARS-CoV-2/Guangdong/GD2020087-P0008/2020__EPI_ISL_413863 spike protein (1-1211)(P715C_P1069C) WhcAg construct
MFVFLVLLPLVSSQCVNLTTRTQLPPAYTNSFTRGVYYPDKVFRSSVLHSTQDLFLPFFSNVTWFHAIHVSGTNGTKRFDNPVLPFNDGVYFASTEKSNIIRGWIFGTTLDSKTQSLLIVNNATNVVIKVCEFQFCNDPFLGVYYHKNNKSWMESEFRVYSSANNCTFEYVSQPFLMDLEGKQGNFKNLREFVFKNIDGYFKIYSKHTPINLVRDLPQGFSALEPLVDLPIGINITRFQTLLALHRSYLTPGDSSSGWTAGAAAYYVGYLQPRTFLLKYNENGTITDAVDCALDPLSETKCTLKSFTVEKGIYQTSNFRVQPTESIVRFPNITNLCPFGEVFNATRFASVYAWNRKRISNCVADYSVLYNSASFSTFKCYGVSPTKLNDLCFTNVYADSFVIRGDEVREIAPGQTGKIADYNYKLPDDFTGCVIAWNSNNLDSKVGGNYNYLYRLFRKSNLKPFERDISTEIYQAGSTPCNGVEGFNCYFPLQSYGFQPTNGVGYQPYRVVVLSFELLHAPATVCGPKKSTNLVKNKCVNFNFNGLTGTGVLTESNKKFLPFQQFGRDIADTTDAVRDPQTLEILDITPCSFGGVSVITPGTNTSNQVAVLYQDVNCTEVPVAIHADQLTPTWRVYSTGSNVFQTRAGCLIGAEHVNNSYECDIPIGAGICASYQTQTNSPRRARSVASQSIIAYTMSLGAENSVAYSNNSIAICTNFTISVTTEILPVSMTKTSVDCTMYICGDSTECSNLLLQYGSFCTQLNRALTGIAVEQDKNTQEVFAQVKQIYKTPPIKDFGGFNFSQILPDPSKPSKRSFIEDLLFNKVTLADAGFIKQYGDCLGDIAARDLICAQKFNGLTVLPPLLTDEMIAQYTSALLAGTITSGWTFGAGAALQIPFAMQMAYRFNGIGVTQNVLYENQKLIANQFNSAIGKIQDSLSSTASALGKLQDVVNQNAQALNTLVKQLSSNFGAISSVLNDILSRLDKVEAEVQIDRLITGRLQSLQTYVTQQLIRAAEIRASANLAATKMSECVLGQSKRVDFCGKGYHLMSFPQSAPHGVVFLHVTYVCAQEKNFTTAPAICHDGKAHFPREGVFVSNGTHWFVTQRNFYEPQIITTDNTFVSGNCDVVIGIVNNTVYDPLQPELDSFKEELDKYFKNHTSPDVDLGDISGINASVVNIQKEIDRLNEVAKNLNESLIDLQELGKYEQYIKGGGGSDIDPYKEFGSSYQLLNFLPLDFFPDLNALVDTATALYEEELTGREHCSPHHTAIRQALVCWDELTKLIAWMSSNITSEQVRTIIVNHVNDTWGLKVRQSLWFHLSCLTFGQHTVQEFLVSFGVWIRTPAPYRPPNAPILSTLPEHTVIC

SEQ ID NO: 7121 - protein, 1365 aa, Artificial Sequence
  SARS-CoV-2/Sweden/01/2020__EPI_ISL_411951 spike protein (1-1211)(P715C_P1069C) WhcAg construct
MFVFLVLLPLVSSQCVNLTTRTQLPPAYTNSFTRGVYYPDKVFRSSVLHSTQDLFLPFFSNVTWFHAIHVSGTNGTKRFDNPVLPFNDGVYFASTEKSNIIRGWIFGTTLDSKTQSLLIVNNATNVVIKVCEFQFCNDPFLGVYYHKNNKSWMESEFRVYSSANNCTFEYVSQPFLMDLEGKQGNFKNLREFVFKNIDGYFKIYSKHTPINLVRDLPQGFSALEPLVDLPIGINITRFQTLLALHRSYLTPGDSSSGWTAGAAAYYVGYLQPRTFLLKYNENGTITDAVDCALDPLSETKCTLKSFTVEKGIYQTSNFRVQPTESIVRFPNITNLCPFGEVFNATRFASVYAWNRKRISNCVADYSVLYNSASFSTFKCYGVSPTKLNDLCFTNVYADSFVIRGDEVRQIAPGQTGKIADYNYKLPDDFTGCVIAWNSNNLDSKVGGNYNYLYRLFRKSNLKPFERDISTEIYQAGSTPCNGVEGFNCYFPLQSYGFQPTNGVGYQPYRVVVLSFELLHAPATVCGPKKSTNLVKNKCVNFNFNGLTGTGVLTESNKKFLPFQQFGRDIADTTDAVRDPQTLEILDITPCSFGGVSVITPGTNTSNQVAVLYQDVNCTEVPVAIHADQLTPTWRVYSTGSNVFQTRAGCLIGAEHVNNSYECDIPIGAGICASYQTQTNSPRRARSVASQSIIAYTMSLGAENSVAYSNNSIAICTNFTISVTTEILPVSMTKTSVDCTMYICGDSTECSNLLLQYGSFCTQLNRALTGIAVEQDKNTQEVFAQVKQIYKTPPIKDCGGFNFSQILPDPSKPSKRSFIEDLLFNKVTLADAGFIKQYGDCLGDIAARDLICAQKFNGLTVLPPLLTDEMIAQYTSALLAGTITSGWTFGAGAALQIPFAMQMAYRFNGIGVTQNVLYENQKLIANQFNSAIGKIQDSLSSTASALGKLQDVVNQNAQALNTLVKQLSSNFGAISSVLNDILSRLDKVEAEVQIDRLITGRLQSLQTYVTQQLIRAAEIRASANLAATKMSECVLGQSKRVDFCGKGYHLMSFPQSAPHGVVFLHVTYVCAQEKNFTTAPAICHDGKAHFPREGVFVSNGTHWFVTQRNFYEPQIITTDNTFVSGNCDVVIGIVNNTVYDPLQPELDSFKEELDKYFKNHTSPDVDLGDISGINASVVNIQKEIDRLNEVAKNLNESLIDLQELGKYEQYIKGGGGSDIDPYKEFGSSYQLLNFLPLDFFPDLNALVDTATALYEEELTGREHCSPHHTAIRQALVCWDELTKLIAWMSSNITSEQVRTIIVNHVNDTWGLKVRQSLWFHLSCLTFGQHTVQEFLVSFGVWIRTPAPYRPPNAPILSTLPEHTVIC

SEQ ID NO: 7122 - protein, 1365 aa, Artificial Sequence
  SARS-CoV-2/Tianmen/HBCDC-HB-07/2020__EPI_ISL_412983 spike protein (1-1211)(P715C_P1069C) WhcAg construct
MFVFLVLLPLVSSQCVNLTTRTQLPPAYTNSFTRGVYYPDKVFRSSVLHSTQDLFLPFFSNVTWFHAIHVSGTNGTKRFDNPVLPFNDGVYFASTEKSNIIRGWIFGTTLDSKTQSLLIVNNATNVVIKVCEFQFCNDPFLGVYYHKNNKSWMESEFRVYSSANNCTFEYVSQPFLMDLEGKQGNFKNLREFVFKNIDGYFKIYSKHTPINLVRDLPQGFSALEPLVDLPIGINITRFQTLLALHRSYLTPGDSSSGWTAGAAAYYVGYLQPRTFLLKYNENGTITDAVDCALDPLSETKCTLKSFTVEKGIYQTSNFRVQPTESIVRFPNITNLCPFGEVFNATRFASVYAWNRKRISNCVADYSVLYNSASFSTFKCYGVSPTKLNDLCFTNVYADSFVIRGDEVRQIAPGQTGKIADYNYKLPDDFTGCVIAWNSNNLDSKVGGNYNYLYRLFRKSNLKPFERDISTEIYQAGSTPCNGVEGFNCYFPLQSYGFQPTNGVGYQPYRVVVLSFELLHAPATVCGPKKSTNLVKNKCVNFNFNGLTGTGVLTESNKKFLPFQQFGRDIADTTDAVRDPQTLEILDITPCSFGGVSVITPGTNTSNQVAVLYQDLNCTEVPVAIHADQLTPTWRVYSTGSNVFQTRAGCLIGAEHVNNSYECDIPIGAGICASYQTQTNSPRRARSVASQSIIAYTMSLGAENSVAYSNNSIAICTNFTISVTTEILPVSMTKTSVDCTMYICGDSTECSNLLLQYGSFCTQLNRALTGIAVEQDKNTQEVFAQVKQIYKTPPIKDFGGFNFSQILPDPSKPSKRSFIEDLLFNKVTLADAGFIKQYGDCLGDIAARDLICAQKFNGLTVLPPLLTDEMIAQYTSALLAGTITSGWTFGAGAALQIPFAMQMAYRFNGIGVTQNVLYENQKLIANQFNSAIGKIQDSLSSTASALGKLQDVVNQNAQALNTLVKQLSSNFGAISSVLNDILSRLDKVEAEVQIDRLITGRLQSLQTYVTQQLIRAAEIRASANLAATKMSECVLGQSKRVDFCGKGYHLMSFPQSAPHGVVFLHVTYVCAQEKNFTTAPAICHDGKAHFPREGVFVSNGTHWFVTQRNFYEPQIITTDNTFVSGNCDVVIGIVNNTVYDPLQPELDSFKEELDKYFKNHTSPDVDLGDISGINASVVNIQKEIDRLNEVAKNLNESLIDLQELGKYEQYIKGGGGSDIDPYKEFGSSYQLLNFLPLDFFPDLNALVDTATALYEEELTGREHCSPHHTAIRQALVCWDELTKLIAWMSSNITSEQVRTIIVNHVNDTWGLKVRQSLWFHLSCLTFGQHTVQEFLVSFGVWIRTPAPYRPPNAPILSTLPEHTVIC

SEQ ID NO: 7123 - protein, 1365 aa, Artificial Sequence
  SARS-CoV-2/Hong Kong/case42_VM20002493/2020__EPI_ISL_414527 spike protein (1-1211)(P715C_P1069C) WhcAg construct
MFVFLVLLPLVSSQCVNLTTRTQLPPAYTNSFTRGVYYPDKVFRSSVLHSTQDLFLPFFSNVTWFHAIHVSGTNGTKRFDNPVLPFNDGVYFASTEKSNIIRGWIFGTTLDSKTQSLLIVNNATNVVIKVCEFQFCNDPFLGVYYHKNNKSWMESEFRVYSSANNCTFEYVSQPFLMDLEGKQGNFKNLREFVFKNIDGYFKIYSKHTPINLVRDLPQGFSALEPLVDLPIGINITRFQTLLALHRSYLTPGDSSSGWTAGAAAYYVGYLQPRTFLLKYNENGTITDAVDCALDPLSETKCTLKSFTVEKGIYQTSNFRVQPTESIVRFPNITNLCPFGEVFNATRFASVYAWNRKRISNCVADYSVLYNSASFSTFKCYGVSPTKLNDLCFTNVYADSFVIRGDEVRQIAPGQTGKIADYNYKLPDDFTGCVIAWNSNNLDSKVGGNYNYLYRLFRKSNLKPFERDISTEIYQAGSTPCNGVEGFNCYFPLQSYGFQPTNGVGYQPYRVVVLSFELLHAPATVCGPKKSTNLVKNKCVNFNFNGLTGTGVLTESNKKFLPFQQFGRDIADTTDAVRDPQTLEILDITPCSFGGVSVITPGTNTSNQVAVLYQDVNCTEVPVAIHADQLTPTWRVYSTGSNVFQTRAGCLIGAEHVNNSYECDIPIGAGICASYQTQTNSPRRARSVASQSIIAYTMSLGAENSVAYSNNSIAICTNFAISVTTEILPVSMTKTSVDCTMYICGDSTECSNLLLQYGSFCTQLNRALTGIAVEQDKNTQEVFAQVKQIYKTPPIKDFGGFNFSQILPDPSKPSKRSFIEDLLFNKVTLADAGFIKQYGDCLGDIAARDLICAQKFNGLTVLPPLLTDEMIAQYTSALLAGTITSGWTFGAGAALQIPFAMQMAYRFNGIGVTQNVLYENQKLIANQFNSAIGKIQDSLSSTASALGKLQDVVNQNAQALNTLVKQLSSNFGAISSVLNDILSRLDKVEAEVQIDRLITGRLQSLQTYVTQQLIRAAEIRASANLAATKMSECVLGQSKRVDFCGKGYHLMSFPQSAPHGVVFLHVTYVCAQEKNFTTAPAICHDGKAHFPREGVFVSNGTHWFVTQRNFYEPQIITTDNTFVSGNCDVVIGIVNNTVYDPLQPELDSFKEELDKYFKNHTSPDVDLGDISGINASVVNIQKEIDRLNEVAKNLNESLIDLQELGKYEQYIKGGGGSDIDPYKEFGSSYQLLNFLPLDFFPDLNALVDTATALYEEELTGREHCSPHHTAIRQALVCWDELTKLIAWMSSNITSEQVRTIIVNHVNDTWGLKVRQSLWFHLSCLTFGQHTVQEFLVSFGVWIRTPAPYRPPNAPILSTLPEHTVIC

SEQ ID NO: 7124 - protein, 1365 aa, Artificial Sequence
  SARS-CoV-2/USA/CruiseA-23/2020__EPI_ISL_414482 spike protein (1-1211)(P715C_P1069C) WhcAg construct
MFVFLVLLPLVSSQCVNLTTRTQLPPAYTNSFTRGVYYPDKVFRSSVLHSTQDLFLPFFSNVTWFHAIHVSGTNGTKRFDNPVLPFNDGVYFASTEKSNIIRGWIFGTTLDSKTQSLLIVNNATNVVIKVCEFQFCNDPFLGVYYHKNNKSWMESEFRVYSSANNCTFEYVSQPFLMDLEVKQGNFKNLREFVFKNIDGYFKIYSKHTPINLVRDLPQGFSALEPLVDLPIGINITRFQTLLALHRSYLTPGDSSSGWTAGAAAYYVGYLQPRTFLLKYNENGTITDAVDCALDPLSETKCTLKSFTVEKGIYQTSNFRVQPTESIVRFPNITNLCPFGEVFNATRFASVYAWNRKRISNCVADYSVLYNSASFSTFKCYGVSPTKLNDLCFTNVYADSFVIRGDEVRQIAPGQTGKIADYNYKLPDDFTGCVIAWNSNNLDSKVGGNYNYLYRLFRKSNLKPFERDISTEIYQAGSTPCNGVEGFNCYFPLQSYGFQPTNGVGYQPYRVVVLSFELLHAPATVCGPKKSTNLVKNKCVNFNFNGLTGTGVLTESNKKFLPFQQFGRDIADTTDAVRDPQTLEILDITPCSFGGVSVITPGTNTSNQVAVLYQDVNCTEVPVAIHADQLTPTWRVYSTGSNVFQTRAGCLIGAEHVNNSYECDIPIGAGICASYQTQTNSPRRARSVASQSIIAYTMSLGAENSVAYSNNSIAICTNFTISVTTEILPVSMTKTSVDCTMYICGDSTECSNLLLQYGSFCTQLNRALTGIAVEQDKNTQEVFAQVKQIYKTPPIKDFGGFNFSQILPDPSKPSKRSFIEDLLFNKVTLADAGFIKQYGDCLGDIAARDLICAQKFNGLTVLPPLLTDEMIAQYTSALLAGTITSGWTFGAGAALQIPFAMQMAYRFNGIGVTQNVLYENQKLIANQFNSAIGKIQDSLSSTASALGKLQDVVNQNAQALNTLVKQLSSNFGAISSVLNDILSRLDKVEAEVQIDRLITGRLQSLQTYVTQQLIRAAEIRASANLAATKMSECVLGQSKRVDFCGKGYHLMSFPQSAPHGVVFLHVTYVCAQEKNFTTAPAICHDGKAHFPREGVFVSNGTHWFVTQRNFYEPQIITTDNTFVSGNCDVVIGIVNNTVYDPLQPELDSFKEELDKYFKNHTSPDVDLGDISGINASVVNIQKEIDRLNEVAKNLNESLIDLQELGKYEQYIKGGGGSDIDPYKEFGSSYQLLNFLPLDFFPDLNALVDTATALYEEELTGREHCSPHHTAIRQALVCWDELTKLIAWMSSNITSEQVRTIIVNHVNDTWGLKVRQSLWFHLSCLTFGQHTVQEFLVSFGVWIRTPAPYRPPNAPILSTLPEHTVIC

SEQ ID NO: 7125 - protein, 1365 aa, Artificial Sequence
  SARS-CoV-2/Hong Kong/case85_VM20002868/2020__EPI_ISL_414519 spike protein (1-1211)(P715C_P1069C) WhcAg construct
MFVFLVLVPLVSSQCVNLTTRTQLPPAYTNSFTRGVYYPDKVFRSSVLHSTQDLFLPFFSNVTWFHAIHVSGTNGTKRFDNPVLPFNDGVYFASTEKSNIIRGWIFGTTLDSKTQSLLIVNNATNVVIKVCEFQFCNDPFLGVYYHKNNKSWMESEFRVYSSANNCTFEYVSQPFLMDLEGKQGNFKNLREFVFKNIDGYFKIYSKHTPINLVRDLPQGFSALEPLVDLPIGINITRFQTLLALHRSYLTPGDSSSGWTAGAAAYYVGYLQPRTFLLKYNENGTITDAVDCALDPLSETKCTLKSFTVEKGIYQTSNFRVQPTESIVRFPNITNLCPFGEVFNATRFASVYAWNRKRISNCVADYSVLYNSASFSTFKCYGVSPTKLNDLCFTNVYADSFVIRGDEVRQIAPGQTGKIADYNYKLPDDFTGCVIAWNSNNLDSKVGGNYNYLYRLFRKSNLKPFERDISTEIYQAGSTPCNGVEGFNCYFPLQSYGFQPTNGVGYQPYRVVVLSFELLHAPATVCGPKKSTNLVKNKCVNFNFNGLTGTGVLTESNKKFLPFQQFGRDIADTTDAVRDPQTLEILDITPCSFGGVSVITPGTNTSNQVAVLYQDVNCTEVPVAIHADQLTPTWRVYSTGSNVFQTRAGCLIGAEHVNNSYECDIPIGAGICASYQTQTNSPRRARSVASQSIIAYTMSLGAENSVAYSNNSIAICTNFTISVTTEILPVSMTKTSVDCTMYICGDSTECSNLLLQYGSFCTQLNRALTGIAVEQDKNTQEVFAQVKQIYKTPPIKDFGGFNFSQILPDPSKPSKRSFIEDLLFNKVTLADAGFIKQYGDCLGDIAARDLICAQKFNGLTVLPPLLTDEMIAQYTSALLAGTITSGWTFGAGAALQIPFAMQMAYRFNGIGVTQNVLYENQKLIANQFNSAIGKIQDSLSSTASALGKLQDVVNQNAQALNTLVKQLSSNFGAISSVLNDILSRLDKVEAEVQIDRLITGRLQSLQTYVTQQLIRAAEIRASANLAATKMSECVLGQSKRVDFCGKGYHLMSFPQSAPHGVVFLHVTYVCAQEKNFTTAPAICHDGKAHFPREGVFVSNGTHWFVTQRNFYEPQIITTDNTFVSGNCDVVIGIVNNTVYDPLQPELDSFKEELDKYFKNHTSPDVDLGDISGINASVVNIQKEIDRLNEVAKNLNESLIDLQELGKYEQYIKGGGGSDIDPYKEFGSSYQLLNFLPLDFFPDLNALVDTATALYEEELTGREHCSPHHTAIRQALVCWDELTKLIAWMSSNITSEQVRTIIVNHVNDTWGLKVRQSLWFHLSCLTFGQHTVQEFLVSFGVWIRTPAPYRPPNAPILSTLPEHTVIC

SEQ ID NO: 7126 - protein, 1365 aa, Artificial Sequence; identical to SEQ ID NO: 7116
  SARS-CoV-2/England/200990660/2020__EPI_ISL_414523 spike protein (1-1211)(P715C_P1069C) WhcAg construct

SEQ ID NO: 7127 - protein, 1365 aa, Artificial Sequence
  SARS-CoV-2/Australia/NSW09/2020__EPI_ISL_413595 spike protein (1-1211)(P715C_P1069C) WhcAg construct
MFVFLVLLPLVSSQCVNLTTRTQLPPAYTNSFTRGVYYPDKVFRSSVLHSTQDLFLPFFSNVTWFHAIHVSGTNGTKRFDNPVLPFNDGVYFASTEKSNIIRGWIFGTTLDSKTQSLLIVNNATNVVIKVCEFQFCNDPFLGVYYHKNNKSWMESEFRVYSSANNCTFEYVSQPFLMDLEGKQGNFKNLREFVFKNIDGYFKIYSKHTPINLVRDLPQGFSALEPLVDLPIGINITRFQTLLALHRSYLTPGDSSSGWTAGAAAYYVGYLQPRTFLLKYNENGTITDAVDCALDPLSETKCTLKSFTVEKGIYQTSNFRVQPTESIVRFPNITNLCPFGEVFNATRFASVYAWNRKRISNCVADYSVLYNSASFSTFKCYGVSPTKLNDLCFTNVYADSFVIRGDEVRQIAPGQTGKIADYNYKLPDDFTGCVIAWNSNNLDSKVGGNYNYLYRLFRKSNLKPFERDISTEIYQAGSTPCNGVEGFNCYFPLQSYGFQPTNGVGYQPYRVVVLSFELLHAPATVCGPKKSTNLVKNKCVNFNFNGLTGTGVLTESNKKFLPFQQFGRDIADTTDAVRDPQTLEILDITPCSFGGVSVITPGTNTSNQVAVLYQDVNCTEVPVAIHADQLTPTWRVYSTGSNVFQTRAGCLIGAEHVNNSYECDIPIGAGICASYQTQTNSPRRARSVASQSIIAYTMSLGAENSVAYSNNSIAICTNFTISVTTEILPVSMTKTSVDCTMYICGDSTECSNLLLQYGSFCTQLNRALTGIAVEQDKNTQEVFAQVKQIYKTPPIKDFGGFNFSQILPDPSKPSKRSFIEDLLFNKVTLADAGFIKQYGDCLGDIAARDLICAQKFNGLTVLPPLLTDEMIAQYTSALLAGTITSGWTFGAGAALQIPFAMQMAYRFNGIGVTQNVLYENQKLIANQFNSAIGKIQDSLSFTASALGKLQDVVNQNAQALNTLVKQLSSNFGAISSVLNDILSRLDKVEAEVQIDRLITGRLQSLQTYVTQQLIRAAEIRASANLAATKMSECVLGQSKRVDFCGKGYHLMSFPQSAPHGVVFLHVTYVCAQEKNFTTAPAICHDGKAHFPREGVFVSNGTHWFVTQRNFYEPQIITTDNTFVSGNCDVVIGIVNNTVYDPLQPELDSFKEELDKYFKNHTSPDVDLGDISGINASVVNIQKEIDRLNEVAKNLNESLIDLQELGKYEQYIKGGGGSDIDPYKEFGSSYQLLNFLPLDFFPDLNALVDTATALYEEELTGREHCSPHHTAIRQALVCWDELTKLIAWMSSNITSEQVRTIIVNHVNDTWGLKVRQSLWFHLSCLTFGQHTVQEFLVSFGVWIRTPAPYRPPNAPILSTLPEHTVIC

SEQ ID NO: 7128 - protein, 1365 aa, Artificial Sequence; identical to SEQ ID NO: 7108
  SARS-CoV-2/Australia/NSW10/2020__EPI_ISL_413596 spike protein (1-1211)(P715C_P1069C) WhcAg construct

SEQ ID NO: 7129 - protein, 1365 aa, Artificial Sequence
  SARS-CoV-2/Switzerland/1000477797/2020__EPI_ISL_413023 spike protein (1-1211)(P715C_P1069C) WhcAg construct
MFVFLVLLPLVSSQCVNLTTRTQLPPAYTNSFTRGVYYPDKVFRSSVLHSTQDLFLPFFSNVTWFHAIHVSGTNGTKRFDNPVLPFNDGVYFASTEKSNIIRGWIFGTTLDSKTQSLLIVNNATNVVIKVCEFQFCNDPFLGVYYHKNNKSWMESEFRVYSSANNCTFEYVSQPFLMDLEGKQGNFKNLREFVFKNIDGYFNIYSKHTPINLVRDLPQGFSALEPLVDLPIGINITRFQTLLALHRSYLTPGDSSSGWTAGAAAYYVGYLQPRTFLLKYNENGTITDAVDCALDPLSETKCTLKSFTVEKGIYQTSNFRVQPTESIVRFPNITNLCPFGEVFNATRFASVYAWNRKRISNCVADYSVLYNSASFSTFKCYGVSPTKLNDLCFTNVYADSFVIRGDEVRQIAPGQTGKIADYNYKLPDDFTGCVIAWNSNNLDSKVGGNYNYLYRLFRKSNLKPFERDISTEIYQAGSTPCNGVEGFNCYFPLQSYGFQPTNGVGYQPYRVVVLSFELLHAPATVCGPKKSTNLVKNKCVNFNFNGLTGTGVLTESNKKFLPFQQFGRDIADTTDAVRDPQTLEILDITPCSFGGVSVITPGTNTSNQVAVLYQGVNCTEVPVAIHADQLTPTWRVYSTGSNVFQTRAGCLIGAEHVNNSYECDIPIGAGICASYQTQTNSPRRARSVASQSIIAYTMSLGAENSVAYSNNSIAICTNFTISVTTEILPVSMTKTSVDCTMYICGDSTECSNLLLQYGSFCTQLNRALTGIAVEQDKNTQEVFAQVKQIYKTPPIKDFGGFNFSQILPDPSKPSKRSFIEDLLFNKVTLADAGFIKQYGDCLGDIAARDLICAQKFNGLTVLPPLLTDEMIAQYTSALLAGTITSGWTFGAGAALQIPFAMQMAYRFNGIGVTQNVLYENQKLIANQFNSAIGKIQDSLSSTASALGKLQDVVNQNAQALNTLVKQLSSNFGAISSVLNDILSRLDKVEAEVQIDRLITGRLQSLQTYVTQQLIRAAEIRASANLAATKMSECVLGQSKRVDFCGKGYHLMSFPQSAPHGVVFLHVTYVCAQEKNFTTAPAICHDGKAHFPREGVFVSNGTHWFVTQRNFYEPQIITTDNTFVSGNCDVVIGIVNNTVYDPLQPELDSFKEELDKYFKNHTSPDVDLGDISGINASVVNIQKEIDRLNEVAKNLNESLIDLQELGKYEQYIKGGGGSDIDPYKEFGSSYQLLNFLPLDFFPDLNALVDTATALYEEELTGREHCSPHHTAIRQALVCWDELTKLIAWMSSNITSEQVRTIIVNHVNDTWGLKVRQSLWFHLSCLTFGQHTVQEFLVSFGVWIRTPAPYRPPNAPILSTLPEHTVIC

SEQ ID NO: 7130 - protein, 1365 aa, Artificial Sequence
  SARS-CoV-2/Belgium/BA-02291/2020__EPI_ISL_415159 spike protein (1-1211)(P715C_P1069C) WhcAg construct
MFVFLVLLPLVSSQCVNLTTRTQLPPAYTNSFTRGVYYPDKVFRSSVLHSTQDLFLPFFSNVTWFHAIHVSGTNGTKRFDNPVLPFNDGVYFASTEKSNIIRGWIFGTTLDSKTQSLLIVNNATNVVIKVCEFQFCNDPFLGVYYHKNNKSWMESEFRVYSSANNCTFEYVSQPFLMDLEGKQGNFKNLREFVFKNIDGYFKIYSKHTPINLVRDLPQGFSALEPLVDLPIGINITRFQTLLALHRSYLTPGDSSSGWTAGAAAYYVGYLQPRTFLLKYNENGTITDAVDCALDPLSETKCTLKSFTVEKGIYQTSNFRVQPTESIVRFPNITNLCPFGEVFNATRFASVYAWNRKRISNCVADYSVLYNSASFSTFKCYGVSPTKLNDLCFTNVYADSFVIRGDEVRQIAPGQTGKIADYNYKLPDDFTGCVIAWNSNNLDSKVGGNYNYLYRLFRRSNLKPFERDISTEIYQAGSTPCNGVEGFNCYFPLQSYGFQPTNGVGYQPYRVVVLSFELLPAPATVCGPKKSTNLVKNKCVNFNFNGLTGTGVLTESNKKFLPFQQFGRDIADTTDAVRDPQTLEILDITPCSFGGVSVITPGTNTSNQVAVLYQGVNCTEVPVAIHADQLTPTWRVYSTGSNVFQTRAGCLIGAEHVNNSYECDIPIGAGICASYQTQTNSPRRARSVASQSIIAYTMSLGAENSVAYSNNSIAICTNFTISVTTEILPVSMTKTSVDCTMYICGDSTECSNLLLQYGSFCTQLNRALTGIAVEQDKNTQEVFAQVKQIYKTPPIKDFGGFNFSQILPDPSKPSKRSFIEDLLFNKVTLADAGFIKQYGDCLGDIAARDLICAQKFNGLTVLPPLLTDEMIAQYTSALLAGTITSGWTFGAGAALQIPFAMQMAYRFNGIGVTQNVLYENQKLIANQFNSAIGKIQDSLSSAAPALGKLQDVVNQNAQALNTLVKQLSSNFGAISSVLNDILSRLDKVEAEVQIDRLITGRLQSLQTYVTQQLIRAAEIRASANLAATKMSECVLGQSKRVDFCGKGYHLMSFPQSAPHGVVFLHVTYVCAQEKNFTTAPAICHDGKAHFPREGVFVSNGTHWFVTQRNFYEPQIITTDNTFVSGNCDVVIGIVNNTVYDPLQPELDSFKEELDKYFKNHTSPDVDLGDISGINASVVNIQKEIDRLNEVAKNLNESLIDLQELGKYEQYIKGGGGSDIDPYKEFGSSYQLLNFLPLDFFPDLNALVDTATALYEEELTGREHCSPHHTAIRQALVCWDELTKLIAWMSSNITSEQVRTIIVNHVNDTWGLKVRQSLWFHLSCLTFGQHTVQEFLVSFGVWIRTPAPYRPPNAPILSTLPEHTVIC

SEQ ID NO: 7131 - protein, 1365 aa, Artificial Sequence
  SARS-CoV-2/USA/WA8-UW5/2020__EPI_ISL_413486 spike protein (1-1211)(P715C_P1069C) WhcAg construct
MFVFLVLLPLVSSQCVNLTTRTQLPPAYTNSFTRGVYYPDKVFRSSVLHSTQDLFLPFFSNVTWFHAIHVSGTNGTKRFDNPVLPFNDGVYFASTEKSNIIRGWIFGTTLDSKTQSLLIVNNATNVVIKVCEFQFCNDPFLGVYYHKNNKSWMESEFRVYSSANNCTFEYVSQPFLMDLEGKQGNFKNLREFVFKNIDGYFKIYSKHTPINLVRDLPQGFSALEPLVDLPIGINITRFQTLLALHRSYLTPGDSSSGWTAGAAAYYVGYLQPRTFLLKYNENGTITDAVDCALDPLSETKCTLKSFTVEKGIYQTSNFRVQPTESIVRFPNITNLCPFGEVFNATRFASVYAWNRKRISNCVADYSVLYNSASFSTFKCYGVSPTKLNDLCFTNVYADSFVIRGDEVRQIAPGQTGKIADYNYKLPDDFTGCVIAWNSNNLDSKVGGNYNYLYRLFRKSNLKPFERDISTEIYQAGSTPCNGVEGFNCYFPLQSYGFQPTNGVGYQPYRVVVLSFELLHAPATVCGPKKSTNLVKNKCVNFNFNGLTGTGVLTESNKKFLPFQQFGRDIADTTDAVRDPQTLEILDITPCSFGGVSVITPGTNTSNQVAVLYQDVNCTEVPVAIHADQLTPTWRVYSTGSNVFQTRAGCLIGAEYVNNSYECDIPIGAGICASYQTQTNSPRRARSVASQSIIAYTMSLGAENSVAYSNNSIAICTNFTISVTTEILPVSMTKTSVDCTMYICGDSTECSNLLLQYGSFCTQLNRALTGIAVEQDKNTQEVFAQVKQIYKTPPIKDFGGFNFSQILPDPSKPSKRSFIEDLLFNKVTLADAGFIKQYGDCLGDIAARDLICAQKFNGLTVLPPLLTDEMIAQYTSALLAGTITSGWTFGAGAALQIPFAMQMAYRFNGIGVTQNVLYENQKLIANQFNSAIGKIQDSLSSTASALGKLQDVVNQNAQALNTLVKQLSSNFGAISSVLNDILSRLDKVEAEVQIDRLITGRLQSLQTYVTQQLIRAAEIRASANLAATKMSECVLGQSKRVDFCGKGYHLMSFPQSAPHGVVFLHVTYVCAQEKNFTTAPAICHDGKAHFPREGVFVSNGTHWFVTQRNFYEPQIITTDNTFVSGNCDVVIGIVNNTVYDPLQPELDSFKEELDKYFKNHTSPDVDLGDISGINASVVNIQKEIDRLNEVAKNLNESLIDLQELGKYEQYIKGGGGSDIDPYKEFGSSYQLLNFLPLDFFPDLNALVDTATALYEEELTGREHCSPHHTAIRQALVCWDELTKLIAWMSSNITSEQVRTIIVNHVNDTWGLKVRQSLWFHLSCLTFGQHTVQEFLVSFGVWIRTPAPYRPPNAPILSTLPEHTVIC

SEQ ID NO: 7132 - protein, 1365 aa, Artificial Sequence
  SARS-CoV-2/England/20102000506/2020__EPI_ISL_415147 spike protein (1-1211)(P715C_P1069C) WhcAg construct
MFVFLVLLPLVSSQCVNLTTRTQLPPAYTNSFTRGVYYPDKVFRSSVLHSTQDLFLPFFSNVTWFHAIHVSGTNGTKRFDNPVLPFNDGVYFASTEKSNIIRGWIFGTTLDSKTQSLLIVNNATNVVIKVCEFQFCNDPFLGVYYHKNNKSWMESEFRVYSSANNCTFEYVSQPFLMDLEGKQGNFKNLREFVFKNIDGYFKIYSKHTPINLVRDLPQGFSALEPLVDLPIGINITRFQTLLALHRSYLTPGDSSSGWTAGAAAYYVGYLQPRTFLLKYNENGTITDAVDCALDPLSETKCTLKSFTVEKGIYQTSNFRVQPTESIVRFPNITNLCPFGEVFNATRFASVYAWNRKRISNCVADYSVLYNSASFSTFKCYGVSPTKLNDLCFTNVYADSFVIRGDEVRQIAPGQTGKIADYNYKLPDDFTGCVIAWNSNNLDSKVGGNYNYLYRLFRKSNLKPFERDISTEIYQAGSTPCNGVEGFNCYFPLQSYGFQPTNGVGYQPYRVVVLSFELLHAPATVCGPKKSTNLVKNKCVNFNFNGLTGTGVLTESNKKFLPFQQFGRDIADTTDAVRDPQTLEILDITPCSFGGVSVITPGTNTSNQVAVLYQGVNCTEVPVAIHADQLTPTWRVYSTGSNVFQTRAGCLIGAEHVNNSYECDIPIGAGICASYQTQTNSPRRARSVASQSIIAYTMSLGAENSVAYSNNSIAICTNFTISVTTEILPVSMTKTSVDCTMYICGDSTECSNLLLQYGSFCTQLNRALTGIAVEQDKNTQEVFAQVKQIYKTPPIKDFGGFNFSQILPDPSKPSKRSFIEDLLFNKVTLADAGFIKQYGYCLGDIAARDLICAQKFNGLTVLPPLLTDEMIAQYTSALLAGTITSGWTFGAGAALQIPFAMQMAYRFNGIGVTQNVLYENQKLIANQFNSAIGKIQDSLSSTASALGKLQDVVNQNAQALNTLVKQLSSNFGAISSVLNDILSRLDKVEAEVQIDRLITGRLQSLQTYVTQQLIRAAEIRASANLAATKMSECVLGQSKRVDFCGKGYHLMSFPQSAPHGVVFLHVTYVCAQEKNFTTAPAICHDGKAHFPREGVFVSNGTHWFVTQRNFYEPQIITTDNTFVSGNCDVVIGIVNNTVYDPLQPELDSFKEELDKYFKNHTSPDVDLGDISGINASVVNIQKEIDRLNEVAKNLNESLIDLQELGKYEQYIKGGGGSDIDPYKEFGSSYQLLNFLPLDFFPDLNALVDTATALYEEELTGREHCSPHHTAIRQALVCWDELTKLIAWMSSNITSEQVRTIIVNHVNDTWGLKVRQSLWFHLSCLTFGQHTVQEFLVSFGVWIRTPAPYRPPNAPILSTLPEHTVIC

SEQ ID NO: 7133 - protein, 1365 aa, Artificial Sequence
  SARS-CoV-2/Belgium/VAG-03013/2020__EPI_ISL_415155 spike protein (1-1211)(P715C_P1069C) WhcAg construct
MFVFLVLLPLVSSQCVNLTTRTQLPPAYTNSFTRGVYYPDKVFRSSVLHSTQDLFLPFFSNVTWFHAIHVSGTNGTKRFDNPVLPFNDGVYFASTEKSNIIRGWIFGTTLDSKTQSLLIVNNATNVVIKVCEFQFCNDPFLGVYYHKNNKSWMESEFRVYSSANNCTFEYVSQPFLMDLEGKQGNFKNLREFVFKNIDGYFKIYSKHTPINLVRDLPQGFSALEPLVDLPIGINITRFQTLLALHRSYLTPGDSSSGWTAGAAAYYVGYLQPRTFLLKYNENGTITDAVDCALDPLSETKCTLKSFTVEKGIYQTSNFRVQPTESIVRFPNITNLCPFGEVFNATRFASVYAWNRKRISNCVADYSVLYNSASFSTFKCYGVSPTKLNDLCFTNVYADSFVIRGDEVRQIAPGQTGKIADYNYKLPDDFTGCVIAWNSNNLDSKVGGNYNYLYRLFRKSNLKPFERDISTEIYQAGSTPCNGVEGFNCYFPLQSYGFQPTNGVGYQPYRVVVLSFELLHAPATVCGPKKSTNLVKNKCVNFNFNGLTGTGVLTESNKKFLPFQQFGRDIADTTDAVRDPQTLEILDITPCSFGGVSVITPGTNTSNQVAVLYQGVNCTEVPVAIHADQLTPTWRVYSTGSNVFQTRAGCLIGAEHVNNSYECDIPIGAGICASYQTQTNSPRRARSVASQSIIAYTMSLGAENSVAYSNNSIAICTNFTISVTTEILPVSMTKTSVDCTMYICGDSTECSNLLLQYGSFCTQLNRALTGIAVEQDKNTQEVFAQVKQIYKTPPIKDFGGFNFSQILPDPSKPSKRSFIEDLLFNKVTLADAGFIKQYGDCLGDIAARDLICAQKFNGLTVLPPLLTDEMIAQYTSALLAGTITSGWTFGAGAALQIPFAMQMAYRFNGIGVTQNVLYENQKLIANQFNSAIGKIQDSLSSTATALGKLQDVVNQNAQALNTLVKQLSSNFGAISSVLNDILSRLDKVEAEVQIDRLITGRLQSLQTYVTQQLIRAAEIRASANLAATKMSECVLGQSKRVDFCGKGYHLMSFPQSAPHGVVFLHVTYVCAQEKNFTTAPAICHDGKAHFPREGVFVSNGTHWFVTQRNFYEPQIITTDNTFVSGNCDVVIGIVNNTVYDPLQPELDSFKEELDKYFKNHTSPDVDLGDISGINASVVNIQKEIDRLNEVAKNLNESLIDLQELGKYEQYIKGGGGSDIDPYKEFGSSYQLLNFLPLDFFPDLNALVDTATALYEEELTGREHCSPHHTAIRQALVCWDELTKLIAWMSSNITSEQVRTIIVNHVNDTWGLKVRQSLWFHLSCLTFGQHTVQEFLVSFGVWIRTPAPYRPPNAPILSTLPEHTVIC

SEQ ID NO: 7134 - protein, 1365 aa, Artificial Sequence
  SARS-CoV-2/Belgium/BC-03016/2020__EPI_ISL_415157 spike protein (1-1211)(P715C_P1069C) WhcAg construct
MFVFLVLLPLVSSQCVNLTTRTQLPPAYTNSFTRGVYYPDKVFRSSVLHSTQDLFLPFFSNVTWFHAIHVSGTNGTKRFDNPVLPFNDGVYFASTEKSNIIRGWIFGTTLDSKTQSLLIVNNATNVVIKVCEFQFCNDPFLGVYYHKNNKSWMESEFRVYSSANNCTFEYVSQPFLMDLEGKQGNFKNLREFVFKNIDGYFKIYSKHTPINLVRDLPQGFSALEPLVDLPIGINITRFQTLLALHRSYLTPGDSSSGWTAGAAAYYVGYLQPRTFLLKYNENGTITDAVDCALDPLSETKCTLKSFTVEKGIYQTSNFRVQPTESIVRFPNITNLCPFGEVFNATRFASVYAWNRKRISNCVADYSVLYNSASFSTFKCYGVSPTKLNDLCFTNVYADSFVIRGDEVRQIAPGQTGKIADYNYKLPDDFTGCVIAWNSNNLDSKVGGNYNYLYRLFRKSNLKPFERDISTEIYQAGSTPCNGVEGFNCYFPLQSYGFQPTNGVGYQPYRVVVLSFELLHAPATVCGPKKSTNLVKNKCVNFNFNGLTGTGVLTESNKKFLPFQQFGRDIADTTDAVRDPQTLEILDITPCSFGGVSVITPGTNTSNQVAVLYQGVNCTEVPVAIHADQLTPTWRVYSTGSNVFQTRAGCLIGAEHVNNSYECDIPIGAGICASYQTQTNSPRRARSVASQSIIAYTMSLGAENSVAYSNNSIAICTNFTISVTTEILPVSMTKTSVDCTMYICGDSTECSNLLLQYGSFCTQLNRALTGIAVEQDKNTQEVFAQVKQIYKTPPIKDFGGFNFSQILPDPSKPSKRSFIEDLLFNKVTLADAGFIKQYGDCLGDIAARDLICAQKFNGLTVLPPLLTDEMIAQYTSALLAGTITSGWTFGAGAALQIPFAMQMAYRFNGIGVTQNVLYENQKLIANQFNSAIGKIQDSLSSTAPALGKLQDVVNQNAQALNTLVKQLSSNFGAISSVLNDILSRLDKVEAEVQIDRLITGRLQSLQTYVTQQLIRAAEIRASANLAATKMSECVLGQSKRVDFCGKGYHLMSFPQSAPHGVVFLHVTYVCAQEKNFTTAPAICHDGKAHFPREGVFVSNGTHWFVTQRNFYEPQIITTDNTFVSGNCDVVIGIVNNTVYDPLQPELDSFKEELDKYFKNHTSPDVDLGDISGINASVVNIQKEIDRLNEVAKNLNESLIDLQELGKYEQYIKGGGGSDIDPYKEFGSSYQLLNFLPLDFFPDLNALVDTATALYEEELTGREHCSPHHTAIRQALVCWDELTKLIAWMSSNITSEQVRTIIVNHVNDTWGLKVRQSLWFHLSCLTFGQHTVQEFLVSFGVWIRTPAPYRPPNAPILSTLPEHTVIC

SEQ ID NO: 7135 - protein, 1365 aa, Artificial Sequence
  SARS-CoV-2/Germany/BavPat3/2020__EPI_ISL_414521 spike protein (1-1211)(P715C_P1069C) WhcAg construct
MFVFLVLLPLVSSQCVNLTTRTQLPPAYTNSFTRGVYYPDKVFRSSVLHSTQDLFLPFFSNVTWFHAIHVSGTNGTKRFDNPVLPFNDGVYFASTEKSNIIRGWIFGTTLDSKTQSLLIVNNATNVVIKVCEFQFCNDPFLGVYYHKNNKSWMESEFRVYSSANNCTFEYVSQPFLMDLEGKQGNFKNLREFVFKNIDGYFKIYSKHTPINLVRDLPQGFSALEPLVDLPIGINITRFQTLLALHRSYLTPGDSSSGWTAGAAAYYVGYLQPRTFLLKYNENGTITDAVDCALDPLSETKCTLKSFTVEKGIYQTSNFRVQPTESIVRFPNITNLCPFGEVFNATRFASVYAWNRKRISNCVADYSVLYNSASFSTFKCYGVSPTKLNDLCFTNVYADSFVIRGDEVRQIAPGQTGKIADYNYKLPDDFTGCVIAWNSNNLDSKVGGNYNYLYRLFRKSNLKPFERDISTEIYQAGSTPCNGVEGFNCYFPLQSYGFQPTNGVGYQPYRVVVLSFELLHAPATVCGPKKSTNLVKNKCVNFNFNGLTGTGVLTESNKKFLPFQQFGRDIADTTDAVRDPQTLEILDITPCSFGGVSVITPGTNTSNQVAVLYQDVNCTEVPVAIHADQLTPTWRVYSTGSNVFQTRAGCLIGAEHVNNSYECDIPIGAGICASYQTQTNSPRRARSVASQSIIAYTMSLGAENSVAYSNNSIAICTNFTISVTTEILPVSMTKTSVDCTMYICGDSTECSNLLLQYGSFCTQLNRALTGIAVEQDKNTQQVFAQVKQIYKTPPIKDFGGFNFSQILPDPSKPSKRSFIEDLLFNKVTLADAGFIKQYGDCLGDIAARDLICAQKFNGLTVLPPLLTDEMIAQYTSALLAGTITSGWTFGAGAALQIPFAMQMAYRFNGIGVTQNVLYENQKLIANQFNSAIGKIQDSLSSTASALGKLQDVVNQNAQALNTLVKQLSSNFGAISSVLNDILSRLDKVEAEVQIDRLITGRLQSLQTYVTQQLIRAAEIRASANLAATKMSECVLGQSKRVDFCGKGYHLMSFPQSAPHGVVFLHVTYVCAQEKNFTTAPAICHDGKAHFPREGVFVSNGTHWFVTQRNFYEPQIITTDNTFVSGNCDVVIGIVNNTVYDPLQPELDSFKEELDKYFKNHTSPDVDLGDISGINASVVNIQKEIDRLNEVAKNLNESLIDLQELGKYEQYIKGGGGSDIDPYKEFGSSYQLLNFLPLDFFPDLNALVDTATALYEEELTGREHCSPHHTAIRQALVCWDELTKLIAWMSSNITSEQVRTIIVNHVNDTWGLKVRQSLWFHLSCLTFGQHTVQEFLVSFGVWIRTPAPYRPPNAPILSTLPEHTVIC

SEQ ID NO: 7136 - protein, 1365 aa, Artificial Sequence
  SARS-CoV-2/France/HF1805/2020__EPI_ISL_414628 spike protein (1-1211)(P715C_P1069C) WhcAg construct
MFVFLVLLPLVSSQCVNLTTRTQLPPAYTNSFTRGVYYPDKVFRSSVLHSTQDLFLPFFSNVTWFHAIHVSGTNGTKRFDNPVLPFNDGVYFASTEKSNIIRGWIFGTTLDSKTQSLLIVNNATNVVIKVCEFQFCNDPFLGVYYHKNNKSWMESEFRVYSSANNCTFEYVSQPFLMDLEGKQGNFKNLREFVFKNIDGYFKIYSKHTPINLVRDLPQGFSALEPLVDLPIGINITRFQTLLALHRSYLTPGDSSSGWTAGAAAYYVGYLQPRTFLLKYNENGTITDAVDCALDPLSETKCTLKSFTVEKGIYQTSNFRVQPTESIVRFPNITNLCPFGEVFNATRFASVYAWNRKRISNCVADYSVLYNSASFSTFKCYGVSPTKLNDLCFTNVYADSFVIRGDEVRQIAPGQTGKIADYNYKLPDDFTGCVIAWNSNNLDSKVGGNYNYLYRLFRKSNLKPFERDISTEIYQAGSTPCNGVEGFNCYFPLQSYGFQPTNGVGYQPYRVVVLSFELLHAPATVCGPKKSTNLVKNKCVNFNFNGLTGTGVLTESNKKFLPFQQFGRDIADTTDAVRDPQTLEILDITPCSFGGVSVITPGTNTSNQVAVLYQGVNCTEVPVAIHADQLTPTWRVYSTGSNVFQTRAGCLIGAEHVNNSYECDIPIGAGICASYQTQTNSPRRARSVASQSIIAYTMSLGAENSVAYSNNSIAICTNFTISVTTEILPVSMTKTSVDCTMYICGDSTECSNLLLQYGSFCTQLNRALTGIAVEQDKNTQEVFAQVKQIYKTPPIKDFGGFNFSQILPDPSKPSKRSFIEDLLFNKVTLADAGFIKQYGDCLGDIAARDLICAQKFNGLTVLPPLLTDEMIAQYTSALLAGTITSGWTFGAGAALQIPFAMQMAYRFNGIGVTQNVLYENQKLIANQFNSAIGKIQDSLSSTASALGKLQDVVNQNAQALNTLVKQLSSNFGAISSVLNDILSRLDKVEAEVQIDRLITGRLQSLQTYVTQQLIRAAEIRASANLAATKMSECVLGQSKRVDFCGKGYHLMSFPQSAPHGVVFLHVTYVCAQEKNFTTAPAICHDGKAHFPREGVFVSNGTHWFVTQRNFYEPQIITTDNTFVSGNCDVVIGVVNNTVYDPLQPELDSFKEELDKYFKNHTSPDVDLGDISGINASVVNIQKEIDRLNEVAKNLNESLIDLQELGKYEQYIKGGGGSDIDPYKEFGSSYQLLNFLPLDFFPDLNALVDTATALYEEELTGREHCSPHHTAIRQALVCWDELTKLIAWMSSNITSEQVRTIIVNHVNDTWGLKVRQSLWFHLSCLTFGQHTVQEFLVSFGVWIRTPAPYRPPNAPILSTLPEHTVIC

SEQ ID NO: 7137 - protein, 1365 aa, Artificial Sequence
  SARS-CoV-2/Netherlands/ZuidHolland_9/2020__EPI_ISL_414445 spike protein (1-1211)(P715C_P1069C) WhcAg construct
MFVFLVLLPLVSSQCVNLTTRTQLPPAYTNSFTRGVYYPDKVFRSSVLHSTQDLFLPFFSNVTWFHAIHVSGTNGTKRFDNPVLPFNDGVYFASTEKSNIIRGWIFGTTLDSKTQSLLIVNNATNVVIKVCEFQFCNDPFLGVYYHKNNKSWMESEFRVYSSANNCTFEYVSQPFLMDLEGKQGNFKNLREFVFKNIDGYFKIYSKHTPINLVRDLPQGFSALEPLVDLPIGINITRFQTLLALHRSYLTPGDSSSGWTAGAAAYYVGYLQPRTFLLKYNENGTITDAVDCALDPLSETKCTLKSFTVEKGIYQTSNFRVQPTESIVRFPNITNLCPFGEVFNATRFASVYAWNRKRISNCVADYSVLYNSASFSTFKCYGVSPTKLNDLCFTNVYADSFVIRGDEVRQIAPGQTGKIADYNYKLPDDFTGCVIAWNSNNLDSKVGGNYNYLYRLFRKSNLKPFERDISTEIYQAGSTPCNGVEGFNCYFPLQSYGFQPTNGVGYQPYRVVVLSFELLHAPATVCGPKKSTNLVKNKCVNFNFNGLTGTGVLTESNKKFLPFQQFGRDIADTTDAVRDPQTLEILDITPCSFGGVSVITPGTNTSNQVAVLYQGVNCTEVPVAIHADQLTPTWRVYSTGSNVFQTRAGCLIGAEHVNNSYECDIPIGAGICASYQTQTNSPRRARSVASQSIIAYTMSLGAENSVAYSNNSIAICTNFTISVTTEILPVSMTKTSVDCTMYICGDSTECSNLLLQYGSFCTQLNRALTGIAVEQDKNTQEVFAQVKQIYKTPPIKDFGGFNFSQILPDPSKPSKRSFIEDLLFNKVTLADAGFIKQYGDCLGDIAARDLICVQKFNGLTVLPPLLTDEMIAQYTSALLAGTITSGWTFGAGAALQIPFAMQMAYRFNGIGVTQNVLYENQKLIANQFNSAIGKIQDSLSSTASALGKLQDVVNQNAQALNTLVKQLSSNFGAISSVLNDILSRLDKVEAEVQIDRLITGRLQSLQTYVTQQLIRAAEIRASANLAATKMSECVLGQSKRVDFCGKGYHLMSFPQSAPHGVVFLHVTYVCAQEKNFTTAPAICHDGKAHFPREGVFVSNGTHWFVTQRNFYEPQIITTDNTFVSGNCDVVIGIVNNTVYDPLQPELDSFKEELDKYFKNHTSPDVDLGDISGINASVVNIQKEIDRLNEVAKNLNESLIDLQELGKYEQYIKGGGGSDIDPYKEFGSSYQLLNFLPLDFFPDLNALVDTATALYEEELTGREHCSPHHTAIRQALVCWDELTKLIAWMSSNITSEQVRTIIVNHVNDTWGLKVRQSLWFHLSCLTFGQHTVQEFLVSFGVWIRTPAPYRPPNAPILSTLPEHTVIC

SEQ ID NO: 7138 - protein, 1365 aa, Artificial Sequence
  SARS-CoV-2/Finland/FIN03032020A/2020__EPI_ISL_413602 spike protein (1-1211)(P715C_P1069C) WhcAg construct
MFVFLVLLPLVSSQCVNLTTRTQLPPAYTNSFTRGVYYPDKVFRSSVLHSTQDLFLPFFSNVTWFHAIHVSGTNGTKRFDNPVLPFNDGVYFASTEKSNIIRGWIFGTTLDSKTQSLLIVNNATNVVIKVCEFQFCNDPFLGVYYHKNNKSWMESEFRVYSSANNCTFEYVSQPFLMDLEGKQGNFKNLREFVFKNIDGYFKIYSKHTPINLVRDLPQGFSALEPLVDLPIGINITRFQTLLALHRSYLTPGDSSSGWTAGAAAYYVGYLQPRTFLLKYNENGTITDAVDCALDPLSETKCTLKSFTVEKGIYQTSNFRVQPTESIVRFPNITNLCPFGEVFNATRFASVYAWNRKRISNCVADYSVLYNSASFSTFKCYGVSPTKLNDLCFTNVYADSFVIRGDEVRQIAPGQTGKIADYNYKLPDDFTGCVISWNSNNLDSKVGGNYNYLYRLFRKSNLKPFERDISTEIYQAGSTPCNGVEGFNCYFPLQSYGFQPTNGVGYQPYRVVVLSFELLHAPATVCGPKKSTNLVKNKCVNFNFNGLTGTGVLTESNKKFLPFQQFGRDIADTTDAVRDPQTLEILDITPCSFGGVSVITPGTNTSNQVAVLYQGVNCTEVPVAIHADQLTPTWRVYSTGSNVFQTRAGCLIGAEHVNNSYECDIPIGAGICASYQTQTNSPRRARSVASQSIIAYTMSLGAENSVAYSNNSIAICTNFTISVTTEILPVSMTKTSVDCTMYICGDSTECSNLLLQYGSFCTQLNRALTGIAVEQDKNTQEVFAQVKQIYKTPPIKDFGGFNFSQILPDPSKPSKRSFIEDLLFNKVTLADAGFIKQYGDCLGDIAARDLICAQKFNGLTVLPPLLTDEMIAQYTSALLAGTITSGWTFGAGAALQIPFAMQMAYRFNGIGVTQNVLYENQKLIANQFNSAIGKIQDSLSSTASALGKLQDVVNQNAQALNTLVKQLSSNFGAISSVLNDILSRLDKVEAEVQIDRLITGRLQSLQTYVTQQLIRAAEIRASANLAATKMSECVLGQSKRVDFCGKGYHLMSFPQSAPHGVVFLHVTYVCAQEKNFTTAPAICHDGKAHFPREGVFVSNGTHWFVTQRNFYEPQIITTDNTFVSGNCDVVIGIVNNTVYDPLQPELDSFKEELDKYFKNHTSPDVDLGDISGINASVVNIQKEIDRLNEVAKNLNESLIDLQELGKYEQYIKGGGGSDIDPYKEFGSSYQLLNFLPLDFFPDLNALVDTATALYEEELTGREHCSPHHTAIRQALVCWDELTKLIAWMSSNITSEQVRTIIVNHVNDTWGLKVRQSLWFHLSCLTFGQHTVQEFLVSFGVWIRTPAPYRPPNAPILSTLPEHTVIC

SEQ ID NO: 7139 - protein, 1365 aa, Artificial Sequence
  SARS-CoV-2/France/GE1977/2020__EPI_ISL_414632 spike protein (1-1211)(P715C_P1069C) WhcAg construct
MFVFLVLLPLVSSQCVNLTTRTQLPPAYTNSFTRGVYYPDKVFRSSVLHSTQDLFLPFFSNVTWFHAIHVSGTNGTKRFDNPVLPFNDGVYFASTEKSNIIRGWIFGTTLDSKTQSLLIVNNATNVVIKVCEFQFCNDPFLGVYYHKNNKSWMESEFRVYSSANNCTFEYVSQPFLMDLEGKQGNFKNLREFVFKNIDGYFKIYSKHTPINLVRDLPQGFSALEPLVDLPIGINITRFQTLLALHRSYLTPGDSSSGWTAGAAAYYVGYLQPRTFLLKYNENGTITDAVDCALDPLSETKCTLKSFTVEKGIYQTSNFRVQPTESIVRFPNITNLCPFGEVFNATRFASVYAWNRKRISNCVADYSVLYNSASFSTFKCYGVSPTKLNDLCFTNVYADSFVIRGDEVRQIAPGQTGKIADYNYKLPDDFTGCVIAWNSNNLDSKVGGNYNYLYRLFRKSNLKPFERDISTEIYQAGSTPCNGVEGFNCYFPLQSYGFQPTNGVGYQPYRVVVLSFELLHAPATVCGPKKSTNLVKNKCVNFNFNGLTGTGVLTESNKKFLPFQQFGRDIADTTDAVRDPQTLEILDITPCSFGGVSVITPGTNTSNQVAVLYQGVNCTEVPVAIHADQLTPTWRVYSTGSNVFQTRAGCLIGAEHVNNSYECDIPIGAGICASYQTQTNSPRRARSVASQSIIAYTMSLGAENSVAYSNNSIAICTNFTISVTTEILPVSMTKTSVDCTMYICGDSTECSNLLLQYGSFCTQLNRALTGIAVEQDKNTQEVFAQVKQIYKTPPIKDFGGFNFSQILPDPSKPSKRSFIEDLLFNKVTLADAGFIKQYGDCLGDIAARDLICAQKFNGLTVLPPLLTDEMIAQYTSALLAGTITSGWTFGAGAALQIPFAMQMAYRFNGIGVTQNVLYENQKLIANQFNSAIGKIQDSLFSTASALGKLQDVVNQNAQALNTLVKQLSSNFGAISSVLNDILSRLDKVEAEVQIDRLITGRLQSLQTYVTQQLIRAAEIRASANLAATKMSECVLGQSKRVDFCGKGYHLMSFPQSAPHGVVFLHVTYVCAQEKNFTTAPAICHDGKAHFPREGVFVSNGTHWFVTQRNFYEPQIITTDNTFVSGNCDVVIGIVNNTVYDPLQPELDSFKEELDKYFKNHTSPDVDLGDISGINASVVNIQKEIDRLNEVAKNLNESLIDLQELGKYEQYIKGGGGSDIDPYKEFGSSYQLLNFLPLDFFPDLNALVDTATALYEEELTGREHCSPHHTAIRQALVCWDELTKLIAWMSSNITSEQVRTIIVNHVNDTWGLKVRQSLWFHLSCLTFGQHTVQEFLVSFGVWIRTPAPYRPPNAPILSTLPEHTVIC

SEQ ID NO: 7140 - protein, 1365 aa, Artificial Sequence
  SARS-CoV-2/Finland/FIN-313/2020__EPI_ISL_414641 spike protein (1-1211)(P715C_P1069C) WhcAg construct
MFVFLVLLPLVSSQCVNLTTRTQLPPAYTNSFTRGVYYPDKVFRSSVLHSTQDLFLPFFSNVTWFHAIHVSGTNGTKRFDNPVLPFNDGVYFASTEKSNIIRGWIFGTTLDSKTQSLLIVNNATNVVIKVCEFQFCNDPFLGVYYHKNNKSWMESEFRVYSSANNCTFEYVSQPFLMDLEGKQGNFKNLREFVFKNIDGYFKIYSKHTPINLVRDLPQGFSALEPLVDLPIGINITRFKTLLALHRSYLTPGDSSSGWTAGAAAYYVGYLQPRTFLLKYNENGTITDAVDCALDPLSETKCTLKSFTVEKGIYQTSNFRVQPTESIVRFPNITNLCPFGEVFNATRFASVYAWNRKRISNCVADYSVLYNSASFSTFKCYGVSPTKLNDLCFTNVYADSFVIRGDEVRQIAPGQTGKIADYNYKLPDDFTGCVIAWNSNNLDSKVGGNYNYLYRLFRKSNLKPFERDISTEIYQAGSTPCNGVEGFNCYFPLQSYGFQPTNGVGYQPYRVVVLSFELLHAPATVCGPKKSTNLVKNKCVNFNFNGLTGTGVLTESNKKFLPFQQFGRDIADTTDAVRDPQTLEILDITPCSFGGVSVITPGTNTSNQVAVLYQGVNCTEVPVAIHADQLTPTWRVYSTGSNVFQTRAGCLIGAEHVNNSYECDIPIGAGICASYQTQTNSPRRARSVASQSIIAYTMSLGAENSVAYSNNSIAICTNFTISVTTEILPVSMTKTSVDCTMYICGDSTECSNLLLQYGSFCTQLNRALTGIAVEQDKNTQEVFAQVKQIYKTPPIKDFGGFNFSQILPDPSKPSKRSFIEDLLFNKVTLADAGFIKQYGDCLGDIAARDLICAQKFNGLTVLPPLLTDEMIAQYTSALLAGTITSGWTFGAGAALQIPFAMQMAYRFNGIGVTQNVLYENQKLIANQFNSAIGKIQDSLSSTASALGKLQDVVNQNAQALNTLVKQLSSNFGAISSVLNDILSRLDKVEAEVQIDRLITGRLQSLQTYVTQQLIRAAEIRASANLAATKMSECVLGQSKRVDFCGKGYHLMSFPQSAPHGVVFLHVTYVCAQEKNFTTAPAICHDGKAHFPREGVFVSNGTHWFVTQRNFYEPQIITTDNTFVSGNCDVVIGIVNNTVYDPLQPELDSFKEELDKYFKNHTSPDVDLGDISGINASVVNIQKEIDRLNEVAKNLNESLIDLQELGKYEQYIKGGGGSDIDPYKEFGSSYQLLNFLPLDFFPDLNALVDTATALYEEELTGREHCSPHHTAIRQALVCWDELTKLIAWMSSNITSEQVRTIIVNHVNDTWGLKVRQSLWFHLSCLTFGQHTVQEFLVSFGVWIRTPAPYRPPNAPILSTLPEHTVIC

SEQ ID NO: 7141 - protein, 1365 aa, Artificial Sequence
  SARS-CoV-2/Netherlands/ZuidHolland_2/2020__EPI_ISL_414556 spike protein (1-1211)(P715C_P1069C) WhcAg construct
MFVFLVLLPLVSSQCVNLTTRTQLPPAYTNSFTRGVYYPDKVFRSSVLHSTQDLFLPFFSNVTWFHAIHVSGTNGTKRFDNPVLPFNDGVYFASTEKSNIIRGWIFGTTLDSKTQSLLIVNNATNVVIKVCEFQFCNDPFLGVYYHKNNKSWMESEFRVYSSANNCTFEYVSQPFLMDLEGKQGNFKNLREFVFKNIDGYFKIYSKHTPINLVRDLPQGFSALEPLVDLPIGINITRFQTLLALHRSYLTPGDSSSGWTAGAAAYYVGYLQPRTFLLKYNENGTITDAVDCALDPLSETKCTLKSFTVEKGIYQTSNFRVQPTESIVRFPNITNLCPFGEVFNATRFASVYAWNRKRISNCVADYSVLYNSASFSTFKCYGVSPTKLNDLCFTNVYADSFVIRGDEVRQIAPGQTGKIADYNYKLPDDFTGCVIAWNSNNLDSKVGGNYNYLYRLFRKSNLKPFERDISTEIYQAGSTPCNGVEGFNCYFPLQSYGFQPTNGVGYQPYRVVVLSFELLHAPATVCGPKKSTNLVKNKCVNFNFNGLTGTGVLTESNKKFLPFQQFGRDIADTTDAVRDPQTLEILDITPCSFGGVSVITPGTNTSNQVAVLYQGVNCTEVPVAIHADQLTPTWRVYSTGSNVFQTRAGCLIGAEHVNNSYECDIPIGAGICASYQTQTNSPRRARSVASQSIIAYTMSLGAENSVAYSNNSIAICTNFTISVTTEILPVSMTKTSVDCTMYICGDSTECSNLLLQYGSFCTQLNRALTGIALEQDKNTQEVFAQVKQIYKTPPIKDFGGFNFSQILPDPSKPSKRSFIEDLLFNKVTLADAGFIKQYGDCLGDIAARDLICAQKFNGLTVLPPLLTDEMIAQYTSALLAGTITSGWTFGAGAALQIPFAMQMAYRFNGIGVTQNVLYENQKLIANQFNSAIGKIQDSLSSTASALGKLQDVVNQNAQALNTLVKQLSSNFGAISSVLNDILSRLDKVEAEVQIDRLITGRLQSLQTYVTQQLIRAAEIRASANLAATKMSECVLGQSKRVDFCGKGYHLMSFPQSAPHGVVFLHVTYVCAQEKNFTTAPAICHDGKAHFPREGVFVSNGTHWFVTQRNFYEPQIITTDNTFVSGNCDVVIGIVNNTVYDPLQPELDSFKEELDKYFKNHTSPDVDLGDISGINASVVNIQKEIDRLNEVAKNLNESLIDLQELGKYEQYIKGGGGSDIDPYKEFGSSYQLLNFLPLDFFPDLNALVDTATALYEEELTGREHCSPHHTAIRQALVCWDELTKLIAWMSSNITSEQVRTIIVNHVNDTWGLKVRQSLWFHLSCLTFGQHTVQEFLVSFGVWIRTPAPYRPPNAPILSTLPEHTVIC

SEQ ID NO: 7142 - protein, 1365 aa, Artificial Sequence
  SARS-CoV-2/USA/WA-UW31/2020__EPI_ISL_414618 spike protein (1-1211)(P715C_P1069C) WhcAg construct
MFVFLVLLPLVSSQCVNLTTRTQLPPAYTNSFTRGVYYPDKVFRSSVLHSTQDLFLPFFSNVTWFHAIHVSGTNGTKRFDNPVLPFNDGVYFASTEKSNIIRGWIFGTTLDSKTQSLLIVNNATNVVIKVCEFQFCNDPFLGVYYHKNNKSWMESEFRVYSSANNCTFEYVSQPFLMDLEGKQGNFKNLREFVFKNIDGYFKIYSKHTPINLVRDLPQGFSALEPLVDLPIGINITRFQTLLALHRSYLTPGDSSSGWTAGAAAYYVGYLQPRTFLLKYNENGTITDAVDCALDPLSETKCTLKSFTVEKGIYQTSNFRVQPTESIVRFPNITNLCPFGEVFNATRFASVYAWNRKRISNCVADYSVLYNSASFSTFKCYGVSPTKLNDLCFTNVYADSFVIRGDEVRQIAPGQTGKIADYNYKLPDDFTGCVIAWNSNNLDSKVGGNYNYLYRLFRKSNLKPFERDISTEIYQAGSTPCNGAEGFNCYFPLQSYGFQPTNGVGYQPYRVVVLSFELLHAPATVCGPKKSTNLVKNKCVNFNFNGLTGTGVLTESNKKFLPFQQFGRDIADTTDAVRDPQTLEILDITPCSFGGVSVITPGTNTSNQVAVLYQDVNCTEVPVAIHADQLTPTWRVYSTGSNVFQTRAGCLIGAEHVNNSYECDIPIGAGICASYQTQTNSPRRARSVASQSIIAYTMSLGAENSVAYSNNSIAICTNFTISVTTEILPVSMTKTSVDCTMYICGDSTECSNLLLQYGSFCTQLNRALTGIAVEQDKNTQEVFAQVKQIYKTPPIKDFGGFNFSQILPDPSKPSKRSFIEDLLFNKVTLADAGFIKQYGDCLGDIAARDLICAQKFNGLTVLPPLLTDEMIAQYTSALLAGTITSGWTFGAGAALQIPFAMQMAYRFNGIGVTQNVLYENQKLIANQFNSAIGKIQDSLSSTASALGKLQDVVNQNAQALNTLVKQLSSNFGAISSVLNDILSRLDKVEAEVQIDRLITGRLQSLQTYVTQQLIRAAEIRASANLAATKMSECVLGQSKRVDFCGKGYHLMSFPQSAPHGVVFLHVTYVCAQEKNFTTAPAICHDGKAHFPREGVFVSNGTHWFVTQRNFYEPQIITTDNTFVSGNCDVVIGIVNNTVYDPLQPELDSFKEELDKYFKNHTSPDVDLGDISGINASVVNIQKEIDRLNEVAKNLNESLIDLQELGKYEQYIKGGGGSDIDPYKEFGSSYQLLNFLPLDFFPDLNALVDTATALYEEELTGREHCSPHHTAIRQALVCWDELTKLIAWMSSNITSEQVRTIIVNHVNDTWGLKVRQSLWFHLSCLTFGQHTVQEFLVSFGVWIRTPAPYRPPNAPILSTLPEHTVIC

SEQ ID NO: 7143 - protein, 1365 aa, Artificial Sequence
  SARS-CoV-2/South Korea/SNU01/2020__EPI_ISL_411929 spike protein (1-1211)(P715C_P1069C) WhcAg construct
MFVFLVLLPLVSSQCVNLTTRTQLPPAYTNSFTRGVYYPDKVFRSSVLHSTQDLFLPFFSNVTWFHAIHVSGTNGTKRFDNPVLPFNDGVYFASTEKSNIIRGWIFGTTLDSKTQSLLIVNNATNVVIKVCEFQFCNDPFLGVYYHKNNKSWMESEFRVYSSANNCTFEYVSQPFLMDLEGKQGNFKNLREFVFKNIDGYFKIYSKHTPINLVRDLPQGFWALEPLVDLPIGINITRFQTLLALHRSYLTPGDSSSGWTAGAAAYYVGYLQPRTFLLKYNENGTITDAVDCALDPLSETKCTLKSFTVEKGIYQTSNFRVQPTESIVRFPNITNLCPFGEVFNATRFASVYAWNRKRISNCVADYSVLYNSASFSTFKCYGVSPTKLNDLCFTNVYADSFVIRGDEVRQIAPGQTGKIADYNYKLPDDFTGCVIAWNSNNLDSKVGGNYNYLYRLFRKSNLKPFERDISTEIYQAGSTPCNGVEGFNCYFPLQSYGFQPTNGVGYQPYRVVVLSFELLHAPATVCGPKKSTNLVKNKCVNFNFNGLTGTGVLTESNKKFLPFQQFGRDIADTTDAVRDPQTLEILDITPCSFGGVSVITPGTNTSNQVAVLYQDVNCTEVPVAIHADQLTPTWRVYSTGSNVFQTRAGCLIGAEHVNNSYECDIPIGAGICASYQTQTNSPRRARSVASQSIIAYTMSLGAENSVAYSNNSIAICTNFTISVTTEILPVSMTKTSVDCTMYICGDSTECSNLLLQYGSFCTQLNRALTGIAVEQDKNTQEVFAQVKQIYKTPPIKDFGGFNFSQILPDPSKPSKRSFIEDLLFNKVTLADAGFIKQYGDCLGDIAARDLICAQKFNGLTVLPPLLTDEMIAQYTSALLAGTITSGWTFGAGAALQIPFAMQMAYRFNGIGVTQNVLYENQKLIANQFNSAIGKIQDSLSSTASALGKLQDVVNQNAQALNTLVKQLSSNFGAISSVLNDILSRLDKVEAEVQIDRLITGRLQSLQTYVTQQLIRAAEIRASANLAATKMSECVLGQSKRVDFCGKGYHLMSFPQSAPHGVVFLHVTYVCAQEKNFTTAPAICHDGKAHFPREGVFVSNGTHWFVTQRNFYEPQIITTDNTFVSGNCDVVIGIVNNTVYDPLQPELDSFKEELDKYFKNHTSPDVDLGDISGINASVVNIQKEIDRLNEVAKNLNESLIDLQELGKYEQYIKGGGGSDIDPYKEFGSSYQLLNFLPLDFFPDLNALVDTATALYEEELTGREHCSPHHTAIRQALVCWDELTKLIAWMSSNITSEQVRTIIVNHVNDTWGLKVRQSLWFHLSCLTFGQHTVQEFLVSFGVWIRTPAPYRPPNAPILSTLPEHTVIC

SEQ ID NO: 7144 - protein, 1365 aa, Artificial Sequence
  SARS-CoV-2/China/WF0004/2020__EPI_ISL_413694 spike protein (1-1211)(P715C_P1069C) WhcAg construct
MFVFLVLLPLVSSQCVNLTTRTQLPPAYTNSFTRGVYYPDKVFRSSVLHSTQDLFLPFFSNVTWFHAIHVSGTNGTKRFDNPVLPFNDGVYFASTEKSNIIRGWIFGTTLDSKTQSLLIVNNATNVVIKVCEFQFCNDPFLGVYYHKNNKSWTESEFRVYSSANNCTFEYVSQPFLMDLEGKQGNFKNLREFVFKNIDGYFKIYSKHTPINLVRDLPQGFSALEPLVDLPIGINITRFQTLLALHRSYLTPGDSSSGWTAGAAAYYVGYLQPRTFLLKYNENGTITDAVDCALDPLSETKCTLKSFTVEKGIYQTSNFRVQPTESIVRFPNITNLCPFGEVFNATRFASVYAWNRKRISNCVADYSVLYNSASFSTFKCYGVSPTKLNDLCFTNVYADSFVIRGDEVRQIAPGQTGKIADYNYKLPDDFTGCVIAWNSNNLDSKVGGNYNYLYRLFRKSNLKPFERDISTEIYQAGSTPCNGVEGFNCYFPLQSYGFQPTNGVGYQPYRVVVLSFELLHAPATVCGPKKSTNLVKNKCVNFNFNGLTGTGVLTESNKKFLPFQQFGRDIADTTDAVRDPQTLEILDITPCSFGGVSVITPGTNTSNQVAVLYQDVNCTEVPVAIHADQLTPTWRVYSTGSNVFQTRAGCLIGAEHVNNSYECDIPIGAGICASYQTQTNSPRRARSVASQSIIAYTMSLGAENSVAYSNNSIAICTNFTISVTTEILPVSMTKTSVDCTMYICGDSTECSNLLLQYGSFCTQLNRALTGIAVEQDKNTQEVFAQVKQIYKTPPIKDFGGFNFSQILPDPSKPSKRSFIEDLLFNKVTLADAGFIKQYGDCLGDIAARDLICAQKFNGLTVLPPLLTDEMIAQYTSALLAGTITSGWTFGAGAALQIPFAMQMAYRFNGIGVTQNVLYENQKLIANQFNSAIGKIQDSLSSTASALGKLQDVVNQNAQALNTLVKQLSSNFGAISSVLNDILSRLDKVEAEVQIDRLITGRLQSLQTYVTQQLIRAAEIRASANLAATKMSECVLGQSKRFDFCGKGYHLMSFPQSAPHGVVFLHVTYVCAQEKNFTTAPAICHDGKAHFPREGVFVSNGTHWFVTQRNFYEPQIITTDNTFVSGNCDVVIGIVNNTVYDPLQPELDSFKEELDKYFKNHTSPDVDLGDISGINASVVNIQKEIDRLNEVAKNLNESLIDLQELGKYEQYIKGGGGSDIDPYKEFGSSYQLLNFLPLDFFPDLNALVDTATALYEEELTGREHCSPHHTAIRQALVCWDELTKLIAWMSSNITSEQVRTIIVNHVNDTWGLKVRQSLWFHLSCLTFGQHTVQEFLVSFGVWIRTPAPYRPPNAPILSTLPEHTVIC

SEQ ID NO: 7145 - protein, 1365 aa, Artificial Sequence
  SARS-CoV-2/China/WF0028/2020__EPI_ISL_413791 spike protein (1-1211)(P715C_P1069C) WhcAg construct
MFVFLVLLPLVSSQCVNLTTRTQLPPAYTNSFTRGVYYPDKVFRSSVLHSTQDLFLPFFSNVTWFHAIHVSGTNGTKRFDNPVLPFNDGVYFASTEKSNIIRGWIFGTTLDSKTQSLLIVNNATNVVIKVCEFQFCNDPFLGVYYHKNNKSWMESEFRVYSSANNCTFEYVSQPFLMDLEGKQGNFKNLREFVFKNIDGYFKIYSKHTPINLVRDLPQGFSALEPLVDLPIGINITRFQTLLALHRSYLTPGDSSSGWTAGAAAYYVGYLQPRTFLLKYNENGTITDAVDCALDPLSETKCTLKSFTVEKGIYQTSNFRVQPTESIVRFPNITNLCPFGEVFNATRFASVYAWNRKRISNCVADYSVLYNSASFSTFKCYGVSPTKLNDLCFTNVYADSFVIRGDEVRQIAPGQTGKIADYNYKLPDDFTGCVIAWNSNNLDSKVGGNYNYLYRLFRKSNLKPFERDISTEIYQAGSTPCNGVEGFNCYFPLQSYGFQPTNGVGYQPYRVVVLSFELLHAPATVCGPKKSTNLVKNKCVNFNFNGLTGTGVLTESNKKFLPFQQFGRDIADTTDAVRDPQTLEILDITPCSFGGVSVITPGTNTSNQVAVLYQDVNCTEVPVAIHADQLTPTWRVYSTGSNVFQTRAGCLIGAEHVNNSYECDIPIGAGICASYQTQTNSPRRARSVASQSIIAYTMSLGAENSVAYSNNSIAICTNFTISVTTEILPVSMTKTSVDCTMYICGDSTECSNLLLQYGSFCTQLNRALTGIAVEQDKNTQEVFAQVKQIYKTPPIKDFGGFNFSQILPDPSKPSKRSFIEDLLFNKVTLADAGFIKQYGDCLGDIAARDLICAQKFNGLTVLPPLLTDEMIAQYTSALLAGTITSGWTFGAGAALQIPFAMQMAYRFNGIGVTQNVLYENQKLIANQFNSAIGKIQDSLSSTASALGKLQDVVNQNAQALNTLVKQLSSNFGAISSVLNDILSRLDKVEAEVQIDRLITGRLQSLQTYVTQQLIRAAEIRASANLAATKMSECVLGQSKRVDFCGKGYHLMSFPQSAPHGVVFLHVTYVCAQEKNFTTAPAICHDGKAHFPREGVFVSNGTHWFVTQRNFYEPQIITTDNTFVSGNCDVVIGIVNNTVYDPLQPELESFKEELDKYFKNHTSPDVDLGDISGINASVVNIQKEIDRLNEVAKNLNESLIDLQELGKYEQYIKGGGGSDIDPYKEFGSSYQLLNFLPLDFFPDLNALVDTATALYEEELTGREHCSPHHTAIRQALVCWDELTKLIAWMSSNITSEQVRTIIVNHVNDTWGLKVRQSLWFHLSCLTFGQHTVQEFLVSFGVWIRTPAPYRPPNAPILSTLPEHTVIC

SEQ ID NO: 7146 - protein, 1365 aa, Artificial Sequence
  SARS-CoV-2/2019-nCoV/USA-CruiseA-18/2020__MT159716.1 spike protein (1-1211)(P715C_P1069C) WhcAg construct
MFVFLVLLPLVSSQCVNLTTRTQLPPAYTNSFTRGVYYPDKVFRSSVLHSTQDLFLPFFSNVTWFHAIHVSGTNGTKRFDNPVLPFNDGVYFASTEKSNIIRGWIFGTTLDSKTQSLLIVNNATNVVIKVCEFQFCNDPFLGVYYHKNNKSWMESELRVYSSANNCTFEYVSQPFLMDLEGKQGNFKNLREFVFKNIDGYFKIYSKHTPINLVRDLPQGFSALEPLVDLPIGINITRFQTLLALHRSYLTPGDSSSGWTAGAAAYYVGYLQPRTFLLKYNENGTITDAVDCALDPLSETKCTLKSFTVEKGIYQTSNFRVQPTESIVRFPNITNLCPFGEVFNATRFASVYAWNRKRISNCVADYSVLYNSASFSTFKCYGVSPTKLNDLCFTNVYADSFVIRGDEVRQIAPGQTGKIADYNYKLPDDFTGCVIAWNSNNLDSKVGGNYNYLYRLFRKSNLKPFERDISTEIYQAGSTPCNGVEGFNCYFPLQSYGFQPTNGVGYQPYRVVVLSFELLHAPATVCGPKKSTNLVKNKCVNFNFNGLTGTGVLTESNKKFLPFQQFGRDIADTTDAVRDPQTLEILDITPCSFGGVSVITPGTNTSNQVAVLYQDVNCTEVPVAIHADQLTPTWRVYSTGSNVFQTRAGCLIGAEHVNNSYECDIPIGAGICASYQTQTNSPRRARSVASQSIIAYTMSLGAENSVAYSNNSIAICTNFTISVTTEILPVSMTKTSVDCTMYICGDSTECSNLLLQYGSFCTQLNRALTGIAVEQDKNTQEVFAQVKQIYKTPPIKDFGGFNFSQILPDPSKPSKRSFIEDLLFNKVTLADAGFIKQYGDCLGDIAARDLICAQKFNGLTVLPPLLTDEMIAQYTSALLAGTITSGWTFGAGAALQIPFAMQMAYRFNGIGVTQNVLYENQKLIANQFNSAIGKIQDSLSSTASALGKLQDVVNQNAQALNTLVKQLSSNFGAISSVLNDILSRLDKVEAEVQIDRLITGRLQSLQTYVTQQLIRAAEIRASANLAATKMSECVLGQSKRVDFCGKGYHLMSFPQSAPHGVVFLHVTYVCAQEKNFTTAPAICHDGKAHFPREGVFVSNGTHWFVTQRNFYEPQIITTDNTFVSGNCDVVIGIVNNTVYDPLQPELDSFKEELDKYFKNHTSPDVDLGDISGINASVVNIQKEIDRLNEVAKNLNESLIDLQELGKYEQYIKGGGGSDIDPYKEFGSSYQLLNFLPLDFFPDLNALVDTATALYEEELTGREHCSPHHTAIRQALVCWDELTKLIAWMSSNITSEQVRTIIVNHVNDTWGLKVRQSLWFHLSCLTFGQHTVQEFLVSFGVWIRTPAPYRPPNAPILSTLPEHTVIC

SEQ ID NO: 7147 - protein, 1365 aa, Artificial Sequence
  SARS-CoV-2/SARS-CoV-2/Yunnan-01/human/2020/CHN__MT049951.1 spike protein (1-1211)(P715C_P1069C) WhcAg construct
MFVFLVLLPLVSSQCVNLTTRTQLPPANTNSFTRGVYYPDKVFRSSVLHSTQDLFLPFFSNVTWFHAIHVSGTNGTKRFDNPVLPFNDGVYFASTEKSNIIRGWIFGTTLDSKTQSLLIVNNATNVVIKVCEFQFCNDPFLGVYYHKNNKSWMESEFRVYSSANNCTFEYVSQPFLMDLEGKQGNFKNLREFVFKNIDGYFKIYSKHTPINLVRDLPQGFSALEPLVDLPIGINITRFQTLLALHRSYLTPGDSSSGWTAGAAAYYVGYLQPRTFLLKYNENGTITDAVDCALDPLSETKCTLKSFTVEKGIYQTSNFRVQPTESIVRFPNITNLCPFGEVFNATRFASVYAWNRKRISNCVADYSVLYNSASFSTFKCYGVSPTKLNDLCFTNVYADSFVIRGDEVRQIAPGQTGKIADYNYKLPDDFTGCVIAWNSNNLDSKVGGNYNYLYRLFRKSNLKPFERDISTEIYQAGSTPCNGVEGFNCYFPLQSYGFQPTNGVGYQPYRVVVLSFELLHAPATVCGPKKSTNLVKNKCVNFNFNGLTGTGVLTESNKKFLPFQQFGRDIADTTDAVRDPQTLEILDITPCSFGGVSVITPGTNTSNQVAVLYQDVNCTEVPVAIHADQLTPTWRVYSTGSNVFQTRAGCLIGAEHVNNSYECDIPIGAGICASYQTQTNSPRRARSVASQSIIAYTMSLGAENSVAYSNNSIAICTNFTISVTTEILPVSMTKTSVDCTMYICGDSTECSNLLLQYGSFCTQLNRALTGIAVEQDKNTQEVFAQVKQIYKTPPIKDFGGFNFSQILPDPSKPSKRSFIEDLLFNKVTLADAGFIKQYGDCLGDIAARDLICAQKFNGLTVLPPLLTDEMIAQYTSALLAGTITSGWTFGAGAALQIPFAMQMAYRFNGIGVTQNVLYENQKLIANQFNSAIGKIQDSLSSTASALGKLQDVVNQNAQALNTLVKQLSSNFGAISSVLNDILSRLDKVEAEVQIDRLITGRLQSLQTYVTQQLIRAAEIRASANLAATKMSECVLGQSKRVDFCGKGYHLMSFPQSAPHGVVFLHVTYVCAQEKNFTTAPAICHDGKAHFPREGVFVSNGTHWFVTQRNFYEPQIITTDNTFVSGNCDVVIGIVNNTVYDPLQPELDSFKEELDKYFKNHTSPDVDLGDISGINASVVNIQKEIDRLNEVAKNLNESLIDLQELGKYEQYIKGGGGSDIDPYKEFGSSYQLLNFLPLDFFPDLNALVDTATALYEEELTGREHCSPHHTAIRQALVCWDELTKLIAWMSSNITSEQVRTIIVNHVNDTWGLKVRQSLWFHLSCLTFGQHTVQEFLVSFGVWIRTPAPYRPPNAPILSTLPEHTVIC

SEQ ID NO: 7148 - protein, 1365 aa, Artificial Sequence
  SARS-CoV-2/USA/WA-UW292/2020__EPI_ISL_418077 spike protein (1-1211)(P715C_P1069C) WhcAg construct
MFVFLVLLPLVSSQCVNLTTRTQLPPAYTNSFTRGVYYPDKVFRSSVLHSTQDLFLPFFSNVTWFHAIHVSGTNGTKRFDNPVLPFNDGVYFASTEKSNIIRGWIFGTTLDSKTQSLLIVNNATNVVIKVCEFQFCNDPFLGVYYHKNNKSWMESEFRVYSSANNCTFEYVSQPFLMDLEGKQGNFKNLREFVFKNIDGYFKIYSKHTPINLVRDLPQGFSALEPLVDLPIGINITRFQTLLALHRSYLTPGDSSSGWTAGAAAYYVGYLQPRTFLLKYNENGTITDAVDCALDPLSETKCTLKSFTVEKGIYQTSNFRVQPTESIVRFPNITNLCPFGEVFNATRFASVYAWNRKRISNCVADYSVLYNSASFSTFKCYGVSPTKLNDLCFTNVYADSFVIRGDEVRQIAPGQTGKIADYNYKLPDDFTGCVIAWNSNNLDSKVGGNYNYLYRLFRKSNLKPFERDISTEIYQASSTPCNGVEGFNCYFPLQSYGFQPTNGVGYQPYRVVVLSFELLHAPATVCGPKKSTNLVKNKCVNFNFNGLTGTGVLTESNKKFLPFQQFGRDIADTTDAVRDPQTLEILDITPCSFGGVSVITPGTNTSNQVAVLYQDVNCTEVPVAIHADQLTPTWRVYSTGSNVFQTRAGCLIGAEHVNNSYECDIPIGAGICASYQTQTNSPRRARSVASQSIIAYTMSLGAENSVAYSNNSIAICTNFTISVTTEILPVSMTKTSVDCTMYICGDSTECSNLLLQYGSFCTQLNRALTGIAVEQDKNTQEVFAQVKQIYKTPPIKDFGGFNFSQILPDPSKPSKRSFIEDLLFNKVTLADAGFIKQYGDCLGDIAARDLICAQKFNGLTVLPPLLTDEMIAQYTSALLAGTITSGWTFGAGAALQIPFAMQMAYRFNGIGVTQNVLYENQKLIANQFNSAIGKIQDSLSSTASALGKLQDVVNQNAQALNTLVKQLSSNFGAISSVLNDILSRLDKVEAEVQIDRLITGRLQSLQTYVTQQLIRAAEIRASANLAATKMSECVLGQSKRVDFCGKGYHLMSFPQSAPHGVVFLHVTYVCAQEKNFTTAPAICHDGKAHFPREGVFVSNGTHWFVTQRNFYEPQIITTDNTFVSGNCDVVIGIVNNTVYDPLQPELDSFKEELDKYFKNHTSPDVDLGDISGINASVVNIQKEIDRLNEVAKNLNESLIDLQELGKYEQYIKGGGGSDIDPYKEFGSSYQLLNFLPLDFFPDLNALVDTATALYEEELTGREHCSPHHTAIRQALVCWDELTKLIAWMSSNITSEQVRTIIVNHVNDTWGLKVRQSLWFHLSCLTFGQHTVQEFLVSFGVWIRTPAPYRPPNAPILSTLPEHTVIC

SEQ ID NO: 7149 - protein, 1365 aa, Artificial Sequence
  SARS-CoV-2/Iceland/192/2020__EPI_ISL_417819 spike protein (1-1211)(P715C_P1069C) WhcAg construct
MFVFFVLLPLVSSQCVNLTTRTQLPPAYTNSFTRGVYYPDKVFRSSVLHSTQDLFLPFFSNVTWFHAIHVSGTNGTKRFDNPVLPFNDGVYFASTEKSNIIRGWIFGTTLDSKTQSLLIVNNATNVVIKVCEFQFCNDPFLGVYYHKNNKSWMESEFRVYSSANNCTFEYVSQPFLMDLEGKQGNFKNLREFVFKNIDGYFKIYSKHTPINLVRDLPQGFSALEPLVDLPIGINITRFQTLLALHRSYLTPGDSSSGWTAGAAAYYVGYLQPRTFLLKYNENGTITDAVDCALDPLSETKCTLKSFTVEKGIYQTSNFRVQPTESIVRFPNITNLCPFGEVFNATRFASVYAWNRKRISNCVADYSVLYNSASFSTFKCYGVSPTKLNDLCFTNVYADSFVIRGDEVRQIAPGQTGKIADYNYKLPDDFTGCVIAWNSNNLDSKVGGNYNYLYRLFRKSNLKPFERDISTEIYQAGSTPCNGVEGFNCYFPLQSYGFQPTNGVGYQPYRVVVLSFELLHAPATVCGPKKSTNLVKNKCVNFNFNGLTGTGVLTESNKKFLPFQQFGRDIADTTDAVRDPQTLEILDITPCSFGGVSVITPGTNTSNQVAVLYQGVNCTEVPVAIHADQLTPTWRVYSTGSNVFQTRAGCLIGAEHVNNSYECDIPIGAGICASYQTQTNSPRRARSVASQSIIAYTMSLGAENSVAYSNNSIAICTNFTISVTTEILPVSMTKTSVDCTMYICGDSTECSNLLLQYGSFCTQLNRALTGIAVEQDKNTQEVFAQVKQIYKTPPIKDFGGFNFSQILPDPSKPSKRSFIEDLLFNKVTLADAGFIKQYGDCLGDIAARDLICAQKFNGLTVLPPLLTDEMIAQYTSALLAGTITSGWTFGAGAALQIPFAMQMAYRFNGIGVTQNVLYENQKLIANQFNSAIGKIQDSLSSTASALGKLQDVVNQNAQALNTLVKQLSSNFGAISSVLNDILSRLDKVEAEVQIDRLITGRLQSLQTYVTQQLIRAAEIRASANLAATKMSECVLGQSKRVDFCGKGYHLMSFPQSAPHGVVFLHVTYVCAQEKNFTTAPAICHDGKAHFPREGVFVSNGTHWFVTQRNFYEPQIITTDNTFVSGNCDVVIGIVNNTVYDPLQPELDSFKEELDKYFKNHTSPDVDLGDISGINASVVNIQKEIDRLNEVAKNLNESLIDLQELGKYEQYIKGGGGSDIDPYKEFGSSYQLLNFLPLDFFPDLNALVDTATALYEEELTGREHCSPHHTAIRQALVCWDELTKLIAWMSSNITSEQVRTIIVNHVNDTWGLKVRQSLWFHLSCLTFGQHTVQEFLVSFGVWIRTPAPYRPPNAPILSTLPEHTVIC

SEQ ID NO: 7150 - protein, 1365 aa, Artificial Sequence
  SARS-CoV-2/Belgium/ULG-6939/2020__EPI_ISL_417020 spike protein (1-1211)(P715C_P1069C) WhcAg construct
MFVFLVLLPLVSSQCVNLTTRTQLPPAYTNSFTRGVYYPDKVFRSSVLHSTQDLFLPFFSNVTWFHAIHVSGTNGTKRFDNPVLPFNDGVYFASTEKSNIIRGWIFGTTLDSKTQSLLIVNNATNVVIKVCEFQFCNDPFLGVYYHKNNKSWMESEFRVYSSANNCTFEYVSQPFLMDLEGKQGNFKNLREFVFKNIDGYFKIYSKHTPINLVRDLPQGFSALEPLVDLPIGINITRFQTLLALHRSYLTPGDSSSGWTAGAAAYYVGYLQPRTFLLKYNENGTITDAVDCALDPLSETKCTLKSFTVEKGIYQTSNFRVQPTESIVRFPNITNLCPFGEVFNATRFASVYAWNRKRISNCVADYSVLYNSASFSTFKCYGVSPTKLNDLCFTNVYADSFVIRGDEVRQIAPGQTGKIADYNYKLPDDFTGCVIAWNSNNLDSKVGGNYNYLYRLFRKSNLKPFERDISTEIYQAGSTPCNGVEGFNCYFPLQSYGFQPTNGVGYQPYRVVVLSFELLHAPATVCGPKKSTNLVKNKCVNFNFNGLTGTGVLTESNKKFLPFQQFGRDIADTTDAVRDPQTLEILDITPCSFGGVSVITPGTNTSNQVAVLYQGVNCTEVPVAIHADQLTPTWRVYSTGSNVFQTRAGCLIGAEHVNNSYECDIPIGAGICASYQTQTNSPRRARSVASQSIIAYTMSLGAENSVVYSNNSIAICTNFTISVTTEILPVSMTKTSVDCTMYICGDSTECSNLLLQYGSFCTQLNRALTGIAVEQDKNTQEVFAQVKQIYKTPPIKDFGGFNFSQILPDPSKPSKRSFIEDLLFNKVTLADAGFIKQYGDCLGDIAARDLICAQKFNGLTVLPPLLTDEMIAQYTSALLAGTITSGWTFGAGAALQIPFAMQMAYRFNGIGVTQNVLYENQKLIANQFNSAIGKIQDSLSSTASALGKLQDVVNQNAQALNTLVKQLSSNFGAISSVLNDILSRLDKVEAEVQIDRLITGRLQSLQTYVTQQLIRAAEIRASANLAATKMSECVLGQSKRVDFCGKGYHLMSFPQSAPHGVVFLHVTYVCAQEKNFTTAPAICHDGKAHFPREGVFVSNGTHWFVTQRNFYEPQIITTDNTFVSGNCDVVIGIVNNTVYDPLQPELDSFKEELDKYFKNHTSPDVDLGDISGINASVVNIQKEIDRLNEVAKNLNESLIDLQELGKYEQYIKGGGGSDIDPYKEFGSSYQLLNFLPLDFFPDLNALVDTATALYEEELTGREHCSPHHTAIRQALVCWDELTKLIAWMSSNITSEQVRTIIVNHVNDTWGLKVRQSLWFHLSCLTFGQHTVQEFLVSFGVWIRTPAPYRPPNAPILSTLPEHTVIC

SEQ ID NO: 7151 - protein, 1365 aa, Artificial Sequence
  SARS-CoV-2/France/HF2496/2020__EPI_ISL_418231 spike protein (1-1211)(P715C_P1069C) WhcAg construct
MFVFLVLLPLVSSQCVNLTTRTQLPPAYTNSFTRGVYYPDKVFRSSVLHSTQDLFLPFFSNVTWFHAIHVSGTNGTKRFDNPVLPFNDGVYFASTEKSNIIRGWIFGTTLDSKTQSLLIVNNATNVVIKVCEFQFCNDPFLGVYYHKNNKSWMESEFRVYSSANNCTFEYVSQPFLMDLEGKQGNFKNLREFVFKNIDGYFKIYSKHTPINLVRDLPQGFSALEPLVDLPIGINITRFQTLLALHRSYLTPGDSSSGWTAGAAAYYVGYLQPRTFLLKYNENGTITDAVDCALDPLSETKCTLKSFTVEKGIYQTSNFRVQPTESIVRFPNITNLCPFGEVFNATRFASVYAWNRKRISNCVADYSVLYNSASFSTFKCYGVSPTKLNDLCFTNVYADSFVIRGDEVRQIAPGQTGKIADYNYKLPDDFTGCVIAWNSNNLDSKVGGNYNYLYRLFRKSNLKPFERDISTEIYQAGSTPCNGVEGFNCYFPLQSYGFQPTNGVGYQPYRVVVLSFELLHAPATVCGPKKSTNLVKNKCVNFNFNGLTGTGVLTESNKKFLPFQQFGRDIADTTDAVRDPQTLEILDITPCSFGGVSVITPGTNTSNQVAVLYQGVNCTEVPVAIHADQLTPTWRVYSTGSNVFQTRAGCLIGAEHVNNSYECDIPIGAGICASYQTQTNSPRRARSVASQSIIAYTMSLGAENSVAYSNNSIAICTNFTISVTTEILPVSMTKTSVDCTMYICGDSTECSNLLLQYGSFCTQLNRALTGIAVEQDKNTQEVFAQVKQIYKTPPIKDFGGFNFSQILPDPSKPSKRSFIEDLLFNKVTLADAGFIKQYGDCLGDIVARDLICAQKFNGLTVLPPLLTDEMIAQYTSALLAGTITSGWTFGAGAALQIPFAMQMAYRFNGIGVTQNVLYENQKLIANQFNSAIGKIQDSLSSTASALGKLQDVVNQNAQALNTLVKQLSSNFGAISSVLNDILSRLDKVEAEVQIDRLITGRLQSLQTYVTQQLIRAAEIRASANLAATKMSECVLGQSKRVDFCGKGYHLMSFPQSAPHGVVFLHVTYVCAQEKNFTTAPAICHDGKAHFPREGVFVSNGTHWFVTQRNFYEPQIITTDNTFVSGNCDVVIGIVNNTVYDPLQPELDSFKEELDKYFKNHTSPDVDLGDISGINASVVNIQKEIDRLNEVAKNLNESLIDLQELGKYEQYIKGGGGSDIDPYKEFGSSYQLLNFLPLDFFPDLNALVDTATALYEEELTGREHCSPHHTAIRQALVCWDELTKLIAWMSSNITSEQVRTIIVNHVNDTWGLKVRQSLWFHLSCLTFGQHTVQEFLVSFGVWIRTPAPYRPPNAPILSTLPEHTVIC

SEQ ID NO: 7152 - protein, 1365 aa, Artificial Sequence
  SARS-CoV-2/USA/WA-UW291/2020__EPI_ISL_418076 spike protein (1-1211)(P715C_P1069C) WhcAg construct
MFVFLVLLPLVSSQCVNLTTRTQLPPAYTNSFTRGVYYPDKVFRSSVLHSTQDLFLPFFSNVTWFHAIHVSGTNGTKRFDNPVLPFNDGVYFASTEKSNIIRGWIFGTTLDSKTQSLLIVNNATNVVIKVCEFQFCNDPFLGVYYHKNNKSWMESEFRVYSSANNCTFEYVSQPFLMDLEGKQGNFKNLREFVFKNIDGYFKIYSKHTPINLVRDLPQGFSALEPLVDLPIGINITRFQTLLALHRSYLTPGDSSSGWTAGAAAYYVGYLQPRTFLLKYNENGTITDAVDCALDPLSETKCTLKSFTVEKGIYQTSNFRVQPTESIVRFPNITNLCPFGEVFNATRFASVYAWNRKRISNCVADYSVLYNSASFSTFKCYGVSPTKLNDLCFTNVYADSFVIRGDEVRQIAPGQTGKIADYNYKLPDDFTGCVIAWNSNNLDSKVGGNYNYLYRLFRKSNLKPFERDISTEIYQAGSTPCNGVEGFNCYFPLQSYGFQPTNGVGYQPYRVVVLSFELLHAPATVCGPKKSTNLVKNKCVNFNFNGLTGTGVLTESNKKFLPFQQFGRDIADTTDAVRDPQTLEILDITPCSFGGVSVITPGTNTSNQVAVLYQGVNCTEVPVAIHADQLTPTWRVYSTGSNVFQTRAGCLIGAEHVNNSYECDIPIGAGICASYQTQTNSPRRARSVASQSIIAYTMSLGAENSVAYSNNSIAICTNFTISVTTEILPVSMTKTSVDCTMYICGDSTECSNLLLQYGSFCTQLNRALTGIAVEQDKNTQEVFAQVKQIYKTPPIKDFGGFNFSQILPDPSKPSKRSFIEDLLFNKVTLADAGFIKQYGDCLGDIAARDLICAQKFNGLTVLPPLLTDEMIAQYTSALLAGTITSGWTFGAGAALQIPFAMQMAYRFNGIGVTQNVLYENQKLIANQFNSAIGKIQYSLSSTASALGKLQDVVNQNAQALNTLVKQLSSNFGAISSVLNDILSRLDKVEAEVQIDRLITGRLQSLQTYVTQQLIRAAEIRASANLAATKMSECVLGQSKRVDFCGKGYHLMSFPQSAPHGVVFLHVTYVCAQEKNFTTAPAICHDGKAHFPREGVFVSNGTHWFVTQRNFYEPQIITTDNTFVSGNCDVVIGIVNNTVYDPLQPELDSFKEELDKYFKNHTSPDVDLGDISGINASVVNIQKEIDRLNEVAKNLNESLIDLQELGKYEQYIKGGGGSDIDPYKEFGSSYQLLNFLPLDFFPDLNALVDTATALYEEELTGREHCSPHHTAIRQALVCWDELTKLIAWMSSNITSEQVRTIIVNHVNDTWGLKVRQSLWFHLSCLTFGQHTVQEFLVSFGVWIRTPAPYRPPNAPILSTLPEHTVIC

SEQ ID NO: 7153 - protein, 1365 aa, Artificial Sequence; identical to SEQ ID NO: 7116
  SARS-CoV-2/Portugal/PT0034/2020__EPI_ISL_418019 spike protein (1-1211)(P715C_P1069C) WhcAg construct

SEQ ID NO: 7154 - protein, 1365 aa, Artificial Sequence
  SARS-CoV-2/Iceland/202/2020__EPI_ISL_417750 spike protein (1-1211)(P715C_P1069C) WhcAg construct
MFVFLVLLPLVSSQCVNLTTRTQLPPAYTNSFTRGVYYPDKVFRSSVLHSTQDLFLPFFSNVTWFHAIHVSGTNGTKRFDNPVLPFNDGVYFASTEKSNIIRGWIFGTTLDSKTQSLLIVNNATNVVIKVCEFQFCNDPFLGVYYHKNNKSWMESEFRVYSSANNCTFEYVSQPFLMDLEGKQGNFKNLREFVFKNIDGYFKIYSKHTPINLVRDLPQGFSALEPLVDLPIGINITRFQTLLALHRSYLTPGDSSSGWTAGAAAYYVGYLQPRTFLLKYNENGTITDAVDCALDPLSETKCTLKSFTVEKGIYQTSNFRVQPTESIVRFPNITNLCPFGEVFNATRFASVYAWNRKRISNCVADYSVLYNSASFSTFKCYGVSPTKLNDLCFTNVYADSFVIRGDEVRQIAPGQTGKIADYNYKLPDDFTGCVIAWNSNNLDSKVGGNYNYLYRLFRKSNLKPFERDISTEIYQAGSTPCNGVEGFNCYFPLQSYGFQPTNGVGYQPYRVVVLSFELLHAPATVCGPKKSTNLVKNKCVNFNFNGLTGTGVLTESNKKFLPFQQFGRDIADTTDAVRDPQTLEILDITPCSFGGVSVITPGTNTSNQVAVLYQDVNCTEVPVAIHADQLTPTWRVYSTGSNVFQTRAGCLIGAEHVNNSYECDIPIGAGICASYQTQTNSPRRARSVASQSIIAYTMSLGAENSVAYSNNSIAICTNFTISVTTEILPVSMTKTSVDCTMYICGDSTECSNLLLQYGSFCTQLNRALTGIAVEQDKNTQEVFAQVKQIYKTPPIKDFGGFNFSQILPDPSKPSKRSFIEDLLFNKVTLADAGFIKQYGDCLGDIAARDLICAQKFNGLTVLPPLLTDEMIAQYTSALLAGTITSGWTFGAGAALQIPFAMQMAYRFNGIGVTQNVLYENQKLIANQFNSAIGKIQDSLSSTASALGKLQDVVNQNAQALNTLVKQLSSNFGAISSVLNDILSRLDKVEAEVQIDRLITGRLQSLQTYVTQQLIRAAEIRASANLAATKMSECVLGQSKRVDFCGKGYHLMSFPQSAPHGVVFLHVTYVCAQEKNFTTAPAICHDGKAHFPREGVFVSNGTHWFVTQRNFYEPQIITTDNTFVSGNCDVVIGIVNNTVYDPLQPELDSFKEELDKYFKNHTSPDVDLGDIPGINASVVNIQKEIDRLNEVAKNLNESLIDLQELGKYEQYIKGGGGSDIDPYKEFGSSYQLLNFLPLDFFPDLNALVDTATALYEEELTGREHCSPHHTAIRQALVCWDELTKLIAWMSSNITSEQVRTIIVNHVNDTWGLKVRQSLWFHLSCLTFGQHTVQEFLVSFGVWIRTPAPYRPPNAPILSTLPEHTVIC

SEQ ID NO: 7155 - protein, 1365 aa, Artificial Sequence
  SARS-CoV-2/USA/WA-UW261/2020__EPI_ISL_418046 spike protein (1-1211)(P715C_P1069C) WhcAg construct
MFVFLVLLPLVSSQCVNLTTRTQLPPAYTNSFTRGVYYPDKVFRSSVLHSTQDLFLPFFSNVTWFHAIHVSGTNGTKRFDNPVLPFNDGVYFASTEKSNIIRGWIFGTTLDSKTQSLLIVNNATNVVIKVCEFQFCNDPFLGVYYHKNNKSWMESEFRVYSSANNCTFEYVSQPFLMDLEGKQGNFKNLREFVFKNIDGYFKIYSKHTPINLVRDLPQGFSALEPLVDLPIGINITRFQTLLALHRSYLTPGDSSSGWTAGAAAYYVGYLQPRTFLLKYNENGTITDAVDCALDPLSETKCTLKSFTVEKGIYQTSNFRVQPTESIVRFPNITNLCPFGEVFNATRFTSVYAWNRKRISNCVADYSVLYNSASFSTFKCYGVSPTKLNDLCFTNVYADSFVIRGDEVRQIAPGQTGKIADYNYKLPDDFTGCVIAWNSNNLDSKVGGNYNYLYRLFRKSNLKPFERDISTEIYQAGSTPCNGVEGFNCYFPLQSYGFQPTNGVGYQPYRVVVLSFELLHAPATVCGPKKSTNLVKNKCVNFNFNGLTGTGVLTESNKKFLPFQQFGRDIADTTDAVRDPQTLEILDITPCSFGGVSVITPGTNTSNQVAVLYQDVNCTEVPVAIHADQLTPTWRVYSTGSNVFQTRAGCLIGAEHVNNSYECDIPIGAGICASYQTQTNSPRRARSVASQSIIAYTMSLGAENSVAYSNNSIAICTNFTISVTTEILPVSMTKTSVDCTMYICGDSTECSNLLLQYGSFCTQLNRALTGIAVEQDKNTQEVFAQVKQIYKTPPIKDFGGFNFSQILPDPSKPSKRSFIEDLLFNKVTLADAGFIKQYGDCLGDIAARDLICAQKFNGLTVLPPLLTDEMIAQYTSALLAGTITSGWTFGAGAALQIPFAMQMAYRFNGIGVTQNVLYENQKLIANQFNSAIGKIQDSLSSTASALGKLQDVVNQNAQALNTLVKQLSSNFGAISSVLNDILSRLDKVEAEVQIDRLITGRLQSLQTYVTQQLIRAAEIRASANLAATKMSECVLGQSKRVDFCGKGYHLMSFPQSAPHGVVFLHVTYVCAQEKNFTTAPAICHDGKAHFPREGVFVSNGTHWFVTQRNFYEPQIITTDNTFVSGNCDVVIGIVNNTVYDPLQPELDSFKEELDKYFKNHTSPDVDLGDISGINASVVNIQKEIDRLNEVAKNLNESLIDLQELGKYEQYIKGGGGSDIDPYKEFGSSYQLLNFLPLDFFPDLNALVDTATALYEEELTGREHCSPHHTAIRQALVCWDELTKLIAWMSSNITSEQVRTIIVNHVNDTWGLKVRQSLWFHLSCLTFGQHTVQEFLVSFGVWIRTPAPYRPPNAPILSTLPEHTVIC

SEQ ID NO: 7156 - protein, 1365 aa, Artificial Sequence
  SARS-CoV-2/Portugal/PT0035/2020__EPI_ISL_418020 spike protein (1-1211)(P715C_P1069C) WhcAg construct
MFVFLVLLPLVSSQCVNLTTRTQLPPAYTNSFTRGVYYPDKVFRSSVLHSTQDLFLPFFSNVTWFHAIHVSGTNGTKRFDNPVLPFNDGVYFASTEKSNIIRGWIFGTTLDSKTQSLLIVNNATNVVIKVCEFQFCNDPFLGVYYHKNNKSWMESEFRVYSSANNCTFEYVSQPFLMDLEGKQGNFKNLREFVFKNIDGYFKIYSKHTPINLVRDLPQGFSALEPLVDLPIGINITRFQTLLALHRSYLTPGDSSSGWTAGAAAYYVGYLQPRTFLLKYNENGTITDAVDCALDPLSETKCTLKSFTVEKGIYQTSNFRVQPTESIVRFPNITNLCPFGEVFNATRFASVYAWNRKRISNCVADYSVLYNSASFSTFKCYGVSPTKLNDLCFTNVYADSFVIRGDEVRQIAPGQTGKIADYNYKLPDDFTGCVIAWNSNNLDSKVGGNYNYLYRLFRKSNLKPFERDISTEIYQAGSTPCNGVEGFNCYFPLQSYGFQPTNGVGYQPYRVVVLSFELLHAPATVCGPKKSTNLVKNKCVNFNFNGLTGTGVLTESNKKFLPFQQFGRDIADTTDAVRDPQTLEILDITPCSFGGVSVITPGTNTSNQVAVLYQDVNCTEVPVAIHADQLTPTWRVYSTGSNVFQTRAGCLIGAEHVNNSYECDIPIGAGICASYQTQTNSPRRARSVASQSIIAYTMSLGAENSVAYSNNSIAICTNFTISVTTEILPVSMTKTSVDCTMYICGDSTECSNLLLQYGSFCTQLNRALTGIAVEQDKNTQEVFAQVKQIYKTPPIKDFGGFNFSQILPDPSKPSKRSFIEDLLFNKVTLADAGFIKQYGDCLGDISARDLICAQKFNGLTVLPPLLTDEMIAQYTSALLAGTITSGWTFGAGAALQIPFAMQMAYRFNGIGVTQNVLYENQKLIANQFNSAIGKIQDSLSSTASALGKLQDVVNQNAQALNTLVKQLSSNFGAISSVLNDILSRLDKVEAEVQIDRLITGRLQSLQTYVTQQLIRAAEIRASANLAATKMSECVLGQSKRVDFCGKGYHLMSFPQSAPHGVVFLHVTYVCAQEKNFTTAPAICHDGKAHFPREGVFVSNGTHWFVTQRNFYEPQIITTDNTFVSGNCDVVIGIVNNTVYDPLQPELDSFKEELDKYFKNHTSPDVDLGDISGINASVVNIQKEIDRLNEVAKNLNESLIDLQELGKYEQYIKGGGGSDIDPYKEFGSSYQLLNFLPLDFFPDLNALVDTATALYEEELTGREHCSPHHTAIRQALVCWDELTKLIAWMSSNITSEQVRTIIVNHVNDTWGLKVRQSLWFHLSCLTFGQHTVQEFLVSFGVWIRTPAPYRPPNAPILSTLPEHTVIC

SEQ ID NO: 7157 - protein, 1365 aa, Artificial Sequence
  SARS-CoV-2/USA/NY-NYUMC7/2020__EPI_ISL_418192 spike protein (1-1211)(P715C_P1069C) WhcAg construct
MFVFLVLLPLVSSQCVNLTTRTQLPPAYTNSFTRGVYYPDKVFRSSVLHSTQDLFLPFFSNVTWFHAIHVSGTNGTKRFDNPVLPFNDGVYFASTEKSNIIRGWIFGTTLDSKTQSLLIVNNATNVVIKVCEFQFCNDPFLGVYHHKNNKSWMESEFRVYSSANNCTFEYVSQPFLMDLEGKQGNFKNLREFVFKNIDGYFKIYSKHTPINLVRDLPQGFSALEPLVDLPIGINITRFQTLLALHRSYLTPGDSSSGWTAGAAAYYVGYLQPRTFLLKYNENGTITDAVDCALDPLSETKCTLKSFTVEKGIYQTSNFRVQPTESIVRFPNITNLCPFGEVFNATRFASVYAWNRKRISNCVADYSVLYNSASFSTFKCYGVSPTKLNDLCFTNVYADSFVIRGDEVRQIAPGQTGKIADYNYKLPDDFTGCVIAWNSNNLDSKVGGNYNYLYRLFRKSNLKPFERDISTEIYQAGSTPCNGVEGFNCYFPLQSYGFQPTNGVGYQPYRVVVLSFELLHAPATVCGPKKSTNLVKNKCVNFNFNGLTGTGVLTESNKKFLPFQQFGRDIADTTDAVRDPQTLEILDITPCSFGGVSVITPGTNTSNQVAVLYQGVNCTEVPVAIHADQLTPTWRVYSTGSNVFQTRAGCLIGAEHVNNSYECDIPIGAGICASYQTQTNSPRRARSVASQSIIAYTMSLGAENSVAYSNNSIAICTNFTISVTTEILPVSMTKTSVDCTMYICGDSTECSNLLLQYGSFCTQLNRALTGIAVEQDKNTQEVFAQVKQIYKTPPIKDFGGFNFSQILPDPSKPSKRSFIEDLLFNKVTLADAGFIKQYGDCLGDIAARDLICAQKFNGLTVLPPLLTDEMIAQYTSALLAGTITSGWTFGAGAALQIPFAMQMAYRFNGIGVTQNVLYENQKLIANQFNSAIGKIQDSLSSTASALGKLQDVVNQNAQALNTLVKQLSSNFGAISSVLNDILSRLDKVEAEVQIDRLITGRLQSLQTYVTQQLIRAAEIRASANLAATKMSECVLGQSKRVDFCGKGYHLMSFPQSAPHGVVFLHVTYVCAQEKNFTTAPAICHDGKAHFPREGVFVSNGTHWFVTQRNFYEPQIITTDNTFVSGNCDVVIGIVNNTVYDPLQPELDSFKEELDKYFKNHTSPDVDLGDISGINASVVNIQKEIDRLNEVAKNLNESLIDLQELGKYEQYIKGGGGSDIDPYKEFGSSYQLLNFLPLDFFPDLNALVDTATALYEEELTGREHCSPHHTAIRQALVCWDELTKLIAWMSSNITSEQVRTIIVNHVNDTWGLKVRQSLWFHLSCLTFGQHTVQEFLVSFGVWIRTPAPYRPPNAPILSTLPEHTVIC

SEQ ID NO: 7158 - protein, 1365 aa, Artificial Sequence
  SARS-CoV-2/Iceland/189/2020__EPI_ISL_417709 spike protein (1-1211)(P715C_P1069C) WhcAg construct
MFVFLVLLPLVSSQCVNLTTRTQLPPAYTNSFTRGVYYPDKVFRSSVLHSTQDLFLPFFSNVTWFHAIHVSGTNGTKRFDNPVLPFNDGVYFASTEKSNIIRGWIFGTTLDSKTQSLLIVNNATNVVIKVCEFQFCNDPFLGVYYHKNNKSWMESEFRVYSSANNCTFEYVSQPFLMDLEGKQGNFKNLREFVFKNIDGYFKIYSKHTPINLVRDLPQGFSALEPLVDLPIGINITRFQTLLALHRSYLTPGDSSSGWTAGAAAYYVGYLQPRTFLLKYNENGTITDAVDCALDPLSETKCTLKSFTVEKGIYQTSNFRVQPTESIVRFPNITNLCPFGEVFNATRFASVYAWNRKRISNCVADYSVLYNSASFSTFKCYGVSPTKLNDLCFTNVYADSFVIRGDEVRQIAPGQTGKIADYNYKLPDDFTGCVIAWNSNNLDSKVGGNYNYLYRLFRKSNLKPFERDISTEIYQAGSTPCNGVEGFNCYFPLQSYGFQPTNGVGYQPYRVVVLSFELLHAPATVCGPKKSTNLVKNKCVNFNFNGLTGTGVLTESNKKFLPFQQFGRDIADTTDAVRDPQTLEILDITPCSFGGVSVITPGTNTSNQVAVLYQGVNCTEVPVAIHADQLTPTWRVYSTGSNVFQTRAGCLIGAEHVNNSYECDIPIGAGICASYQTQTNSPRRARSVASQSIIAYTMSLGAENSVAYSNNSIAICTNFTISVTTEILPVSMTKTSVDCTMYICGDSTECSNLLLQYGSFCTQLNRALTGIAVEQDKNTQEVFAQVKQIYKTPPIKDFGGFNFSQILPDPSKPSKRSFIEDLLFNKVTLADAGFTKQYGDCLGDIAARDLICAQKFNGLTVLPPLLTDEMIAQYTSALLAGTITSGWTFGAGAALQIPFAMQMAYRFNGIGVTQNVLYENQKLIANQFNSAIGKIQDSLSSTASALGKLQDVVNQNAQALNTLVKQLSSNFGAISSVLNDILSRLDKVEAEVQIDRLITGRLQSLQTYVTQQLIRAAEIRASANLAATKMSECVLGQSKRVDFCGKGYHLMSFPQSAPHGVVFLHVTYVCAQEKNFTTAPAICHDGKAHFPREGVFVSNGTHWFVTQRNFYEPQIITTDNTFVSGNCDVVIGIVNNTVYDPLQPELDSFKEELDKYFKNHTSPDVDLGDISGINASVVNIQKEIDRLNEVAKNLNESLIDLQELGKYEQYIKGGGGSDIDPYKEFGSSYQLLNFLPLDFFPDLNALVDTATALYEEELTGREHCSPHHTAIRQALVCWDELTKLIAWMSSNITSEQVRTIIVNHVNDTWGLKVRQSLWFHLSCLTFGQHTVQEFLVSFGVWIRTPAPYRPPNAPILSTLPEHTVIC

SEQ ID NO: 7159 - protein, 1365 aa, Artificial Sequence
  SARS-CoV-2/Australia/NSW56/2020__EPI_ISL_417408 spike protein (1-1211)(P715C_P1069C) WhcAg construct
MFVFLVLLPLVSSQCVNLTTRTQLPPAYTNSFTRGVYYPDKVFRSSVLHSTQDLFLPFFSNVTWFHAIHVSGTNGTKRFDNPVLPFNDGVYFASTEKSNIIRGWIFGTTLDSKTQSLLIVNNATNVVIKVCEFQFCNDPFLGVYYHKNNKSWMESEFRVYSSANNCTFEYVSQPFLMDLEGKQGNFKNLREFVFKNIDGYFKIYSKHTPINLVRDLPQGFSALEPLVDLPIGINITRFQTLLALHRSYLTPGDSSSGWTAGAAAYYVGYLQPRTFLLKYNENGTITDAVDCALDPLSETKCTLKSFTVEKGIYQTSNFRVQPTESIVRFPNITNLCPFGEVFNATRFASVYAWNRKRISNCVADYSVLYNSASFSTFKCYGVSPTKLNDLCFTNVYADSFVIRGDEVRQIAPGQTGKIADYNYKLPDDFTGCVIAWNSNNLDSKVGGNYNYLYRLFRKSNLKPFERDISTEIYQAGSTPCNGVEGFNCYFPLQSYGFQPTNGVGYQPYRVVVLSFELLHAPATVCGPKKSTNLVKNKCVNFNFNGLTGTGVLTESNKKFLPFQQFGRDIADTTDAVRDPQTLEILDITPCSFGGVSVITPGTNTSNQVAVLYQDVNCTEVPVAIHADQLTPTWRVYSTGSNVFQTRAGCLIGAEHVNNSYECDIPIGAGICASYQTQTNSPRRARSVASQSIIAYTMSLGAENSVAYSNNSIAICTNFTISVTTEILPVSMTKTSVDCTMYICGDSTECSNLLLQYGSFCTQLNRALTGIAVEQDKNTQEVFAQVKQIYKTPPIKDFGGFNFSQILPDSSKPSKRSFIEDLLFNKVTLADAGFIKQYGDCLGDIAARDLICAQKFNGLTVLPPLLTDEMIAQYTSALLAGTITSGWTFGAGAALQIPFAMQMAYRFNGIGVTQNVLYENQKLIANQFNSAIGKIQDSLSSTASALGKLQDVVNQNAQALNTLVKQLSSNFGAISSVLNDILSRLDKVEAEVQIDRLITGRLQSLQTYVTQQLIRAAEIRASANLAATKMSECVLGQSKRVDFCGKGYHLMSFPQSAPHGVVFLHVTYVCAQEKNFTTAPAICHDGKAHFPREGVFVSNGTHWFVTQRNFYEPQIITTDNTFVSGNCDVVIGIVNNTVYDPLQPELDSFKEELDKYFKNHTSPDVDLGDISGINASVVNIQKEIDRLNEVAKNLNESLIDLQELGKYEQYIKGGGGSDIDPYKEFGSSYQLLNFLPLDFFPDLNALVDTATALYEEELTGREHCSPHHTAIRQALVCWDELTKLIAWMSSNITSEQVRTIIVNHVNDTWGLKVRQSLWFHLSCLTFGQHTVQEFLVSFGVWIRTPAPYRPPNAPILSTLPEHTVIC

SEQ ID NO: 7160 - protein, 1365 aa, Artificial Sequence
  SARS-CoV-2/Iceland/280/2020__EPI_ISL_417608 spike protein (1-1211)(P715C_P1069C) WhcAg construct
MFVFLVLLPLVSSQCVNLTTRTQLPPAYTNSFTRGVYYPDKVFRSSVLHSTQDLFLPFFSNVTWFHAIHVSGTNGTKRFDNPVLPFNDGVYFASTEKSNIIRGWIFGTTLDSKTQSLLIVNNATNVVIKVCEFQFCNDPFLGVYYHKNNKSWMESEFRVYSSANNCTFEYVSQPFLMDLEGKQGNFKNLREFVFKNIDGYFKIYSKHTPINLVRDLPQGFSALEPLVDLPIGINITRFQTLLALHRSYLTPGDSSSGWTAGAAAYYVGYLQPRTFLLKYNENGTITDAVDCALDPLSETKCTLKSFTVEKGIYQTSNFRVQPTESIVRFPNITNLCPFGEVFNATRFASVYAWNRKRISNCVADYSVLYNSASFSTFKCYGVSPTKLNDLCFTNVYADSFVIRGDEVRQIAPGQTGKIADYNYKLPDDFTGCVIAWNSNNLDSKVGGNYNYLYRLFRKSNLKPFERDISTEIYQAGSTPCNGVEGFNCYFPLQSYGFQPTNGVGYQPYRVVVLSFELLHAPATVCGPKKSTNLVKNKCVNFNFNGLTGTGVLTESNKKFLPFQQFGRDIADTTDAVRDPQTLEILDITPCSFGGVSVITPGTNTSNQVAVLYQGVNCTEVPVAIHADQLTPTWRVYSTGSNVFQTRAGCLIGAEHVNNSYECDIPIGAGICASYHTQTNSPRRARSVASQSIIAYTMSLGAENSVAYSNNSIAICTNFTISVTTEILPVSMTKTSVDCTMYICGDSTECSNLLLQYGSFCTQLNRALTGIAVEQDKNTQEVFAQVKQIYKTPPIKDFGGFNFSQILPDPSKPSKRSFIEDLLFNKVTLADAGFIKQYGDCLGDIAARDLICAQKFNGLTVLPPLLTDEMIAQYTSALLAGTITSGWTFGAGAALQIPFAMQMAYRFNGIGVTQNVLYENQKLIANQFNSAIGKIQDSLSSTASALGKLQDVVNQNAQALNTLVKQLSSNFGAISSVLNDILSRLDKVEAEVQIDRLITGRLQSLQTYVTQQLIRAAEIRASANLAATKMSECVLGQSKRVDFCGKGYHLMSFPQSAPHGVVFLHVTYVCAQEKNFTTAPAICHDGKAHFPREGVFVSNGTHWFVTQRNFYEPQIITTDNTFVSGNCDVVIGIVNNTVYDPLQPELDSFKEELDKYFKNHTSPDVDLGDISGINASVVNIQKEIDRLNEVAKNLNESLIDLQELGKYEQYIKGGGGSDIDPYKEFGSSYQLLNFLPLDFFPDLNALVDTATALYEEELTGREHCSPHHTAIRQALVCWDELTKLIAWMSSNITSEQVRTIIVNHVNDTWGLKVRQSLWFHLSCLTFGQHTVQEFLVSFGVWIRTPAPYRPPNAPILSTLPEHTVIC

SEQ ID NO: 7161 - protein, 1365 aa, Artificial Sequence; identical to SEQ ID NO: 7116
  SARS-CoV-2/Iceland/247/2020__EPI_ISL_417575 spike protein (1-1211)(P715C_P1069C) WhcAg construct

SEQ ID NO: 7162 - protein, 1365 aa, Artificial Sequence
  SARS-CoV-2/Iceland/238/2020__EPI_ISL_417566 spike protein (1-1211)(P715C_P1069C) WhcAg construct
MFVFLVLLPLVSSQCVNLTTRTQLPPAYTNSFTRGVYYPDKVFRSSVLHSTQDLFLPFFSNVTWFHAIHVSGTNGTKRFDNPVLPFNDGVYFASTEKSNIIRGWIFGTTLDSKTQSLLIVNNATNVVIKVCEFQFCNDPFLGVYYHKNNKSWMESEFRVYSSANNCTFEYVSQPFLMDLEGKQGNFKNLREFVFKNIDGYFKIYSKHTPINLVRDLPQGFSALEPLVDLPIGINITRFQTLLALHRSYLTPGDSSSGWTAGAAAYYVGYLQPRTFLLKYNENGTITDAVDCALDPLSETKCTLKSFTVEKGIYQTSNFRVQPTESIVRFPNITNLCPFGEVFNATRFASVYAWNRKRISNCVADYSVLYNSASFSTFKCYGVSPTKLNDLCFTNVYADSFVIRGDEVRQIAPGQTGKIADYNYKLPDDFTGCVIAWNSNNLDSKVGGNYNYLYRLFRKSNLKPFERDISTEIYQAGSTPCNGVEGFNCYFPLQSYGFQPTNGVGYQPYRVVVLSFELLHAPATVCGPKKSTNLVKNKCVNFNFNGLTGTGVLTESNKKFLPFQQFGRDIADTTDAVRDPQTLEILDITPCSFGGVSVITPGTNTSNQVAVLYQGVNCTEVPVAIHADQLTPTWRVYSTGSNVFQTRAGCLIGAEHVNNSYECDIPIGAGICASYQTQTNSPRRARSVASQSIIAYTMSLGAENSVAYSNNSIAICTNFTISVTTEILPVSMTKTSVDCTMYICGDSTECSNLLLQYGSFCTQLNRALTGIAVEQDKNTQEVFAQVKQIYKTPPIKDFGGFNFSQILPDPSKPSKRSFIEDLLFNKVTLADVGFIKQYGDCLGDIAARDLICAQKFNGLTVLPPLLTDEMIAQYTSALLAGTITSGWTFGAGAALQIPFAMQMAYRFNGIGVTQNVLYENQKLIANQFNSAIGKIQDSLSSTASALGKLQDVVNQNAQALNTLVKQLSSNFGAISSVLNDILSRLDKVEAEVQIDRLITGRLQSLQTYVTQQLIRAAEIRASANLAATKMSECVLGQSKRVDFCGKGYHLMSFPQSAPHGVVFLHVTYVCAQEKNFTTAPAICHDGKAHFPREGVFVSNGTHWFVTQRNFYEPQIITTDNTFVSGNCDVVIGIVNNTVYDPLQPELDSFKEELDKYFKNHTSPDVDLGDISGINASVVNIQKEIDRLNEVAKNLNESLIDLQELGKYEQYIKGGGGSDIDPYKEFGSSYQLLNFLPLDFFPDLNALVDTATALYEEELTGREHCSPHHTAIRQALVCWDELTKLIAWMSSNITSEQVRTIIVNHVNDTWGLKVRQSLWFHLSCLTFGQHTVQEFLVSFGVWIRTPAPYRPPNAPILSTLPEHTVIC

SEQ ID NO: 7163 - protein, 1365 aa, Artificial Sequence
  SARS-CoV-2/Greece/16/2020__EPI_ISL_418265 spike protein (1-1211)(P715C_P1069C) WhcAg construct
MFVFLVLLPLVSSQCVNLTTRTQLPPAYTNSFTRGVYYPDKVFRSSVLHSTQDLFLPFFSNVTWFHAIHVSGTNGTKRFDNPVLPFNDGVYFASTEKSNIIRGWIFGTTLDSKTQSLLIVNNATNVVIKVCEFQFCNDPFLGVYYHKNNKSWMESEFRVYSSANNCTFEYVSQPFLMDLEGKQGNFKNLREFVFKNVDGYFKIYSKHTPINLVRDLPQGFSALEPLVDLPIGINITRFQTLLALHRSYLTPGDSSSGWTAGAAAYYVGYLQPRTFLLKYNENGTITDAVDCALDPLSETKCTLKSFTVEKGIYQTSNFRVQPTESIVRFPNITNLCPFGEVFNATRFASVYAWNRKRISNCVADYSVLYNSASFSTFKCYGVSPTKLNDLCFTNVYADSFVIRGDEVRQIAPGQTGKIADYNYKLPDDFTGCVIAWNSNNLDSKVGGNYNYLYRLFRKSNLKPFERDISTEIYQAGSTPCNGVEGFNCYFPLQSYGFQPTNGVGYQPYRVVVLSFELLHAPATVCGPKKSTNLVKNKCVNFNFNGLTGTGVLTESNKKFLPFQQFGRDIADTTDAVRDPQTLEILDITPCSFGGVSVITPGTNTSNQVAVLYQDVNCTEVPVAIHADQLTPTWRVYSTGSNVFQTRAGCLIGAEHVNNSYECDIPIGAGICASYQTQTNSPRRARSVASQSIIAYTMSLGAENSVAYSNNSIAICTNFTISVTTEILPVSMTKTSVDCTMYICGDSTECSNLLLQYGSFCTQLNRALTGIAVEQDKNTQEVFAQVKQIYKTPPIKDFGGFNFSQILPDPSKPSKRSFIEDLLFNKVTLADAGFIKQYGDCLGDIAARDLICAQKFNGLTVLPPLLTDEMIAQYTSALLAGTITSGWTFGAGAALQIPFAMQMAYRFNGIGVTQNVLYENQKLIANQFNSAIGKIQDSLSSTASALGKLQDVVNQNAQALNTLVKQLSSNFGAISSVLNDILSRLDKVEAEVQIDRLITGRLQSLQTYVTQQLIRAAEIRASANLAATKMSECVLGQSKRVDFCGKGYHLMSFPQSAPHGVVFLHVTYVCAQEKNFTTAPAICHDGKAHFPREGVFVSNGTHWFVTQRNFYEPQIITTDNTFVSGNCDVVIGIVNNTVYDPLQPELDSFKEELDKYFKNHTSPDVDLGDISGINASVVNIQKEIDRLNEVAKNLNESLIDLQELGKYEQYIKGGGGSDIDPYKEFGSSYQLLNFLPLDFFPDLNALVDTATALYEEELTGREHCSPHHTAIRQALVCWDELTKLIAWMSSNITSEQVRTIIVNHVNDTWGLKVRQSLWFHLSCLTFGQHTVQEFLVSFGVWIRTPAPYRPPNAPILSTLPEHTVIC

SEQ ID NO: 7164 - protein, 1365 aa, Artificial Sequence
  SARS-CoV-2/Iceland/319/2020__EPI_ISL_417648 spike protein (1-1211)(P715C_P1069C) WhcAg construct
MFVFLVLLPLVSSQCVNLTTRTQLPPAYTNSFTRGVYYPDKVFRSSVLHSTQDLFLPFFSNVTWFHAIHVSGTNGTKRFDNPVLPFNDGVYFASTEKSNIIRGWIFGTTLDSKTQSLLIVNNATNVVIKVCEFQFCNDPFLGVYYHKNNKSWMESEFRVYSSANNCTFEYVSQPFLIDLEGKQGNFKNLREFVFKNIDGYFKIYSKHTPINLVRDLPQGFSALEPLVDLPIGINITRFQTLLALHRSYLTPGDSSSGWTAGAAAYYVGYLQPRTFLLKYNENGTITDAVDCALDPLSETKCTLKSFTVEKGIYQTSNFRVQPTESIVRFPNITNLCPFGEVFNATRFASVYAWNRKRISNCVADYSVLYNSASFSTFKCYGVSPTKLNDLCFTNVYADSFVIRGDEVRQIAPGQTGKIADYNYKLPDDFTGCVIAWNSNNLDSKVGGNYNYLYRLFRKSNLKPFERDISTEIYQAGSTPCNGVEGFNCYFPLQSYGFQPTNGVGYQPYRVVVLSFELLHAPATVCGPKKSTNLVKNKCVNFNFNGLTGTGVLTESNKKFLPFQQFGRDIADTTDAVRDPQTLEILDITPCSFGGVSVITPGTNTSNQVAVLYQGVNCTEVPVAIHADQLTPTWRVYSTGSNVFQTRAGCLIGAEHVNNSYECDIPIGAGICASYQTQTNSPRRARSVASQSIIAYTMSLGAENSVAYSNNSIAICTNFTISVTTEILPVSMTKTSVDCTMYICGDSTECSNLLLQYGSFCTQLNRALTGIAVEQDKNTQEVFAQVKQIYKTPPIKDFGGFNFSQILPDPSKPSKRSFIEDLLFNKVTLADAGFIKQYGDCLGDIAARDLICAQKFNGLTVLPPLLTDEMIAQYTSALLAGTITSGWTFGAGAALQIPFAMQMAYRFNGIGVTQNVLYENQKLIANQFNSAIGKIQDSLSSTASALGKLQDVVNQNAQALNTLVKQLSSNFGAISSVLNDILSRLDKVEAEVQIDRLITGRLQSLQTYVTQQLIRAAEIRASANLAATKMSECVLGQSKRVDFCGKGYHLMSFPQSAPHGVVFLHVTYVCAQEKNFTTAPAICHDGKAHFPREGVFVSNGTHWFVTQRNFYEPQIITTDNTFVSGNCDVVIGIVNNTVYDPLQPELDSFKEELDKYFKNHTSPDVDLGDISGINASVVNIQKEIDRLNEVAKNLNESLIDLQELGKYEQYIKGGGGSDIDPYKEFGSSYQLLNFLPLDFFPDLNALVDTATALYEEELTGREHCSPHHTAIRQALVCWDELTKLIAWMSSNITSEQVRTIIVNHVNDTWGLKVRQSLWFHLSCLTFGQHTVQEFLVSFGVWIRTPAPYRPPNAPILSTLPEHTVIC

SEQ ID NO: 7165 - protein, 1365 aa, Artificial Sequence
  SARS-CoV-2/Congo/94/2020__EPI_ISL_417947 spike protein (1-1211)(P715C_P1069C) WhcAg construct
MFVFLVLLPLVSSQCVNLTTRTQLPPAYTNSFTRGVYYPDKVFRSSVLHSTQDLFLPFFSNVTWFHAIHVSGTNGTKRFDNPVLPFNDGVYFASTEKSNIIRGWIFGTTLDSKTQSLLIVNNATNVVIKVCEFQFCNDPFLGVYYHKNNKSWMESEFRVYSSANNCTFEYVSQPFLMDLEGKQGNFKNLREFVFKNIDGYFKIYSKHTPINLVRDLPQGFSALEPLVDLPIGINITRFQTLLALHRSYLTPGDSSSGWTAGAAAYYVGYLQPRTFLLKYNENGTITDAVDCALDPLSETKCTLKSFTVEKGIYQTSNFRVQPTESIVRFPNITNLCPFGEVFNATRFASVYAWNRKRISNCVADYSVLYNSASFSTFKCYGVSPTKLNDLCFTNVYADSFVIRGDEVRQIAPGQTGKIADYNYKLPDDFTGCVIAWNSNNLDSKVGGNYNYLYRLFRKSNLKPFERDISTEIYQAGSTPCNGVEGFNCYFPLQSYGFQPTNGVGYQPYRVVVLSFELLHAPATVCGPKKSTNLVKNKCVNFNFNGLTGTGVLTESNKKFLPFQQFGRDIADTTDAVRDPQTLEILDITPCSFGGVSVITPGTNTSNQVAVLYQGVNCTEVPVAIHADQLTPTWRVYSTGSNVFQTRAGCLIGAEHVNNSYECDIPIGAGICASYQTQTNSPRRARSVASQSIIAYTMSLGAENSVAYSNNSIAICTNFTISVTTEILPVSMTKTSVDCTMYICGDSTECSNLLLQYGSFCTQLNRALTGIAVEQDKNTQEVFAQVKQIYKTPPIKDFGGFNFSQILPDPSKPSKRSFIEDILFNKVTLADAGFIKQYGDCLGDIAARDLICAQKFNGLTVLPPLLTDEMIAQYTSALLAGTITSGWTFGAGAALQIPFAMQMAYRFNGIGVTQNVLYENQKLIANQFNSAIGKIQDSLSSTASALGKLQDVVNQNAQALNTLVKQLSSNFGAISSVLNDILSRLDKVEAEVQIDRLITGRLQSLQTYVTQQLIRAAEIRASANLAATKMSECVLGQSKRVDFCGKGYHLMSFPQSAPHGVVFLHVTYVCAQEKNFTTAPAICHDGKAHFPREGVFVSNGTHWFVTQRNFYEPQIITTDNTFVSGNCDVVIGIVNNTVYDPLQPELDSFKEELDKYFKNHTSPDVDLGDISGINASVVNIQKEIDRLNEVAKNLNESLIDLQELGKYEQYIKGGGGSDIDPYKEFGSSYQLLNFLPLDFFPDLNALVDTATALYEEELTGREHCSPHHTAIRQALVCWDELTKLIAWMSSNITSEQVRTIIVNHVNDTWGLKVRQSLWFHLSCLTFGQHTVQEFLVSFGVWIRTPAPYRPPNAPILSTLPEHTVIC

SEQ ID NO: 7166 - protein, 1365 aa, Artificial Sequence
  SARS-CoV-2/Congo/158/2020__EPI_ISL_417950 spike protein (1-1211)(P715C_P1069C) WhcAg construct
MFVFLVLLPLVSSQCVNLTTRTQLPPAYTNSFTRGVYYPDKVFRSSVLHSTQDLFLPFFSNVTWFHAIHVSGTNGTKRFDNPVLPFNDGVYFASTEKSNIIRGWIFGTTLDSKTQSLLIVNNATNVVIKVCEFQFCNDPFLGVYYHKNNKSWMESEFRVYSSANNCTFEYVSQPFLMDLEGKQGNFKNLREFVFKNIDGYFKIYSKHTPINLVRDLPQGFSALEPLVDLPIGINITRFQTLLALHRSYLTPGDSSSGWTAGAAAYYVGYLQPRTFLLKYNENGTITDAVDCALDPLSETKCTLKSFTVEKGIYQTSNFRVQPTESIVRFPNITNLCPFGEVFNATRFASVYAWNRKRISNCVADYSVLYNSASFSTFKCYGVSPTKLNDLCFTNVYADSFVIRGDEVRQIAPGQTGKIADYNYKLPDDFTGCVIAWNSNNLDSKVGGNYNYLYRLFRKSNLKPFERDISTEIYQAGSTPCNGVEGFNCYFPLQSYGFQPTNGVGYQPYRVVVLSFELLHAPATVCGPKKSTNLVKNKCVNFNFNGLTGTGVLTESNKKFLPFQQFGRDIADTTDAVRDPQTLEILDITPCSFGGVSVITPGTNTSNQVAVLYQDVNCTEVPVAIHADQLTPTWRVYSTGSNVFQTRAGCLIGAEHVNNSYECDIPIGAGICASYQTQTNSPRRARSVASQSIIAYTMSLGAENSVAYSNNSIAICTNFTISVTTEILPVSMTKTSVDCTMYICGDSTECSNLLLQYGSFCTQLNRALTGIAVEQDKNTQEVFAQVKQIYKTPPIKDFGGFNFSQILPDPSKPSKRSFIEDLLFNKVTLADAGFIKQYGDCLGDIAARDLICAQKFNGLTVLPPLLTDEMIAQYTSALLAGTITSGWTFGAGAALQIPFAMQMAYRFNGIGVTQNVLYENQKLIANQFNSAIGKIQDSLSSTASALGKLQDVVNQNAQALNTLVKQLSSNFGAISSVLNDILSRLDKVEAEVQIDRLITGRLQSLQTYVTQQLIRAAEIRASANLAATKMSECVLGQSKRVDFCGKGYHLMSFPQSAPHGVVFLHVTYVCAQEKNFTTAPAICHDGKAHFPREGVFVSNGTHWFVTQRNFYEPQIITTDNTFLSGNCDVVIGIVNNTVYDPLQPELDSFKEELDKYFKNHTSPDVDLGDISGINASVVNIQKEIDRLNEVAKNLNESLIDLQELGKYEQYIKGGGGSDIDPYKEFGSSYQLLNFLPLDFFPDLNALVDTATALYEEELTGREHCSPHHTAIRQALVCWDELTKLIAWMSSNITSEQVRTIIVNHVNDTWGLKVRQSLWFHLSCLTFGQHTVQEFLVSFGVWIRTPAPYRPPNAPILSTLPEHTVIC

SEQ ID NO: 7167 - protein, 1365 aa, Artificial Sequence
  SARS-CoV-2/USA/UT-00034/2020__EPI_ISL_417977 spike protein (1-1211)(P715C_P1069C) WhcAg construct
MFVFLVLLPLVSSQCVNLTTRTQLPPAYTNSFTRGVYYPDKVFRSSVLHSTQDLFLPFFSNVTWFHAIHVSGTNGTKRFDNPVLPFNDGVYFASTEKSNIIRGWIFGTTLDSKTQSLLIVNNATNVVIKVCEFQFCNDPFLGVYYYKNNKSWMESEFRVYSSANNCTFEYVSQPFLMDLEGKQGNFKNLREFVFKNIDGYFKIYSKHTPINLVRDLPQGFSALEPLVDLPIGINITRFQTLLALHRSYLTPGDSSSGWTAGAAAYYVGYLQPRTFLLKYNENGTITDAVDCALDPLSETKCTLKSFTVEKGIYQTSNFRVQPTESIVRFPNITNLCPFGEVFNATRFASVYAWNRKRISNCVADYSVLYNSASFSTFKCYGVSPTKLNDLCFTNVYADSFVIRGDEVRQIAPGQTGKIADYNYKLPDDFTGCVIAWNSNNLDSKVGGNYNYLYRLFRKSNLKPFERDISTEIYQAGSTPCNGVEGFNCYFPLQSYGFQPTNGVGYQPYRVVVLSFELLHAPATVCGPKKSTNLVKNKCVNFNFNGLTGTGVLTESNKKFLPFQQFGRDIADTTDAVRDPQTLEILDITPCSFGGVSVITPGTNTSNQVAVLYQGVNCTEVPVAIHADQLTPTWRVYSTGSNVFQTRAGCLIGAEHVNNSYECDIPIGAGICASYQTQTNSPRRARSVASQSIIAYTMSLGAENSVAYSNNSIAICTNFTISVTTEILPVSMTKTSVDCTMYICGDSTECSNLLLQYGSFCTQLNRALTGIAVEQDKNTQEVFAQVKQIYKTPPIKDFGGFNFSQILPDPSKPSKRSFIEDLLFNKVTLADAGFIKQYGDCLGDIAARDLICAQKFNGLTVLPPLLTDEMIAQYTSALLAGTITSGWTFGAGAALQIPFAMQMAYRFNGIGVTQNVLYENQKLIANQFNSAIGKIQDSLSSTASALGKLQDVVNQNAQALNTLVKQLSSNFGAISSVLNDILSRLDKVEAEVQIDRLITGRLQSLQTYVTQQLIRAAEIRASANLAATKMSECVLGQSKRVDFCGKGYHLMSFPQSAPHGVVFLHVTYVCAQEKNFTTAPAICHDGKAHFPREGVFVSNGTHWFVTQRNFYEPQIITTDNTFVSGNCDVVIGIVNNTVYDPLQPELDSFKEELDKYFKNHTSPDVDLGDISGINASVVNIQKEIDRLNEVAKNLNESLIDLQELGKYEQYIKGGGGSDIDPYKEFGSSYQLLNFLPLDFFPDLNALVDTATALYEEELTGREHCSPHHTAIRQALVCWDELTKLIAWMSSNITSEQVRTIIVNHVNDTWGLKVRQSLWFHLSCLTFGQHTVQEFLVSFGVWIRTPAPYRPPNAPILSTLPEHTVIC

SEQ ID NO: 7168 - protein, 1365 aa, Artificial Sequence
  SARS-CoV-2/USA/UT-00033/2020__EPI_ISL_417976 spike protein (1-1211)(P715C_P1069C) WhcAg construct
MFVFLVLLPLVSSQCVNLTTRTQLPPAYTNSFTRGVYYPDKVFRSSVLHSTQDLFLPFFSNVTWFHAIHVSGTNGTKRFDNPVLPFNDGVYFASTEKSNIIRGWIFGTTLDSKTQSLLIVNNATNVVIKVCEFQFCNDPFLGVYYHKNNKSWMESEFRVYSSANNCTFEYVSQPFLMDLEGKQGNFKNLREFVFKNIDGYFKIYSKHTPINLVRDLPQGFSALEPLVDLPIGINITRFQTLLALHRSYLTPGDSSSGLTAGAAAYYVGYLQPRTFLLKYNENGTITDAVDCALDPLSETKCTLKSFTVEKGIYQTSNFRVQPTESIVRFPNITNLCPFGEVFNATRFASVYAWNRKRISNCVADYSVLYNSASFSTFKCYGVSPTKLNDLCFTNVYADSFVIRGDEVRQIAPGQTGKIADYNYKLPDDFTGCVIAWNSNNLDSKVGGNYNYLYRLFRKSNLKPFERDISTEIYQAGSTPCNGVEGFNCYFPLQSYGFQPTNGVGYQPYRVVVLSFELLHAPATVCGPKKSTNLVKNKCVNFNFNGLTGTGVLTESNKKFLPFQQFGRDIADTTDAVRDPQTLEILDITPCSFGGVSVITPGTNTSNQVAVLYQGVNCTEVPVAIHADQLTPTWRVYSTGSNVFQTRAGCLIGAEHVNNSYECDIPIGAGICASYQTQTNSPRRARSVASQSIIAYTMSLGAENSVAYSNNSIAICTNFTISVTTEILPVSMTKTSVDCTMYICGDSTECSNLLLQYGSFCTQLNRALTGIAVEQDKNTQEVFAQVKQIYKTPPIKDFGGFNFSQILPDPSKPSKRSFIEDLLFNKVTLADAGFIKQYGDCLGDIAARDLICAQKFNGLTVLPPLLTDEMIAQYTSALLAGTITSGWTFGAGAALQIPFAMQMAYRFNGIGVTQNVLYENQKLIANQFNSAIGKIQDSLSSTASALGKLQDVVNQNAQALNTLVKQLSSNFGAISSVLNDILSRLDKVEAEVQIDRLITGRLQSLQTYVTQQLIRAAEIRASANLAATKMSECVLGQSKRVDFCGKGYHLMSFPQSAPHGVVFLHVTYVCAQEKNFTTAPAICHDGKAHFPREGVFVSNGTHWFVTQRNFYEPQIITTDNTFVSGNCDVVIGIVNNTVYDPLQPELDSFKEELDKYFKNHTSPDVDLGDISGINASVVNIQKEIDRLNEVAKNLNESLIDLQELGKYEQYIKGGGGSDIDPYKEFGSSYQLLNFLPLDFFPDLNALVDTATALYEEELTGREHCSPHHTAIRQALVCWDELTKLIAWMSSNITSEQVRTIIVNHVNDTWGLKVRQSLWFHLSCLTFGQHTVQEFLVSFGVWIRTPAPYRPPNAPILSTLPEHTVIC

SEQ ID NO: 7169 - protein, 1365 aa, Artificial Sequence
  SARS-CoV-2/USA/WI-13/2020__EPI_ISL_417516 spike protein (1-1211)(P715C_P1069C) WhcAg construct
MFVFLVLLPLVSSQCVNLTTRTQLPPAYTNSFTRGVYYPDKVFRSSVLHSTQDLFLPFFSNVTWFHAIHVSGTNGTKRFDNPVLPFNDGVYFASTEKSNIIRGWIFGTTLDSKTQSLLIVNNATNVVIKVCEFQFCNDPFLGVYYHKNNKSWMESEFRVYSSANNCTFEYVSQPFLMDLEGKQGNFKNLREFVFKNIDGYFKIYSKHTPINLVRDLPQGFSALEPLVDLPIGINITRFQTLLALHRSYLTPGDSSSGWTAGAAAYYVGYLQPRTFLLKYNENGTITDAVDCALDPLSETKCTLKSFTVEKGIYQTSNFRVLPTESIVRFPNITNLCPFGEVFNATRFASVYAWNRKRISNCVADYSVLYNSASFSTFKCYGVSPTKLNDLCFTNVYADSFVIRGDEVRQIAPGQTGKIADYNYKLPDDFTGCVIAWNSNNLDSKVGGNYNYLYRLFRKSNLKPFERDISTEIYQAGSTPCNGVEGFNCYFPLQSYGFQPTNGVGYQPYRVVVLSFELLHAPATVCGPKKSTNLVKNKCVNFNFNGLTGTGVLTESNKKFLPFQQFGRDIADTTDAVRDPQTLEILDITPCSFGGVSVITPGTNTSNQVAVLYQGVNCTEVPVAIHADQLTPTWRVYSTGSNVFQTRAGCLIGAEHVNNSYECDIPIGAGICASYQTQTNSPRRARSVASQSIIAYTMSLGAENSVAYSNNSIAICTNFTISVTTEILPVSMTKTSVDCTMYICGDSTECSNLLLQYGSFCTQLNRALTGIAVEQDKNTQEVFAQVKQIYKTPPIKDFGGFNFSQILPDPSKPSKRSFIEDLLFNKVTLADAGFIKQYGDCLGDIAARDLICAQKFNGLTVLPPLLTDEMIAQYTSALLAGTITSGWTFGAGAALQIPFAMQMAYRFNGIGVTQNVLYENQKLIANQFNSAIGKIQDSLSSTASALGKLQDVVNQNAQALNTLVKQLSSNFGAISSVLNDILSRLDKVEAEVQIDRLITGRLQSLQTYVTQQLIRAAEIRASANLAATKMSECVLGQSKRVDFCGKGYHLMSFPQSAPHGVVFLHVTYVCAQEKNFTTAPAICHDGKAHFPREGVFVSNGTHWFVTQRNFYEPQIITTDNTFVSGNCDVVIGIVNNTVYDPLQPELDSFKEELDKYFKNHTSPDVDLGDISGINASVVNIQKEIDRLNEVAKNLNESLIDLQELGKYEQYIKGGGGSDIDPYKEFGSSYQLLNFLPLDFFPDLNALVDTATALYEEELTGREHCSPHHTAIRQALVCWDELTKLIAWMSSNITSEQVRTIIVNHVNDTWGLKVRQSLWFHLSCLTFGQHTVQEFLVSFGVWIRTPAPYRPPNAPILSTLPEHTVIC

SEQ ID NO: 7170 - protein, 1364 aa, Artificial Sequence
  SARS-CoV-2/India/1-27/2020__EPI_ISL_413522 spike protein (1-1210)(P714C_P1068C) WhcAg construct
MFVFLVLLPLVSSQCVNLTTRTQLPPAYTNSFTRGVYYPDKVFRSSVLHSTQDLFLPFFSNVTWFHAIHVSGTNGTKRFDNPVLPFNDGVYFASTEKSNIIRGWIFGTTLDSKTQSLLIVNNATNVVIKVCEFQFCNDPFLGVYHKNNKSWMESEFRVYSSANNCTFEYVSQPFLMDLEGKQGNFKNLREFVFKNIDGYFKIYSKHTPINLVRDLPQGFSALEPLVDLPIGINITRFQTLLALHRSYLTPGDSSSGWTAGAAAYYVGYLQPRTFLLKYNENGTITDAVDCALDPLSETKCTLKSFTVEKGIYQTSNFRVQPTESIVRFPNITNLCPFGEVFNATRFASVYAWNRKRISNCVADYSVLYNSASFSTFKCYGVSPTKLNDLCFTNVYADSFVIRGDEVIQIAPGQTGKIADYNYKLPDDFTGCVIAWNSNNLDSKVGGNYNYLYRLFRKSNLKPFERDISTEIYQAGSTPCNGVEGFNCYFPLQSYGFQPTNGVGYQPYRVVVLSFELLHAPATVCGPKKSTNLVKNKCVNFNFNGLTGTGVLTESNKKFLPFQQFGRDIADTTDAVRDPQTLEILDITPCSFGGVSVITPGTNTSNQVAVLYQDVNCTEVPVAIHADQLTPTWRVYSTGSNVFQTRAGCLIGAEHVNNSYECDIPIGAGICASYQTQTNSPRRARSVASQSIIAYTMSLGAENSVAYSNNSIAICTNFTISVTTEILPVSMTKTSVDCTMYICGDSTECSNLLLQYGSFCTQLNRALTGIAVEQDKNTQEVFAQVKQIYKTPPIKDFGGFNFSQILPDPSKPSKRSFIEDLLFNKVTLADAGFIKQYGDCLGDIAARDLICAQKFNGLTVLPPLLTDEMIAQYTSALLAGTITSGWTFGAGAALQIPFAMQMAYRFNGIGVTQNVLYENQKLIANQFNSAIGKIQDSLSSTASALGKLQDVVNQNAQALNTLVKQLSSNFGAISSVLNDILSRLDKVEAEVQIDRLITGRLQSLQTYVTQQLIRAAEIRASANLAATKMSECVLGQSKRVDFCGKGYHLMSFPQSAPHGVVFLHVTYVCAQEKNFTTAPAICHDGKAHFPREGVFVSNGTHWFVTQRNFYEPQIITTDNTFVSGNCDVVIGIVNNTVYDPLQPELDSFKEELDKYFKNHTSPDVDLGDISGINASVVNIQKEIDRLNEVAKNLNESLIDLQELGKYEQYIKGGGGSDIDPYKEFGSSYQLLNFLPLDFFPDLNALVDTATALYEEELTGREHCSPHHTAIRQALVCWDELTKLIAWMSSNITSEQVRTIIVNHVNDTWGLKVRQSLWFHLSCLTFGQHTVQEFLVSFGVWIRTPAPYRPPNAPILSTLPEHTVIC

SEQ ID NO: 7171 - protein, 1359 aa, Artificial Sequence
  SARS-CoV-2/pangolin/Guangxi/P4L/2017__EPI_ISL_410538 spike protein (1-1205)(P709C_P1063C) WhcAg construct
MFVFLFVLPLVSSQCVNLTTRTGIPPGYTNSSTRGVYYPDKVFRSSILHLTQDLFLPFFSNVTWFNTINYQGGFKKFDNPVLPFNDGVYFASTEKSNIIRGWIFGTTLDARTQSLLIVNNATNVVIKVCEFQFCTDPFLGVYYHNNNKTWVENEFRVYSSANNCTFEYISQPFLMDLEGKQGNFKNLREFVFKNVDGYFKIYSKHTPIDLVRDLPRGFAALEPLVDLPIGINITRFQTLLALHRSYLTPGNLESGWTTGAAAYYVGYLQQRTFLLSYNQNGTITDAVDCSLDPLSETKCTLKSLTVEKGIYQTSNFRVQPTISIVRFPNITNLCPFGEVFNASKFASVYAWNRKRISNCVADYSVLYNSTSFSTFKCYGVSPTKLNDLCFTNVYADSFVVKGDEVRQIAPGQTGVIADYNYKLPDDFTGCVIAWNSVKQDALTGGNYGYLYRLFRKSKLKPFERDISTEIYQAGSTPCNGQVGLNCYYPLERYGFHPTTGVNYQPFRVVVLSFELLNGPATVCGPKLSTTLVKDKCVNFNFNGLTGTGVLTTSKKQFLPFQQFGRDISDTTDAVRDPQTLEILDITPCSFGGVSVITPGTNTSNQVAVLYQDVNCTEVPMAIHAEQLTPAWRVYSAGANVFQTRAGCLVGAEHVNNSYECDIPVGAGICASYHSMSSLRSVNQRSIIAYTMSLGAENSVAYSNNSIAICTNFTISVTTEILPVSMTKTSVDCTMYICGDSIECSNLLLQYGSFCTQLNRALTGIAVEQDKNTQEVFAQVKQIYKTPPIKDFGGFNFSQILPDPSKPSKRSFIEDLLFNKVTLADAGFIKQYGDCLGDIAARDLICAQKFNGLTVLPPLLTDEMIAQYTSALLAGTITSGWTFGAGAALQIPFAMQMAYRFNGIGVTQNVLYENQKLIANQFNSAIGKIQDSLSSTASALGKLQDVVNQNAQALNTLVKQLSSNFGAISSVLNDILSRLDKVEAEVQIDRLITGRLQSLQTYVTQQLIRAAEIRASANLAATKMSECVLGQSKRVDFCGKGYHLMSFPQSAPHGVVFLHVTYVCAQEKNFTTAPAICHEGKAHFPREGVFVSNGTHWFITQRNFYEPQIITTDNTFVSGSCDVVIGIVNNTVYDPLQPELDSFKEELDKYFKNHTSPDVDLGDISGINASVVNIQKEIDRLNEVAKNLNESPIDLQELGKYEQYIKGGGGSDIDPYKEFGSSYQLLNFLPLDFFPDLNALVDTATALYEEELTGREHCSPHHTAIRQALVCWDELTKLIAWMSSNITSEQVRTIIVNHVNDTWGLKVRQSLWFHLSCLTFGQHTVQEFLVSFGVWIRTPAPYRPPNAPILSTLPEHTVIC

SEQ ID NO: 7172 - protein, 1359 aa, Artificial Sequence
  SARS-CoV-2/pangolin/Guangxi/P5L/2017__EPI_ISL_410540 spike protein (1-1205)(P709C_P1063C) WhcAg construct
MFVFLFVLPLVSSQCVNLTTRTGIPPGYTNSSTRGVYYPDKVFRSSILHLTQDLFLPFFSNVTWFNTINYQGGFKKFDNPVLPFNDGVYFASTEKSNIIRGWIFGTTLDARTQSLLIVNNATNVVIKVCEFQFCTDPFLGVYYHNNNKTWVENEFRVYSSANNCTFEYISQPFLMDLEGKQGNFKNLREFVFKNVDGYFKIYSKHTPIDLVRDLPRGFAALEPLVDLPIGINITRFQTLLALHRSYLTPGKLESGWTTGAAAYYVGYLQQRTFLLSYNQNGTITDAVDCSLDPLSETKCTLKSLTVEKGIYQTSNFRVQPTISIVRFPNITNLCPFGEVFNASKFASVYAWNRKRISNCVADYSVLYNSTSFSTFKCYGVSPTKLNDLCFTNVYADSFVVKGDEVRQIAPGQTGVIADYNYKLPDDFTGCVIAWNSVKQDALTGGNYGYLYRLFRKSKLKPFERDISTEIYQAGSTPCNGQVGLNCYYPLERYGFHPTTGVNYQPFRVVVLSFELLNGPATVCGPKLSTTLVKDKCVNFNFNGLTGTGVLTTSKKQFLPFQQFGRDISDTTDAVRDPQTLEILDITPCSFGGVSVITPGTNTSNQVAVLYQDVNCTEVPMAIHAEQLTPAWRVYSAGANVFQTRAGCLVGAEHVNNSYECDIPVGAGICASYHSMSSFRSVNQRSIIAYTMSLGAENSVAYSNNSIAICTNFTISVTTEILPVSMTKTSVDCTMYICGDSIECSNLLLQYGSFCTQLNRALTGIAVEQDKNTQEVFAQVKQIYKTPPIKDFGGFNFSQILPDPSKPSKRSFIEDLLFNKVTLADAGFIKQYGDCLGDIAARDLICAQKFNGLTVLPPLLTDEMIAQYTSALLAGTITSGWTFGAGAALQIPFAMQMAYRFNGIGVTQNVLYENQKLIANQFNSAIGKIQDSLSSTASALGKLQDVVNQNAQALNTLVKQLSSNFGAISSVLNDILSRLDKVEAEVQIDRLITGRLQSLQTYVTQQLIRAAEIRASANLAATKMSECVLGQSKRVDFCGKGYHLMSFPQSAPHGVVFLHVTYVCAQEKNFTTAPAICHEGKAHFPREGVFVSNGTHWFITQRNFYEPQIITTDNTFVSGSCDVVIGIVNNTVYDPLQPELDSFKEELDKYFKNHTSPDVDLGDISGINASVVNIQKEIDRLNEVAKNLNESLIDLQELGKYEQYIKGGGGSDIDPYKEFGSSYQLLNFLPLDFFPDLNALVDTATALYEEELTGREHCSPHHTAIRQALVCWDELTKLIAWMSSNITSEQVRTIIVNHVNDTWGLKVRQSLWFHLSCLTFGQHTVQEFLVSFGVWIRTPAPYRPPNAPILSTLPEHTVIC

SEQ ID NO: 7173 - protein, 1359 aa, Artificial Sequence
  SARS-CoV-2/pangolin/Guangxi/P5E/2017__EPI_ISL_410541 spike protein (1-1205)(P709C_P1063C) WhcAg construct
MFVFLFVLPLVSSQCVNLTTRTGIPPGYTNSSTRGVYYPDKVFRSSILHLTQDLFLPFFSNVTWFNTITYQGGSKKFDNPVLPFNDGVYFASTEKSNIIRGWIFGTTLDARTQSLLIVNNATNVVIKVCEFQFCTDPFLGVYYHNNNKTWVENEFRVYSSANNCTFEYISQPFLMDLEGKQGNFKNLREFVFKNVDGYFKIYSKHTPIDLVRDLPRGFAALEPLVDLPIGINITRFQTLLALHRSYLTPGKLESGWTTGAAAYYVGYLQQRTFLLSYNQNGTITDAVDCSLDPLSETKCTLKSLTVEKGIYQTSNFRVQPTISIVRFPNITNLCPFGEVFNASKFASVYAWNRKRISNCVADYSVLYNSTSFSTFKCYGVSPTKLNDLCFTNVYADSFVVKGDEVRQIAPGQTGVIADYNYKLPDDFTGCVIAWNSVKQDALTGDNYGYLYRLFRKSKLKPFERDISTEIYQAGSTPCNGQVGLNCYYPLERYGFHPTTGVNYQPFRVVVLSFELLNGPATVCGPKLSTTLVKDKCVNFNFNGLTGTGVLTTSKKQFLPFQQFGRDISDTTDAVRDPQTLEILDITPCSFGGVSVITPGTNTSNQVAVLYQDVNCTEVPMAIHAEQLTPAWRVYSAGANVFQTRAGCLVGAEHVNNSYECDIPVGAGICASYHSMSSFRSVNQRSIIAYTMSLGAENSVAYSNNSIAICTNFTISVTTEILPVSMTKTSVDCTMYICGDSIECSNLLLQYGSFCTQLNRALTGIAVEQDKNTQEVFAQVKQIYKTPPIKDFGGFNFSQILPDPSKPSKRSFIEDLLFNKVTLADAGFIKQYGDCLGDIAARDLICAQKFNGLTVLPPLLTDEMIAQYTSALLAGTITSGWTFGAGAALQIPFAMQMAYRFNGIGVTQNVLYENQKLIANQFNSAIGKIQDSLSSTASALGKLQDVVNQNAQALNTLVKQLSSNFGAISSVLNDILSRLDKVEAEVQIDRLITGRLQSLQTYVTQQLIRAAEIRASANLAATKMSECVLGQSKRVDFCGKGYHLMSFPQSAPHGVVFLHVTYVCAQEKNFTTAPAICHEGKAHFPREGVFVSNGTHWFITQRNFYEPQIITTDNTFVSGSCDVVIGIVNNTVYDPLQPELDSFKEELDKYFKNHTSPDVDLGDISGINASVVNIQKEIDRLNEVAKNLNESLIDLQELGKYEQYIKGGGGSDIDPYKEFGSSYQLLNFLPLDFFPDLNALVDTATALYEEELTGREHCSPHHTAIRQALVCWDELTKLIAWMSSNITSEQVRTIIVNHVNDTWGLKVRQSLWFHLSCLTFGQHTVQEFLVSFGVWIRTPAPYRPPNAPILSTLPEHTVIC

SEQ ID NO: 7174 - protein, 1357 aa, Artificial Sequence
  SARS-CoV-2/pangolin/Guangxi/P1E/2017__EPI_ISL_410539 spike protein (1-1203)(P707C_P1061C) WhcAg construct
MFVFLFVLPLVSSQCVNLTTRTGIQPGYTNSSTRGVYYPDKVFRSSILHLTQDLFLPFFSNVTWFNTINYQGGFKKFDNPVLPFNDGVYFASTEKSNIIRGWIFGTTLDARTQSLLIVNNATNVVIKVCEFQFCTDPFLGVYYHNNNKTWVENEFRVYSSANNCTFEYISQPFLMDLEGKQGNFKNLREFVFKNVDGYFKIYSKHTPIDLVRDLPRGFAALEPLVDLPIGINITRFQTLLALHRSYLTPGKLESGWTTGAAAYYVGYLQQRTFLLSYNQNGTITDAVDCSLDPLSETKCTLKSLTVEKGIYQTSNFRVQPTISIVRFPNITNLCPFGEVFNASKFASVYAWNRKRISNCVADYSVLYNSTSFSTFKCYGVSPTKLNDLCFTNVYADSFVVKGDEVRQIAPGQTGVIADYNYKLPDDFTGCVIAWNSVKQDALTGGNYLYRLFRKSKLKPFERDISTEIYQAGSTPCNGQVGLNCYYPLERYGFHPTTGVNYQPFRVVVLSFELLNGPATVCGPKLSTTLVKDKCVNFNFNGLTGTGVLTTSKKQFLPFQQFGRDISDTTDAVRDPQTLEILDITPCSFGGVSVITPGTNTSNQVAVLYQDVNCTEVPMAIHAEQLTPAWRVYSAGANVFQTRAGCLVGAEHVNNSYECDIPVGAGICASYHSMSSLRSVNQRSIIAYTMSLGAENSVAYSNNSIAICTNFTISVTTEILPVSMTKTSVDCTMYICGDSIECSNLLLQYGSFCTQLNRALTGIAVEQDKNTQEVFAQVKQIYKTPPIKDFGGFNFSQILPDPSKPSKRSFIEDLLFNKVTLADAGFIKQYGDCLGDIAARDLICAQKFNGLTVLPPLLTDEMIAQYTSALLAGTITSGWTFGAGAALQIPFAMQMAYRFNGIGVTQNVLYENQKLIANQFNSAIGKIQDSLSSTASALGKLQDVVNQNAQALNTLVKQLSSNFGAISSVLNDILSRLDKVEAEVQIDRLITGRLQSLQTYVTQQLIRAAEIRASANLAATKMSECVLGQSKRVDFCGKGYHLMSFPQSAPHGVVFLHVTYVCAQEKNFTTAPAICHEGKAHFPREGVFVSNGTHWFITQRNFYEPQIITTDNTFVSGSCDVVIGIVNNTVYDPLQPELDSFKEELDKYFKNHTSPDVDLGDISGINASVVNIQKEIDRLNEVAKNLNESLIDLQELGKYEQYIKGGGGSDIDPYKEFGSSYQLLNFLPLDFFPDLNALVDTATALYEEELTGREHCSPHHTAIRQALVCWDELTKLIAWMSSNITSEQVRTIIVNHVNDTWGLKVRQSLWFHLSCLTFGQHTVQEFLVSFGVWIRTPAPYRPPNAPILSTLPEHTVIC

SEQ ID NO: 7175 - protein, 1365 aa, Artificial Sequence
  SARS-CoV-2/Wuhan/WIV05/2019__EPI_ISL_402128 spike protein (1-1211)(G889C_L1034C) WhcAg construct
MFVFLVLLPLVSSQCVNLTTRTQLPPAYTNSFTRGVYYPDKVFRSSVLHSTQDLFLPFFSNVTWFHAIHVSGTNGTKRFDNPVLPFNDGVYFASTEKSNIIRGWIFGTTLDSKTQSLLIVNNATNVVIKVCEFQFCNDPFLGVYYHKNNKSWMESEFRVYSSANNCTFEYVSQPFLMDLEGKQGNFKNLREFVFKNIDGYFKIYSKHTPINLVRDLPQGFSALEPLVDLPIGINITRFQTLLALHRSYLTPGDSSSGWTAGAAAYYVGYLQPRTFLLKYNENGTITDAVDCALDPLSETKCTLKSFTVEKGIYQTSNFRVQPTESIVRFPNITNLCPFGEVFNATRFASVYAWNRKRISNCVADYSVLYNSASFSTFKCYGVSPTKLNDLCFTNVYADSFVIRGDEVRQIAPGQTGKIADYNYKLPDDFTGCVIAWNSNNLDSKVGGNYNYLYRLFRKSNLKPFERDISTEIYQAGSTPCNGVEGFNCYFPLQSYGFQPTNGVGYQPYRVVVLSFELLHAPATVCGPKKSTNLVKNKCVNFNFNGLTGTGVLTESNKKFLPFQQFGRDIADTTDAVRDPQTLEILDITPCSFGGVSVITPGTNTSNQVAVLYQDVNCTEVPVAIHADQLTPTWRVYSTGSNVFQTRAGCLIGAEHVNNSYECDIPIGAGICASYQTQTNSPRRARSVASQSIIAYTMSLGAENSVAYSNNSIAIPTNFTISVTTEILPVSMTKTSVDCTMYICGDSTECSNLLLQYGSFCTQLNRALTGIAVEQDKNTQEVFAQVKQIYKTPPIKDFGGFNFSQILPDPSKPSKRSFIEDLLFNKVTLADAGFIKQYGDCLGDIAARDLICAQKFNGLTVLPPLLTDEMIAQYTSALLAGTITSGWTFCAGAALQIPFAMQMAYRFNGIGVTQNVLYENQKLIANQFNSAIGKIQDSLSSTASALGKLQDVVNQNAQALNTLVKQLSSNFGAISSVLNDILSRLDKVEAEVQIDRLITGRLQSLQTYVTQQLIRAAEIRASANLAATKMSECVCGQSKRVDFCGKGYHLMSFPQSAPHGVVFLHVTYVPAQEKNFTTAPAICHDGKAHFPREGVFVSNGTHWFVTQRNFYEPQIITTDNTFVSGNCDVVIGIVNNTVYDPLQPELDSFKEELDKYFKNHTSPDVDLGDISGINASVVNIQKEIDRLNEVAKNLNESLIDLQELGKYEQYIKGGGGSDIDPYKEFGSSYQLLNFLPLDFFPDLNALVDTATALYEEELTGREHCSPHHTAIRQALVCWDELTKLIAWMSSNITSEQVRTIIVNHVNDTWGLKVRQSLWFHLSCLTFGQHTVQEFLVSFGVWIRTPAPYRPPNAPILSTLPEHTVIC

SEQ ID NO: 7176 - protein, 1361 aa, Artificial Sequence
  SARS-CoV-2/bat/Yunnan/RaTG13/2013__EPI_ISL_402131 spike protein (1-1207)(G885C_L1030C) WhcAg construct
MFVFLVLLPLVSSQCVNLTTRTQLPPAYTNSSTRGVYYPDKVFRSSVLHLTQDLFLPFFSNVTWFHAIHVSGTNGIKRFDNPVLPFNDGVYFASTEKSNIIRGWIFGTTLDSKTQSLLIVNNATNVVIKVCEFQFCNDPFLGVYYHKNNKSWMESEFRVYSSANNCTFEYVSQPFLMDLEGKQGNFKNLREFVFKNIDGYFKIYSKHTPINLVRDLPPGFSALEPLVDLPIGINITRFQTLLALHRSYLTPGDSSSGWTAGAAAYYVGYLQPRTFLLKYNENGTITDAVDCALDPLSETKCTLKSFTVEKGIYQTSNFRVQPTDSIVRFPNITNLCPFGEVFNATTFASVYAWNRKRISNCVADYSVLYNSTSFSTFKCYGVSPTKLNDLCFTNVYADSFVITGDEVRQIAPGQTGKIADYNYKLPDDFTGCVIAWNSKHIDAKEGGNFNYLYRLFRKANLKPFERDISTEIYQAGSKPCNGQTGLNCYYPLYRYGFYPTDGVGHQPYRVVVLSFELLNAPATVCGPKKSTNLVKNKCVNFNFNGLTGTGVLTESNKKFLPFQQFGRDIADTTDAVRDPQTLEILDITPCSFGGVSVITPGTNASNQVAVLYQDVNCTEVPVAIHADQLTPTWRVYSTGSNVFQTRAGCLIGAEHVNNSYECDIPIGAGICASYQTQTNSRSVASQSIIAYTMSLGAENSVAYSNNSIAIPTNFTISVTTEILPVSMTKTSVDCTMYICGDSTECSNLLLQYGSFCTQLNRALTGIAVEQDKNTQEVFAQVKQIYKTPPIKDFGGFNFSQILPDPSKPSKRSFIEDLLFNKVTLADAGFIKQYGDCLGDIAARDLICAQKFNGLTVLPPLLTDEMIAQYTSALLAGTITSGWTFCAGAALQIPFAMQMAYRFNGIGVTQNVLYENQKLIANQFNSAIGKIQDSLSSTASALGKLQDVVNQNAQALNTLVKQLSSNFGAISSVLNDILSRLDKVEAEVQIDRLITGRLQSLQTYVTQQLIRAAEIRASANLAATKMSECVCGQSKRVDFCGKGYHLMSFPQSAPHGVVFLHVTYVPAQEKNFTTAPAICHDGKAHFPREGVFVSNGTHWFVTQRNFYEPQIITTDNTFVSGSCDVVIGIVNNTVYDPLQPELDSFKEELDKYFKNHTSPDVDLGDISGINASVVNIQKEIDRLNEVAKNLNESLIDLQELGKYEQYIKGGGGSDIDPYKEFGSSYQLLNFLPLDFFPDLNALVDTATALYEEELTGREHCSPHHTAIRQALVCWDELTKLIAWMSSNITSEQVRTIIVNHVNDTWGLKVRQSLWFHLSCLTFGQHTVQEFLVSFGVWIRTPAPYRPPNAPILSTLPEHTVIC

SEQ ID NO: 7177 - protein, 1365 aa, Artificial Sequence
  SARS-CoV-2/Wuhan/HBCDC-HB-01/2019__EPI_ISL_402132 spike protein (1-1211)(G889C_L1034C) WhcAg construct
MFVFLVLLPLVSSQCVNLTTRTQLPPAYTNSITRGVYYPDKVFRSSVLHSTQDLFLPFFSNVTWFHAIHVSGTNGTKRFDNPVLPFNDGVYFASTEKSNIIRGWIFGTTLDSKTQSLLIVNNATNVVIKVCEFQFCNDPFLGVYYHKNNKSWMESEFRVYSSANNCTFEYVSQPFLMDLEGKQGNFKNLREFVFKNIDGYFKIYSKHTPINLVRDLPQGFSALEPLVDLPIGINITRFQTLLALHRSYLTPGDSSSGWTAGAAAYYVGYLQPRTFLLKYNENGTITDAVDCALDPLSETKCTLKSFTVEKGIYQTSNFRVQPTESIVRFPNITNLCPFGEVFNATRFASVYAWNRKRISNCVADYSVLYNSASFSTFKCYGVSPTKLNDLCFTNVYADSFVIRGDEVRQIAPGQTGKIADYNYKLPDDFTGCVIAWNSNNLDSKVGGNYNYLYRLFRKSNLKPFERDISTEIYQAGSTPCNGVEGFNCYFPLQSYGFQPTNGVGYQPYRVVVLSFELLHAPATVCGPKKSTNLVKNKCVNFNFNGLTGTGVLTESNKKFLPFQQFGRDIADTTDAVRDPQTLEILDITPCSFGGVSVITPGTNTSNQVAVLYQDVNCTEVPVAIHADQLTPTWRVYSTGSNVFQTRAGCLIGAEHVNNSYECDIPIGAGICASYQTQTNSPRRARSVASQSIIAYTMSLGAENSVAYSNNSIAIPTNFTISVTTEILPVSMTKTSVDCTMYICGDSTECSNLLLQYGSFCTQLNRALTGIAVEQDKNTQEVFAQVKQIYKTPPIKDFGGFNFSQILPDPSKPSKRSFIEDLLFNKVTLADAGFIKQYGDCLGDIAARDLICAQKFNGLTVLPPLLTDEMIAQYTSALLAGTITSGWTFCAGAALQIPFAMQMAYRFNGIGVTQNVLYENQKLIANQFNSAIGKIQDSLSSTASALGKLQDVVNQNAQALNTLVKQLSSNFGAISSVLNDILSRLDKVEAEVQIDRLITGRLQSLQTYVTQQLIRAAEIRASANLAATKMSECVCGQSKRVDFCGKGYHLMSFPQSAPHGVVFLHVTYVPAQEKNFTTAPAICHDGKAHFPREGVFVSNGTHWFVTQRNFYEPQIITTDNTFVSGNCDVVIGIVNNTVYDPLQPELDSFKEELDKYFKNHTSPDVDLGDISGINASVVNIQKEIDRLNEVAKNLNESLIDLQELGKYEQYIKGGGGSDIDPYKEFGSSYQLLNFLPLDFFPDLNALVDTATALYEEELTGREHCSPHHTAIRQALVCWDELTKLIAWMSSNITSEQVRTIIVNHVNDTWGLKVRQSLWFHLSCLTFGQHTVQEFLVSFGVWIRTPAPYRPPNAPILSTLPEHTVIC

SEQ ID NO: 7178 - protein, 1365 aa, Artificial Sequence
  SARS-CoV-2/Guangdong/20SF028/2020__EPI_ISL_403936 spike protein (1-1211)(G889C_L1034C) WhcAg construct
MFVFLVLLPLVSSQCVNLTTRTQLPPAYTNSFTRGVYYPDKVFRSSVLYSTQDLFLPFFSNVTWFHAIHVSGTNGTKRFDNPVLPFNDGVYFASTEKSNIIRGWIFGTTLDSKTQSLLIVNNATNVVIKVCEFQFCNDPFLGVYYHKNNKSWMESEFRVYSSANNCTFEYVSQPFLMDLEGKQGNFKNLREFVFKNIDGYFKIYSKHTPINLVRDLPQGFSALEPLVDLPIGINITRFQTLLALHRSYLTPGDSSSGWTAGAAAYYVGYLQPRTFLLKYNENGTITDAVDCALDPLSETKCTLKSFTVEKGIYQTSNFRVQPTESIVRFPNITNLCPFGEVFNATRFASVYAWNRKRISNCVADYSVLYNSASFSTFKCYGVSPTKLNDLCFTNVYADSFVIRGDEVRQIAPGQTGKIADYNYKLPDDFTGCVIAWNSNNLDSKVGGNYNYLYRLFRKSNLKPFERDISTEIYQAGSTPCNGVEGFNCYFPLQSYGFQPTNGVGYQPYRVVVLSFELLHAPATVCGPKKSTNLVKNKCVNFNFNGLTGTGVLTESNKKFLPFQQFGRDIADTTDAVRDPQTLEILDITPCSFGGVSVITPGTNTSNQVAVLYQDVNCTEVPVAIHADQLTPTWRVYSTGSNVFQTRAGCLIGAEHVNNSYECDIPIGAGICASYQTQTNSPRRARSVASQSIIAYTMSLGAENSVAYSNNSIAIPTNFTISVTTEILPVSMTKTSVDCTMYICGDSTECSNLLLQYGSFCTQLNRALTGIAVEQDKNTQEVFAQVKQIYKTPPIKDFGGFNFSQILPDPSKPSKRSFIEDLLFNKVTLADAGFIKQYGDCLGDIAARDLICAQKFNGLTVLPPLLTDEMIAQYTSALLAGTITSGWTFCAGAALQIPFAMQMAYRFNGIGVTQNVLYENQKLIANQFNSAIGKIQDSLSSTASALGKLQDVVNQNAQALNTLVKQLSSNFGAISSVLNDILSRLDKVEAEVQIDRLITGRLQSLQTYVTQQLIRAAEIRASANLAATKMSECVCGQSKRVDFCGKGYHLMSFPQSAPHGVVFLHVTYVPAQEKNFTTAPAICHDGKAHFPREGVFVSNGTHWFVTQRNFYEPQIITTDNTFVSGNCDVVIGIVNNTVYDPLQPELDSFKEELDKYFKNHTSPDVDLGDISGINASVVNIQKEIDRLNEVAKNLNESLIDLQELGKYEQYIKGGGGSDIDPYKEFGSSYQLLNFLPLDFFPDLNALVDTATALYEEELTGREHCSPHHTAIRQALVCWDELTKLIAWMSSNITSEQVRTIIVNHVNDTWGLKVRQSLWFHLSCLTFGQHTVQEFLVSFGVWIRTPAPYRPPNAPILSTLPEHTVIC

SEQ ID NO: 7179 - protein, 1365 aa, Artificial Sequence
  SARS-CoV-2/Shenzhen/SZTH-001/2020__EPI_ISL_406592 spike protein (1-1211)(G889C_L1034C) WhcAg construct
MFVFLVLLPLVSSQCVNLTTRTQLPPAYTNSFTRGVYYPDKVFRSSVLHSTQDLFLPFFSNVTWFHAIHVSGTNGTKRFDNPVLPFNDGVYFASTEKSNIIRGWIFGTTLDSKTQSLLIVNNATNVVIKVCEFQFCNDPFLGVYYHKNNKSWMESEFRVYSSANNCTFEYVSQPFLMDLEGKQGNFKNLREFVFKNIDGYFKIYSKHTPINLVRDLPQGFSALEPLVDLPIGINITRFQTLLALHRSYLTPGDSSSGWTAGAAAYYVGYLQPRTFLLKYNENGTITDAVDCALDPLSETKCTLKSFTVEKGIYQTSNFRVQPTESIVRFPNITNLCPFGEVFNATRFASVYAWNRKRISNCVADYSVLYNSASFSTFKCYGVSPTKLNDLCFTNVYADSFVIRGDEVRQIAPGQTGKIADYNYKLPDDFTGCVIAWNSNNLDSKVGGNYNYLYRLFRKSNLKPFERDISTEIYQAGSTPCNGVEGFNCYFPLQSYGFQPTNGVGYQPYRVVVLSFELLHAPATVCGPKKSTNLVKNKCVNFNFNGLTGTGVLTESNKKFLPFQQFGRDIADTTDAVRDPQTLEILDITPCSFGGVSVITPGTNTSNQVAVLYQDVNCTEVPVAIHADQLTPTWRVYSTGSNVFQTRAGCLIGAEHVNNSYECDIPIGAGICASYQTQTNSPRRARSVASQSIIAYTMSLGAENSVAYSNNSIAIPTNFTISVTTEILPVSMTKTSVDCTMYICGDSTECSNLLLQYGSFCTQLNRALTGIAVEQDKNTQEVFAQVKQIYKTPPIKDFGGFNFSQILPDPSKPSKRSFIEDLLFNKVTLADAGFIKQYGDCLGDIAARDLICAQKFNGLTVLPPLLTDEMIAQYTSALLAGTITSGWTFCAGAALQIPFAMQMAYRFNGIGVTQNVLYENQKLIANQFNSAIGKIQDSLSSTASALGKLQDVVNQNAQALNTLVKQLSSNFGAISSVLNDILSRLDKVEAEVQIDRLITGRLQSLQTYVTQQLIRAAEIRASANLAATKMSECVCGQSKRVDFCGKGYHLMSFPQSAPHGVVFLHVTYVPAQEKNFTTAPAICHDGKAHFPREGVFVSNGTHWFVTQRNFYEPQIITTDNTFVSGNCDVLIGIVNNTVYDPLQPELDSFKEELDKYFKNHTSPDVDLGDISGINASVVNIQKEIDRLNEVAKNLNESLIDLQELGKYEQYIKGGGGSDIDPYKEFGSSYQLLNFLPLDFFPDLNALVDTATALYEEELTGREHCSPHHTAIRQALVCWDELTKLIAWMSSNITSEQVRTIIVNHVNDTWGLKVRQSLWFHLSCLTFGQHTVQEFLVSFGVWIRTPAPYRPPNAPILSTLPEHTVIC

SEQ ID NO: 7180 - protein, 1365 aa, Artificial Sequence
  SARS-CoV-2/Shenzhen/SZTH-004/2020__EPI_ISL_406595 spike protein (1-1211)(G889C_L1034C) WhcAg construct
MFVFLVLLPLVSSQCVNLTTRTQLPPAYTNSFTRGVYYPDKVFRSSVLHSTQDLFLPFFSNVTWFHAIHVSGTNGTKRFDNPVLPFNDGVYFASTEKSNIIRGWIFGTTLDSKTQSLLIVNNATNVVIKVCEFQFCNDPFLGVYYHKNNKSWMESEFRVYSSANNCTFEYVSQPFLMDLEGKQGNFKNLREFVFKNIDGYFKIYSKHTPINLVRDLPQGFSALEPLVDLPIGINITRFQTLLALHRSYLTPGDSSSGWTAGAAAYYVGYLQPRTFLLKYNENGTITDAVDCALDPLSETKCTLKSFTVEKGIYQTSNFRVQPTESIVRFPNITNLCPFGEVFNATRFASVYAWDRKRISNCVAYYSVLYNSASFSTFKCYGVSPTKLNDLCFTNVYADSFVIRGDEVRQIAPGQTGKIADYNYKLPDDFTGCVIAWNSNNLDSKVGGNYNYLYRLFRKSNLKPFERDISTEIYQAGSTPCNGVEGFNCYFPLQSYGFQPTNGVGYQPYRVVVLSFELLHAPATVCGPKKSTNLVKNKCVNFNFNGLTGTGVLTESNKKFLPFQQFGRDIADTTDAVRDPQTLEILDITPCSFGGVSVITPGTNTSNQVAVLYQDVNCTEVPVAIHADQLTPTWRVYSTGSNVFQTRAGCLIGAEHVNNSYECDIPIGAGICASYQTQTNSPRRARSVASQSIIAYTMSLGAENSVAYSNNSIAIPTNFTISVTTEILPVSMTKTSVDCTMYICGDSTECSNLLLQYGSFCTQLNRALTGIAVEQDKNTQEVFAQVKQIYKTPPIKDFGGFNFSQILPDPSKPSKRSFIEDLLFNKVTLADAGFIKQYGDCLGDIAARDLICAQKFNGLTVLPPLLTDEMIAQYTSALLAGTITSGWTFCAGAALQIPFAMQMAYRFNGIGVTQNVLYENQKLIANQFNSAIGKIQDSLSSTASALGKLQDVVNQNAQALNTLVKQLSSNFGAISSVLNDILSRLDKVEAEVQIDRLITGRLQSLQTYVTQQLIRAAEIRASANLAATKMSECVCGQSKRVDFCGKGYHLMSFPQSAPHGVVFLHVTYVPAQEKNFTTAPAICHDGKAHFPREGVFVSNGTHWFVTQRNFYEPQIITTDNTFVSGNCDVVIGIVNNTVYDPLQPELDSFKEELDKYFKNHTSPDVDLGDISGINASVVNIQKEIDRLNEVAKNLNESLIDLQELGKYEQYIKGGGGSDIDPYKEFGSSYQLLNFLPLDFFPDLNALVDTATALYEEELTGREHCSPHHTAIRQALVCWDELTKLIAWMSSNITSEQVRTIIVNHVNDTWGLKVRQSLWFHLSCLTFGQHTVQEFLVSFGVWIRTPAPYRPPNAPILSTLPEHTVIC

SEQ ID NO: 7181 - protein, 1365 aa, Artificial Sequence
  SARS-CoV-2/France/IDF0372/2020__EPI_ISL_406596 spike protein (1-1211)(G889C_L1034C) WhcAg construct
MFVFLVLLPLVSSQCVNLTTRTQLPPAYTNSFTRGVYYPDKVFRSSVLHSTQDLFLPFFSNVTWFHAIHVSGTNGTKRFDNPVLPFNDGVYFASTEKSNIIRGWIFGTTLDSKTQSLLIVNNATNVVIKVCEFQFCNDPFLGVYYHKNNKSWMESEFRVYSSANNCTFEYVSQPFLMDLEGKQGNFKNLREFVFKNIDGYFKIYSKHTPINLVRDLPQGFSALEPLVDLPIGINITRFQTLLALHRSYLTPGDSSSGWTAGAAAYYVGYLQPRTFLLKYNENGTITDAVDCALDPLSETKCTLKSFTVEKGIYQTSNFRVQPTESIVRFPNITNLCPFGEVFNATRFASVYAWNRKRISNCVADYSFLYNSASFSTFKCYGVSPTKLNDLCFTNVYADSFVIRGDEVRQIAPGQTGKIADYNYKLPDDFTGCVIAWNSNNLDSKVGGNYNYLYRLFRKSNLKPFERDISTEIYQAGSTPCNGVEGFNCYFPLQSYGFQPTNGVGYQPYRVVVLSFELLHAPATVCGPKKSTNLVKNKCVNFNFNGLTGTGVLTESNKKFLPFQQFGRDIADTTDAVRDPQTLEILDITPCSFGGVSVITPGTNTSNQVAVLYQDVNCTEVPVAIHADQLTPTWRVYSTGSNVFQTRAGCLIGAEHVNNSYECDIPIGAGICASYQTQTNSPRRARSVASQSIIAYTMSLGAENSVAYSNNSIAIPTNFTISVTTEILPVSMTKTSVDCTMYICGDSTECSNLLLQYGSFCTQLNRALTGIAVEQDKNTQEVFAQVKQIYKTPPIKDFGGFNFSQILPDPSKPSKRSFIEDLLFNKVTLADAGFIKQYGDCLGDIAARDLICAQKFNGLTVLPPLLTDEMIAQYTSALLAGTITSGWTFCAGAALQIPFAMQMAYRFNGIGVTQNVLYENQKLIANQFNSAIGKIQDSLSSTASALGKLQDVVNQNAQALNTLVKQLSSNFGAISSVLNDILSRLDKVEAEVQIDRLITGRLQSLQTYVTQQLIRAAEIRASANLAATKMSECVCGQSKRVDFCGKGYHLMSFPQSAPHGVVFLHVTYVPAQEKNFTTAPAICHDGKAHFPREGVFVSNGTHWFVTQRNFYEPQIITTDNTFVSGNCDVVIGIVNNTVYDPLQPELDSFKEELDKYFKNHTSPDVDLGDISGINASVVNIQKEIDRLNEVAKNLNESLIDLQELGKYEQYIKGGGGSDIDPYKEFGSSYQLLNFLPLDFFPDLNALVDTATALYEEELTGREHCSPHHTAIRQALVCWDELTKLIAWMSSNITSEQVRTIIVNHVNDTWGLKVRQSLWFHLSCLTFGQHTVQEFLVSFGVWIRTPAPYRPPNAPILSTLPEHTVIC

SEQ ID NO: 7182 - protein, 1365 aa, Artificial Sequence
  SARS-CoV-2/Australia/VIC01/2020__EPI_ISL_406844 spike protein (1-1211)(G889C_L1034C) WhcAg construct
MFVFLVLLPLVSSQCVNLTTRTQLPPAYTNSFTRGVYYPDKVFRSSVLHSTQDLFLPFFSNVTWFHAIHVSGTNGTKRFDNPVLPFNDGVYFASTEKSNIIRGWIFGTTLDSKTQSLLIVNNATNVVIKVCEFQFCNDPFLGVYYHKNNKSWMESEFRVYSSANNCTFEYVSQPFLMDLEGKQGNFKNLREFVFKNIDGYFKIYSKHTPINLVRDLPQGFSALEPLVDLPIGINITRFQTLLALHRRYLTPGDSSSGWTAGAAAYYVGYLQPRTFLLKYNENGTITDAVDCALDPLSETKCTLKSFTVEKGIYQTSNFRVQPTESIVRFPNITNLCPFGEVFNATRFASVYAWNRKRISNCVADYSVLYNSASFSTFKCYGVSPTKLNDLCFTNVYADSFVIRGDEVRQIAPGQTGKIADYNYKLPDDFTGCVIAWNSNNLDSKVGGNYNYLYRLFRKSNLKPFERDISTEIYQAGSTPCNGVEGFNCYFPLQSYGFQPTNGVGYQPYRVVVLSFELLHAPATVCGPKKSTNLVKNKCVNFNFNGLTGTGVLTESNKKFLPFQQFGRDIADTTDAVRDPQTLEILDITPCSFGGVSVITPGTNTSNQVAVLYQDVNCTEVPVAIHADQLTPTWRVYSTGSNVFQTRAGCLIGAEHVNNSYECDIPIGAGICASYQTQTNSPRRARSVASQSIIAYTMSLGAENSVAYSNNSIAIPTNFTISVTTEILPVSMTKTSVDCTMYICGDSTECSNLLLQYGSFCTQLNRALTGIAVEQDKNTQEVFAQVKQIYKTPPIKDFGGFNFSQILPDPSKPSKRSFIEDLLFNKVTLADAGFIKQYGDCLGDIAARDLICAQKFNGLTVLPPLLTDEMIAQYTSALLAGTITSGWTFCAGAALQIPFAMQMAYRFNGIGVTQNVLYENQKLIANQFNSAIGKIQDSLSSTASALGKLQDVVNQNAQALNTLVKQLSSNFGAISSVLNDILSRLDKVEAEVQIDRLITGRLQSLQTYVTQQLIRAAEIRASANLAATKMSECVCGQSKRVDFCGKGYHLMSFPQSAPHGVVFLHVTYVPAQEKNFTTAPAICHDGKAHFPREGVFVSNGTHWFVTQRNFYEPQIITTDNTFVSGNCDVVIGIVNNTVYDPLQPELDSFKEELDKYFKNHTSPDVDLGDISGINASVVNIQKEIDRLNEVAKNLNESLIDLQELGKYEQYIKGGGGSDIDPYKEFGSSYQLLNFLPLDFFPDLNALVDTATALYEEELTGREHCSPHHTAIRQALVCWDELTKLIAWMSSNITSEQVRTIIVNHVNDTWGLKVRQSLWFHLSCLTFGQHTVQEFLVSFGVWIRTPAPYRPPNAPILSTLPEHTVIC

SEQ ID NO: 7183 - protein, 1365 aa, Artificial Sequence
  SARS-CoV-2/Germany/BavPat1/2020__EPI_ISL_406862 spike protein (1-1211)(G889C_L1034C) WhcAg construct
MFVFLVLLPLVSSQCVNLTTRTQLPPAYTNSFTRGVYYPDKVFRSSVLHSTQDLFLPFFSNVTWFHAIHVSGTNGTKRFDNPVLPFNDGVYFASTEKSNIIRGWIFGTTLDSKTQSLLIVNNATNVVIKVCEFQFCNDPFLGVYYHKNNKSWMESEFRVYSSANNCTFEYVSQPFLMDLEGKQGNFKNLREFVFKNIDGYFKIYSKHTPINLVRDLPQGFSALEPLVDLPIGINITRFQTLLALHRSYLTPGDSSSGWTAGAAAYYVGYLQPRTFLLKYNENGTITDAVDCALDPLSETKCTLKSFTVEKGIYQTSNFRVQPTESIVRFPNITNLCPFGEVFNATRFASVYAWNRKRISNCVADYSVLYNSASFSTFKCYGVSPTKLNDLCFTNVYADSFVIRGDEVRQIAPGQTGKIADYNYKLPDDFTGCVIAWNSNNLDSKVGGNYNYLYRLFRKSNLKPFERDISTEIYQAGSTPCNGVEGFNCYFPLQSYGFQPTNGVGYQPYRVVVLSFELLHAPATVCGPKKSTNLVKNKCVNFNFNGLTGTGVLTESNKKFLPFQQFGRDIADTTDAVRDPQTLEILDITPCSFGGVSVITPGTNTSNQVAVLYQGVNCTEVPVAIHADQLTPTWRVYSTGSNVFQTRAGCLIGAEHVNNSYECDIPIGAGICASYQTQTNSPRRARSVASQSIIAYTMSLGAENSVAYSNNSIAIPTNFTISVTTEILPVSMTKTSVDCTMYICGDSTECSNLLLQYGSFCTQLNRALTGIAVEQDKNTQEVFAQVKQIYKTPPIKDFGGFNFSQILPDPSKPSKRSFIEDLLFNKVTLADAGFIKQYGDCLGDIAARDLICAQKFNGLTVLPPLLTDEMIAQYTSALLAGTITSGWTFCAGAALQIPFAMQMAYRFNGIGVTQNVLYENQKLIANQFNSAIGKIQDSLSSTASALGKLQDVVNQNAQALNTLVKQLSSNFGAISSVLNDILSRLDKVEAEVQIDRLITGRLQSLQTYVTQQLIRAAEIRASANLAATKMSECVCGQSKRVDFCGKGYHLMSFPQSAPHGVVFLHVTYVPAQEKNFTTAPAICHDGKAHFPREGVFVSNGTHWFVTQRNFYEPQIITTDNTFVSGNCDVVIGIVNNTVYDPLQPELDSFKEELDKYFKNHTSPDVDLGDISGINASVVNIQKEIDRLNEVAKNLNESLIDLQELGKYEQYIKGGGGSDIDPYKEFGSSYQLLNFLPLDFFPDLNALVDTATALYEEELTGREHCSPHHTAIRQALVCWDELTKLIAWMSSNITSEQVRTIIVNHVNDTWGLKVRQSLWFHLSCLTFGQHTVQEFLVSFGVWIRTPAPYRPPNAPILSTLPEHTVIC

SEQ ID NO: 7184 - protein, 1365 aa, Artificial Sequence
  SARS-CoV-2/Wuhan/HBCDC-HB-02/2020__EPI_ISL_412978 spike protein (1-1211)(G889C_L1034C) WhcAg construct
MFVFLVLLPLVSSQCVNLTTRTQLPPAYTNSFTRGVYYPDKVFRSSVLHSTQDLFLPFFSNVTWFHAIHVSGTNGTKRFDNPVLPFNDGVYFASTEKSNIIRGWIFGTTLDSKTQSLLIVNNATNVVIKVCEFQFCNDPFLGVYYHKNNKSWMESEFRVYSSANNCTFEYVSQPFLMDLEGKQGNFKNLREFVFKNIDGYFKIYSKHTPINLVRDLPQGFSALEPLVDLPIGINITRFQTLLALHRSYLTPGDSSSGWTAGAAAYYVGYLQPRTFLLKYNENGTITDAVDCALDPLSETKCTLKSFTVEKGIYQTSNFRVQPTESIVRFPNITNLCPFGEVFNATRFASVYAWNRKRISNCVADYSVLYNSASFSTFKCYGVSPTKLNDLCFTNVYADSFVIRGDEVRQIAPGQTGKIADYNYKLPDDFTGCVIAWNSNNLDSKVGGNYNYLYRLFRKSNLKPFERDISTEIYQAGSTPCNGVEGFNCYFPLQSYGFQPTNGVGYQPYRVVVLSFELLHAPATVCGPKKSTNLVKNKCVNFNFNGLTGTGVLTESNKKFLPFQQFGRDIADTTDAVRDPQTLEILDITPCSFGGVSVITPGTNTSNQVAVLYQDVNCTEVPVAIHADQLTPTWRVYSTGSNVFQTRAGCLIGAEHVNNSYECDIPIGAGICASYQTQTNSPRRARSVASQSIIAYTMSLGAENSVAYSNNSIAIPTNFTISVTTEILPVSMTKTSVDCTMYICGDSTECSNFLLQYGSFCTQLNRALTGIAVEQDKNTQEVFAQVKQIYKTPPIKDFGGFNFSQILPDPSKPSKRSFIEDLLFNKVTLADAGFIKQYGDCLGDIAARDLICAQKFNGLTVLPPLLTDEMIAQYTSALLAGTITSGWTFCAGAALQIPFAMQMAYRFNGIGVTQNVLYENQKLIANQFNSAIGKIQDSLSSTASALGKLQDVVNQNAQALNTLVKQLSSNFGAISSVLNDILSRLDKVEAEVQIDRLITGRLQSLQTYVTQQLIRAAEIRASANLAATKMSECVCGQSKRVDFCGKGYHLMSFPQSAPHGVVFLHVTYVPAQEKNFTTAPAICHDGKAHFPREGVFVSNGTHWFVTQRNFYEPQIITTDNTFVSGNCDVVIGIVNNTVYDPLQPELDSFKEELDKYFKNHTSPDVDLGDISGINASVVNIQKEIDRLNEVAKNLNESLIDLQELGKYEQYIKGGGGSDIDPYKEFGSSYQLLNFLPLDFFPDLNALVDTATALYEEELTGREHCSPHHTAIRQALVCWDELTKLIAWMSSNITSEQVRTIIVNHVNDTWGLKVRQSLWFHLSCLTFGQHTVQEFLVSFGVWIRTPAPYRPPNAPILSTLPEHTVIC

SEQ ID NO: 7185 - protein, 1365 aa, Artificial Sequence
  SARS-CoV-2/Australia/QLD02/2020__EPI_ISL_407896 spike protein (1-1211)(G889C_L1034C) WhcAg construct
MFVFLVLLPLVSSQCVNLTTRTQLPPAYTNSFTRGVYYPDKVFRSSVLHSTQDLFLPFFSNVTWFHAIHVSGTNGTKRFDNPVLPFNDGVYFASTEKSNIIRGWIFGTTLDSKTQSLLIVNNATNVVIKVCEFQFCNDPFLGVYYHKNNKSWMESEFRVYSSANNCTFEYVSQPFLMDLEGKQGNFKNLREFVFKNIDGYFKIYSKHTPINLVRDLPQGFSALEPLVDLPIGINITRFQTLLALHRSYLTPGDSSSGWTAGAAAYYVGYLQPRTFLLKYNENGTITDAVDCALDPLSETKCTLKSFTVEKGIYQTSNFRVQPTESIVRFPNITNLCPFGEVFNATRFASVYAWNRKRISNCVADYSVLYNSASFSTFKCYGVSPTKLNDLCFTNVYADSFVIRGDEVRQIAPGQTGKIADYNYKLPDDFTGCVIAWNSNNLDSKVGGNYNYLYRLFRKSNLKPFERDISTEIYQAGSTPCNGVEGFNCYFPLQSYGFQPTNGVGYQPYRVVVLSFELLHAPATVCGPKKSTNLVKNKCVNFNFNGLTGTGVLTESNKKFLPFQQFGRDIADTTDAVRDPQTLEILDITPCSFGGVSVITPGTNTSNQVAVLYQDVNCTEVPVAIHADQLTPTWRVYSTGSNVFQTRAGCLIGAEHVNNSYECDIPIGAGICASYQTQTNSPRRARSVASQSIIAYTMSLGAENSVAYSNNSIAIPTNFTISVTTEILPVSMTKTSVDCTMYICGDSTECSNLLLQYGSFCTQLNRALTGIAVEQDKNTQEVFAQVKQIYKTPPIKDFGGFNFSQILPDPSKPSKRSFIEDLLFNKVTLADAGFIKQYGDCLGDIAARDLICAQKFNGLTVLPPLLTDEMIAQYTSALLAGTITSGWTFCAGAALQIPFAMQMAYRFNGIGVTQNVLYENQKLIANQFNSAIGKIQDSLSSTASALGKLQDVVNQNAQALNTLVKQLSSNFGAISSVLNDILSRLDKVEAEVQIDRLITGRLQSLQTYVTQQLIRAAEIRASANLAATKMSECVCGQSKRVDFCGKGYHLMSFPQSAPHGVVFLHVTYVPAQEKNFTTAPAICHDGKAHFPREGVFVSNGTHWFVTQRNFYEPQIITTDNTFVSGNCDVVIGIVNNTVYDPLQLELDSFKEELDKYFKNHTSPDVDLGDISGINASVVNIQKEIDRLNEVAKNLNESLIDLQELGKYEQYIKGGGGSDIDPYKEFGSSYQLLNFLPLDFFPDLNALVDTATALYEEELTGREHCSPHHTAIRQALVCWDELTKLIAWMSSNITSEQVRTIIVNHVNDTWGLKVRQSLWFHLSCLTFGQHTVQEFLVSFGVWIRTPAPYRPPNAPILSTLPEHTVIC

SEQ ID NO: 7186 - protein, 1365 aa, Artificial Sequence
  SARS-CoV-2/India/1-31/2020__EPI_ISL_413523 spike protein (1-1211)(G889C_L1034C) WhcAg construct
MFVFLVLLPLVSSQCVNLTTRTQLPPAYTNSFTRGVYYPDKVFRSSVLHSTQDLFLPFFSNVTWFHAIHVSGTNGTKRFDNPVLPFNDGVYFASTEKSNIIRGWIFGTTLDSKTQSLLIVNNATNVVIKVCEFQFCNDPFLGVYYHKNNKSWMESEFRVYSSANNCTFEYVSQPFLMDLEGKQGNFKNLREFVFKNIDGYFKIYSKHTPINLVRDLPQGFSALEPLVDLPIGINITRFQTLLALHRSYLTPGDSSSGWTAGAAAYYVGYLQPRTFLLKYNENGTITDAVDCALDPLSETKCTLKSFTVEKGIYQTSNFRVQPTESIVRFPNITNLCPFGEVFNATRFASVYAWNRKRISNCVADYSVLYNSASFSTFKCYGVSPTKLNDLCFTNVYADSFVIRGDEVRQIAPGQTGKIADYNYKLPDDFTGCVIAWNSNNLDSKVGGNYNYLYRLFRKSNLKPFERDISTEIYQAGSTPCNGVEGFNCYFPLQSYGFQPTNGVGYQPYRVVVLSFELLHAPATVCGPKKSTNLVKNKCVNFNFNGLTGTGVLTESNKKFLPFQQFGRDIADTTDAVRDPQTLEILDITPCSFGGVSVITPGTNTSNQVAVLYQDVNCTEVPVAIHADQLTPTWRVYSTGSNVFQTRAGCLIGAEHVNNSYECDIPIGAGICASYQTQTNSPRRARSVASQSIIAYTMSLGAENSVAYSNNSIAIPTNFTISVTTEILPVSMTKTSVDCTMYICGDSTECSNLLLQYGSFCTQLNRALTGIAVEQDKNTQEVFAQVKQIYKTPPIKDFGGFNFSQILPDPSKPSKRSFIEDLLFNKVTLADAGFIKQYGDCLGDIAARDLICAQKFNGLTVLPPLLTDEMIAQYTSALLAGTITSGWTFCAGAALQIPFAMQMAYRFNGIGVTQNVLYENQKLIANQFNSVIGKIQDSLSSTASALGKLQDVVNQNAQALNTLVKQLSSNFGAISSVLNDILSRLDKVEAEVQIDRLITGRLQSLQTYVTQQLIRAAEIRASANLAATKMSECVCGQSKRVDFCGKGYHLMSFPQSAPHGVVFLHVTYVPAQEKNFTTAPAICHDGKAHFPREGVFVSNGTHWFVTQRNFYEPQIITTDNTFVSGNCDVVIGIVNNTVYDPLQPELDSFKEELDKYFKNHTSPDVDLGDISGINASVVNIQKEIDRLNEVAKNLNESLIDLQELGKYEQYIKGGGGSDIDPYKEFGSSYQLLNFLPLDFFPDLNALVDTATALYEEELTGREHCSPHHTAIRQALVCWDELTKLIAWMSSNITSEQVRTIIVNHVNDTWGLKVRQSLWFHLSCLTFGQHTVQEFLVSFGVWIRTPAPYRPPNAPILSTLPEHTVIC

SEQ ID NO: 7187 - protein, 1365 aa, Artificial Sequence
  SARS-CoV-2/Guangdong/GD2020087-P0008/2020__EPI_ISL_413863 spike protein (1-1211)(G889C_L1034C) WhcAg construct
MFVFLVLLPLVSSQCVNLTTRTQLPPAYTNSFTRGVYYPDKVFRSSVLHSTQDLFLPFFSNVTWFHAIHVSGTNGTKRFDNPVLPFNDGVYFASTEKSNIIRGWIFGTTLDSKTQSLLIVNNATNVVIKVCEFQFCNDPFLGVYYHKNNKSWMESEFRVYSSANNCTFEYVSQPFLMDLEGKQGNFKNLREFVFKNIDGYFKIYSKHTPINLVRDLPQGFSALEPLVDLPIGINITRFQTLLALHRSYLTPGDSSSGWTAGAAAYYVGYLQPRTFLLKYNENGTITDAVDCALDPLSETKCTLKSFTVEKGIYQTSNFRVQPTESIVRFPNITNLCPFGEVFNATRFASVYAWNRKRISNCVADYSVLYNSASFSTFKCYGVSPTKLNDLCFTNVYADSFVIRGDEVREIAPGQTGKIADYNYKLPDDFTGCVIAWNSNNLDSKVGGNYNYLYRLFRKSNLKPFERDISTEIYQAGSTPCNGVEGFNCYFPLQSYGFQPTNGVGYQPYRVVVLSFELLHAPATVCGPKKSTNLVKNKCVNFNFNGLTGTGVLTESNKKFLPFQQFGRDIADTTDAVRDPQTLEILDITPCSFGGVSVITPGTNTSNQVAVLYQDVNCTEVPVAIHADQLTPTWRVYSTGSNVFQTRAGCLIGAEHVNNSYECDIPIGAGICASYQTQTNSPRRARSVASQSIIAYTMSLGAENSVAYSNNSIAIPTNFTISVTTEILPVSMTKTSVDCTMYICGDSTECSNLLLQYGSFCTQLNRALTGIAVEQDKNTQEVFAQVKQIYKTPPIKDFGGFNFSQILPDPSKPSKRSFIEDLLFNKVTLADAGFIKQYGDCLGDIAARDLICAQKFNGLTVLPPLLTDEMIAQYTSALLAGTITSGWTFCAGAALQIPFAMQMAYRFNGIGVTQNVLYENQKLIANQFNSAIGKIQDSLSSTASALGKLQDVVNQNAQALNTLVKQLSSNFGAISSVLNDILSRLDKVEAEVQIDRLITGRLQSLQTYVTQQLIRAAEIRASANLAATKMSECVCGQSKRVDFCGKGYHLMSFPQSAPHGVVFLHVTYVPAQEKNFTTAPAICHDGKAHFPREGVFVSNGTHWFVTQRNFYEPQIITTDNTFVSGNCDVVIGIVNNTVYDPLQPELDSFKEELDKYFKNHTSPDVDLGDISGINASVVNIQKEIDRLNEVAKNLNESLIDLQELGKYEQYIKGGGGSDIDPYKEFGSSYQLLNFLPLDFFPDLNALVDTATALYEEELTGREHCSPHHTAIRQALVCWDELTKLIAWMSSNITSEQVRTIIVNHVNDTWGLKVRQSLWFHLSCLTFGQHTVQEFLVSFGVWIRTPAPYRPPNAPILSTLPEHTVIC

SEQ ID NO: 7188 - protein, 1365 aa, Artificial Sequence
  SARS-CoV-2/Sweden/01/2020__EPI_ISL_411951 spike protein (1-1211)(G889C_L1034C) WhcAg construct
MFVFLVLLPLVSSQCVNLTTRTQLPPAYTNSFTRGVYYPDKVFRSSVLHSTQDLFLPFFSNVTWFHAIHVSGTNGTKRFDNPVLPFNDGVYFASTEKSNIIRGWIFGTTLDSKTQSLLIVNNATNVVIKVCEFQFCNDPFLGVYYHKNNKSWMESEFRVYSSANNCTFEYVSQPFLMDLEGKQGNFKNLREFVFKNIDGYFKIYSKHTPINLVRDLPQGFSALEPLVDLPIGINITRFQTLLALHRSYLTPGDSSSGWTAGAAAYYVGYLQPRTFLLKYNENGTITDAVDCALDPLSETKCTLKSFTVEKGIYQTSNFRVQPTESIVRFPNITNLCPFGEVFNATRFASVYAWNRKRISNCVADYSVLYNSASFSTFKCYGVSPTKLNDLCFTNVYADSFVIRGDEVRQIAPGQTGKIADYNYKLPDDFTGCVIAWNSNNLDSKVGGNYNYLYRLFRKSNLKPFERDISTEIYQAGSTPCNGVEGFNCYFPLQSYGFQPTNGVGYQPYRVVVLSFELLHAPATVCGPKKSTNLVKNKCVNFNFNGLTGTGVLTESNKKFLPFQQFGRDIADTTDAVRDPQTLEILDITPCSFGGVSVITPGTNTSNQVAVLYQDVNCTEVPVAIHADQLTPTWRVYSTGSNVFQTRAGCLIGAEHVNNSYECDIPIGAGICASYQTQTNSPRRARSVASQSIIAYTMSLGAENSVAYSNNSIAIPTNFTISVTTEILPVSMTKTSVDCTMYICGDSTECSNLLLQYGSFCTQLNRALTGIAVEQDKNTQEVFAQVKQIYKTPPIKDCGGFNFSQILPDPSKPSKRSFIEDLLFNKVTLADAGFIKQYGDCLGDIAARDLICAQKFNGLTVLPPLLTDEMIAQYTSALLAGTITSGWTFCAGAALQIPFAMQMAYRFNGIGVTQNVLYENQKLIANQFNSAIGKIQDSLSSTASALGKLQDVVNQNAQALNTLVKQLSSNFGAISSVLNDILSRLDKVEAEVQIDRLITGRLQSLQTYVTQQLIRAAEIRASANLAATKMSECVCGQSKRVDFCGKGYHLMSFPQSAPHGVVFLHVTYVPAQEKNFTTAPAICHDGKAHFPREGVFVSNGTHWFVTQRNFYEPQIITTDNTFVSGNCDVVIGIVNNTVYDPLQPELDSFKEELDKYFKNHTSPDVDLGDISGINASVVNIQKEIDRLNEVAKNLNESLIDLQELGKYEQYIKGGGGSDIDPYKEFGSSYQLLNFLPLDFFPDLNALVDTATALYEEELTGREHCSPHHTAIRQALVCWDELTKLIAWMSSNITSEQVRTIIVNHVNDTWGLKVRQSLWFHLSCLTFGQHTVQEFLVSFGVWIRTPAPYRPPNAPILSTLPEHTVIC

SEQ ID NO: 7189 - protein, 1365 aa, Artificial Sequence
  SARS-CoV-2/Tianmen/HBCDC-HB-07/2020__EPI_ISL_412983 spike protein (1-1211)(G889C_L1034C) WhcAg construct
MFVFLVLLPLVSSQCVNLTTRTQLPPAYTNSFTRGVYYPDKVFRSSVLHSTQDLFLPFFSNVTWFHAIHVSGTNGTKRFDNPVLPFNDGVYFASTEKSNIIRGWIFGTTLDSKTQSLLIVNNATNVVIKVCEFQFCNDPFLGVYYHKNNKSWMESEFRVYSSANNCTFEYVSQPFLMDLEGKQGNFKNLREFVFKNIDGYFKIYSKHTPINLVRDLPQGFSALEPLVDLPIGINITRFQTLLALHRSYLTPGDSSSGWTAGAAAYYVGYLQPRTFLLKYNENGTITDAVDCALDPLSETKCTLKSFTVEKGIYQTSNFRVQPTESIVRFPNITNLCPFGEVFNATRFASVYAWNRKRISNCVADYSVLYNSASFSTFKCYGVSPTKLNDLCFTNVYADSFVIRGDEVRQIAPGQTGKIADYNYKLPDDFTGCVIAWNSNNLDSKVGGNYNYLYRLFRKSNLKPFERDISTEIYQAGSTPCNGVEGFNCYFPLQSYGFQPTNGVGYQPYRVVVLSFELLHAPATVCGPKKSTNLVKNKCVNFNFNGLTGTGVLTESNKKFLPFQQFGRDIADTTDAVRDPQTLEILDITPCSFGGVSVITPGTNTSNQVAVLYQDLNCTEVPVAIHADQLTPTWRVYSTGSNVFQTRAGCLIGAEHVNNSYECDIPIGAGICASYQTQTNSPRRARSVASQSIIAYTMSLGAENSVAYSNNSIAIPTNFTISVTTEILPVSMTKTSVDCTMYICGDSTECSNLLLQYGSFCTQLNRALTGIAVEQDKNTQEVFAQVKQIYKTPPIKDFGGFNFSQILPDPSKPSKRSFIEDLLFNKVTLADAGFIKQYGDCLGDIAARDLICAQKFNGLTVLPPLLTDEMIAQYTSALLAGTITSGWTFCAGAALQIPFAMQMAYRFNGIGVTQNVLYENQKLIANQFNSAIGKIQDSLSSTASALGKLQDVVNQNAQALNTLVKQLSSNFGAISSVLNDILSRLDKVEAEVQIDRLITGRLQSLQTYVTQQLIRAAEIRASANLAATKMSECVCGQSKRVDFCGKGYHLMSFPQSAPHGVVFLHVTYVPAQEKNFTTAPAICHDGKAHFPREGVFVSNGTHWFVTQRNFYEPQIITTDNTFVSGNCDVVIGIVNNTVYDPLQPELDSFKEELDKYFKNHTSPDVDLGDISGINASVVNIQKEIDRLNEVAKNLNESLIDLQELGKYEQYIKGGGGSDIDPYKEFGSSYQLLNFLPLDFFPDLNALVDTATALYEEELTGREHCSPHHTAIRQALVCWDELTKLIAWMSSNITSEQVRTIIVNHVNDTWGLKVRQSLWFHLSCLTFGQHTVQEFLVSFGVWIRTPAPYRPPNAPILSTLPEHTVIC

SEQ ID NO: 7190 - protein, 1365 aa, Artificial Sequence
  SARS-CoV-2/Hong Kong/case42_VM20002493/2020__EPI_ISL_414527 spike protein (1-1211)(G889C_L1034C) WhcAg construct
MFVFLVLLPLVSSQCVNLTTRTQLPPAYTNSFTRGVYYPDKVFRSSVLHSTQDLFLPFFSNVTWFHAIHVSGTNGTKRFDNPVLPFNDGVYFASTEKSNIIRGWIFGTTLDSKTQSLLIVNNATNVVIKVCEFQFCNDPFLGVYYHKNNKSWMESEFRVYSSANNCTFEYVSQPFLMDLEGKQGNFKNLREFVFKNIDGYFKIYSKHTPINLVRDLPQGFSALEPLVDLPIGINITRFQTLLALHRSYLTPGDSSSGWTAGAAAYYVGYLQPRTFLLKYNENGTITDAVDCALDPLSETKCTLKSFTVEKGIYQTSNFRVQPTESIVRFPNITNLCPFGEVFNATRFASVYAWNRKRISNCVADYSVLYNSASFSTFKCYGVSPTKLNDLCFTNVYADSFVIRGDEVRQIAPGQTGKIADYNYKLPDDFTGCVIAWNSNNLDSKVGGNYNYLYRLFRKSNLKPFERDISTEIYQAGSTPCNGVEGFNCYFPLQSYGFQPTNGVGYQPYRVVVLSFELLHAPATVCGPKKSTNLVKNKCVNFNFNGLTGTGVLTESNKKFLPFQQFGRDIADTTDAVRDPQTLEILDITPCSFGGVSVITPGTNTSNQVAVLYQDVNCTEVPVAIHADQLTPTWRVYSTGSNVFQTRAGCLIGAEHVNNSYECDIPIGAGICASYQTQTNSPRRARSVASQSIIAYTMSLGAENSVAYSNNSIAIPTNFAISVTTEILPVSMTKTSVDCTMYICGDSTECSNLLLQYGSFCTQLNRALTGIAVEQDKNTQEVFAQVKQIYKTPPIKDFGGFNFSQILPDPSKPSKRSFIEDLLFNKVTLADAGFIKQYGDCLGDIAARDLICAQKFNGLTVLPPLLTDEMIAQYTSALLAGTITSGWTFCAGAALQIPFAMQMAYRFNGIGVTQNVLYENQKLIANQFNSAIGKIQDSLSSTASALGKLQDVVNQNAQALNTLVKQLSSNFGAISSVLNDILSRLDKVEAEVQIDRLITGRLQSLQTYVTQQLIRAAEIRASANLAATKMSECVCGQSKRVDFCGKGYHLMSFPQSAPHGVVFLHVTYVPAQEKNFTTAPAICHDGKAHFPREGVFVSNGTHWFVTQRNFYEPQIITTDNTFVSGNCDVVIGIVNNTVYDPLQPELDSFKEELDKYFKNHTSPDVDLGDISGINASVVNIQKEIDRLNEVAKNLNESLIDLQELGKYEQYIKGGGGSDIDPYKEFGSSYQLLNFLPLDFFPDLNALVDTATALYEEELTGREHCSPHHTAIRQALVCWDELTKLIAWMSSNITSEQVRTIIVNHVNDTWGLKVRQSLWFHLSCLTFGQHTVQEFLVSFGVWIRTPAPYRPPNAPILSTLPEHTVIC

SEQ ID NO: 7191 - protein, 1365 aa, Artificial Sequence
  SARS-CoV-2/USA/CruiseA-23/2020__EPI_ISL_414482 spike protein (1-1211)(G889C_L1034C) WhcAg construct
MFVFLVLLPLVSSQCVNLTTRTQLPPAYTNSFTRGVYYPDKVFRSSVLHSTQDLFLPFFSNVTWFHAIHVSGTNGTKRFDNPVLPFNDGVYFASTEKSNIIRGWIFGTTLDSKTQSLLIVNNATNVVIKVCEFQFCNDPFLGVYYHKNNKSWMESEFRVYSSANNCTFEYVSQPFLMDLEVKQGNFKNLREFVFKNIDGYFKIYSKHTPINLVRDLPQGFSALEPLVDLPIGINITRFQTLLALHRSYLTPGDSSSGWTAGAAAYYVGYLQPRTFLLKYNENGTITDAVDCALDPLSETKCTLKSFTVEKGIYQTSNFRVQPTESIVRFPNITNLCPFGEVFNATRFASVYAWNRKRISNCVADYSVLYNSASFSTFKCYGVSPTKLNDLCFTNVYADSFVIRGDEVRQIAPGQTGKIADYNYKLPDDFTGCVIAWNSNNLDSKVGGNYNYLYRLFRKSNLKPFERDISTEIYQAGSTPCNGVEGFNCYFPLQSYGFQPTNGVGYQPYRVVVLSFELLHAPATVCGPKKSTNLVKNKCVNFNFNGLTGTGVLTESNKKFLPFQQFGRDIADTTDAVRDPQTLEILDITPCSFGGVSVITPGTNTSNQVAVLYQDVNCTEVPVAIHADQLTPTWRVYSTGSNVFQTRAGCLIGAEHVNNSYECDIPIGAGICASYQTQTNSPRRARSVASQSIIAYTMSLGAENSVAYSNNSIAIPTNFTISVTTEILPVSMTKTSVDCTMYICGDSTECSNLLLQYGSFCTQLNRALTGIAVEQDKNTQEVFAQVKQIYKTPPIKDFGGFNFSQILPDPSKPSKRSFIEDLLFNKVTLADAGFIKQYGDCLGDIAARDLICAQKFNGLTVLPPLLTDEMIAQYTSALLAGTITSGWTFCAGAALQIPFAMQMAYRFNGIGVTQNVLYENQKLIANQFNSAIGKIQDSLSSTASALGKLQDVVNQNAQALNTLVKQLSSNFGAISSVLNDILSRLDKVEAEVQIDRLITGRLQSLQTYVTQQLIRAAEIRASANLAATKMSECVCGQSKRVDFCGKGYHLMSFPQSAPHGVVFLHVTYVPAQEKNFTTAPAICHDGKAHFPREGVFVSNGTHWFVTQRNFYEPQIITTDNTFVSGNCDVVIGIVNNTVYDPLQPELDSFKEELDKYFKNHTSPDVDLGDISGINASVVNIQKEIDRLNEVAKNLNESLIDLQELGKYEQYIKGGGGSDIDPYKEFGSSYQLLNFLPLDFFPDLNALVDTATALYEEELTGREHCSPHHTAIRQALVCWDELTKLIAWMSSNITSEQVRTIIVNHVNDTWGLKVRQSLWFHLSCLTFGQHTVQEFLVSFGVWIRTPAPYRPPNAPILSTLPEHTVIC

SEQ ID NO: 7192 - protein, 1365 aa, Artificial Sequence
  SARS-CoV-2/Hong Kong/case85_VM20002868/2020__EPI_ISL_414519 spike protein (1-1211)(G889C_L1034C) WhcAg construct
MFVFLVLVPLVSSQCVNLTTRTQLPPAYTNSFTRGVYYPDKVFRSSVLHSTQDLFLPFFSNVTWFHAIHVSGTNGTKRFDNPVLPFNDGVYFASTEKSNIIRGWIFGTTLDSKTQSLLIVNNATNVVIKVCEFQFCNDPFLGVYYHKNNKSWMESEFRVYSSANNCTFEYVSQPFLMDLEGKQGNFKNLREFVFKNIDGYFKIYSKHTPINLVRDLPQGFSALEPLVDLPIGINITRFQTLLALHRSYLTPGDSSSGWTAGAAAYYVGYLQPRTFLLKYNENGTITDAVDCALDPLSETKCTLKSFTVEKGIYQTSNFRVQPTESIVRFPNITNLCPFGEVFNATRFASVYAWNRKRISNCVADYSVLYNSASFSTFKCYGVSPTKLNDLCFTNVYADSFVIRGDEVRQIAPGQTGKIADYNYKLPDDFTGCVIAWNSNNLDSKVGGNYNYLYRLFRKSNLKPFERDISTEIYQAGSTPCNGVEGFNCYFPLQSYGFQPTNGVGYQPYRVVVLSFELLHAPATVCGPKKSTNLVKNKCVNFNFNGLTGTGVLTESNKKFLPFQQFGRDIADTTDAVRDPQTLEILDITPCSFGGVSVITPGTNTSNQVAVLYQDVNCTEVPVAIHADQLTPTWRVYSTGSNVFQTRAGCLIGAEHVNNSYECDIPIGAGICASYQTQTNSPRRARSVASQSIIAYTMSLGAENSVAYSNNSIAIPTNFTISVTTEILPVSMTKTSVDCTMYICGDSTECSNLLLQYGSFCTQLNRALTGIAVEQDKNTQEVFAQVKQIYKTPPIKDFGGFNFSQILPDPSKPSKRSFIEDLLFNKVTLADAGFIKQYGDCLGDIAARDLICAQKFNGLTVLPPLLTDEMIAQYTSALLAGTITSGWTFCAGAALQIPFAMQMAYRFNGIGVTQNVLYENQKLIANQFNSAIGKIQDSLSSTASALGKLQDVVNQNAQALNTLVKQLSSNFGAISSVLNDILSRLDKVEAEVQIDRLITGRLQSLQTYVTQQLIRAAEIRASANLAATKMSECVCGQSKRVDFCGKGYHLMSFPQSAPHGVVFLHVTYVPAQEKNFTTAPAICHDGKAHFPREGVFVSNGTHWFVTQRNFYEPQIITTDNTFVSGNCDVVIGIVNNTVYDPLQPELDSFKEELDKYFKNHTSPDVDLGDISGINASVVNIQKEIDRLNEVAKNLNESLIDLQELGKYEQYIKGGGGSDIDPYKEFGSSYQLLNFLPLDFFPDLNALVDTATALYEEELTGREHCSPHHTAIRQALVCWDELTKLIAWMSSNITSEQVRTIIVNHVNDTWGLKVRQSLWFHLSCLTFGQHTVQEFLVSFGVWIRTPAPYRPPNAPILSTLPEHTVIC

SEQ ID NO: 7193 - protein, 1365 aa, Artificial Sequence; identical to SEQ ID NO: 7183
  SARS-CoV-2/England/200990660/2020__EPI_ISL_414523 spike protein (1-1211)(G889C_L1034C) WhcAg construct

SEQ ID NO: 7194 - protein, 1365 aa, Artificial Sequence
  SARS-CoV-2/Australia/NSW09/2020__EPI_ISL_413595 spike protein (1-1211)(G889C_L1034C) WhcAg construct
MFVFLVLLPLVSSQCVNLTTRTQLPPAYTNSFTRGVYYPDKVFRSSVLHSTQDLFLPFFSNVTWFHAIHVSGTNGTKRFDNPVLPFNDGVYFASTEKSNIIRGWIFGTTLDSKTQSLLIVNNATNVVIKVCEFQFCNDPFLGVYYHKNNKSWMESEFRVYSSANNCTFEYVSQPFLMDLEGKQGNFKNLREFVFKNIDGYFKIYSKHTPINLVRDLPQGFSALEPLVDLPIGINITRFQTLLALHRSYLTPGDSSSGWTAGAAAYYVGYLQPRTFLLKYNENGTITDAVDCALDPLSETKCTLKSFTVEKGIYQTSNFRVQPTESIVRFPNITNLCPFGEVFNATRFASVYAWNRKRISNCVADYSVLYNSASFSTFKCYGVSPTKLNDLCFTNVYADSFVIRGDEVRQIAPGQTGKIADYNYKLPDDFTGCVIAWNSNNLDSKVGGNYNYLYRLFRKSNLKPFERDISTEIYQAGSTPCNGVEGFNCYFPLQSYGFQPTNGVGYQPYRVVVLSFELLHAPATVCGPKKSTNLVKNKCVNFNFNGLTGTGVLTESNKKFLPFQQFGRDIADTTDAVRDPQTLEILDITPCSFGGVSVITPGTNTSNQVAVLYQDVNCTEVPVAIHADQLTPTWRVYSTGSNVFQTRAGCLIGAEHVNNSYECDIPIGAGICASYQTQTNSPRRARSVASQSIIAYTMSLGAENSVAYSNNSIAIPTNFTISVTTEILPVSMTKTSVDCTMYICGDSTECSNLLLQYGSFCTQLNRALTGIAVEQDKNTQEVFAQVKQIYKTPPIKDFGGFNFSQILPDPSKPSKRSFIEDLLFNKVTLADAGFIKQYGDCLGDIAARDLICAQKFNGLTVLPPLLTDEMIAQYTSALLAGTITSGWTFCAGAALQIPFAMQMAYRFNGIGVTQNVLYENQKLIANQFNSAIGKIQDSLSFTASALGKLQDVVNQNAQALNTLVKQLSSNFGAISSVLNDILSRLDKVEAEVQIDRLITGRLQSLQTYVTQQLIRAAEIRASANLAATKMSECVCGQSKRVDFCGKGYHLMSFPQSAPHGVVFLHVTYVPAQEKNFTTAPAICHDGKAHFPREGVFVSNGTHWFVTQRNFYEPQIITTDNTFVSGNCDVVIGIVNNTVYDPLQPELDSFKEELDKYFKNHTSPDVDLGDISGINASVVNIQKEIDRLNEVAKNLNESLIDLQELGKYEQYIKGGGGSDIDPYKEFGSSYQLLNFLPLDFFPDLNALVDTATALYEEELTGREHCSPHHTAIRQALVCWDELTKLIAWMSSNITSEQVRTIIVNHVNDTWGLKVRQSLWFHLSCLTFGQHTVQEFLVSFGVWIRTPAPYRPPNAPILSTLPEHTVIC

SEQ ID NO: 7195 - protein, 1365 aa, Artificial Sequence; identical to SEQ ID NO: 7175
  SARS-CoV-2/Australia/NSW10/2020__EPI_ISL_413596 spike protein (1-1211)(G889C_L1034C) WhcAg construct

SEQ ID NO: 7196 - protein, 1365 aa, Artificial Sequence
  SARS-CoV-2/Switzerland/1000477797/2020__EPI_ISL_413023 spike protein (1-1211)(G889C_L1034C) WhcAg construct
MFVFLVLLPLVSSQCVNLTTRTQLPPAYTNSFTRGVYYPDKVFRSSVLHSTQDLFLPFFSNVTWFHAIHVSGTNGTKRFDNPVLPFNDGVYFASTEKSNIIRGWIFGTTLDSKTQSLLIVNNATNVVIKVCEFQFCNDPFLGVYYHKNNKSWMESEFRVYSSANNCTFEYVSQPFLMDLEGKQGNFKNLREFVFKNIDGYFNIYSKHTPINLVRDLPQGFSALEPLVDLPIGINITRFQTLLALHRSYLTPGDSSSGWTAGAAAYYVGYLQPRTFLLKYNENGTITDAVDCALDPLSETKCTLKSFTVEKGIYQTSNFRVQPTESIVRFPNITNLCPFGEVFNATRFASVYAWNRKRISNCVADYSVLYNSASFSTFKCYGVSPTKLNDLCFTNVYADSFVIRGDEVRQIAPGQTGKIADYNYKLPDDFTGCVIAWNSNNLDSKVGGNYNYLYRLFRKSNLKPFERDISTEIYQAGSTPCNGVEGFNCYFPLQSYGFQPTNGVGYQPYRVVVLSFELLHAPATVCGPKKSTNLVKNKCVNFNFNGLTGTGVLTESNKKFLPFQQFGRDIADTTDAVRDPQTLEILDITPCSFGGVSVITPGTNTSNQVAVLYQGVNCTEVPVAIHADQLTPTWRVYSTGSNVFQTRAGCLIGAEHVNNSYECDIPIGAGICASYQTQTNSPRRARSVASQSIIAYTMSLGAENSVAYSNNSIAIPTNFTISVTTEILPVSMTKTSVDCTMYICGDSTECSNLLLQYGSFCTQLNRALTGIAVEQDKNTQEVFAQVKQIYKTPPIKDFGGFNFSQILPDPSKPSKRSFIEDLLFNKVTLADAGFIKQYGDCLGDIAARDLICAQKFNGLTVLPPLLTDEMIAQYTSALLAGTITSGWTFCAGAALQIPFAMQMAYRFNGIGVTQNVLYENQKLIANQFNSAIGKIQDSLSSTASALGKLQDVVNQNAQALNTLVKQLSSNFGAISSVLNDILSRLDKVEAEVQIDRLITGRLQSLQTYVTQQLIRAAEIRASANLAATKMSECVCGQSKRVDFCGKGYHLMSFPQSAPHGVVFLHVTYVPAQEKNFTTAPAICHDGKAHFPREGVFVSNGTHWFVTQRNFYEPQIITTDNTFVSGNCDVVIGIVNNTVYDPLQPELDSFKEELDKYFKNHTSPDVDLGDISGINASVVNIQKEIDRLNEVAKNLNESLIDLQELGKYEQYIKGGGGSDIDPYKEFGSSYQLLNFLPLDFFPDLNALVDTATALYEEELTGREHCSPHHTAIRQALVCWDELTKLIAWMSSNITSEQVRTIIVNHVNDTWGLKVRQSLWFHLSCLTFGQHTVQEFLVSFGVWIRTPAPYRPPNAPILSTLPEHTVIC

SEQ ID NO: 7197 - protein, 1365 aa, Artificial Sequence
  SARS-CoV-2/Belgium/BA-02291/2020__EPI_ISL_415159 spike protein (1-1211)(G889C_L1034C) WhcAg construct
MFVFLVLLPLVSSQCVNLTTRTQLPPAYTNSFTRGVYYPDKVFRSSVLHSTQDLFLPFFSNVTWFHAIHVSGTNGTKRFDNPVLPFNDGVYFASTEKSNIIRGWIFGTTLDSKTQSLLIVNNATNVVIKVCEFQFCNDPFLGVYYHKNNKSWMESEFRVYSSANNCTFEYVSQPFLMDLEGKQGNFKNLREFVFKNIDGYFKIYSKHTPINLVRDLPQGFSALEPLVDLPIGINITRFQTLLALHRSYLTPGDSSSGWTAGAAAYYVGYLQPRTFLLKYNENGTITDAVDCALDPLSETKCTLKSFTVEKGIYQTSNFRVQPTESIVRFPNITNLCPFGEVFNATRFASVYAWNRKRISNCVADYSVLYNSASFSTFKCYGVSPTKLNDLCFTNVYADSFVIRGDEVRQIAPGQTGKIADYNYKLPDDFTGCVIAWNSNNLDSKVGGNYNYLYRLFRRSNLKPFERDISTEIYQAGSTPCNGVEGFNCYFPLQSYGFQPTNGVGYQPYRVVVLSFELLPAPATVCGPKKSTNLVKNKCVNFNFNGLTGTGVLTESNKKFLPFQQFGRDIADTTDAVRDPQTLEILDITPCSFGGVSVITPGTNTSNQVAVLYQGVNCTEVPVAIHADQLTPTWRVYSTGSNVFQTRAGCLIGAEHVNNSYECDIPIGAGICASYQTQTNSPRRARSVASQSIIAYTMSLGAENSVAYSNNSIAIPTNFTISVTTEILPVSMTKTSVDCTMYICGDSTECSNLLLQYGSFCTQLNRALTGIAVEQDKNTQEVFAQVKQIYKTPPIKDFGGFNFSQILPDPSKPSKRSFIEDLLFNKVTLADAGFIKQYGDCLGDIAARDLICAQKFNGLTVLPPLLTDEMIAQYTSALLAGTITSGWTFCAGAALQIPFAMQMAYRFNGIGVTQNVLYENQKLIANQFNSAIGKIQDSLSSAAPALGKLQDVVNQNAQALNTLVKQLSSNFGAISSVLNDILSRLDKVEAEVQIDRLITGRLQSLQTYVTQQLIRAAEIRASANLAATKMSECVCGQSKRVDFCGKGYHLMSFPQSAPHGVVFLHVTYVPAQEKNFTTAPAICHDGKAHFPREGVFVSNGTHWFVTQRNFYEPQIITTDNTFVSGNCDVVIGIVNNTVYDPLQPELDSFKEELDKYFKNHTSPDVDLGDISGINASVVNIQKEIDRLNEVAKNLNESLIDLQELGKYEQYIKGGGGSDIDPYKEFGSSYQLLNFLPLDFFPDLNALVDTATALYEEELTGREHCSPHHTAIRQALVCWDELTKLIAWMSSNITSEQVRTIIVNHVNDTWGLKVRQSLWFHLSCLTFGQHTVQEFLVSFGVWIRTPAPYRPPNAPILSTLPEHTVIC

SEQ ID NO: 7198 - protein, 1365 aa, Artificial Sequence
  SARS-CoV-2/USA/WA8-UW5/2020__EPI_ISL_413486 spike protein (1-1211)(G889C_L1034C) WhcAg construct
MFVFLVLLPLVSSQCVNLTTRTQLPPAYTNSFTRGVYYPDKVFRSSVLHSTQDLFLPFFSNVTWFHAIHVSGTNGTKRFDNPVLPFNDGVYFASTEKSNIIRGWIFGTTLDSKTQSLLIVNNATNVVIKVCEFQFCNDPFLGVYYHKNNKSWMESEFRVYSSANNCTFEYVSQPFLMDLEGKQGNFKNLREFVFKNIDGYFKIYSKHTPINLVRDLPQGFSALEPLVDLPIGINITRFQTLLALHRSYLTPGDSSSGWTAGAAAYYVGYLQPRTFLLKYNENGTITDAVDCALDPLSETKCTLKSFTVEKGIYQTSNFRVQPTESIVRFPNITNLCPFGEVFNATRFASVYAWNRKRISNCVADYSVLYNSASFSTFKCYGVSPTKLNDLCFTNVYADSFVIRGDEVRQIAPGQTGKIADYNYKLPDDFTGCVIAWNSNNLDSKVGGNYNYLYRLFRKSNLKPFERDISTEIYQAGSTPCNGVEGFNCYFPLQSYGFQPTNGVGYQPYRVVVLSFELLHAPATVCGPKKSTNLVKNKCVNFNFNGLTGTGVLTESNKKFLPFQQFGRDIADTTDAVRDPQTLEILDITPCSFGGVSVITPGTNTSNQVAVLYQDVNCTEVPVAIHADQLTPTWRVYSTGSNVFQTRAGCLIGAEYVNNSYECDIPIGAGICASYQTQTNSPRRARSVASQSIIAYTMSLGAENSVAYSNNSIAIPTNFTISVTTEILPVSMTKTSVDCTMYICGDSTECSNLLLQYGSFCTQLNRALTGIAVEQDKNTQEVFAQVKQIYKTPPIKDFGGFNFSQILPDPSKPSKRSFIEDLLFNKVTLADAGFIKQYGDCLGDIAARDLICAQKFNGLTVLPPLLTDEMIAQYTSALLAGTITSGWTFCAGAALQIPFAMQMAYRFNGIGVTQNVLYENQKLIANQFNSAIGKIQDSLSSTASALGKLQDVVNQNAQALNTLVKQLSSNFGAISSVLNDILSRLDKVEAEVQIDRLITGRLQSLQTYVTQQLIRAAEIRASANLAATKMSECVCGQSKRVDFCGKGYHLMSFPQSAPHGVVFLHVTYVPAQEKNFTTAPAICHDGKAHFPREGVFVSNGTHWFVTQRNFYEPQIITTDNTFVSGNCDVVIGIVNNTVYDPLQPELDSFKEELDKYFKNHTSPDVDLGDISGINASVVNIQKEIDRLNEVAKNLNESLIDLQELGKYEQYIKGGGGSDIDPYKEFGSSYQLLNFLPLDFFPDLNALVDTATALYEEELTGREHCSPHHTAIRQALVCWDELTKLIAWMSSNITSEQVRTIIVNHVNDTWGLKVRQSLWFHLSCLTFGQHTVQEFLVSFGVWIRTPAPYRPPNAPILSTLPEHTVIC

SEQ ID NO: 7199 - protein, 1365 aa, Artificial Sequence
  SARS-CoV-2/England/20102000506/2020__EPI_ISL_415147 spike protein (1-1211)(G889C_L1034C) WhcAg construct
MFVFLVLLPLVSSQCVNLTTRTQLPPAYTNSFTRGVYYPDKVFRSSVLHSTQDLFLPFFSNVTWFHAIHVSGTNGTKRFDNPVLPFNDGVYFASTEKSNIIRGWIFGTTLDSKTQSLLIVNNATNVVIKVCEFQFCNDPFLGVYYHKNNKSWMESEFRVYSSANNCTFEYVSQPFLMDLEGKQGNFKNLREFVFKNIDGYFKIYSKHTPINLVRDLPQGFSALEPLVDLPIGINITRFQTLLALHRSYLTPGDSSSGWTAGAAAYYVGYLQPRTFLLKYNENGTITDAVDCALDPLSETKCTLKSFTVEKGIYQTSNFRVQPTESIVRFPNITNLCPFGEVFNATRFASVYAWNRKRISNCVADYSVLYNSASFSTFKCYGVSPTKLNDLCFTNVYADSFVIRGDEVRQIAPGQTGKIADYNYKLPDDFTGCVIAWNSNNLDSKVGGNYNYLYRLFRKSNLKPFERDISTEIYQAGSTPCNGVEGFNCYFPLQSYGFQPTNGVGYQPYRVVVLSFELLHAPATVCGPKKSTNLVKNKCVNFNFNGLTGTGVLTESNKKFLPFQQFGRDIADTTDAVRDPQTLEILDITPCSFGGVSVITPGTNTSNQVAVLYQGVNCTEVPVAIHADQLTPTWRVYSTGSNVFQTRAGCLIGAEHVNNSYECDIPIGAGICASYQTQTNSPRRARSVASQSIIAYTMSLGAENSVAYSNNSIAIPTNFTISVTTEILPVSMTKTSVDCTMYICGDSTECSNLLLQYGSFCTQLNRALTGIAVEQDKNTQEVFAQVKQIYKTPPIKDFGGFNFSQILPDPSKPSKRSFIEDLLFNKVTLADAGFIKQYGYCLGDIAARDLICAQKFNGLTVLPPLLTDEMIAQYTSALLAGTITSGWTFCAGAALQIPFAMQMAYRFNGIGVTQNVLYENQKLIANQFNSAIGKIQDSLSSTASALGKLQDVVNQNAQALNTLVKQLSSNFGAISSVLNDILSRLDKVEAEVQIDRLITGRLQSLQTYVTQQLIRAAEIRASANLAATKMSECVCGQSKRVDFCGKGYHLMSFPQSAPHGVVFLHVTYVPAQEKNFTTAPAICHDGKAHFPREGVFVSNGTHWFVTQRNFYEPQIITTDNTFVSGNCDVVIGIVNNTVYDPLQPELDSFKEELDKYFKNHTSPDVDLGDISGINASVVNIQKEIDRLNEVAKNLNESLIDLQELGKYEQYIKGGGGSDIDPYKEFGSSYQLLNFLPLDFFPDLNALVDTATALYEEELTGREHCSPHHTAIRQALVCWDELTKLIAWMSSNITSEQVRTIIVNHVNDTWGLKVRQSLWFHLSCLTFGQHTVQEFLVSFGVWIRTPAPYRPPNAPILSTLPEHTVIC

SEQ ID NO: 7200 - protein, 1365 aa, Artificial Sequence
  SARS-CoV-2/Belgium/VAG-03013/2020__EPI_ISL_415155 spike protein (1-1211)(G889C_L1034C) WhcAg construct
MFVFLVLLPLVSSQCVNLTTRTQLPPAYTNSFTRGVYYPDKVFRSSVLHSTQDLFLPFFSNVTWFHAIHVSGTNGTKRFDNPVLPFNDGVYFASTEKSNIIRGWIFGTTLDSKTQSLLIVNNATNVVIKVCEFQFCNDPFLGVYYHKNNKSWMESEFRVYSSANNCTFEYVSQPFLMDLEGKQGNFKNLREFVFKNIDGYFKIYSKHTPINLVRDLPQGFSALEPLVDLPIGINITRFQTLLALHRSYLTPGDSSSGWTAGAAAYYVGYLQPRTFLLKYNENGTITDAVDCALDPLSETKCTLKSFTVEKGIYQTSNFRVQPTESIVRFPNITNLCPFGEVFNATRFASVYAWNRKRISNCVADYSVLYNSASFSTFKCYGVSPTKLNDLCFTNVYADSFVIRGDEVRQIAPGQTGKIADYNYKLPDDFTGCVIAWNSNNLDSKVGGNYNYLYRLFRKSNLKPFERDISTEIYQAGSTPCNGVEGFNCYFPLQSYGFQPTNGVGYQPYRVVVLSFELLHAPATVCGPKKSTNLVKNKCVNFNFNGLTGTGVLTESNKKFLPFQQFGRDIADTTDAVRDPQTLEILDITPCSFGGVSVITPGTNTSNQVAVLYQGVNCTEVPVAIHADQLTPTWRVYSTGSNVFQTRAGCLIGAEHVNNSYECDIPIGAGICASYQTQTNSPRRARSVASQSIIAYTMSLGAENSVAYSNNSIAIPTNFTISVTTEILPVSMTKTSVDCTMYICGDSTECSNLLLQYGSFCTQLNRALTGIAVEQDKNTQEVFAQVKQIYKTPPIKDFGGFNFSQILPDPSKPSKRSFIEDLLFNKVTLADAGFIKQYGDCLGDIAARDLICAQKFNGLTVLPPLLTDEMIAQYTSALLAGTITSGWTFCAGAALQIPFAMQMAYRFNGIGVTQNVLYENQKLIANQFNSAIGKIQDSLSSTATALGKLQDVVNQNAQALNTLVKQLSSNFGAISSVLNDILSRLDKVEAEVQIDRLITGRLQSLQTYVTQQLIRAAEIRASANLAATKMSECVCGQSKRVDFCGKGYHLMSFPQSAPHGVVFLHVTYVPAQEKNFTTAPAICHDGKAHFPREGVFVSNGTHWFVTQRNFYEPQIITTDNTFVSGNCDVVIGIVNNTVYDPLQPELDSFKEELDKYFKNHTSPDVDLGDISGINASVVNIQKEIDRLNEVAKNLNESLIDLQELGKYEQYIKGGGGSDIDPYKEFGSSYQLLNFLPLDFFPDLNALVDTATALYEEELTGREHCSPHHTAIRQALVCWDELTKLIAWMSSNITSEQVRTIIVNHVNDTWGLKVRQSLWFHLSCLTFGQHTVQEFLVSFGVWIRTPAPYRPPNAPILSTLPEHTVIC

SEQ ID NO: 7201 - protein, 1365 aa, Artificial Sequence
  SARS-CoV-2/Belgium/BC-03016/2020__EPI_ISL_415157 spike protein (1-1211)(G889C_L1034C) WhcAg construct
MFVFLVLLPLVSSQCVNLTTRTQLPPAYTNSFTRGVYYPDKVFRSSVLHSTQDLFLPFFSNVTWFHAIHVSGTNGTKRFDNPVLPFNDGVYFASTEKSNIIRGWIFGTTLDSKTQSLLIVNNATNVVIKVCEFQFCNDPFLGVYYHKNNKSWMESEFRVYSSANNCTFEYVSQPFLMDLEGKQGNFKNLREFVFKNIDGYFKIYSKHTPINLVRDLPQGFSALEPLVDLPIGINITRFQTLLALHRSYLTPGDSSSGWTAGAAAYYVGYLQPRTFLLKYNENGTITDAVDCALDPLSETKCTLKSFTVEKGIYQTSNFRVQPTESIVRFPNITNLCPFGEVFNATRFASVYAWNRKRISNCVADYSVLYNSASFSTFKCYGVSPTKLNDLCFTNVYADSFVIRGDEVRQIAPGQTGKIADYNYKLPDDFTGCVIAWNSNNLDSKVGGNYNYLYRLFRKSNLKPFERDISTEIYQAGSTPCNGVEGFNCYFPLQSYGFQPTNGVGYQPYRVVVLSFELLHAPATVCGPKKSTNLVKNKCVNFNFNGLTGTGVLTESNKKFLPFQQFGRDIADTTDAVRDPQTLEILDITPCSFGGVSVITPGTNTSNQVAVLYQGVNCTEVPVAIHADQLTPTWRVYSTGSNVFQTRAGCLIGAEHVNNSYECDIPIGAGICASYQTQTNSPRRARSVASQSIIAYTMSLGAENSVAYSNNSIAIPTNFTISVTTEILPVSMTKTSVDCTMYICGDSTECSNLLLQYGSFCTQLNRALTGIAVEQDKNTQEVFAQVKQIYKTPPIKDFGGFNFSQILPDPSKPSKRSFIEDLLFNKVTLADAGFIKQYGDCLGDIAARDLICAQKFNGLTVLPPLLTDEMIAQYTSALLAGTITSGWTFCAGAALQIPFAMQMAYRFNGIGVTQNVLYENQKLIANQFNSAIGKIQDSLSSTAPALGKLQDVVNQNAQALNTLVKQLSSNFGAISSVLNDILSRLDKVEAEVQIDRLITGRLQSLQTYVTQQLIRAAEIRASANLAATKMSECVCGQSKRVDFCGKGYHLMSFPQSAPHGVVFLHVTYVPAQEKNFTTAPAICHDGKAHFPREGVFVSNGTHWFVTQRNFYEPQIITTDNTFVSGNCDVVIGIVNNTVYDPLQPELDSFKEELDKYFKNHTSPDVDLGDISGINASVVNIQKEIDRLNEVAKNLNESLIDLQELGKYEQYIKGGGGSDIDPYKEFGSSYQLLNFLPLDFFPDLNALVDTATALYEEELTGREHCSPHHTAIRQALVCWDELTKLIAWMSSNITSEQVRTIIVNHVNDTWGLKVRQSLWFHLSCLTFGQHTVQEFLVSFGVWIRTPAPYRPPNAPILSTLPEHTVIC

SEQ ID NO: 7202 - protein, 1365 aa, Artificial Sequence
  SARS-CoV-2/Germany/BavPat3/2020__EPI_ISL_414521 spike protein (1-1211)(G889C_L1034C) WhcAg construct
MFVFLVLLPLVSSQCVNLTTRTQLPPAYTNSFTRGVYYPDKVFRSSVLHSTQDLFLPFFSNVTWFHAIHVSGTNGTKRFDNPVLPFNDGVYFASTEKSNIIRGWIFGTTLDSKTQSLLIVNNATNVVIKVCEFQFCNDPFLGVYYHKNNKSWMESEFRVYSSANNCTFEYVSQPFLMDLEGKQGNFKNLREFVFKNIDGYFKIYSKHTPINLVRDLPQGFSALEPLVDLPIGINITRFQTLLALHRSYLTPGDSSSGWTAGAAAYYVGYLQPRTFLLKYNENGTITDAVDCALDPLSETKCTLKSFTVEKGIYQTSNFRVQPTESIVRFPNITNLCPFGEVFNATRFASVYAWNRKRISNCVADYSVLYNSASFSTFKCYGVSPTKLNDLCFTNVYADSFVIRGDEVRQIAPGQTGKIADYNYKLPDDFTGCVIAWNSNNLDSKVGGNYNYLYRLFRKSNLKPFERDISTEIYQAGSTPCNGVEGFNCYFPLQSYGFQPTNGVGYQPYRVVVLSFELLHAPATVCGPKKSTNLVKNKCVNFNFNGLTGTGVLTESNKKFLPFQQFGRDIADTTDAVRDPQTLEILDITPCSFGGVSVITPGTNTSNQVAVLYQDVNCTEVPVAIHADQLTPTWRVYSTGSNVFQTRAGCLIGAEHVNNSYECDIPIGAGICASYQTQTNSPRRARSVASQSIIAYTMSLGAENSVAYSNNSIAIPTNFTISVTTEILPVSMTKTSVDCTMYICGDSTECSNLLLQYGSFCTQLNRALTGIAVEQDKNTQQVFAQVKQIYKTPPIKDFGGFNFSQILPDPSKPSKRSFIEDLLFNKVTLADAGFIKQYGDCLGDIAARDLICAQKFNGLTVLPPLLTDEMIAQYTSALLAGTITSGWTFCAGAALQIPFAMQMAYRFNGIGVTQNVLYENQKLIANQFNSAIGKIQDSLSSTASALGKLQDVVNQNAQALNTLVKQLSSNFGAISSVLNDILSRLDKVEAEVQIDRLITGRLQSLQTYVTQQLIRAAEIRASANLAATKMSECVCGQSKRVDFCGKGYHLMSFPQSAPHGVVFLHVTYVPAQEKNFTTAPAICHDGKAHFPREGVFVSNGTHWFVTQRNFYEPQIITTDNTFVSGNCDVVIGIVNNTVYDPLQPELDSFKEELDKYFKNHTSPDVDLGDISGINASVVNIQKEIDRLNEVAKNLNESLIDLQELGKYEQYIKGGGGSDIDPYKEFGSSYQLLNFLPLDFFPDLNALVDTATALYEEELTGREHCSPHHTAIRQALVCWDELTKLIAWMSSNITSEQVRTIIVNHVNDTWGLKVRQSLWFHLSCLTFGQHTVQEFLVSFGVWIRTPAPYRPPNAPILSTLPEHTVIC

SEQ ID NO: 7203 - protein, 1365 aa, Artificial Sequence
  SARS-CoV-2/France/HF1805/2020__EPI_ISL_414628 spike protein (1-1211)(G889C_L1034C) WhcAg construct
MFVFLVLLPLVSSQCVNLTTRTQLPPAYTNSFTRGVYYPDKVFRSSVLHSTQDLFLPFFSNVTWFHAIHVSGTNGTKRFDNPVLPFNDGVYFASTEKSNIIRGWIFGTTLDSKTQSLLIVNNATNVVIKVCEFQFCNDPFLGVYYHKNNKSWMESEFRVYSSANNCTFEYVSQPFLMDLEGKQGNFKNLREFVFKNIDGYFKIYSKHTPINLVRDLPQGFSALEPLVDLPIGINITRFQTLLALHRSYLTPGDSSSGWTAGAAAYYVGYLQPRTFLLKYNENGTITDAVDCALDPLSETKCTLKSFTVEKGIYQTSNFRVQPTESIVRFPNITNLCPFGEVFNATRFASVYAWNRKRISNCVADYSVLYNSASFSTFKCYGVSPTKLNDLCFTNVYADSFVIRGDEVRQIAPGQTGKIADYNYKLPDDFTGCVIAWNSNNLDSKVGGNYNYLYRLFRKSNLKPFERDISTEIYQAGSTPCNGVEGFNCYFPLQSYGFQPTNGVGYQPYRVVVLSFELLHAPATVCGPKKSTNLVKNKCVNFNFNGLTGTGVLTESNKKFLPFQQFGRDIADTTDAVRDPQTLEILDITPCSFGGVSVITPGTNTSNQVAVLYQGVNCTEVPVAIHADQLTPTWRVYSTGSNVFQTRAGCLIGAEHVNNSYECDIPIGAGICASYQTQTNSPRRARSVASQSIIAYTMSLGAENSVAYSNNSIAIPTNFTISVTTEILPVSMTKTSVDCTMYICGDSTECSNLLLQYGSFCTQLNRALTGIAVEQDKNTQEVFAQVKQIYKTPPIKDFGGFNFSQILPDPSKPSKRSFIEDLLFNKVTLADAGFIKQYGDCLGDIAARDLICAQKFNGLTVLPPLLTDEMIAQYTSALLAGTITSGWTFCAGAALQIPFAMQMAYRFNGIGVTQNVLYENQKLIANQFNSAIGKIQDSLSSTASALGKLQDVVNQNAQALNTLVKQLSSNFGAISSVLNDILSRLDKVEAEVQIDRLITGRLQSLQTYVTQQLIRAAEIRASANLAATKMSECVCGQSKRVDFCGKGYHLMSFPQSAPHGVVFLHVTYVPAQEKNFTTAPAICHDGKAHFPREGVFVSNGTHWFVTQRNFYEPQIITTDNTFVSGNCDVVIGVVNNTVYDPLQPELDSFKEELDKYFKNHTSPDVDLGDISGINASVVNIQKEIDRLNEVAKNLNESLIDLQELGKYEQYIKGGGGSDIDPYKEFGSSYQLLNFLPLDFFPDLNALVDTATALYEEELTGREHCSPHHTAIRQALVCWDELTKLIAWMSSNITSEQVRTIIVNHVNDTWGLKVRQSLWFHLSCLTFGQHTVQEFLVSFGVWIRTPAPYRPPNAPILSTLPEHTVIC

SEQ ID NO: 7204 - protein, 1365 aa, Artificial Sequence
  SARS-CoV-2/Netherlands/ZuidHolland_9/2020__EPI_ISL_414445 spike protein (1-1211)(G889C_L1034C) WhcAg construct
MFVFLVLLPLVSSQCVNLTTRTQLPPAYTNSFTRGVYYPDKVFRSSVLHSTQDLFLPFFSNVTWFHAIHVSGTNGTKRFDNPVLPFNDGVYFASTEKSNIIRGWIFGTTLDSKTQSLLIVNNATNVVIKVCEFQFCNDPFLGVYYHKNNKSWMESEFRVYSSANNCTFEYVSQPFLMDLEGKQGNFKNLREFVFKNIDGYFKIYSKHTPINLVRDLPQGFSALEPLVDLPIGINITRFQTLLALHRSYLTPGDSSSGWTAGAAAYYVGYLQPRTFLLKYNENGTITDAVDCALDPLSETKCTLKSFTVEKGIYQTSNFRVQPTESIVRFPNITNLCPFGEVFNATRFASVYAWNRKRISNCVADYSVLYNSASFSTFKCYGVSPTKLNDLCFTNVYADSFVIRGDEVRQIAPGQTGKIADYNYKLPDDFTGCVIAWNSNNLDSKVGGNYNYLYRLFRKSNLKPFERDISTEIYQAGSTPCNGVEGFNCYFPLQSYGFQPTNGVGYQPYRVVVLSFELLHAPATVCGPKKSTNLVKNKCVNFNFNGLTGTGVLTESNKKFLPFQQFGRDIADTTDAVRDPQTLEILDITPCSFGGVSVITPGTNTSNQVAVLYQGVNCTEVPVAIHADQLTPTWRVYSTGSNVFQTRAGCLIGAEHVNNSYECDIPIGAGICASYQTQTNSPRRARSVASQSIIAYTMSLGAENSVAYSNNSIAIPTNFTISVTTEILPVSMTKTSVDCTMYICGDSTECSNLLLQYGSFCTQLNRALTGIAVEQDKNTQEVFAQVKQIYKTPPIKDFGGFNFSQILPDPSKPSKRSFIEDLLFNKVTLADAGFIKQYGDCLGDIAARDLICVQKFNGLTVLPPLLTDEMIAQYTSALLAGTITSGWTFCAGAALQIPFAMQMAYRFNGIGVTQNVLYENQKLIANQFNSAIGKIQDSLSSTASALGKLQDVVNQNAQALNTLVKQLSSNFGAISSVLNDILSRLDKVEAEVQIDRLITGRLQSLQTYVTQQLIRAAEIRASANLAATKMSECVCGQSKRVDFCGKGYHLMSFPQSAPHGVVFLHVTYVPAQEKNFTTAPAICHDGKAHFPREGVFVSNGTHWFVTQRNFYEPQIITTDNTFVSGNCDVVIGIVNNTVYDPLQPELDSFKEELDKYFKNHTSPDVDLGDISGINASVVNIQKEIDRLNEVAKNLNESLIDLQELGKYEQYIKGGGGSDIDPYKEFGSSYQLLNFLPLDFFPDLNALVDTATALYEEELTGREHCSPHHTAIRQALVCWDELTKLIAWMSSNITSEQVRTIIVNHVNDTWGLKVRQSLWFHLSCLTFGQHTVQEFLVSFGVWIRTPAPYRPPNAPILSTLPEHTVIC

SEQ ID NO: 7205 - protein, 1365 aa, Artificial Sequence
  SARS-CoV-2/Finland/FIN03032020A/2020__EPI_ISL_413602 spike protein (1-1211)(G889C_L1034C) WhcAg construct
MFVFLVLLPLVSSQCVNLTTRTQLPPAYTNSFTRGVYYPDKVFRSSVLHSTQDLFLPFFSNVTWFHAIHVSGTNGTKRFDNPVLPFNDGVYFASTEKSNIIRGWIFGTTLDSKTQSLLIVNNATNVVIKVCEFQFCNDPFLGVYYHKNNKSWMESEFRVYSSANNCTFEYVSQPFLMDLEGKQGNFKNLREFVFKNIDGYFKIYSKHTPINLVRDLPQGFSALEPLVDLPIGINITRFQTLLALHRSYLTPGDSSSGWTAGAAAYYVGYLQPRTFLLKYNENGTITDAVDCALDPLSETKCTLKSFTVEKGIYQTSNFRVQPTESIVRFPNITNLCPFGEVFNATRFASVYAWNRKRISNCVADYSVLYNSASFSTFKCYGVSPTKLNDLCFTNVYADSFVIRGDEVRQIAPGQTGKIADYNYKLPDDFTGCVISWNSNNLDSKVGGNYNYLYRLFRKSNLKPFERDISTEIYQAGSTPCNGVEGFNCYFPLQSYGFQPTNGVGYQPYRVVVLSFELLHAPATVCGPKKSTNLVKNKCVNFNFNGLTGTGVLTESNKKFLPFQQFGRDIADTTDAVRDPQTLEILDITPCSFGGVSVITPGTNTSNQVAVLYQGVNCTEVPVAIHADQLTPTWRVYSTGSNVFQTRAGCLIGAEHVNNSYECDIPIGAGICASYQTQTNSPRRARSVASQSIIAYTMSLGAENSVAYSNNSIAIPTNFTISVTTEILPVSMTKTSVDCTMYICGDSTECSNLLLQYGSFCTQLNRALTGIAVEQDKNTQEVFAQVKQIYKTPPIKDFGGFNFSQILPDPSKPSKRSFIEDLLFNKVTLADAGFIKQYGDCLGDIAARDLICAQKFNGLTVLPPLLTDEMIAQYTSALLAGTITSGWTFCAGAALQIPFAMQMAYRFNGIGVTQNVLYENQKLIANQFNSAIGKIQDSLSSTASALGKLQDVVNQNAQALNTLVKQLSSNFGAISSVLNDILSRLDKVEAEVQIDRLITGRLQSLQTYVTQQLIRAAEIRASANLAATKMSECVCGQSKRVDFCGKGYHLMSFPQSAPHGVVFLHVTYVPAQEKNFTTAPAICHDGKAHFPREGVFVSNGTHWFVTQRNFYEPQIITTDNTFVSGNCDVVIGIVNNTVYDPLQPELDSFKEELDKYFKNHTSPDVDLGDISGINASVVNIQKEIDRLNEVAKNLNESLIDLQELGKYEQYIKGGGGSDIDPYKEFGSSYQLLNFLPLDFFPDLNALVDTATALYEEELTGREHCSPHHTAIRQALVCWDELTKLIAWMSSNITSEQVRTIIVNHVNDTWGLKVRQSLWFHLSCLTFGQHTVQEFLVSFGVWIRTPAPYRPPNAPILSTLPEHTVIC

SEQ ID NO: 7206 - protein, 1365 aa, Artificial Sequence
  SARS-CoV-2/France/GE1977/2020__EPI_ISL_414632 spike protein (1-1211)(G889C_L1034C) WhcAg construct
MFVFLVLLPLVSSQCVNLTTRTQLPPAYTNSFTRGVYYPDKVFRSSVLHSTQDLFLPFFSNVTWFHAIHVSGTNGTKRFDNPVLPFNDGVYFASTEKSNIIRGWIFGTTLDSKTQSLLIVNNATNVVIKVCEFQFCNDPFLGVYYHKNNKSWMESEFRVYSSANNCTFEYVSQPFLMDLEGKQGNFKNLREFVFKNIDGYFKIYSKHTPINLVRDLPQGFSALEPLVDLPIGINITRFQTLLALHRSYLTPGDSSSGWTAGAAAYYVGYLQPRTFLLKYNENGTITDAVDCALDPLSETKCTLKSFTVEKGIYQTSNFRVQPTESIVRFPNITNLCPFGEVFNATRFASVYAWNRKRISNCVADYSVLYNSASFSTFKCYGVSPTKLNDLCFTNVYADSFVIRGDEVRQIAPGQTGKIADYNYKLPDDFTGCVIAWNSNNLDSKVGGNYNYLYRLFRKSNLKPFERDISTEIYQAGSTPCNGVEGFNCYFPLQSYGFQPTNGVGYQPYRVVVLSFELLHAPATVCGPKKSTNLVKNKCVNFNFNGLTGTGVLTESNKKFLPFQQFGRDIADTTDAVRDPQTLEILDITPCSFGGVSVITPGTNTSNQVAVLYQGVNCTEVPVAIHADQLTPTWRVYSTGSNVFQTRAGCLIGAEHVNNSYECDIPIGAGICASYQTQTNSPRRARSVASQSIIAYTMSLGAENSVAYSNNSIAIPTNFTISVTTEILPVSMTKTSVDCTMYICGDSTECSNLLLQYGSFCTQLNRALTGIAVEQDKNTQEVFAQVKQIYKTPPIKDFGGFNFSQILPDPSKPSKRSFIEDLLFNKVTLADAGFIKQYGDCLGDIAARDLICAQKFNGLTVLPPLLTDEMIAQYTSALLAGTITSGWTFCAGAALQIPFAMQMAYRFNGIGVTQNVLYENQKLIANQFNSAIGKIQDSLFSTASALGKLQDVVNQNAQALNTLVKQLSSNFGAISSVLNDILSRLDKVEAEVQIDRLITGRLQSLQTYVTQQLIRAAEIRASANLAATKMSECVCGQSKRVDFCGKGYHLMSFPQSAPHGVVFLHVTYVPAQEKNFTTAPAICHDGKAHFPREGVFVSNGTHWFVTQRNFYEPQIITTDNTFVSGNCDVVIGIVNNTVYDPLQPELDSFKEELDKYFKNHTSPDVDLGDISGINASVVNIQKEIDRLNEVAKNLNESLIDLQELGKYEQYIKGGGGSDIDPYKEFGSSYQLLNFLPLDFFPDLNALVDTATALYEEELTGREHCSPHHTAIRQALVCWDELTKLIAWMSSNITSEQVRTIIVNHVNDTWGLKVRQSLWFHLSCLTFGQHTVQEFLVSFGVWIRTPAPYRPPNAPILSTLPEHTVIC

SEQ ID NO: 7207 - protein, 1365 aa, Artificial Sequence
  SARS-CoV-2/Finland/FIN-313/2020__EPI_ISL_414641 spike protein (1-1211)(G889C_L1034C) WhcAg construct
MFVFLVLLPLVSSQCVNLTTRTQLPPAYTNSFTRGVYYPDKVFRSSVLHSTQDLFLPFFSNVTWFHAIHVSGTNGTKRFDNPVLPFNDGVYFASTEKSNIIRGWIFGTTLDSKTQSLLIVNNATNVVIKVCEFQFCNDPFLGVYYHKNNKSWMESEFRVYSSANNCTFEYVSQPFLMDLEGKQGNFKNLREFVFKNIDGYFKIYSKHTPINLVRDLPQGFSALEPLVDLPIGINITRFKTLLALHRSYLTPGDSSSGWTAGAAAYYVGYLQPRTFLLKYNENGTITDAVDCALDPLSETKCTLKSFTVEKGIYQTSNFRVQPTESIVRFPNITNLCPFGEVFNATRFASVYAWNRKRISNCVADYSVLYNSASFSTFKCYGVSPTKLNDLCFTNVYADSFVIRGDEVRQIAPGQTGKIADYNYKLPDDFTGCVIAWNSNNLDSKVGGNYNYLYRLFRKSNLKPFERDISTEIYQAGSTPCNGVEGFNCYFPLQSYGFQPTNGVGYQPYRVVVLSFELLHAPATVCGPKKSTNLVKNKCVNFNFNGLTGTGVLTESNKKFLPFQQFGRDIADTTDAVRDPQTLEILDITPCSFGGVSVITPGTNTSNQVAVLYQGVNCTEVPVAIHADQLTPTWRVYSTGSNVFQTRAGCLIGAEHVNNSYECDIPIGAGICASYQTQTNSPRRARSVASQSIIAYTMSLGAENSVAYSNNSIAIPTNFTISVTTEILPVSMTKTSVDCTMYICGDSTECSNLLLQYGSFCTQLNRALTGIAVEQDKNTQEVFAQVKQIYKTPPIKDFGGFNFSQILPDPSKPSKRSFIEDLLFNKVTLADAGFIKQYGDCLGDIAARDLICAQKFNGLTVLPPLLTDEMIAQYTSALLAGTITSGWTFCAGAALQIPFAMQMAYRFNGIGVTQNVLYENQKLIANQFNSAIGKIQDSLSSTASALGKLQDVVNQNAQALNTLVKQLSSNFGAISSVLNDILSRLDKVEAEVQIDRLITGRLQSLQTYVTQQLIRAAEIRASANLAATKMSECVCGQSKRVDFCGKGYHLMSFPQSAPHGVVFLHVTYVPAQEKNFTTAPAICHDGKAHFPREGVFVSNGTHWFVTQRNFYEPQIITTDNTFVSGNCDVVIGIVNNTVYDPLQPELDSFKEELDKYFKNHTSPDVDLGDISGINASVVNIQKEIDRLNEVAKNLNESLIDLQELGKYEQYIKGGGGSDIDPYKEFGSSYQLLNFLPLDFFPDLNALVDTATALYEEELTGREHCSPHHTAIRQALVCWDELTKLIAWMSSNITSEQVRTIIVNHVNDTWGLKVRQSLWFHLSCLTFGQHTVQEFLVSFGVWIRTPAPYRPPNAPILSTLPEHTVIC

SEQ ID NO: 7208 - protein, 1365 aa, Artificial Sequence
  SARS-CoV-2/Netherlands/ZuidHolland_2/2020__EPI_ISL_414556 spike protein (1-1211)(G889C_L1034C) WhcAg construct
MFVFLVLLPLVSSQCVNLTTRTQLPPAYTNSFTRGVYYPDKVFRSSVLHSTQDLFLPFFSNVTWFHAIHVSGTNGTKRFDNPVLPFNDGVYFASTEKSNIIRGWIFGTTLDSKTQSLLIVNNATNVVIKVCEFQFCNDPFLGVYYHKNNKSWMESEFRVYSSANNCTFEYVSQPFLMDLEGKQGNFKNLREFVFKNIDGYFKIYSKHTPINLVRDLPQGFSALEPLVDLPIGINITRFQTLLALHRSYLTPGDSSSGWTAGAAAYYVGYLQPRTFLLKYNENGTITDAVDCALDPLSETKCTLKSFTVEKGIYQTSNFRVQPTESIVRFPNITNLCPFGEVFNATRFASVYAWNRKRISNCVADYSVLYNSASFSTFKCYGVSPTKLNDLCFTNVYADSFVIRGDEVRQIAPGQTGKIADYNYKLPDDFTGCVIAWNSNNLDSKVGGNYNYLYRLFRKSNLKPFERDISTEIYQAGSTPCNGVEGFNCYFPLQSYGFQPTNGVGYQPYRVVVLSFELLHAPATVCGPKKSTNLVKNKCVNFNFNGLTGTGVLTESNKKFLPFQQFGRDIADTTDAVRDPQTLEILDITPCSFGGVSVITPGTNTSNQVAVLYQGVNCTEVPVAIHADQLTPTWRVYSTGSNVFQTRAGCLIGAEHVNNSYECDIPIGAGICASYQTQTNSPRRARSVASQSIIAYTMSLGAENSVAYSNNSIAIPTNFTISVTTEILPVSMTKTSVDCTMYICGDSTECSNLLLQYGSFCTQLNRALTGIALEQDKNTQEVFAQVKQIYKTPPIKDFGGFNFSQILPDPSKPSKRSFIEDLLFNKVTLADAGFIKQYGDCLGDIAARDLICAQKFNGLTVLPPLLTDEMIAQYTSALLAGTITSGWTFCAGAALQIPFAMQMAYRFNGIGVTQNVLYENQKLIANQFNSAIGKIQDSLSSTASALGKLQDVVNQNAQALNTLVKQLSSNFGAISSVLNDILSRLDKVEAEVQIDRLITGRLQSLQTYVTQQLIRAAEIRASANLAATKMSECVCGQSKRVDFCGKGYHLMSFPQSAPHGVVFLHVTYVPAQEKNFTTAPAICHDGKAHFPREGVFVSNGTHWFVTQRNFYEPQIITTDNTFVSGNCDVVIGIVNNTVYDPLQPELDSFKEELDKYFKNHTSPDVDLGDISGINASVVNIQKEIDRLNEVAKNLNESLIDLQELGKYEQYIKGGGGSDIDPYKEFGSSYQLLNFLPLDFFPDLNALVDTATALYEEELTGREHCSPHHTAIRQALVCWDELTKLIAWMSSNITSEQVRTIIVNHVNDTWGLKVRQSLWFHLSCLTFGQHTVQEFLVSFGVWIRTPAPYRPPNAPILSTLPEHTVIC

SEQ ID NO: 7209 - protein, 1365 aa, Artificial Sequence
  SARS-CoV-2/USA/WA-UW31/2020__EPI_ISL_414618 spike protein (1-1211)(G889C_L1034C) WhcAg construct
MFVFLVLLPLVSSQCVNLTTRTQLPPAYTNSFTRGVYYPDKVFRSSVLHSTQDLFLPFFSNVTWFHAIHVSGTNGTKRFDNPVLPFNDGVYFASTEKSNIIRGWIFGTTLDSKTQSLLIVNNATNVVIKVCEFQFCNDPFLGVYYHKNNKSWMESEFRVYSSANNCTFEYVSQPFLMDLEGKQGNFKNLREFVFKNIDGYFKIYSKHTPINLVRDLPQGFSALEPLVDLPIGINITRFQTLLALHRSYLTPGDSSSGWTAGAAAYYVGYLQPRTFLLKYNENGTITDAVDCALDPLSETKCTLKSFTVEKGIYQTSNFRVQPTESIVRFPNITNLCPFGEVFNATRFASVYAWNRKRISNCVADYSVLYNSASFSTFKCYGVSPTKLNDLCFTNVYADSFVIRGDEVRQIAPGQTGKIADYNYKLPDDFTGCVIAWNSNNLDSKVGGNYNYLYRLFRKSNLKPFERDISTEIYQAGSTPCNGAEGFNCYFPLQSYGFQPTNGVGYQPYRVVVLSFELLHAPATVCGPKKSTNLVKNKCVNFNFNGLTGTGVLTESNKKFLPFQQFGRDIADTTDAVRDPQTLEILDITPCSFGGVSVITPGTNTSNQVAVLYQDVNCTEVPVAIHADQLTPTWRVYSTGSNVFQTRAGCLIGAEHVNNSYECDIPIGAGICASYQTQTNSPRRARSVASQSIIAYTMSLGAENSVAYSNNSIAIPTNFTISVTTEILPVSMTKTSVDCTMYICGDSTECSNLLLQYGSFCTQLNRALTGIAVEQDKNTQEVFAQVKQIYKTPPIKDFGGFNFSQILPDPSKPSKRSFIEDLLFNKVTLADAGFIKQYGDCLGDIAARDLICAQKFNGLTVLPPLLTDEMIAQYTSALLAGTITSGWTFCAGAALQIPFAMQMAYRFNGIGVTQNVLYENQKLIANQFNSAIGKIQDSLSSTASALGKLQDVVNQNAQALNTLVKQLSSNFGAISSVLNDILSRLDKVEAEVQIDRLITGRLQSLQTYVTQQLIRAAEIRASANLAATKMSECVCGQSKRVDFCGKGYHLMSFPQSAPHGVVFLHVTYVPAQEKNFTTAPAICHDGKAHFPREGVFVSNGTHWFVTQRNFYEPQIITTDNTFVSGNCDVVIGIVNNTVYDPLQPELDSFKEELDKYFKNHTSPDVDLGDISGINASVVNIQKEIDRLNEVAKNLNESLIDLQELGKYEQYIKGGGGSDIDPYKEFGSSYQLLNFLPLDFFPDLNALVDTATALYEEELTGREHCSPHHTAIRQALVCWDELTKLIAWMSSNITSEQVRTIIVNHVNDTWGLKVRQSLWFHLSCLTFGQHTVQEFLVSFGVWIRTPAPYRPPNAPILSTLPEHTVIC

SEQ ID NO: 7210 - protein, 1365 aa, Artificial Sequence
  SARS-CoV-2/South Korea/SNU01/2020__EPI_ISL_411929 spike protein (1-1211)(G889C_L1034C) WhcAg construct
MFVFLVLLPLVSSQCVNLTTRTQLPPAYTNSFTRGVYYPDKVFRSSVLHSTQDLFLPFFSNVTWFHAIHVSGTNGTKRFDNPVLPFNDGVYFASTEKSNIIRGWIFGTTLDSKTQSLLIVNNATNVVIKVCEFQFCNDPFLGVYYHKNNKSWMESEFRVYSSANNCTFEYVSQPFLMDLEGKQGNFKNLREFVFKNIDGYFKIYSKHTPINLVRDLPQGFWALEPLVDLPIGINITRFQTLLALHRSYLTPGDSSSGWTAGAAAYYVGYLQPRTFLLKYNENGTITDAVDCALDPLSETKCTLKSFTVEKGIYQTSNFRVQPTESIVRFPNITNLCPFGEVFNATRFASVYAWNRKRISNCVADYSVLYNSASFSTFKCYGVSPTKLNDLCFTNVYADSFVIRGDEVRQIAPGQTGKIADYNYKLPDDFTGCVIAWNSNNLDSKVGGNYNYLYRLFRKSNLKPFERDISTEIYQAGSTPCNGVEGFNCYFPLQSYGFQPTNGVGYQPYRVVVLSFELLHAPATVCGPKKSTNLVKNKCVNFNFNGLTGTGVLTESNKKFLPFQQFGRDIADTTDAVRDPQTLEILDITPCSFGGVSVITPGTNTSNQVAVLYQDVNCTEVPVAIHADQLTPTWRVYSTGSNVFQTRAGCLIGAEHVNNSYECDIPIGAGICASYQTQTNSPRRARSVASQSIIAYTMSLGAENSVAYSNNSIAIPTNFTISVTTEILPVSMTKTSVDCTMYICGDSTECSNLLLQYGSFCTQLNRALTGIAVEQDKNTQEVFAQVKQIYKTPPIKDFGGFNFSQILPDPSKPSKRSFIEDLLFNKVTLADAGFIKQYGDCLGDIAARDLICAQKFNGLTVLPPLLTDEMIAQYTSALLAGTITSGWTFCAGAALQIPFAMQMAYRFNGIGVTQNVLYENQKLIANQFNSAIGKIQDSLSSTASALGKLQDVVNQNAQALNTLVKQLSSNFGAISSVLNDILSRLDKVEAEVQIDRLITGRLQSLQTYVTQQLIRAAEIRASANLAATKMSECVCGQSKRVDFCGKGYHLMSFPQSAPHGVVFLHVTYVPAQEKNFTTAPAICHDGKAHFPREGVFVSNGTHWFVTQRNFYEPQIITTDNTFVSGNCDVVIGIVNNTVYDPLQPELDSFKEELDKYFKNHTSPDVDLGDISGINASVVNIQKEIDRLNEVAKNLNESLIDLQELGKYEQYIKGGGGSDIDPYKEFGSSYQLLNFLPLDFFPDLNALVDTATALYEEELTGREHCSPHHTAIRQALVCWDELTKLIAWMSSNITSEQVRTIIVNHVNDTWGLKVRQSLWFHLSCLTFGQHTVQEFLVSFGVWIRTPAPYRPPNAPILSTLPEHTVIC

SEQ ID NO: 7211 - protein, 1365 aa, Artificial Sequence
  SARS-CoV-2/China/WF0004/2020__EPI_ISL_413694 spike protein (1-1211)(G889C_L1034C) WhcAg construct
MFVFLVLLPLVSSQCVNLTTRTQLPPAYTNSFTRGVYYPDKVFRSSVLHSTQDLFLPFFSNVTWFHAIHVSGTNGTKRFDNPVLPFNDGVYFASTEKSNIIRGWIFGTTLDSKTQSLLIVNNATNVVIKVCEFQFCNDPFLGVYYHKNNKSWTESEFRVYSSANNCTFEYVSQPFLMDLEGKQGNFKNLREFVFKNIDGYFKIYSKHTPINLVRDLPQGFSALEPLVDLPIGINITRFQTLLALHRSYLTPGDSSSGWTAGAAAYYVGYLQPRTFLLKYNENGTITDAVDCALDPLSETKCTLKSFTVEKGIYQTSNFRVQPTESIVRFPNITNLCPFGEVFNATRFASVYAWNRKRISNCVADYSVLYNSASFSTFKCYGVSPTKLNDLCFTNVYADSFVIRGDEVRQIAPGQTGKIADYNYKLPDDFTGCVIAWNSNNLDSKVGGNYNYLYRLFRKSNLKPFERDISTEIYQAGSTPCNGVEGFNCYFPLQSYGFQPTNGVGYQPYRVVVLSFELLHAPATVCGPKKSTNLVKNKCVNFNFNGLTGTGVLTESNKKFLPFQQFGRDIADTTDAVRDPQTLEILDITPCSFGGVSVITPGTNTSNQVAVLYQDVNCTEVPVAIHADQLTPTWRVYSTGSNVFQTRAGCLIGAEHVNNSYECDIPIGAGICASYQTQTNSPRRARSVASQSIIAYTMSLGAENSVAYSNNSIAIPTNFTISVTTEILPVSMTKTSVDCTMYICGDSTECSNLLLQYGSFCTQLNRALTGIAVEQDKNTQEVFAQVKQIYKTPPIKDFGGFNFSQILPDPSKPSKRSFIEDLLFNKVTLADAGFIKQYGDCLGDIAARDLICAQKFNGLTVLPPLLTDEMIAQYTSALLAGTITSGWTFCAGAALQIPFAMQMAYRFNGIGVTQNVLYENQKLIANQFNSAIGKIQDSLSSTASALGKLQDVVNQNAQALNTLVKQLSSNFGAISSVLNDILSRLDKVEAEVQIDRLITGRLQSLQTYVTQQLIRAAEIRASANLAATKMSECVCGQSKRFDFCGKGYHLMSFPQSAPHGVVFLHVTYVPAQEKNFTTAPAICHDGKAHFPREGVFVSNGTHWFVTQRNFYEPQIITTDNTFVSGNCDVVIGIVNNTVYDPLQPELDSFKEELDKYFKNHTSPDVDLGDISGINASVVNIQKEIDRLNEVAKNLNESLIDLQELGKYEQYIKGGGGSDIDPYKEFGSSYQLLNFLPLDFFPDLNALVDTATALYEEELTGREHCSPHHTAIRQALVCWDELTKLIAWMSSNITSEQVRTIIVNHVNDTWGLKVRQSLWFHLSCLTFGQHTVQEFLVSFGVWIRTPAPYRPPNAPILSTLPEHTVIC

SEQ ID NO: 7212 - protein, 1365 aa, Artificial Sequence
  SARS-CoV-2/China/WF0028/2020__EPI_ISL_413791 spike protein (1-1211)(G889C_L1034C) WhcAg construct
MFVFLVLLPLVSSQCVNLTTRTQLPPAYTNSFTRGVYYPDKVFRSSVLHSTQDLFLPFFSNVTWFHAIHVSGTNGTKRFDNPVLPFNDGVYFASTEKSNIIRGWIFGTTLDSKTQSLLIVNNATNVVIKVCEFQFCNDPFLGVYYHKNNKSWMESEFRVYSSANNCTFEYVSQPFLMDLEGKQGNFKNLREFVFKNIDGYFKIYSKHTPINLVRDLPQGFSALEPLVDLPIGINITRFQTLLALHRSYLTPGDSSSGWTAGAAAYYVGYLQPRTFLLKYNENGTITDAVDCALDPLSETKCTLKSFTVEKGIYQTSNFRVQPTESIVRFPNITNLCPFGEVFNATRFASVYAWNRKRISNCVADYSVLYNSASFSTFKCYGVSPTKLNDLCFTNVYADSFVIRGDEVRQIAPGQTGKIADYNYKLPDDFTGCVIAWNSNNLDSKVGGNYNYLYRLFRKSNLKPFERDISTEIYQAGSTPCNGVEGFNCYFPLQSYGFQPTNGVGYQPYRVVVLSFELLHAPATVCGPKKSTNLVKNKCVNFNFNGLTGTGVLTESNKKFLPFQQFGRDIADTTDAVRDPQTLEILDITPCSFGGVSVITPGTNTSNQVAVLYQDVNCTEVPVAIHADQLTPTWRVYSTGSNVFQTRAGCLIGAEHVNNSYECDIPIGAGICASYQTQTNSPRRARSVASQSIIAYTMSLGAENSVAYSNNSIAIPTNFTISVTTEILPVSMTKTSVDCTMYICGDSTECSNLLLQYGSFCTQLNRALTGIAVEQDKNTQEVFAQVKQIYKTPPIKDFGGFNFSQILPDPSKPSKRSFIEDLLFNKVTLADAGFIKQYGDCLGDIAARDLICAQKFNGLTVLPPLLTDEMIAQYTSALLAGTITSGWTFCAGAALQIPFAMQMAYRFNGIGVTQNVLYENQKLIANQFNSAIGKIQDSLSSTASALGKLQDVVNQNAQALNTLVKQLSSNFGAISSVLNDILSRLDKVEAEVQIDRLITGRLQSLQTYVTQQLIRAAEIRASANLAATKMSECVCGQSKRVDFCGKGYHLMSFPQSAPHGVVFLHVTYVPAQEKNFTTAPAICHDGKAHFPREGVFVSNGTHWFVTQRNFYEPQIITTDNTFVSGNCDVVIGIVNNTVYDPLQPELESFKEELDKYFKNHTSPDVDLGDISGINASVVNIQKEIDRLNEVAKNLNESLIDLQELGKYEQYIKGGGGSDIDPYKEFGSSYQLLNFLPLDFFPDLNALVDTATALYEEELTGREHCSPHHTAIRQALVCWDELTKLIAWMSSNITSEQVRTIIVNHVNDTWGLKVRQSLWFHLSCLTFGQHTVQEFLVSFGVWIRTPAPYRPPNAPILSTLPEHTVIC

SEQ ID NO: 7213 - protein, 1365 aa, Artificial Sequence
  SARS-CoV-2/2019-nCoV/USA-CruiseA-18/2020__MT159716.1 spike protein (1-1211)(G889C_L1034C) WhcAg construct
MFVFLVLLPLVSSQCVNLTTRTQLPPAYTNSFTRGVYYPDKVFRSSVLHSTQDLFLPFFSNVTWFHAIHVSGTNGTKRFDNPVLPFNDGVYFASTEKSNIIRGWIFGTTLDSKTQSLLIVNNATNVVIKVCEFQFCNDPFLGVYYHKNNKSWMESELRVYSSANNCTFEYVSQPFLMDLEGKQGNFKNLREFVFKNIDGYFKIYSKHTPINLVRDLPQGFSALEPLVDLPIGINITRFQTLLALHRSYLTPGDSSSGWTAGAAAYYVGYLQPRTFLLKYNENGTITDAVDCALDPLSETKCTLKSFTVEKGIYQTSNFRVQPTESIVRFPNITNLCPFGEVFNATRFASVYAWNRKRISNCVADYSVLYNSASFSTFKCYGVSPTKLNDLCFTNVYADSFVIRGDEVRQIAPGQTGKIADYNYKLPDDFTGCVIAWNSNNLDSKVGGNYNYLYRLFRKSNLKPFERDISTEIYQAGSTPCNGVEGFNCYFPLQSYGFQPTNGVGYQPYRVVVLSFELLHAPATVCGPKKSTNLVKNKCVNFNFNGLTGTGVLTESNKKFLPFQQFGRDIADTTDAVRDPQTLEILDITPCSFGGVSVITPGTNTSNQVAVLYQDVNCTEVPVAIHADQLTPTWRVYSTGSNVFQTRAGCLIGAEHVNNSYECDIPIGAGICASYQTQTNSPRRARSVASQSIIAYTMSLGAENSVAYSNNSIAIPTNFTISVTTEILPVSMTKTSVDCTMYICGDSTECSNLLLQYGSFCTQLNRALTGIAVEQDKNTQEVFAQVKQIYKTPPIKDFGGFNFSQILPDPSKPSKRSFIEDLLFNKVTLADAGFIKQYGDCLGDIAARDLICAQKFNGLTVLPPLLTDEMIAQYTSALLAGTITSGWTFCAGAALQIPFAMQMAYRFNGIGVTQNVLYENQKLIANQFNSAIGKIQDSLSSTASALGKLQDVVNQNAQALNTLVKQLSSNFGAISSVLNDILSRLDKVEAEVQIDRLITGRLQSLQTYVTQQLIRAAEIRASANLAATKMSECVCGQSKRVDFCGKGYHLMSFPQSAPHGVVFLHVTYVPAQEKNFTTAPAICHDGKAHFPREGVFVSNGTHWFVTQRNFYEPQIITTDNTFVSGNCDVVIGIVNNTVYDPLQPELDSFKEELDKYFKNHTSPDVDLGDISGINASVVNIQKEIDRLNEVAKNLNESLIDLQELGKYEQYIKGGGGSDIDPYKEFGSSYQLLNFLPLDFFPDLNALVDTATALYEEELTGREHCSPHHTAIRQALVCWDELTKLIAWMSSNITSEQVRTIIVNHVNDTWGLKVRQSLWFHLSCLTFGQHTVQEFLVSFGVWIRTPAPYRPPNAPILSTLPEHTVIC

SEQ ID NO: 7214 - protein, 1365 aa, Artificial Sequence
  SARS-CoV-2/SARS-CoV-2/Yunnan-01/human/2020/CHN__MT049951.1 spike protein (1-1211)(G889C_L1034C) WhcAg construct
MFVFLVLLPLVSSQCVNLTTRTQLPPANTNSFTRGVYYPDKVFRSSVLHSTQDLFLPFFSNVTWFHAIHVSGTNGTKRFDNPVLPFNDGVYFASTEKSNIIRGWIFGTTLDSKTQSLLIVNNATNVVIKVCEFQFCNDPFLGVYYHKNNKSWMESEFRVYSSANNCTFEYVSQPFLMDLEGKQGNFKNLREFVFKNIDGYFKIYSKHTPINLVRDLPQGFSALEPLVDLPIGINITRFQTLLALHRSYLTPGDSSSGWTAGAAAYYVGYLQPRTFLLKYNENGTITDAVDCALDPLSETKCTLKSFTVEKGIYQTSNFRVQPTESIVRFPNITNLCPFGEVFNATRFASVYAWNRKRISNCVADYSVLYNSASFSTFKCYGVSPTKLNDLCFTNVYADSFVIRGDEVRQIAPGQTGKIADYNYKLPDDFTGCVIAWNSNNLDSKVGGNYNYLYRLFRKSNLKPFERDISTEIYQAGSTPCNGVEGFNCYFPLQSYGFQPTNGVGYQPYRVVVLSFELLHAPATVCGPKKSTNLVKNKCVNFNFNGLTGTGVLTESNKKFLPFQQFGRDIADTTDAVRDPQTLEILDITPCSFGGVSVITPGTNTSNQVAVLYQDVNCTEVPVAIHADQLTPTWRVYSTGSNVFQTRAGCLIGAEHVNNSYECDIPIGAGICASYQTQTNSPRRARSVASQSIIAYTMSLGAENSVAYSNNSIAIPTNFTISVTTEILPVSMTKTSVDCTMYICGDSTECSNLLLQYGSFCTQLNRALTGIAVEQDKNTQEVFAQVKQIYKTPPIKDFGGFNFSQILPDPSKPSKRSFIEDLLFNKVTLADAGFIKQYGDCLGDIAARDLICAQKFNGLTVLPPLLTDEMIAQYTSALLAGTITSGWTFCAGAALQIPFAMQMAYRFNGIGVTQNVLYENQKLIANQFNSAIGKIQDSLSSTASALGKLQDVVNQNAQALNTLVKQLSSNFGAISSVLNDILSRLDKVEAEVQIDRLITGRLQSLQTYVTQQLIRAAEIRASANLAATKMSECVCGQSKRVDFCGKGYHLMSFPQSAPHGVVFLHVTYVPAQEKNFTTAPAICHDGKAHFPREGVFVSNGTHWFVTQRNFYEPQIITTDNTFVSGNCDVVIGIVNNTVYDPLQPELDSFKEELDKYFKNHTSPDVDLGDISGINASVVNIQKEIDRLNEVAKNLNESLIDLQELGKYEQYIKGGGGSDIDPYKEFGSSYQLLNFLPLDFFPDLNALVDTATALYEEELTGREHCSPHHTAIRQALVCWDELTKLIAWMSSNITSEQVRTIIVNHVNDTWGLKVRQSLWFHLSCLTFGQHTVQEFLVSFGVWIRTPAPYRPPNAPILSTLPEHTVIC

SEQ ID NO: 7215 - protein, 1365 aa, Artificial Sequence
  SARS-CoV-2/USA/WA-UW292/2020__EPI_ISL_418077 spike protein (1-1211)(G889C_L1034C) WhcAg construct
MFVFLVLLPLVSSQCVNLTTRTQLPPAYTNSFTRGVYYPDKVFRSSVLHSTQDLFLPFFSNVTWFHAIHVSGTNGTKRFDNPVLPFNDGVYFASTEKSNIIRGWIFGTTLDSKTQSLLIVNNATNVVIKVCEFQFCNDPFLGVYYHKNNKSWMESEFRVYSSANNCTFEYVSQPFLMDLEGKQGNFKNLREFVFKNIDGYFKIYSKHTPINLVRDLPQGFSALEPLVDLPIGINITRFQTLLALHRSYLTPGDSSSGWTAGAAAYYVGYLQPRTFLLKYNENGTITDAVDCALDPLSETKCTLKSFTVEKGIYQTSNFRVQPTESIVRFPNITNLCPFGEVFNATRFASVYAWNRKRISNCVADYSVLYNSASFSTFKCYGVSPTKLNDLCFTNVYADSFVIRGDEVRQIAPGQTGKIADYNYKLPDDFTGCVIAWNSNNLDSKVGGNYNYLYRLFRKSNLKPFERDISTEIYQASSTPCNGVEGFNCYFPLQSYGFQPTNGVGYQPYRVVVLSFELLHAPATVCGPKKSTNLVKNKCVNFNFNGLTGTGVLTESNKKFLPFQQFGRDIADTTDAVRDPQTLEILDITPCSFGGVSVITPGTNTSNQVAVLYQDVNCTEVPVAIHADQLTPTWRVYSTGSNVFQTRAGCLIGAEHVNNSYECDIPIGAGICASYQTQTNSPRRARSVASQSIIAYTMSLGAENSVAYSNNSIAIPTNFTISVTTEILPVSMTKTSVDCTMYICGDSTECSNLLLQYGSFCTQLNRALTGIAVEQDKNTQEVFAQVKQIYKTPPIKDFGGFNFSQILPDPSKPSKRSFIEDLLFNKVTLADAGFIKQYGDCLGDIAARDLICAQKFNGLTVLPPLLTDEMIAQYTSALLAGTITSGWTFCAGAALQIPFAMQMAYRFNGIGVTQNVLYENQKLIANQFNSAIGKIQDSLSSTASALGKLQDVVNQNAQALNTLVKQLSSNFGAISSVLNDILSRLDKVEAEVQIDRLITGRLQSLQTYVTQQLIRAAEIRASANLAATKMSECVCGQSKRVDFCGKGYHLMSFPQSAPHGVVFLHVTYVPAQEKNFTTAPAICHDGKAHFPREGVFVSNGTHWFVTQRNFYEPQIITTDNTFVSGNCDVVIGIVNNTVYDPLQPELDSFKEELDKYFKNHTSPDVDLGDISGINASVVNIQKEIDRLNEVAKNLNESLIDLQELGKYEQYIKGGGGSDIDPYKEFGSSYQLLNFLPLDFFPDLNALVDTATALYEEELTGREHCSPHHTAIRQALVCWDELTKLIAWMSSNITSEQVRTIIVNHVNDTWGLKVRQSLWFHLSCLTFGQHTVQEFLVSFGVWIRTPAPYRPPNAPILSTLPEHTVIC

SEQ ID NO: 7216 - protein, 1365 aa, Artificial Sequence
  SARS-CoV-2/Iceland/192/2020__EPI_ISL_417819 spike protein (1-1211)(G889C_L1034C) WhcAg construct
MFVFFVLLPLVSSQCVNLTTRTQLPPAYTNSFTRGVYYPDKVFRSSVLHSTQDLFLPFFSNVTWFHAIHVSGTNGTKRFDNPVLPFNDGVYFASTEKSNIIRGWIFGTTLDSKTQSLLIVNNATNVVIKVCEFQFCNDPFLGVYYHKNNKSWMESEFRVYSSANNCTFEYVSQPFLMDLEGKQGNFKNLREFVFKNIDGYFKIYSKHTPINLVRDLPQGFSALEPLVDLPIGINITRFQTLLALHRSYLTPGDSSSGWTAGAAAYYVGYLQPRTFLLKYNENGTITDAVDCALDPLSETKCTLKSFTVEKGIYQTSNFRVQPTESIVRFPNITNLCPFGEVFNATRFASVYAWNRKRISNCVADYSVLYNSASFSTFKCYGVSPTKLNDLCFTNVYADSFVIRGDEVRQIAPGQTGKIADYNYKLPDDFTGCVIAWNSNNLDSKVGGNYNYLYRLFRKSNLKPFERDISTEIYQAGSTPCNGVEGFNCYFPLQSYGFQPTNGVGYQPYRVVVLSFELLHAPATVCGPKKSTNLVKNKCVNFNFNGLTGTGVLTESNKKFLPFQQFGRDIADTTDAVRDPQTLEILDITPCSFGGVSVITPGTNTSNQVAVLYQGVNCTEVPVAIHADQLTPTWRVYSTGSNVFQTRAGCLIGAEHVNNSYECDIPIGAGICASYQTQTNSPRRARSVASQSIIAYTMSLGAENSVAYSNNSIAIPTNFTISVTTEILPVSMTKTSVDCTMYICGDSTECSNLLLQYGSFCTQLNRALTGIAVEQDKNTQEVFAQVKQIYKTPPIKDFGGFNFSQILPDPSKPSKRSFIEDLLFNKVTLADAGFIKQYGDCLGDIAARDLICAQKFNGLTVLPPLLTDEMIAQYTSALLAGTITSGWTFCAGAALQIPFAMQMAYRFNGIGVTQNVLYENQKLIANQFNSAIGKIQDSLSSTASALGKLQDVVNQNAQALNTLVKQLSSNFGAISSVLNDILSRLDKVEAEVQIDRLITGRLQSLQTYVTQQLIRAAEIRASANLAATKMSECVCGQSKRVDFCGKGYHLMSFPQSAPHGVVFLHVTYVPAQEKNFTTAPAICHDGKAHFPREGVFVSNGTHWFVTQRNFYEPQIITTDNTFVSGNCDVVIGIVNNTVYDPLQPELDSFKEELDKYFKNHTSPDVDLGDISGINASVVNIQKEIDRLNEVAKNLNESLIDLQELGKYEQYIKGGGGSDIDPYKEFGSSYQLLNFLPLDFFPDLNALVDTATALYEEELTGREHCSPHHTAIRQALVCWDELTKLIAWMSSNITSEQVRTIIVNHVNDTWGLKVRQSLWFHLSCLTFGQHTVQEFLVSFGVWIRTPAPYRPPNAPILSTLPEHTVIC

SEQ ID NO: 7217 - protein, 1365 aa, Artificial Sequence
  SARS-CoV-2/Belgium/ULG-6939/2020__EPI_ISL_417020 spike protein (1-1211)(G889C_L1034C) WhcAg construct
MFVFLVLLPLVSSQCVNLTTRTQLPPAYTNSFTRGVYYPDKVFRSSVLHSTQDLFLPFFSNVTWFHAIHVSGTNGTKRFDNPVLPFNDGVYFASTEKSNIIRGWIFGTTLDSKTQSLLIVNNATNVVIKVCEFQFCNDPFLGVYYHKNNKSWMESEFRVYSSANNCTFEYVSQPFLMDLEGKQGNFKNLREFVFKNIDGYFKIYSKHTPINLVRDLPQGFSALEPLVDLPIGINITRFQTLLALHRSYLTPGDSSSGWTAGAAAYYVGYLQPRTFLLKYNENGTITDAVDCALDPLSETKCTLKSFTVEKGIYQTSNFRVQPTESIVRFPNITNLCPFGEVFNATRFASVYAWNRKRISNCVADYSVLYNSASFSTFKCYGVSPTKLNDLCFTNVYADSFVIRGDEVRQIAPGQTGKIADYNYKLPDDFTGCVIAWNSNNLDSKVGGNYNYLYRLFRKSNLKPFERDISTEIYQAGSTPCNGVEGFNCYFPLQSYGFQPTNGVGYQPYRVVVLSFELLHAPATVCGPKKSTNLVKNKCVNFNFNGLTGTGVLTESNKKFLPFQQFGRDIADTTDAVRDPQTLEILDITPCSFGGVSVITPGTNTSNQVAVLYQGVNCTEVPVAIHADQLTPTWRVYSTGSNVFQTRAGCLIGAEHVNNSYECDIPIGAGICASYQTQTNSPRRARSVASQSIIAYTMSLGAENSVVYSNNSIAIPTNFTISVTTEILPVSMTKTSVDCTMYICGDSTECSNLLLQYGSFCTQLNRALTGIAVEQDKNTQEVFAQVKQIYKTPPIKDFGGFNFSQILPDPSKPSKRSFIEDLLFNKVTLADAGFIKQYGDCLGDIAARDLICAQKFNGLTVLPPLLTDEMIAQYTSALLAGTITSGWTFCAGAALQIPFAMQMAYRFNGIGVTQNVLYENQKLIANQFNSAIGKIQDSLSSTASALGKLQDVVNQNAQALNTLVKQLSSNFGAISSVLNDILSRLDKVEAEVQIDRLITGRLQSLQTYVTQQLIRAAEIRASANLAATKMSECVCGQSKRVDFCGKGYHLMSFPQSAPHGVVFLHVTYVPAQEKNFTTAPAICHDGKAHFPREGVFVSNGTHWFVTQRNFYEPQIITTDNTFVSGNCDVVIGIVNNTVYDPLQPELDSFKEELDKYFKNHTSPDVDLGDISGINASVVNIQKEIDRLNEVAKNLNESLIDLQELGKYEQYIKGGGGSDIDPYKEFGSSYQLLNFLPLDFFPDLNALVDTATALYEEELTGREHCSPHHTAIRQALVCWDELTKLIAWMSSNITSEQVRTIIVNHVNDTWGLKVRQSLWFHLSCLTFGQHTVQEFLVSFGVWIRTPAPYRPPNAPILSTLPEHTVIC

SEQ ID NO: 7218 - protein, 1365 aa, Artificial Sequence
  SARS-CoV-2/France/HF2496/2020__EPI_ISL_418231 spike protein (1-1211)(G889C_L1034C) WhcAg construct
MFVFLVLLPLVSSQCVNLTTRTQLPPAYTNSFTRGVYYPDKVFRSSVLHSTQDLFLPFFSNVTWFHAIHVSGTNGTKRFDNPVLPFNDGVYFASTEKSNIIRGWIFGTTLDSKTQSLLIVNNATNVVIKVCEFQFCNDPFLGVYYHKNNKSWMESEFRVYSSANNCTFEYVSQPFLMDLEGKQGNFKNLREFVFKNIDGYFKIYSKHTPINLVRDLPQGFSALEPLVDLPIGINITRFQTLLALHRSYLTPGDSSSGWTAGAAAYYVGYLQPRTFLLKYNENGTITDAVDCALDPLSETKCTLKSFTVEKGIYQTSNFRVQPTESIVRFPNITNLCPFGEVFNATRFASVYAWNRKRISNCVADYSVLYNSASFSTFKCYGVSPTKLNDLCFTNVYADSFVIRGDEVRQIAPGQTGKIADYNYKLPDDFTGCVIAWNSNNLDSKVGGNYNYLYRLFRKSNLKPFERDISTEIYQAGSTPCNGVEGFNCYFPLQSYGFQPTNGVGYQPYRVVVLSFELLHAPATVCGPKKSTNLVKNKCVNFNFNGLTGTGVLTESNKKFLPFQQFGRDIADTTDAVRDPQTLEILDITPCSFGGVSVITPGTNTSNQVAVLYQGVNCTEVPVAIHADQLTPTWRVYSTGSNVFQTRAGCLIGAEHVNNSYECDIPIGAGICASYQTQTNSPRRARSVASQSIIAYTMSLGAENSVAYSNNSIAIPTNFTISVTTEILPVSMTKTSVDCTMYICGDSTECSNLLLQYGSFCTQLNRALTGIAVEQDKNTQEVFAQVKQIYKTPPIKDFGGFNFSQILPDPSKPSKRSFIEDLLFNKVTLADAGFIKQYGDCLGDIVARDLICAQKFNGLTVLPPLLTDEMIAQYTSALLAGTITSGWTFCAGAALQIPFAMQMAYRFNGIGVTQNVLYENQKLIANQFNSAIGKIQDSLSSTASALGKLQDVVNQNAQALNTLVKQLSSNFGAISSVLNDILSRLDKVEAEVQIDRLITGRLQSLQTYVTQQLIRAAEIRASANLAATKMSECVCGQSKRVDFCGKGYHLMSFPQSAPHGVVFLHVTYVPAQEKNFTTAPAICHDGKAHFPREGVFVSNGTHWFVTQRNFYEPQIITTDNTFVSGNCDVVIGIVNNTVYDPLQPELDSFKEELDKYFKNHTSPDVDLGDISGINASVVNIQKEIDRLNEVAKNLNESLIDLQELGKYEQYIKGGGGSDIDPYKEFGSSYQLLNFLPLDFFPDLNALVDTATALYEEELTGREHCSPHHTAIRQALVCWDELTKLIAWMSSNITSEQVRTIIVNHVNDTWGLKVRQSLWFHLSCLTFGQHTVQEFLVSFGVWIRTPAPYRPPNAPILSTLPEHTVIC

SEQ ID NO: 7219 - protein, 1365 aa, Artificial Sequence
  SARS-CoV-2/USA/WA-UW291/2020__EPI_ISL_418076 spike protein (1-1211)(G889C_L1034C) WhcAg construct
MFVFLVLLPLVSSQCVNLTTRTQLPPAYTNSFTRGVYYPDKVFRSSVLHSTQDLFLPFFSNVTWFHAIHVSGTNGTKRFDNPVLPFNDGVYFASTEKSNIIRGWIFGTTLDSKTQSLLIVNNATNVVIKVCEFQFCNDPFLGVYYHKNNKSWMESEFRVYSSANNCTFEYVSQPFLMDLEGKQGNFKNLREFVFKNIDGYFKIYSKHTPINLVRDLPQGFSALEPLVDLPIGINITRFQTLLALHRSYLTPGDSSSGWTAGAAAYYVGYLQPRTFLLKYNENGTITDAVDCALDPLSETKCTLKSFTVEKGIYQTSNFRVQPTESIVRFPNITNLCPFGEVFNATRFASVYAWNRKRISNCVADYSVLYNSASFSTFKCYGVSPTKLNDLCFTNVYADSFVIRGDEVRQIAPGQTGKIADYNYKLPDDFTGCVIAWNSNNLDSKVGGNYNYLYRLFRKSNLKPFERDISTEIYQAGSTPCNGVEGFNCYFPLQSYGFQPTNGVGYQPYRVVVLSFELLHAPATVCGPKKSTNLVKNKCVNFNFNGLTGTGVLTESNKKFLPFQQFGRDIADTTDAVRDPQTLEILDITPCSFGGVSVITPGTNTSNQVAVLYQGVNCTEVPVAIHADQLTPTWRVYSTGSNVFQTRAGCLIGAEHVNNSYECDIPIGAGICASYQTQTNSPRRARSVASQSIIAYTMSLGAENSVAYSNNSIAIPTNFTISVTTEILPVSMTKTSVDCTMYICGDSTECSNLLLQYGSFCTQLNRALTGIAVEQDKNTQEVFAQVKQIYKTPPIKDFGGFNFSQILPDPSKPSKRSFIEDLLFNKVTLADAGFIKQYGDCLGDIAARDLICAQKFNGLTVLPPLLTDEMIAQYTSALLAGTITSGWTFCAGAALQIPFAMQMAYRFNGIGVTQNVLYENQKLIANQFNSAIGKIQYSLSSTASALGKLQDVVNQNAQALNTLVKQLSSNFGAISSVLNDILSRLDKVEAEVQIDRLITGRLQSLQTYVTQQLIRAAEIRASANLAATKMSECVCGQSKRVDFCGKGYHLMSFPQSAPHGVVFLHVTYVPAQEKNFTTAPAICHDGKAHFPREGVFVSNGTHWFVTQRNFYEPQIITTDNTFVSGNCDVVIGIVNNTVYDPLQPELDSFKEELDKYFKNHTSPDVDLGDISGINASVVNIQKEIDRLNEVAKNLNESLIDLQELGKYEQYIKGGGGSDIDPYKEFGSSYQLLNFLPLDFFPDLNALVDTATALYEEELTGREHCSPHHTAIRQALVCWDELTKLIAWMSSNITSEQVRTIIVNHVNDTWGLKVRQSLWFHLSCLTFGQHTVQEFLVSFGVWIRTPAPYRPPNAPILSTLPEHTVIC

SEQ ID NO: 7220 - protein, 1365 aa, Artificial Sequence; identical to SEQ ID NO: 7183
  SARS-CoV-2/Portugal/PT0034/2020__EPI_ISL_418019 spike protein (1-1211)(G889C_L1034C) WhcAg construct

SEQ ID NO: 7221 - protein, 1365 aa, Artificial Sequence
  SARS-CoV-2/Iceland/202/2020__EPI_ISL_417750 spike protein (1-1211)(G889C_L1034C) WhcAg construct
MFVFLVLLPLVSSQCVNLTTRTQLPPAYTNSFTRGVYYPDKVFRSSVLHSTQDLFLPFFSNVTWFHAIHVSGTNGTKRFDNPVLPFNDGVYFASTEKSNIIRGWIFGTTLDSKTQSLLIVNNATNVVIKVCEFQFCNDPFLGVYYHKNNKSWMESEFRVYSSANNCTFEYVSQPFLMDLEGKQGNFKNLREFVFKNIDGYFKIYSKHTPINLVRDLPQGFSALEPLVDLPIGINITRFQTLLALHRSYLTPGDSSSGWTAGAAAYYVGYLQPRTFLLKYNENGTITDAVDCALDPLSETKCTLKSFTVEKGIYQTSNFRVQPTESIVRFPNITNLCPFGEVFNATRFASVYAWNRKRISNCVADYSVLYNSASFSTFKCYGVSPTKLNDLCFTNVYADSFVIRGDEVRQIAPGQTGKIADYNYKLPDDFTGCVIAWNSNNLDSKVGGNYNYLYRLFRKSNLKPFERDISTEIYQAGSTPCNGVEGFNCYFPLQSYGFQPTNGVGYQPYRVVVLSFELLHAPATVCGPKKSTNLVKNKCVNFNFNGLTGTGVLTESNKKFLPFQQFGRDIADTTDAVRDPQTLEILDITPCSFGGVSVITPGTNTSNQVAVLYQDVNCTEVPVAIHADQLTPTWRVYSTGSNVFQTRAGCLIGAEHVNNSYECDIPIGAGICASYQTQTNSPRRARSVASQSIIAYTMSLGAENSVAYSNNSIAIPTNFTISVTTEILPVSMTKTSVDCTMYICGDSTECSNLLLQYGSFCTQLNRALTGIAVEQDKNTQEVFAQVKQIYKTPPIKDFGGFNFSQILPDPSKPSKRSFIEDLLFNKVTLADAGFIKQYGDCLGDIAARDLICAQKFNGLTVLPPLLTDEMIAQYTSALLAGTITSGWTFCAGAALQIPFAMQMAYRFNGIGVTQNVLYENQKLIANQFNSAIGKIQDSLSSTASALGKLQDVVNQNAQALNTLVKQLSSNFGAISSVLNDILSRLDKVEAEVQIDRLITGRLQSLQTYVTQQLIRAAEIRASANLAATKMSECVCGQSKRVDFCGKGYHLMSFPQSAPHGVVFLHVTYVPAQEKNFTTAPAICHDGKAHFPREGVFVSNGTHWFVTQRNFYEPQIITTDNTFVSGNCDVVIGIVNNTVYDPLQPELDSFKEELDKYFKNHTSPDVDLGDIPGINASVVNIQKEIDRLNEVAKNLNESLIDLQELGKYEQYIKGGGGSDIDPYKEFGSSYQLLNFLPLDFFPDLNALVDTATALYEEELTGREHCSPHHTAIRQALVCWDELTKLIAWMSSNITSEQVRTIIVNHVNDTWGLKVRQSLWFHLSCLTFGQHTVQEFLVSFGVWIRTPAPYRPPNAPILSTLPEHTVIC

SEQ ID NO: 7222 - protein, 1365 aa, Artificial Sequence
  SARS-CoV-2/USA/WA-UW261/2020__EPI_ISL_418046 spike protein (1-1211)(G889C_L1034C) WhcAg construct
MFVFLVLLPLVSSQCVNLTTRTQLPPAYTNSFTRGVYYPDKVFRSSVLHSTQDLFLPFFSNVTWFHAIHVSGTNGTKRFDNPVLPFNDGVYFASTEKSNIIRGWIFGTTLDSKTQSLLIVNNATNVVIKVCEFQFCNDPFLGVYYHKNNKSWMESEFRVYSSANNCTFEYVSQPFLMDLEGKQGNFKNLREFVFKNIDGYFKIYSKHTPINLVRDLPQGFSALEPLVDLPIGINITRFQTLLALHRSYLTPGDSSSGWTAGAAAYYVGYLQPRTFLLKYNENGTITDAVDCALDPLSETKCTLKSFTVEKGIYQTSNFRVQPTESIVRFPNITNLCPFGEVFNATRFTSVYAWNRKRISNCVADYSVLYNSASFSTFKCYGVSPTKLNDLCFTNVYADSFVIRGDEVRQIAPGQTGKIADYNYKLPDDFTGCVIAWNSNNLDSKVGGNYNYLYRLFRKSNLKPFERDISTEIYQAGSTPCNGVEGFNCYFPLQSYGFQPTNGVGYQPYRVVVLSFELLHAPATVCGPKKSTNLVKNKCVNFNFNGLTGTGVLTESNKKFLPFQQFGRDIADTTDAVRDPQTLEILDITPCSFGGVSVITPGTNTSNQVAVLYQDVNCTEVPVAIHADQLTPTWRVYSTGSNVFQTRAGCLIGAEHVNNSYECDIPIGAGICASYQTQTNSPRRARSVASQSIIAYTMSLGAENSVAYSNNSIAIPTNFTISVTTEILPVSMTKTSVDCTMYICGDSTECSNLLLQYGSFCTQLNRALTGIAVEQDKNTQEVFAQVKQIYKTPPIKDFGGFNFSQILPDPSKPSKRSFIEDLLFNKVTLADAGFIKQYGDCLGDIAARDLICAQKFNGLTVLPPLLTDEMIAQYTSALLAGTITSGWTFCAGAALQIPFAMQMAYRFNGIGVTQNVLYENQKLIANQFNSAIGKIQDSLSSTASALGKLQDVVNQNAQALNTLVKQLSSNFGAISSVLNDILSRLDKVEAEVQIDRLITGRLQSLQTYVTQQLIRAAEIRASANLAATKMSECVCGQSKRVDFCGKGYHLMSFPQSAPHGVVFLHVTYVPAQEKNFTTAPAICHDGKAHFPREGVFVSNGTHWFVTQRNFYEPQIITTDNTFVSGNCDVVIGIVNNTVYDPLQPELDSFKEELDKYFKNHTSPDVDLGDISGINASVVNIQKEIDRLNEVAKNLNESLIDLQELGKYEQYIKGGGGSDIDPYKEFGSSYQLLNFLPLDFFPDLNALVDTATALYEEELTGREHCSPHHTAIRQALVCWDELTKLIAWMSSNITSEQVRTIIVNHVNDTWGLKVRQSLWFHLSCLTFGQHTVQEFLVSFGVWIRTPAPYRPPNAPILSTLPEHTVIC

SEQ ID NO: 7223 - protein, 1365 aa, Artificial Sequence
  SARS-CoV-2/Portugal/PT0035/2020__EPI_ISL_418020 spike protein (1-1211)(G889C_L1034C) WhcAg construct
MFVFLVLLPLVSSQCVNLTTRTQLPPAYTNSFTRGVYYPDKVFRSSVLHSTQDLFLPFFSNVTWFHAIHVSGTNGTKRFDNPVLPFNDGVYFASTEKSNIIRGWIFGTTLDSKTQSLLIVNNATNVVIKVCEFQFCNDPFLGVYYHKNNKSWMESEFRVYSSANNCTFEYVSQPFLMDLEGKQGNFKNLREFVFKNIDGYFKIYSKHTPINLVRDLPQGFSALEPLVDLPIGINITRFQTLLALHRSYLTPGDSSSGWTAGAAAYYVGYLQPRTFLLKYNENGTITDAVDCALDPLSETKCTLKSFTVEKGIYQTSNFRVQPTESIVRFPNITNLCPFGEVFNATRFASVYAWNRKRISNCVADYSVLYNSASFSTFKCYGVSPTKLNDLCFTNVYADSFVIRGDEVRQIAPGQTGKIADYNYKLPDDFTGCVIAWNSNNLDSKVGGNYNYLYRLFRKSNLKPFERDISTEIYQAGSTPCNGVEGFNCYFPLQSYGFQPTNGVGYQPYRVVVLSFELLHAPATVCGPKKSTNLVKNKCVNFNFNGLTGTGVLTESNKKFLPFQQFGRDIADTTDAVRDPQTLEILDITPCSFGGVSVITPGTNTSNQVAVLYQDVNCTEVPVAIHADQLTPTWRVYSTGSNVFQTRAGCLIGAEHVNNSYECDIPIGAGICASYQTQTNSPRRARSVASQSIIAYTMSLGAENSVAYSNNSIAIPTNFTISVTTEILPVSMTKTSVDCTMYICGDSTECSNLLLQYGSFCTQLNRALTGIAVEQDKNTQEVFAQVKQIYKTPPIKDFGGFNFSQILPDPSKPSKRSFIEDLLFNKVTLADAGFIKQYGDCLGDISARDLICAQKFNGLTVLPPLLTDEMIAQYTSALLAGTITSGWTFCAGAALQIPFAMQMAYRFNGIGVTQNVLYENQKLIANQFNSAIGKIQDSLSSTASALGKLQDVVNQNAQALNTLVKQLSSNFGAISSVLNDILSRLDKVEAEVQIDRLITGRLQSLQTYVTQQLIRAAEIRASANLAATKMSECVCGQSKRVDFCGKGYHLMSFPQSAPHGVVFLHVTYVPAQEKNFTTAPAICHDGKAHFPREGVFVSNGTHWFVTQRNFYEPQIITTDNTFVSGNCDVVIGIVNNTVYDPLQPELDSFKEELDKYFKNHTSPDVDLGDISGINASVVNIQKEIDRLNEVAKNLNESLIDLQELGKYEQYIKGGGGSDIDPYKEFGSSYQLLNFLPLDFFPDLNALVDTATALYEEELTGREHCSPHHTAIRQALVCWDELTKLIAWMSSNITSEQVRTIIVNHVNDTWGLKVRQSLWFHLSCLTFGQHTVQEFLVSFGVWIRTPAPYRPPNAPILSTLPEHTVIC

SEQ ID NO: 7224 - protein, 1365 aa, Artificial Sequence
  SARS-CoV-2/USA/NY-NYUMC7/2020__EPI_ISL_418192 spike protein (1-1211)(G889C_L1034C) WhcAg construct
MFVFLVLLPLVSSQCVNLTTRTQLPPAYTNSFTRGVYYPDKVFRSSVLHSTQDLFLPFFSNVTWFHAIHVSGTNGTKRFDNPVLPFNDGVYFASTEKSNIIRGWIFGTTLDSKTQSLLIVNNATNVVIKVCEFQFCNDPFLGVYHHKNNKSWMESEFRVYSSANNCTFEYVSQPFLMDLEGKQGNFKNLREFVFKNIDGYFKIYSKHTPINLVRDLPQGFSALEPLVDLPIGINITRFQTLLALHRSYLTPGDSSSGWTAGAAAYYVGYLQPRTFLLKYNENGTITDAVDCALDPLSETKCTLKSFTVEKGIYQTSNFRVQPTESIVRFPNITNLCPFGEVFNATRFASVYAWNRKRISNCVADYSVLYNSASFSTFKCYGVSPTKLNDLCFTNVYADSFVIRGDEVRQIAPGQTGKIADYNYKLPDDFTGCVIAWNSNNLDSKVGGNYNYLYRLFRKSNLKPFERDISTEIYQAGSTPCNGVEGFNCYFPLQSYGFQPTNGVGYQPYRVVVLSFELLHAPATVCGPKKSTNLVKNKCVNFNFNGLTGTGVLTESNKKFLPFQQFGRDIADTTDAVRDPQTLEILDITPCSFGGVSVITPGTNTSNQVAVLYQGVNCTEVPVAIHADQLTPTWRVYSTGSNVFQTRAGCLIGAEHVNNSYECDIPIGAGICASYQTQTNSPRRARSVASQSIIAYTMSLGAENSVAYSNNSIAIPTNFTISVTTEILPVSMTKTSVDCTMYICGDSTECSNLLLQYGSFCTQLNRALTGIAVEQDKNTQEVFAQVKQIYKTPPIKDFGGFNFSQILPDPSKPSKRSFIEDLLFNKVTLADAGFIKQYGDCLGDIAARDLICAQKFNGLTVLPPLLTDEMIAQYTSALLAGTITSGWTFCAGAALQIPFAMQMAYRFNGIGVTQNVLYENQKLIANQFNSAIGKIQDSLSSTASALGKLQDVVNQNAQALNTLVKQLSSNFGAISSVLNDILSRLDKVEAEVQIDRLITGRLQSLQTYVTQQLIRAAEIRASANLAATKMSECVCGQSKRVDFCGKGYHLMSFPQSAPHGVVFLHVTYVPAQEKNFTTAPAICHDGKAHFPREGVFVSNGTHWFVTQRNFYEPQIITTDNTFVSGNCDVVIGIVNNTVYDPLQPELDSFKEELDKYFKNHTSPDVDLGDISGINASVVNIQKEIDRLNEVAKNLNESLIDLQELGKYEQYIKGGGGSDIDPYKEFGSSYQLLNFLPLDFFPDLNALVDTATALYEEELTGREHCSPHHTAIRQALVCWDELTKLIAWMSSNITSEQVRTIIVNHVNDTWGLKVRQSLWFHLSCLTFGQHTVQEFLVSFGVWIRTPAPYRPPNAPILSTLPEHTVIC

SEQ ID NO: 7225 - protein, 1365 aa, Artificial Sequence
  SARS-CoV-2/Iceland/189/2020__EPI_ISL_417709 spike protein (1-1211)(G889C_L1034C) WhcAg construct
MFVFLVLLPLVSSQCVNLTTRTQLPPAYTNSFTRGVYYPDKVFRSSVLHSTQDLFLPFFSNVTWFHAIHVSGTNGTKRFDNPVLPFNDGVYFASTEKSNIIRGWIFGTTLDSKTQSLLIVNNATNVVIKVCEFQFCNDPFLGVYYHKNNKSWMESEFRVYSSANNCTFEYVSQPFLMDLEGKQGNFKNLREFVFKNIDGYFKIYSKHTPINLVRDLPQGFSALEPLVDLPIGINITRFQTLLALHRSYLTPGDSSSGWTAGAAAYYVGYLQPRTFLLKYNENGTITDAVDCALDPLSETKCTLKSFTVEKGIYQTSNFRVQPTESIVRFPNITNLCPFGEVFNATRFASVYAWNRKRISNCVADYSVLYNSASFSTFKCYGVSPTKLNDLCFTNVYADSFVIRGDEVRQIAPGQTGKIADYNYKLPDDFTGCVIAWNSNNLDSKVGGNYNYLYRLFRKSNLKPFERDISTEIYQAGSTPCNGVEGFNCYFPLQSYGFQPTNGVGYQPYRVVVLSFELLHAPATVCGPKKSTNLVKNKCVNFNFNGLTGTGVLTESNKKFLPFQQFGRDIADTTDAVRDPQTLEILDITPCSFGGVSVITPGTNTSNQVAVLYQGVNCTEVPVAIHADQLTPTWRVYSTGSNVFQTRAGCLIGAEHVNNSYECDIPIGAGICASYQTQTNSPRRARSVASQSIIAYTMSLGAENSVAYSNNSIAIPTNFTISVTTEILPVSMTKTSVDCTMYICGDSTECSNLLLQYGSFCTQLNRALTGIAVEQDKNTQEVFAQVKQIYKTPPIKDFGGFNFSQILPDPSKPSKRSFIEDLLFNKVTLADAGFTKQYGDCLGDIAARDLICAQKFNGLTVLPPLLTDEMIAQYTSALLAGTITSGWTFCAGAALQIPFAMQMAYRFNGIGVTQNVLYENQKLIANQFNSAIGKIQDSLSSTASALGKLQDVVNQNAQALNTLVKQLSSNFGAISSVLNDILSRLDKVEAEVQIDRLITGRLQSLQTYVTQQLIRAAEIRASANLAATKMSECVCGQSKRVDFCGKGYHLMSFPQSAPHGVVFLHVTYVPAQEKNFTTAPAICHDGKAHFPREGVFVSNGTHWFVTQRNFYEPQIITTDNTFVSGNCDVVIGIVNNTVYDPLQPELDSFKEELDKYFKNHTSPDVDLGDISGINASVVNIQKEIDRLNEVAKNLNESLIDLQELGKYEQYIKGGGGSDIDPYKEFGSSYQLLNFLPLDFFPDLNALVDTATALYEEELTGREHCSPHHTAIRQALVCWDELTKLIAWMSSNITSEQVRTIIVNHVNDTWGLKVRQSLWFHLSCLTFGQHTVQEFLVSFGVWIRTPAPYRPPNAPILSTLPEHTVIC

SEQ ID NO: 7226 - protein, 1365 aa, Artificial Sequence
  SARS-CoV-2/Australia/NSW56/2020__EPI_ISL_417408 spike protein (1-1211)(G889C_L1034C) WhcAg construct
MFVFLVLLPLVSSQCVNLTTRTQLPPAYTNSFTRGVYYPDKVFRSSVLHSTQDLFLPFFSNVTWFHAIHVSGTNGTKRFDNPVLPFNDGVYFASTEKSNIIRGWIFGTTLDSKTQSLLIVNNATNVVIKVCEFQFCNDPFLGVYYHKNNKSWMESEFRVYSSANNCTFEYVSQPFLMDLEGKQGNFKNLREFVFKNIDGYFKIYSKHTPINLVRDLPQGFSALEPLVDLPIGINITRFQTLLALHRSYLTPGDSSSGWTAGAAAYYVGYLQPRTFLLKYNENGTITDAVDCALDPLSETKCTLKSFTVEKGIYQTSNFRVQPTESIVRFPNITNLCPFGEVFNATRFASVYAWNRKRISNCVADYSVLYNSASFSTFKCYGVSPTKLNDLCFTNVYADSFVIRGDEVRQIAPGQTGKIADYNYKLPDDFTGCVIAWNSNNLDSKVGGNYNYLYRLFRKSNLKPFERDISTEIYQAGSTPCNGVEGFNCYFPLQSYGFQPTNGVGYQPYRVVVLSFELLHAPATVCGPKKSTNLVKNKCVNFNFNGLTGTGVLTESNKKFLPFQQFGRDIADTTDAVRDPQTLEILDITPCSFGGVSVITPGTNTSNQVAVLYQDVNCTEVPVAIHADQLTPTWRVYSTGSNVFQTRAGCLIGAEHVNNSYECDIPIGAGICASYQTQTNSPRRARSVASQSIIAYTMSLGAENSVAYSNNSIAIPTNFTISVTTEILPVSMTKTSVDCTMYICGDSTECSNLLLQYGSFCTQLNRALTGIAVEQDKNTQEVFAQVKQIYKTPPIKDFGGFNFSQILPDSSKPSKRSFIEDLLFNKVTLADAGFIKQYGDCLGDIAARDLICAQKFNGLTVLPPLLTDEMIAQYTSALLAGTITSGWTFCAGAALQIPFAMQMAYRFNGIGVTQNVLYENQKLIANQFNSAIGKIQDSLSSTASALGKLQDVVNQNAQALNTLVKQLSSNFGAISSVLNDILSRLDKVEAEVQIDRLITGRLQSLQTYVTQQLIRAAEIRASANLAATKMSECVCGQSKRVDFCGKGYHLMSFPQSAPHGVVFLHVTYVPAQEKNFTTAPAICHDGKAHFPREGVFVSNGTHWFVTQRNFYEPQIITTDNTFVSGNCDVVIGIVNNTVYDPLQPELDSFKEELDKYFKNHTSPDVDLGDISGINASVVNIQKEIDRLNEVAKNLNESLIDLQELGKYEQYIKGGGGSDIDPYKEFGSSYQLLNFLPLDFFPDLNALVDTATALYEEELTGREHCSPHHTAIRQALVCWDELTKLIAWMSSNITSEQVRTIIVNHVNDTWGLKVRQSLWFHLSCLTFGQHTVQEFLVSFGVWIRTPAPYRPPNAPILSTLPEHTVIC

SEQ ID NO: 7227 - protein, 1365 aa, Artificial Sequence
  SARS-CoV-2/Iceland/280/2020__EPI_ISL_417608 spike protein (1-1211)(G889C_L1034C) WhcAg construct
MFVFLVLLPLVSSQCVNLTTRTQLPPAYTNSFTRGVYYPDKVFRSSVLHSTQDLFLPFFSNVTWFHAIHVSGTNGTKRFDNPVLPFNDGVYFASTEKSNIIRGWIFGTTLDSKTQSLLIVNNATNVVIKVCEFQFCNDPFLGVYYHKNNKSWMESEFRVYSSANNCTFEYVSQPFLMDLEGKQGNFKNLREFVFKNIDGYFKIYSKHTPINLVRDLPQGFSALEPLVDLPIGINITRFQTLLALHRSYLTPGDSSSGWTAGAAAYYVGYLQPRTFLLKYNENGTITDAVDCALDPLSETKCTLKSFTVEKGIYQTSNFRVQPTESIVRFPNITNLCPFGEVFNATRFASVYAWNRKRISNCVADYSVLYNSASFSTFKCYGVSPTKLNDLCFTNVYADSFVIRGDEVRQIAPGQTGKIADYNYKLPDDFTGCVIAWNSNNLDSKVGGNYNYLYRLFRKSNLKPFERDISTEIYQAGSTPCNGVEGFNCYFPLQSYGFQPTNGVGYQPYRVVVLSFELLHAPATVCGPKKSTNLVKNKCVNFNFNGLTGTGVLTESNKKFLPFQQFGRDIADTTDAVRDPQTLEILDITPCSFGGVSVITPGTNTSNQVAVLYQGVNCTEVPVAIHADQLTPTWRVYSTGSNVFQTRAGCLIGAEHVNNSYECDIPIGAGICASYHTQTNSPRRARSVASQSIIAYTMSLGAENSVAYSNNSIAIPTNFTISVTTEILPVSMTKTSVDCTMYICGDSTECSNLLLQYGSFCTQLNRALTGIAVEQDKNTQEVFAQVKQIYKTPPIKDFGGFNFSQILPDPSKPSKRSFIEDLLFNKVTLADAGFIKQYGDCLGDIAARDLICAQKFNGLTVLPPLLTDEMIAQYTSALLAGTITSGWTFCAGAALQIPFAMQMAYRFNGIGVTQNVLYENQKLIANQFNSAIGKIQDSLSSTASALGKLQDVVNQNAQALNTLVKQLSSNFGAISSVLNDILSRLDKVEAEVQIDRLITGRLQSLQTYVTQQLIRAAEIRASANLAATKMSECVCGQSKRVDFCGKGYHLMSFPQSAPHGVVFLHVTYVPAQEKNFTTAPAICHDGKAHFPREGVFVSNGTHWFVTQRNFYEPQIITTDNTFVSGNCDVVIGIVNNTVYDPLQPELDSFKEELDKYFKNHTSPDVDLGDISGINASVVNIQKEIDRLNEVAKNLNESLIDLQELGKYEQYIKGGGGSDIDPYKEFGSSYQLLNFLPLDFFPDLNALVDTATALYEEELTGREHCSPHHTAIRQALVCWDELTKLIAWMSSNITSEQVRTIIVNHVNDTWGLKVRQSLWFHLSCLTFGQHTVQEFLVSFGVWIRTPAPYRPPNAPILSTLPEHTVIC

SEQ ID NO: 7228 - protein, 1365 aa, Artificial Sequence; identical to SEQ ID NO: 7183
  SARS-CoV-2/Iceland/247/2020__EPI_ISL_417575 spike protein (1-1211)(G889C_L1034C) WhcAg construct

SEQ ID NO: 7229 - protein, 1365 aa, Artificial Sequence
  SARS-CoV-2/Iceland/238/2020__EPI_ISL_417566 spike protein (1-1211)(G889C_L1034C) WhcAg construct
MFVFLVLLPLVSSQCVNLTTRTQLPPAYTNSFTRGVYYPDKVFRSSVLHSTQDLFLPFFSNVTWFHAIHVSGTNGTKRFDNPVLPFNDGVYFASTEKSNIIRGWIFGTTLDSKTQSLLIVNNATNVVIKVCEFQFCNDPFLGVYYHKNNKSWMESEFRVYSSANNCTFEYVSQPFLMDLEGKQGNFKNLREFVFKNIDGYFKIYSKHTPINLVRDLPQGFSALEPLVDLPIGINITRFQTLLALHRSYLTPGDSSSGWTAGAAAYYVGYLQPRTFLLKYNENGTITDAVDCALDPLSETKCTLKSFTVEKGIYQTSNFRVQPTESIVRFPNITNLCPFGEVFNATRFASVYAWNRKRISNCVADYSVLYNSASFSTFKCYGVSPTKLNDLCFTNVYADSFVIRGDEVRQIAPGQTGKIADYNYKLPDDFTGCVIAWNSNNLDSKVGGNYNYLYRLFRKSNLKPFERDISTEIYQAGSTPCNGVEGFNCYFPLQSYGFQPTNGVGYQPYRVVVLSFELLHAPATVCGPKKSTNLVKNKCVNFNFNGLTGTGVLTESNKKFLPFQQFGRDIADTTDAVRDPQTLEILDITPCSFGGVSVITPGTNTSNQVAVLYQGVNCTEVPVAIHADQLTPTWRVYSTGSNVFQTRAGCLIGAEHVNNSYECDIPIGAGICASYQTQTNSPRRARSVASQSIIAYTMSLGAENSVAYSNNSIAIPTNFTISVTTEILPVSMTKTSVDCTMYICGDSTECSNLLLQYGSFCTQLNRALTGIAVEQDKNTQEVFAQVKQIYKTPPIKDFGGFNFSQILPDPSKPSKRSFIEDLLFNKVTLADVGFIKQYGDCLGDIAARDLICAQKFNGLTVLPPLLTDEMIAQYTSALLAGTITSGWTFCAGAALQIPFAMQMAYRFNGIGVTQNVLYENQKLIANQFNSAIGKIQDSLSSTASALGKLQDVVNQNAQALNTLVKQLSSNFGAISSVLNDILSRLDKVEAEVQIDRLITGRLQSLQTYVTQQLIRAAEIRASANLAATKMSECVCGQSKRVDFCGKGYHLMSFPQSAPHGVVFLHVTYVPAQEKNFTTAPAICHDGKAHFPREGVFVSNGTHWFVTQRNFYEPQIITTDNTFVSGNCDVVIGIVNNTVYDPLQPELDSFKEELDKYFKNHTSPDVDLGDISGINASVVNIQKEIDRLNEVAKNLNESLIDLQELGKYEQYIKGGGGSDIDPYKEFGSSYQLLNFLPLDFFPDLNALVDTATALYEEELTGREHCSPHHTAIRQALVCWDELTKLIAWMSSNITSEQVRTIIVNHVNDTWGLKVRQSLWFHLSCLTFGQHTVQEFLVSFGVWIRTPAPYRPPNAPILSTLPEHTVIC

SEQ ID NO: 7230 - protein, 1365 aa, Artificial Sequence
  SARS-CoV-2/Greece/16/2020__EPI_ISL_418265 spike protein (1-1211)(G889C_L1034C) WhcAg construct
MFVFLVLLPLVSSQCVNLTTRTQLPPAYTNSFTRGVYYPDKVFRSSVLHSTQDLFLPFFSNVTWFHAIHVSGTNGTKRFDNPVLPFNDGVYFASTEKSNIIRGWIFGTTLDSKTQSLLIVNNATNVVIKVCEFQFCNDPFLGVYYHKNNKSWMESEFRVYSSANNCTFEYVSQPFLMDLEGKQGNFKNLREFVFKNVDGYFKIYSKHTPINLVRDLPQGFSALEPLVDLPIGINITRFQTLLALHRSYLTPGDSSSGWTAGAAAYYVGYLQPRTFLLKYNENGTITDAVDCALDPLSETKCTLKSFTVEKGIYQTSNFRVQPTESIVRFPNITNLCPFGEVFNATRFASVYAWNRKRISNCVADYSVLYNSASFSTFKCYGVSPTKLNDLCFTNVYADSFVIRGDEVRQIAPGQTGKIADYNYKLPDDFTGCVIAWNSNNLDSKVGGNYNYLYRLFRKSNLKPFERDISTEIYQAGSTPCNGVEGFNCYFPLQSYGFQPTNGVGYQPYRVVVLSFELLHAPATVCGPKKSTNLVKNKCVNFNFNGLTGTGVLTESNKKFLPFQQFGRDIADTTDAVRDPQTLEILDITPCSFGGVSVITPGTNTSNQVAVLYQDVNCTEVPVAIHADQLTPTWRVYSTGSNVFQTRAGCLIGAEHVNNSYECDIPIGAGICASYQTQTNSPRRARSVASQSIIAYTMSLGAENSVAYSNNSIAIPTNFTISVTTEILPVSMTKTSVDCTMYICGDSTECSNLLLQYGSFCTQLNRALTGIAVEQDKNTQEVFAQVKQIYKTPPIKDFGGFNFSQILPDPSKPSKRSFIEDLLFNKVTLADAGFIKQYGDCLGDIAARDLICAQKFNGLTVLPPLLTDEMIAQYTSALLAGTITSGWTFCAGAALQIPFAMQMAYRFNGIGVTQNVLYENQKLIANQFNSAIGKIQDSLSSTASALGKLQDVVNQNAQALNTLVKQLSSNFGAISSVLNDILSRLDKVEAEVQIDRLITGRLQSLQTYVTQQLIRAAEIRASANLAATKMSECVCGQSKRVDFCGKGYHLMSFPQSAPHGVVFLHVTYVPAQEKNFTTAPAICHDGKAHFPREGVFVSNGTHWFVTQRNFYEPQIITTDNTFVSGNCDVVIGIVNNTVYDPLQPELDSFKEELDKYFKNHTSPDVDLGDISGINASVVNIQKEIDRLNEVAKNLNESLIDLQELGKYEQYIKGGGGSDIDPYKEFGSSYQLLNFLPLDFFPDLNALVDTATALYEEELTGREHCSPHHTAIRQALVCWDELTKLIAWMSSNITSEQVRTIIVNHVNDTWGLKVRQSLWFHLSCLTFGQHTVQEFLVSFGVWIRTPAPYRPPNAPILSTLPEHTVIC

SEQ ID NO: 7231 - protein, 1365 aa, Artificial Sequence
  SARS-CoV-2/Iceland/319/2020__EPI_ISL_417648 spike protein (1-1211)(G889C_L1034C) WhcAg construct
MFVFLVLLPLVSSQCVNLTTRTQLPPAYTNSFTRGVYYPDKVFRSSVLHSTQDLFLPFFSNVTWFHAIHVSGTNGTKRFDNPVLPFNDGVYFASTEKSNIIRGWIFGTTLDSKTQSLLIVNNATNVVIKVCEFQFCNDPFLGVYYHKNNKSWMESEFRVYSSANNCTFEYVSQPFLIDLEGKQGNFKNLREFVFKNIDGYFKIYSKHTPINLVRDLPQGFSALEPLVDLPIGINITRFQTLLALHRSYLTPGDSSSGWTAGAAAYYVGYLQPRTFLLKYNENGTITDAVDCALDPLSETKCTLKSFTVEKGIYQTSNFRVQPTESIVRFPNITNLCPFGEVFNATRFASVYAWNRKRISNCVADYSVLYNSASFSTFKCYGVSPTKLNDLCFTNVYADSFVIRGDEVRQIAPGQTGKIADYNYKLPDDFTGCVIAWNSNNLDSKVGGNYNYLYRLFRKSNLKPFERDISTEIYQAGSTPCNGVEGFNCYFPLQSYGFQPTNGVGYQPYRVVVLSFELLHAPATVCGPKKSTNLVKNKCVNFNFNGLTGTGVLTESNKKFLPFQQFGRDIADTTDAVRDPQTLEILDITPCSFGGVSVITPGTNTSNQVAVLYQGVNCTEVPVAIHADQLTPTWRVYSTGSNVFQTRAGCLIGAEHVNNSYECDIPIGAGICASYQTQTNSPRRARSVASQSIIAYTMSLGAENSVAYSNNSIAIPTNFTISVTTEILPVSMTKTSVDCTMYICGDSTECSNLLLQYGSFCTQLNRALTGIAVEQDKNTQEVFAQVKQIYKTPPIKDFGGFNFSQILPDPSKPSKRSFIEDLLFNKVTLADAGFIKQYGDCLGDIAARDLICAQKFNGLTVLPPLLTDEMIAQYTSALLAGTITSGWTFCAGAALQIPFAMQMAYRFNGIGVTQNVLYENQKLIANQFNSAIGKIQDSLSSTASALGKLQDVVNQNAQALNTLVKQLSSNFGAISSVLNDILSRLDKVEAEVQIDRLITGRLQSLQTYVTQQLIRAAEIRASANLAATKMSECVCGQSKRVDFCGKGYHLMSFPQSAPHGVVFLHVTYVPAQEKNFTTAPAICHDGKAHFPREGVFVSNGTHWFVTQRNFYEPQIITTDNTFVSGNCDVVIGIVNNTVYDPLQPELDSFKEELDKYFKNHTSPDVDLGDISGINASVVNIQKEIDRLNEVAKNLNESLIDLQELGKYEQYIKGGGGSDIDPYKEFGSSYQLLNFLPLDFFPDLNALVDTATALYEEELTGREHCSPHHTAIRQALVCWDELTKLIAWMSSNITSEQVRTIIVNHVNDTWGLKVRQSLWFHLSCLTFGQHTVQEFLVSFGVWIRTPAPYRPPNAPILSTLPEHTVIC

SEQ ID NO: 7232 - protein, 1365 aa, Artificial Sequence
  SARS-CoV-2/Congo/94/2020__EPI_ISL_417947 spike protein (1-1211)(G889C_L1034C) WhcAg construct
MFVFLVLLPLVSSQCVNLTTRTQLPPAYTNSFTRGVYYPDKVFRSSVLHSTQDLFLPFFSNVTWFHAIHVSGTNGTKRFDNPVLPFNDGVYFASTEKSNIIRGWIFGTTLDSKTQSLLIVNNATNVVIKVCEFQFCNDPFLGVYYHKNNKSWMESEFRVYSSANNCTFEYVSQPFLMDLEGKQGNFKNLREFVFKNIDGYFKIYSKHTPINLVRDLPQGFSALEPLVDLPIGINITRFQTLLALHRSYLTPGDSSSGWTAGAAAYYVGYLQPRTFLLKYNENGTITDAVDCALDPLSETKCTLKSFTVEKGIYQTSNFRVQPTESIVRFPNITNLCPFGEVFNATRFASVYAWNRKRISNCVADYSVLYNSASFSTFKCYGVSPTKLNDLCFTNVYADSFVIRGDEVRQIAPGQTGKIADYNYKLPDDFTGCVIAWNSNNLDSKVGGNYNYLYRLFRKSNLKPFERDISTEIYQAGSTPCNGVEGFNCYFPLQSYGFQPTNGVGYQPYRVVVLSFELLHAPATVCGPKKSTNLVKNKCVNFNFNGLTGTGVLTESNKKFLPFQQFGRDIADTTDAVRDPQTLEILDITPCSFGGVSVITPGTNTSNQVAVLYQGVNCTEVPVAIHADQLTPTWRVYSTGSNVFQTRAGCLIGAEHVNNSYECDIPIGAGICASYQTQTNSPRRARSVASQSIIAYTMSLGAENSVAYSNNSIAIPTNFTISVTTEILPVSMTKTSVDCTMYICGDSTECSNLLLQYGSFCTQLNRALTGIAVEQDKNTQEVFAQVKQIYKTPPIKDFGGFNFSQILPDPSKPSKRSFIEDILFNKVTLADAGFIKQYGDCLGDIAARDLICAQKFNGLTVLPPLLTDEMIAQYTSALLAGTITSGWTFCAGAALQIPFAMQMAYRFNGIGVTQNVLYENQKLIANQFNSAIGKIQDSLSSTASALGKLQDVVNQNAQALNTLVKQLSSNFGAISSVLNDILSRLDKVEAEVQIDRLITGRLQSLQTYVTQQLIRAAEIRASANLAATKMSECVCGQSKRVDFCGKGYHLMSFPQSAPHGVVFLHVTYVPAQEKNFTTAPAICHDGKAHFPREGVFVSNGTHWFVTQRNFYEPQIITTDNTFVSGNCDVVIGIVNNTVYDPLQPELDSFKEELDKYFKNHTSPDVDLGDISGINASVVNIQKEIDRLNEVAKNLNESLIDLQELGKYEQYIKGGGGSDIDPYKEFGSSYQLLNFLPLDFFPDLNALVDTATALYEEELTGREHCSPHHTAIRQALVCWDELTKLIAWMSSNITSEQVRTIIVNHVNDTWGLKVRQSLWFHLSCLTFGQHTVQEFLVSFGVWIRTPAPYRPPNAPILSTLPEHTVIC

SEQ ID NO: 7233 - protein, 1365 aa, Artificial Sequence
  SARS-CoV-2/Congo/158/2020__EPI_ISL_417950 spike protein (1-1211)(G889C_L1034C) WhcAg construct
MFVFLVLLPLVSSQCVNLTTRTQLPPAYTNSFTRGVYYPDKVFRSSVLHSTQDLFLPFFSNVTWFHAIHVSGTNGTKRFDNPVLPFNDGVYFASTEKSNIIRGWIFGTTLDSKTQSLLIVNNATNVVIKVCEFQFCNDPFLGVYYHKNNKSWMESEFRVYSSANNCTFEYVSQPFLMDLEGKQGNFKNLREFVFKNIDGYFKIYSKHTPINLVRDLPQGFSALEPLVDLPIGINITRFQTLLALHRSYLTPGDSSSGWTAGAAAYYVGYLQPRTFLLKYNENGTITDAVDCALDPLSETKCTLKSFTVEKGIYQTSNFRVQPTESIVRFPNITNLCPFGEVFNATRFASVYAWNRKRISNCVADYSVLYNSASFSTFKCYGVSPTKLNDLCFTNVYADSFVIRGDEVRQIAPGQTGKIADYNYKLPDDFTGCVIAWNSNNLDSKVGGNYNYLYRLFRKSNLKPFERDISTEIYQAGSTPCNGVEGFNCYFPLQSYGFQPTNGVGYQPYRVVVLSFELLHAPATVCGPKKSTNLVKNKCVNFNFNGLTGTGVLTESNKKFLPFQQFGRDIADTTDAVRDPQTLEILDITPCSFGGVSVITPGTNTSNQVAVLYQDVNCTEVPVAIHADQLTPTWRVYSTGSNVFQTRAGCLIGAEHVNNSYECDIPIGAGICASYQTQTNSPRRARSVASQSIIAYTMSLGAENSVAYSNNSIAIPTNFTISVTTEILPVSMTKTSVDCTMYICGDSTECSNLLLQYGSFCTQLNRALTGIAVEQDKNTQEVFAQVKQIYKTPPIKDFGGFNFSQILPDPSKPSKRSFIEDLLFNKVTLADAGFIKQYGDCLGDIAARDLICAQKFNGLTVLPPLLTDEMIAQYTSALLAGTITSGWTFCAGAALQIPFAMQMAYRFNGIGVTQNVLYENQKLIANQFNSAIGKIQDSLSSTASALGKLQDVVNQNAQALNTLVKQLSSNFGAISSVLNDILSRLDKVEAEVQIDRLITGRLQSLQTYVTQQLIRAAEIRASANLAATKMSECVCGQSKRVDFCGKGYHLMSFPQSAPHGVVFLHVTYVPAQEKNFTTAPAICHDGKAHFPREGVFVSNGTHWFVTQRNFYEPQIITTDNTFLSGNCDVVIGIVNNTVYDPLQPELDSFKEELDKYFKNHTSPDVDLGDISGINASVVNIQKEIDRLNEVAKNLNESLIDLQELGKYEQYIKGGGGSDIDPYKEFGSSYQLLNFLPLDFFPDLNALVDTATALYEEELTGREHCSPHHTAIRQALVCWDELTKLIAWMSSNITSEQVRTIIVNHVNDTWGLKVRQSLWFHLSCLTFGQHTVQEFLVSFGVWIRTPAPYRPPNAPILSTLPEHTVIC

SEQ ID NO: 7234 - protein, 1365 aa, Artificial Sequence
  SARS-CoV-2/USA/UT-00034/2020__EPI_ISL_417977 spike protein (1-1211)(G889C_L1034C) WhcAg construct
MFVFLVLLPLVSSQCVNLTTRTQLPPAYTNSFTRGVYYPDKVFRSSVLHSTQDLFLPFFSNVTWFHAIHVSGTNGTKRFDNPVLPFNDGVYFASTEKSNIIRGWIFGTTLDSKTQSLLIVNNATNVVIKVCEFQFCNDPFLGVYYYKNNKSWMESEFRVYSSANNCTFEYVSQPFLMDLEGKQGNFKNLREFVFKNIDGYFKIYSKHTPINLVRDLPQGFSALEPLVDLPIGINITRFQTLLALHRSYLTPGDSSSGWTAGAAAYYVGYLQPRTFLLKYNENGTITDAVDCALDPLSETKCTLKSFTVEKGIYQTSNFRVQPTESIVRFPNITNLCPFGEVFNATRFASVYAWNRKRISNCVADYSVLYNSASFSTFKCYGVSPTKLNDLCFTNVYADSFVIRGDEVRQIAPGQTGKIADYNYKLPDDFTGCVIAWNSNNLDSKVGGNYNYLYRLFRKSNLKPFERDISTEIYQAGSTPCNGVEGFNCYFPLQSYGFQPTNGVGYQPYRVVVLSFELLHAPATVCGPKKSTNLVKNKCVNFNFNGLTGTGVLTESNKKFLPFQQFGRDIADTTDAVRDPQTLEILDITPCSFGGVSVITPGTNTSNQVAVLYQGVNCTEVPVAIHADQLTPTWRVYSTGSNVFQTRAGCLIGAEHVNNSYECDIPIGAGICASYQTQTNSPRRARSVASQSIIAYTMSLGAENSVAYSNNSIAIPTNFTISVTTEILPVSMTKTSVDCTMYICGDSTECSNLLLQYGSFCTQLNRALTGIAVEQDKNTQEVFAQVKQIYKTPPIKDFGGFNFSQILPDPSKPSKRSFIEDLLFNKVTLADAGFIKQYGDCLGDIAARDLICAQKFNGLTVLPPLLTDEMIAQYTSALLAGTITSGWTFCAGAALQIPFAMQMAYRFNGIGVTQNVLYENQKLIANQFNSAIGKIQDSLSSTASALGKLQDVVNQNAQALNTLVKQLSSNFGAISSVLNDILSRLDKVEAEVQIDRLITGRLQSLQTYVTQQLIRAAEIRASANLAATKMSECVCGQSKRVDFCGKGYHLMSFPQSAPHGVVFLHVTYVPAQEKNFTTAPAICHDGKAHFPREGVFVSNGTHWFVTQRNFYEPQIITTDNTFVSGNCDVVIGIVNNTVYDPLQPELDSFKEELDKYFKNHTSPDVDLGDISGINASVVNIQKEIDRLNEVAKNLNESLIDLQELGKYEQYIKGGGGSDIDPYKEFGSSYQLLNFLPLDFFPDLNALVDTATALYEEELTGREHCSPHHTAIRQALVCWDELTKLIAWMSSNITSEQVRTIIVNHVNDTWGLKVRQSLWFHLSCLTFGQHTVQEFLVSFGVWIRTPAPYRPPNAPILSTLPEHTVIC

SEQ ID NO: 7235 - protein, 1365 aa, Artificial Sequence
  SARS-CoV-2/USA/UT-00033/2020__EPI_ISL_417976 spike protein (1-1211)(G889C_L1034C) WhcAg construct
MFVFLVLLPLVSSQCVNLTTRTQLPPAYTNSFTRGVYYPDKVFRSSVLHSTQDLFLPFFSNVTWFHAIHVSGTNGTKRFDNPVLPFNDGVYFASTEKSNIIRGWIFGTTLDSKTQSLLIVNNATNVVIKVCEFQFCNDPFLGVYYHKNNKSWMESEFRVYSSANNCTFEYVSQPFLMDLEGKQGNFKNLREFVFKNIDGYFKIYSKHTPINLVRDLPQGFSALEPLVDLPIGINITRFQTLLALHRSYLTPGDSSSGLTAGAAAYYVGYLQPRTFLLKYNENGTITDAVDCALDPLSETKCTLKSFTVEKGIYQTSNFRVQPTESIVRFPNITNLCPFGEVFNATRFASVYAWNRKRISNCVADYSVLYNSASFSTFKCYGVSPTKLNDLCFTNVYADSFVIRGDEVRQIAPGQTGKIADYNYKLPDDFTGCVIAWNSNNLDSKVGGNYNYLYRLFRKSNLKPFERDISTEIYQAGSTPCNGVEGFNCYFPLQSYGFQPTNGVGYQPYRVVVLSFELLHAPATVCGPKKSTNLVKNKCVNFNFNGLTGTGVLTESNKKFLPFQQFGRDIADTTDAVRDPQTLEILDITPCSFGGVSVITPGTNTSNQVAVLYQGVNCTEVPVAIHADQLTPTWRVYSTGSNVFQTRAGCLIGAEHVNNSYECDIPIGAGICASYQTQTNSPRRARSVASQSIIAYTMSLGAENSVAYSNNSIAIPTNFTISVTTEILPVSMTKTSVDCTMYICGDSTECSNLLLQYGSFCTQLNRALTGIAVEQDKNTQEVFAQVKQIYKTPPIKDFGGFNFSQILPDPSKPSKRSFIEDLLFNKVTLADAGFIKQYGDCLGDIAARDLICAQKFNGLTVLPPLLTDEMIAQYTSALLAGTITSGWTFCAGAALQIPFAMQMAYRFNGIGVTQNVLYENQKLIANQFNSAIGKIQDSLSSTASALGKLQDVVNQNAQALNTLVKQLSSNFGAISSVLNDILSRLDKVEAEVQIDRLITGRLQSLQTYVTQQLIRAAEIRASANLAATKMSECVCGQSKRVDFCGKGYHLMSFPQSAPHGVVFLHVTYVPAQEKNFTTAPAICHDGKAHFPREGVFVSNGTHWFVTQRNFYEPQIITTDNTFVSGNCDVVIGIVNNTVYDPLQPELDSFKEELDKYFKNHTSPDVDLGDISGINASVVNIQKEIDRLNEVAKNLNESLIDLQELGKYEQYIKGGGGSDIDPYKEFGSSYQLLNFLPLDFFPDLNALVDTATALYEEELTGREHCSPHHTAIRQALVCWDELTKLIAWMSSNITSEQVRTIIVNHVNDTWGLKVRQSLWFHLSCLTFGQHTVQEFLVSFGVWIRTPAPYRPPNAPILSTLPEHTVIC

SEQ ID NO: 7236 - protein, 1365 aa, Artificial Sequence
  SARS-CoV-2/USA/WI-13/2020__EPI_ISL_417516 spike protein (1-1211)(G889C_L1034C) WhcAg construct
MFVFLVLLPLVSSQCVNLTTRTQLPPAYTNSFTRGVYYPDKVFRSSVLHSTQDLFLPFFSNVTWFHAIHVSGTNGTKRFDNPVLPFNDGVYFASTEKSNIIRGWIFGTTLDSKTQSLLIVNNATNVVIKVCEFQFCNDPFLGVYYHKNNKSWMESEFRVYSSANNCTFEYVSQPFLMDLEGKQGNFKNLREFVFKNIDGYFKIYSKHTPINLVRDLPQGFSALEPLVDLPIGINITRFQTLLALHRSYLTPGDSSSGWTAGAAAYYVGYLQPRTFLLKYNENGTITDAVDCALDPLSETKCTLKSFTVEKGIYQTSNFRVLPTESIVRFPNITNLCPFGEVFNATRFASVYAWNRKRISNCVADYSVLYNSASFSTFKCYGVSPTKLNDLCFTNVYADSFVIRGDEVRQIAPGQTGKIADYNYKLPDDFTGCVIAWNSNNLDSKVGGNYNYLYRLFRKSNLKPFERDISTEIYQAGSTPCNGVEGFNCYFPLQSYGFQPTNGVGYQPYRVVVLSFELLHAPATVCGPKKSTNLVKNKCVNFNFNGLTGTGVLTESNKKFLPFQQFGRDIADTTDAVRDPQTLEILDITPCSFGGVSVITPGTNTSNQVAVLYQGVNCTEVPVAIHADQLTPTWRVYSTGSNVFQTRAGCLIGAEHVNNSYECDIPIGAGICASYQTQTNSPRRARSVASQSIIAYTMSLGAENSVAYSNNSIAIPTNFTISVTTEILPVSMTKTSVDCTMYICGDSTECSNLLLQYGSFCTQLNRALTGIAVEQDKNTQEVFAQVKQIYKTPPIKDFGGFNFSQILPDPSKPSKRSFIEDLLFNKVTLADAGFIKQYGDCLGDIAARDLICAQKFNGLTVLPPLLTDEMIAQYTSALLAGTITSGWTFCAGAALQIPFAMQMAYRFNGIGVTQNVLYENQKLIANQFNSAIGKIQDSLSSTASALGKLQDVVNQNAQALNTLVKQLSSNFGAISSVLNDILSRLDKVEAEVQIDRLITGRLQSLQTYVTQQLIRAAEIRASANLAATKMSECVCGQSKRVDFCGKGYHLMSFPQSAPHGVVFLHVTYVPAQEKNFTTAPAICHDGKAHFPREGVFVSNGTHWFVTQRNFYEPQIITTDNTFVSGNCDVVIGIVNNTVYDPLQPELDSFKEELDKYFKNHTSPDVDLGDISGINASVVNIQKEIDRLNEVAKNLNESLIDLQELGKYEQYIKGGGGSDIDPYKEFGSSYQLLNFLPLDFFPDLNALVDTATALYEEELTGREHCSPHHTAIRQALVCWDELTKLIAWMSSNITSEQVRTIIVNHVNDTWGLKVRQSLWFHLSCLTFGQHTVQEFLVSFGVWIRTPAPYRPPNAPILSTLPEHTVIC

SEQ ID NO: 7237 - protein, 1364 aa, Artificial Sequence
  SARS-CoV-2/India/1-27/2020__EPI_ISL_413522 spike protein (1-1210)(G888C_L1033C) WhcAg construct
MFVFLVLLPLVSSQCVNLTTRTQLPPAYTNSFTRGVYYPDKVFRSSVLHSTQDLFLPFFSNVTWFHAIHVSGTNGTKRFDNPVLPFNDGVYFASTEKSNIIRGWIFGTTLDSKTQSLLIVNNATNVVIKVCEFQFCNDPFLGVYHKNNKSWMESEFRVYSSANNCTFEYVSQPFLMDLEGKQGNFKNLREFVFKNIDGYFKIYSKHTPINLVRDLPQGFSALEPLVDLPIGINITRFQTLLALHRSYLTPGDSSSGWTAGAAAYYVGYLQPRTFLLKYNENGTITDAVDCALDPLSETKCTLKSFTVEKGIYQTSNFRVQPTESIVRFPNITNLCPFGEVFNATRFASVYAWNRKRISNCVADYSVLYNSASFSTFKCYGVSPTKLNDLCFTNVYADSFVIRGDEVIQIAPGQTGKIADYNYKLPDDFTGCVIAWNSNNLDSKVGGNYNYLYRLFRKSNLKPFERDISTEIYQAGSTPCNGVEGFNCYFPLQSYGFQPTNGVGYQPYRVVVLSFELLHAPATVCGPKKSTNLVKNKCVNFNFNGLTGTGVLTESNKKFLPFQQFGRDIADTTDAVRDPQTLEILDITPCSFGGVSVITPGTNTSNQVAVLYQDVNCTEVPVAIHADQLTPTWRVYSTGSNVFQTRAGCLIGAEHVNNSYECDIPIGAGICASYQTQTNSPRRARSVASQSIIAYTMSLGAENSVAYSNNSIAIPTNFTISVTTEILPVSMTKTSVDCTMYICGDSTECSNLLLQYGSFCTQLNRALTGIAVEQDKNTQEVFAQVKQIYKTPPIKDFGGFNFSQILPDPSKPSKRSFIEDLLFNKVTLADAGFIKQYGDCLGDIAARDLICAQKFNGLTVLPPLLTDEMIAQYTSALLAGTITSGWTFCAGAALQIPFAMQMAYRFNGIGVTQNVLYENQKLIANQFNSAIGKIQDSLSSTASALGKLQDVVNQNAQALNTLVKQLSSNFGAISSVLNDILSRLDKVEAEVQIDRLITGRLQSLQTYVTQQLIRAAEIRASANLAATKMSECVCGQSKRVDFCGKGYHLMSFPQSAPHGVVFLHVTYVPAQEKNFTTAPAICHDGKAHFPREGVFVSNGTHWFVTQRNFYEPQIITTDNTFVSGNCDVVIGIVNNTVYDPLQPELDSFKEELDKYFKNHTSPDVDLGDISGINASVVNIQKEIDRLNEVAKNLNESLIDLQELGKYEQYIKGGGGSDIDPYKEFGSSYQLLNFLPLDFFPDLNALVDTATALYEEELTGREHCSPHHTAIRQALVCWDELTKLIAWMSSNITSEQVRTIIVNHVNDTWGLKVRQSLWFHLSCLTFGQHTVQEFLVSFGVWIRTPAPYRPPNAPILSTLPEHTVIC

SEQ ID NO: 7238 - protein, 1359 aa, Artificial Sequence
  SARS-CoV-2/pangolin/Guangxi/P4L/2017__EPI_ISL_410538 spike protein (1-1205)(G883C_L1028C) WhcAg construct
MFVFLFVLPLVSSQCVNLTTRTGIPPGYTNSSTRGVYYPDKVFRSSILHLTQDLFLPFFSNVTWFNTINYQGGFKKFDNPVLPFNDGVYFASTEKSNIIRGWIFGTTLDARTQSLLIVNNATNVVIKVCEFQFCTDPFLGVYYHNNNKTWVENEFRVYSSANNCTFEYISQPFLMDLEGKQGNFKNLREFVFKNVDGYFKIYSKHTPIDLVRDLPRGFAALEPLVDLPIGINITRFQTLLALHRSYLTPGNLESGWTTGAAAYYVGYLQQRTFLLSYNQNGTITDAVDCSLDPLSETKCTLKSLTVEKGIYQTSNFRVQPTISIVRFPNITNLCPFGEVFNASKFASVYAWNRKRISNCVADYSVLYNSTSFSTFKCYGVSPTKLNDLCFTNVYADSFVVKGDEVRQIAPGQTGVIADYNYKLPDDFTGCVIAWNSVKQDALTGGNYGYLYRLFRKSKLKPFERDISTEIYQAGSTPCNGQVGLNCYYPLERYGFHPTTGVNYQPFRVVVLSFELLNGPATVCGPKLSTTLVKDKCVNFNFNGLTGTGVLTTSKKQFLPFQQFGRDISDTTDAVRDPQTLEILDITPCSFGGVSVITPGTNTSNQVAVLYQDVNCTEVPMAIHAEQLTPAWRVYSAGANVFQTRAGCLVGAEHVNNSYECDIPVGAGICASYHSMSSLRSVNQRSIIAYTMSLGAENSVAYSNNSIAIPTNFTISVTTEILPVSMTKTSVDCTMYICGDSIECSNLLLQYGSFCTQLNRALTGIAVEQDKNTQEVFAQVKQIYKTPPIKDFGGFNFSQILPDPSKPSKRSFIEDLLFNKVTLADAGFIKQYGDCLGDIAARDLICAQKFNGLTVLPPLLTDEMIAQYTSALLAGTITSGWTFCAGAALQIPFAMQMAYRFNGIGVTQNVLYENQKLIANQFNSAIGKIQDSLSSTASALGKLQDVVNQNAQALNTLVKQLSSNFGAISSVLNDILSRLDKVEAEVQIDRLITGRLQSLQTYVTQQLIRAAEIRASANLAATKMSECVCGQSKRVDFCGKGYHLMSFPQSAPHGVVFLHVTYVPAQEKNFTTAPAICHEGKAHFPREGVFVSNGTHWFITQRNFYEPQIITTDNTFVSGSCDVVIGIVNNTVYDPLQPELDSFKEELDKYFKNHTSPDVDLGDISGINASVVNIQKEIDRLNEVAKNLNESPIDLQELGKYEQYIKGGGGSDIDPYKEFGSSYQLLNFLPLDFFPDLNALVDTATALYEEELTGREHCSPHHTAIRQALVCWDELTKLIAWMSSNITSEQVRTIIVNHVNDTWGLKVRQSLWFHLSCLTFGQHTVQEFLVSFGVWIRTPAPYRPPNAPILSTLPEHTVIC

SEQ ID NO: 7239 - protein, 1359 aa, Artificial Sequence
  SARS-CoV-2/pangolin/Guangxi/P5L/2017__EPI_ISL_410540 spike protein (1-1205)(G883C_L1028C) WhcAg construct
MFVFLFVLPLVSSQCVNLTTRTGIPPGYTNSSTRGVYYPDKVFRSSILHLTQDLFLPFFSNVTWFNTINYQGGFKKFDNPVLPFNDGVYFASTEKSNIIRGWIFGTTLDARTQSLLIVNNATNVVIKVCEFQFCTDPFLGVYYHNNNKTWVENEFRVYSSANNCTFEYISQPFLMDLEGKQGNFKNLREFVFKNVDGYFKIYSKHTPIDLVRDLPRGFAALEPLVDLPIGINITRFQTLLALHRSYLTPGKLESGWTTGAAAYYVGYLQQRTFLLSYNQNGTITDAVDCSLDPLSETKCTLKSLTVEKGIYQTSNFRVQPTISIVRFPNITNLCPFGEVFNASKFASVYAWNRKRISNCVADYSVLYNSTSFSTFKCYGVSPTKLNDLCFTNVYADSFVVKGDEVRQIAPGQTGVIADYNYKLPDDFTGCVIAWNSVKQDALTGGNYGYLYRLFRKSKLKPFERDISTEIYQAGSTPCNGQVGLNCYYPLERYGFHPTTGVNYQPFRVVVLSFELLNGPATVCGPKLSTTLVKDKCVNFNFNGLTGTGVLTTSKKQFLPFQQFGRDISDTTDAVRDPQTLEILDITPCSFGGVSVITPGTNTSNQVAVLYQDVNCTEVPMAIHAEQLTPAWRVYSAGANVFQTRAGCLVGAEHVNNSYECDIPVGAGICASYHSMSSFRSVNQRSIIAYTMSLGAENSVAYSNNSIAIPTNFTISVTTEILPVSMTKTSVDCTMYICGDSIECSNLLLQYGSFCTQLNRALTGIAVEQDKNTQEVFAQVKQIYKTPPIKDFGGFNFSQILPDPSKPSKRSFIEDLLFNKVTLADAGFIKQYGDCLGDIAARDLICAQKFNGLTVLPPLLTDEMIAQYTSALLAGTITSGWTFCAGAALQIPFAMQMAYRFNGIGVTQNVLYENQKLIANQFNSAIGKIQDSLSSTASALGKLQDVVNQNAQALNTLVKQLSSNFGAISSVLNDILSRLDKVEAEVQIDRLITGRLQSLQTYVTQQLIRAAEIRASANLAATKMSECVCGQSKRVDFCGKGYHLMSFPQSAPHGVVFLHVTYVPAQEKNFTTAPAICHEGKAHFPREGVFVSNGTHWFITQRNFYEPQIITTDNTFVSGSCDVVIGIVNNTVYDPLQPELDSFKEELDKYFKNHTSPDVDLGDISGINASVVNIQKEIDRLNEVAKNLNESLIDLQELGKYEQYIKGGGGSDIDPYKEFGSSYQLLNFLPLDFFPDLNALVDTATALYEEELTGREHCSPHHTAIRQALVCWDELTKLIAWMSSNITSEQVRTIIVNHVNDTWGLKVRQSLWFHLSCLTFGQHTVQEFLVSFGVWIRTPAPYRPPNAPILSTLPEHTVIC

SEQ ID NO: 7240 - protein, 1359 aa, Artificial Sequence
  SARS-CoV-2/pangolin/Guangxi/P5E/2017__EPI_ISL_410541 spike protein (1-1205)(G883C_L1028C) WhcAg construct
MFVFLFVLPLVSSQCVNLTTRTGIPPGYTNSSTRGVYYPDKVFRSSILHLTQDLFLPFFSNVTWFNTITYQGGSKKFDNPVLPFNDGVYFASTEKSNIIRGWIFGTTLDARTQSLLIVNNATNVVIKVCEFQFCTDPFLGVYYHNNNKTWVENEFRVYSSANNCTFEYISQPFLMDLEGKQGNFKNLREFVFKNVDGYFKIYSKHTPIDLVRDLPRGFAALEPLVDLPIGINITRFQTLLALHRSYLTPGKLESGWTTGAAAYYVGYLQQRTFLLSYNQNGTITDAVDCSLDPLSETKCTLKSLTVEKGIYQTSNFRVQPTISIVRFPNITNLCPFGEVFNASKFASVYAWNRKRISNCVADYSVLYNSTSFSTFKCYGVSPTKLNDLCFTNVYADSFVVKGDEVRQIAPGQTGVIADYNYKLPDDFTGCVIAWNSVKQDALTGDNYGYLYRLFRKSKLKPFERDISTEIYQAGSTPCNGQVGLNCYYPLERYGFHPTTGVNYQPFRVVVLSFELLNGPATVCGPKLSTTLVKDKCVNFNFNGLTGTGVLTTSKKQFLPFQQFGRDISDTTDAVRDPQTLEILDITPCSFGGVSVITPGTNTSNQVAVLYQDVNCTEVPMAIHAEQLTPAWRVYSAGANVFQTRAGCLVGAEHVNNSYECDIPVGAGICASYHSMSSFRSVNQRSIIAYTMSLGAENSVAYSNNSIAIPTNFTISVTTEILPVSMTKTSVDCTMYICGDSIECSNLLLQYGSFCTQLNRALTGIAVEQDKNTQEVFAQVKQIYKTPPIKDFGGFNFSQILPDPSKPSKRSFIEDLLFNKVTLADAGFIKQYGDCLGDIAARDLICAQKFNGLTVLPPLLTDEMIAQYTSALLAGTITSGWTFCAGAALQIPFAMQMAYRFNGIGVTQNVLYENQKLIANQFNSAIGKIQDSLSSTASALGKLQDVVNQNAQALNTLVKQLSSNFGAISSVLNDILSRLDKVEAEVQIDRLITGRLQSLQTYVTQQLIRAAEIRASANLAATKMSECVCGQSKRVDFCGKGYHLMSFPQSAPHGVVFLHVTYVPAQEKNFTTAPAICHEGKAHFPREGVFVSNGTHWFITQRNFYEPQIITTDNTFVSGSCDVVIGIVNNTVYDPLQPELDSFKEELDKYFKNHTSPDVDLGDISGINASVVNIQKEIDRLNEVAKNLNESLIDLQELGKYEQYIKGGGGSDIDPYKEFGSSYQLLNFLPLDFFPDLNALVDTATALYEEELTGREHCSPHHTAIRQALVCWDELTKLIAWMSSNITSEQVRTIIVNHVNDTWGLKVRQSLWFHLSCLTFGQHTVQEFLVSFGVWIRTPAPYRPPNAPILSTLPEHTVIC

SEQ ID NO: 7241 - protein, 1357 aa, Artificial Sequence
  SARS-CoV-2/pangolin/Guangxi/P1E/2017__EPI_ISL_410539 spike protein (1-1203)(G881C_L1026C) WhcAg construct
MFVFLFVLPLVSSQCVNLTTRTGIQPGYTNSSTRGVYYPDKVFRSSILHLTQDLFLPFFSNVTWFNTINYQGGFKKFDNPVLPFNDGVYFASTEKSNIIRGWIFGTTLDARTQSLLIVNNATNVVIKVCEFQFCTDPFLGVYYHNNNKTWVENEFRVYSSANNCTFEYISQPFLMDLEGKQGNFKNLREFVFKNVDGYFKIYSKHTPIDLVRDLPRGFAALEPLVDLPIGINITRFQTLLALHRSYLTPGKLESGWTTGAAAYYVGYLQQRTFLLSYNQNGTITDAVDCSLDPLSETKCTLKSLTVEKGIYQTSNFRVQPTISIVRFPNITNLCPFGEVFNASKFASVYAWNRKRISNCVADYSVLYNSTSFSTFKCYGVSPTKLNDLCFTNVYADSFVVKGDEVRQIAPGQTGVIADYNYKLPDDFTGCVIAWNSVKQDALTGGNYLYRLFRKSKLKPFERDISTEIYQAGSTPCNGQVGLNCYYPLERYGFHPTTGVNYQPFRVVVLSFELLNGPATVCGPKLSTTLVKDKCVNFNFNGLTGTGVLTTSKKQFLPFQQFGRDISDTTDAVRDPQTLEILDITPCSFGGVSVITPGTNTSNQVAVLYQDVNCTEVPMAIHAEQLTPAWRVYSAGANVFQTRAGCLVGAEHVNNSYECDIPVGAGICASYHSMSSLRSVNQRSIIAYTMSLGAENSVAYSNNSIAIPTNFTISVTTEILPVSMTKTSVDCTMYICGDSIECSNLLLQYGSFCTQLNRALTGIAVEQDKNTQEVFAQVKQIYKTPPIKDFGGFNFSQILPDPSKPSKRSFIEDLLFNKVTLADAGFIKQYGDCLGDIAARDLICAQKFNGLTVLPPLLTDEMIAQYTSALLAGTITSGWTFCAGAALQIPFAMQMAYRFNGIGVTQNVLYENQKLIANQFNSAIGKIQDSLSSTASALGKLQDVVNQNAQALNTLVKQLSSNFGAISSVLNDILSRLDKVEAEVQIDRLITGRLQSLQTYVTQQLIRAAEIRASANLAATKMSECVCGQSKRVDFCGKGYHLMSFPQSAPHGVVFLHVTYVPAQEKNFTTAPAICHEGKAHFPREGVFVSNGTHWFITQRNFYEPQIITTDNTFVSGSCDVVIGIVNNTVYDPLQPELDSFKEELDKYFKNHTSPDVDLGDISGINASVVNIQKEIDRLNEVAKNLNESLIDLQELGKYEQYIKGGGGSDIDPYKEFGSSYQLLNFLPLDFFPDLNALVDTATALYEEELTGREHCSPHHTAIRQALVCWDELTKLIAWMSSNITSEQVRTIIVNHVNDTWGLKVRQSLWFHLSCLTFGQHTVQEFLVSFGVWIRTPAPYRPPNAPILSTLPEHTVIC

SEQ ID NO: 7242 - protein, 1365 aa, Artificial Sequence
  SARS-CoV-2/Wuhan/WIV05/2019__EPI_ISL_402128 spike protein (1-1211)(I909C_Y1047C) WhcAg construct
MFVFLVLLPLVSSQCVNLTTRTQLPPAYTNSFTRGVYYPDKVFRSSVLHSTQDLFLPFFSNVTWFHAIHVSGTNGTKRFDNPVLPFNDGVYFASTEKSNIIRGWIFGTTLDSKTQSLLIVNNATNVVIKVCEFQFCNDPFLGVYYHKNNKSWMESEFRVYSSANNCTFEYVSQPFLMDLEGKQGNFKNLREFVFKNIDGYFKIYSKHTPINLVRDLPQGFSALEPLVDLPIGINITRFQTLLALHRSYLTPGDSSSGWTAGAAAYYVGYLQPRTFLLKYNENGTITDAVDCALDPLSETKCTLKSFTVEKGIYQTSNFRVQPTESIVRFPNITNLCPFGEVFNATRFASVYAWNRKRISNCVADYSVLYNSASFSTFKCYGVSPTKLNDLCFTNVYADSFVIRGDEVRQIAPGQTGKIADYNYKLPDDFTGCVIAWNSNNLDSKVGGNYNYLYRLFRKSNLKPFERDISTEIYQAGSTPCNGVEGFNCYFPLQSYGFQPTNGVGYQPYRVVVLSFELLHAPATVCGPKKSTNLVKNKCVNFNFNGLTGTGVLTESNKKFLPFQQFGRDIADTTDAVRDPQTLEILDITPCSFGGVSVITPGTNTSNQVAVLYQDVNCTEVPVAIHADQLTPTWRVYSTGSNVFQTRAGCLIGAEHVNNSYECDIPIGAGICASYQTQTNSPRRARSVASQSIIAYTMSLGAENSVAYSNNSIAIPTNFTISVTTEILPVSMTKTSVDCTMYICGDSTECSNLLLQYGSFCTQLNRALTGIAVEQDKNTQEVFAQVKQIYKTPPIKDFGGFNFSQILPDPSKPSKRSFIEDLLFNKVTLADAGFIKQYGDCLGDIAARDLICAQKFNGLTVLPPLLTDEMIAQYTSALLAGTITSGWTFGAGAALQIPFAMQMAYRFNGCGVTQNVLYENQKLIANQFNSAIGKIQDSLSSTASALGKLQDVVNQNAQALNTLVKQLSSNFGAISSVLNDILSRLDKVEAEVQIDRLITGRLQSLQTYVTQQLIRAAEIRASANLAATKMSECVLGQSKRVDFCGKGCHLMSFPQSAPHGVVFLHVTYVPAQEKNFTTAPAICHDGKAHFPREGVFVSNGTHWFVTQRNFYEPQIITTDNTFVSGNCDVVIGIVNNTVYDPLQPELDSFKEELDKYFKNHTSPDVDLGDISGINASVVNIQKEIDRLNEVAKNLNESLIDLQELGKYEQYIKGGGGSDIDPYKEFGSSYQLLNFLPLDFFPDLNALVDTATALYEEELTGREHCSPHHTAIRQALVCWDELTKLIAWMSSNITSEQVRTIIVNHVNDTWGLKVRQSLWFHLSCLTFGQHTVQEFLVSFGVWIRTPAPYRPPNAPILSTLPEHTVIC

SEQ ID NO: 7243 - protein, 1361 aa, Artificial Sequence
  SARS-CoV-2/bat/Yunnan/RaTG13/2013__EPI_ISL_402131 spike protein (1-1207)(I905C_Y1043C) WhcAg construct
MFVFLVLLPLVSSQCVNLTTRTQLPPAYTNSSTRGVYYPDKVFRSSVLHLTQDLFLPFFSNVTWFHAIHVSGTNGIKRFDNPVLPFNDGVYFASTEKSNIIRGWIFGTTLDSKTQSLLIVNNATNVVIKVCEFQFCNDPFLGVYYHKNNKSWMESEFRVYSSANNCTFEYVSQPFLMDLEGKQGNFKNLREFVFKNIDGYFKIYSKHTPINLVRDLPPGFSALEPLVDLPIGINITRFQTLLALHRSYLTPGDSSSGWTAGAAAYYVGYLQPRTFLLKYNENGTITDAVDCALDPLSETKCTLKSFTVEKGIYQTSNFRVQPTDSIVRFPNITNLCPFGEVFNATTFASVYAWNRKRISNCVADYSVLYNSTSFSTFKCYGVSPTKLNDLCFTNVYADSFVITGDEVRQIAPGQTGKIADYNYKLPDDFTGCVIAWNSKHIDAKEGGNFNYLYRLFRKANLKPFERDISTEIYQAGSKPCNGQTGLNCYYPLYRYGFYPTDGVGHQPYRVVVLSFELLNAPATVCGPKKSTNLVKNKCVNFNFNGLTGTGVLTESNKKFLPFQQFGRDIADTTDAVRDPQTLEILDITPCSFGGVSVITPGTNASNQVAVLYQDVNCTEVPVAIHADQLTPTWRVYSTGSNVFQTRAGCLIGAEHVNNSYECDIPIGAGICASYQTQTNSRSVASQSIIAYTMSLGAENSVAYSNNSIAIPTNFTISVTTEILPVSMTKTSVDCTMYICGDSTECSNLLLQYGSFCTQLNRALTGIAVEQDKNTQEVFAQVKQIYKTPPIKDFGGFNFSQILPDPSKPSKRSFIEDLLFNKVTLADAGFIKQYGDCLGDIAARDLICAQKFNGLTVLPPLLTDEMIAQYTSALLAGTITSGWTFGAGAALQIPFAMQMAYRFNGCGVTQNVLYENQKLIANQFNSAIGKIQDSLSSTASALGKLQDVVNQNAQALNTLVKQLSSNFGAISSVLNDILSRLDKVEAEVQIDRLITGRLQSLQTYVTQQLIRAAEIRASANLAATKMSECVLGQSKRVDFCGKGCHLMSFPQSAPHGVVFLHVTYVPAQEKNFTTAPAICHDGKAHFPREGVFVSNGTHWFVTQRNFYEPQIITTDNTFVSGSCDVVIGIVNNTVYDPLQPELDSFKEELDKYFKNHTSPDVDLGDISGINASVVNIQKEIDRLNEVAKNLNESLIDLQELGKYEQYIKGGGGSDIDPYKEFGSSYQLLNFLPLDFFPDLNALVDTATALYEEELTGREHCSPHHTAIRQALVCWDELTKLIAWMSSNITSEQVRTIIVNHVNDTWGLKVRQSLWFHLSCLTFGQHTVQEFLVSFGVWIRTPAPYRPPNAPILSTLPEHTVIC

SEQ ID NO: 7244 - protein, 1365 aa, Artificial Sequence
  SARS-CoV-2/Wuhan/HBCDC-HB-01/2019__EPI_ISL_402132 spike protein (1-1211)(I909C_Y1047C) WhcAg construct
MFVFLVLLPLVSSQCVNLTTRTQLPPAYTNSITRGVYYPDKVFRSSVLHSTQDLFLPFFSNVTWFHAIHVSGTNGTKRFDNPVLPFNDGVYFASTEKSNIIRGWIFGTTLDSKTQSLLIVNNATNVVIKVCEFQFCNDPFLGVYYHKNNKSWMESEFRVYSSANNCTFEYVSQPFLMDLEGKQGNFKNLREFVFKNIDGYFKIYSKHTPINLVRDLPQGFSALEPLVDLPIGINITRFQTLLALHRSYLTPGDSSSGWTAGAAAYYVGYLQPRTFLLKYNENGTITDAVDCALDPLSETKCTLKSFTVEKGIYQTSNFRVQPTESIVRFPNITNLCPFGEVFNATRFASVYAWNRKRISNCVADYSVLYNSASFSTFKCYGVSPTKLNDLCFTNVYADSFVIRGDEVRQIAPGQTGKIADYNYKLPDDFTGCVIAWNSNNLDSKVGGNYNYLYRLFRKSNLKPFERDISTEIYQAGSTPCNGVEGFNCYFPLQSYGFQPTNGVGYQPYRVVVLSFELLHAPATVCGPKKSTNLVKNKCVNFNFNGLTGTGVLTESNKKFLPFQQFGRDIADTTDAVRDPQTLEILDITPCSFGGVSVITPGTNTSNQVAVLYQDVNCTEVPVAIHADQLTPTWRVYSTGSNVFQTRAGCLIGAEHVNNSYECDIPIGAGICASYQTQTNSPRRARSVASQSIIAYTMSLGAENSVAYSNNSIAIPTNFTISVTTEILPVSMTKTSVDCTMYICGDSTECSNLLLQYGSFCTQLNRALTGIAVEQDKNTQEVFAQVKQIYKTPPIKDFGGFNFSQILPDPSKPSKRSFIEDLLFNKVTLADAGFIKQYGDCLGDIAARDLICAQKFNGLTVLPPLLTDEMIAQYTSALLAGTITSGWTFGAGAALQIPFAMQMAYRFNGCGVTQNVLYENQKLIANQFNSAIGKIQDSLSSTASALGKLQDVVNQNAQALNTLVKQLSSNFGAISSVLNDILSRLDKVEAEVQIDRLITGRLQSLQTYVTQQLIRAAEIRASANLAATKMSECVLGQSKRVDFCGKGCHLMSFPQSAPHGVVFLHVTYVPAQEKNFTTAPAICHDGKAHFPREGVFVSNGTHWFVTQRNFYEPQIITTDNTFVSGNCDVVIGIVNNTVYDPLQPELDSFKEELDKYFKNHTSPDVDLGDISGINASVVNIQKEIDRLNEVAKNLNESLIDLQELGKYEQYIKGGGGSDIDPYKEFGSSYQLLNFLPLDFFPDLNALVDTATALYEEELTGREHCSPHHTAIRQALVCWDELTKLIAWMSSNITSEQVRTIIVNHVNDTWGLKVRQSLWFHLSCLTFGQHTVQEFLVSFGVWIRTPAPYRPPNAPILSTLPEHTVIC

SEQ ID NO: 7245 - protein, 1365 aa, Artificial Sequence
  SARS-CoV-2/Guangdong/20SF028/2020__EPI_ISL_403936 spike protein (1-1211)(I909C_Y1047C) WhcAg construct
MFVFLVLLPLVSSQCVNLTTRTQLPPAYTNSFTRGVYYPDKVFRSSVLYSTQDLFLPFFSNVTWFHAIHVSGTNGTKRFDNPVLPFNDGVYFASTEKSNIIRGWIFGTTLDSKTQSLLIVNNATNVVIKVCEFQFCNDPFLGVYYHKNNKSWMESEFRVYSSANNCTFEYVSQPFLMDLEGKQGNFKNLREFVFKNIDGYFKIYSKHTPINLVRDLPQGFSALEPLVDLPIGINITRFQTLLALHRSYLTPGDSSSGWTAGAAAYYVGYLQPRTFLLKYNENGTITDAVDCALDPLSETKCTLKSFTVEKGIYQTSNFRVQPTESIVRFPNITNLCPFGEVFNATRFASVYAWNRKRISNCVADYSVLYNSASFSTFKCYGVSPTKLNDLCFTNVYADSFVIRGDEVRQIAPGQTGKIADYNYKLPDDFTGCVIAWNSNNLDSKVGGNYNYLYRLFRKSNLKPFERDISTEIYQAGSTPCNGVEGFNCYFPLQSYGFQPTNGVGYQPYRVVVLSFELLHAPATVCGPKKSTNLVKNKCVNFNFNGLTGTGVLTESNKKFLPFQQFGRDIADTTDAVRDPQTLEILDITPCSFGGVSVITPGTNTSNQVAVLYQDVNCTEVPVAIHADQLTPTWRVYSTGSNVFQTRAGCLIGAEHVNNSYECDIPIGAGICASYQTQTNSPRRARSVASQSIIAYTMSLGAENSVAYSNNSIAIPTNFTISVTTEILPVSMTKTSVDCTMYICGDSTECSNLLLQYGSFCTQLNRALTGIAVEQDKNTQEVFAQVKQIYKTPPIKDFGGFNFSQILPDPSKPSKRSFIEDLLFNKVTLADAGFIKQYGDCLGDIAARDLICAQKFNGLTVLPPLLTDEMIAQYTSALLAGTITSGWTFGAGAALQIPFAMQMAYRFNGCGVTQNVLYENQKLIANQFNSAIGKIQDSLSSTASALGKLQDVVNQNAQALNTLVKQLSSNFGAISSVLNDILSRLDKVEAEVQIDRLITGRLQSLQTYVTQQLIRAAEIRASANLAATKMSECVLGQSKRVDFCGKGCHLMSFPQSAPHGVVFLHVTYVPAQEKNFTTAPAICHDGKAHFPREGVFVSNGTHWFVTQRNFYEPQIITTDNTFVSGNCDVVIGIVNNTVYDPLQPELDSFKEELDKYFKNHTSPDVDLGDISGINASVVNIQKEIDRLNEVAKNLNESLIDLQELGKYEQYIKGGGGSDIDPYKEFGSSYQLLNFLPLDFFPDLNALVDTATALYEEELTGREHCSPHHTAIRQALVCWDELTKLIAWMSSNITSEQVRTIIVNHVNDTWGLKVRQSLWFHLSCLTFGQHTVQEFLVSFGVWIRTPAPYRPPNAPILSTLPEHTVIC

SEQ ID NO: 7246 - protein, 1365 aa, Artificial Sequence
  SARS-CoV-2/Shenzhen/SZTH-001/2020__EPI_ISL_406592 spike protein (1-1211)(I909C_Y1047C) WhcAg construct
MFVFLVLLPLVSSQCVNLTTRTQLPPAYTNSFTRGVYYPDKVFRSSVLHSTQDLFLPFFSNVTWFHAIHVSGTNGTKRFDNPVLPFNDGVYFASTEKSNIIRGWIFGTTLDSKTQSLLIVNNATNVVIKVCEFQFCNDPFLGVYYHKNNKSWMESEFRVYSSANNCTFEYVSQPFLMDLEGKQGNFKNLREFVFKNIDGYFKIYSKHTPINLVRDLPQGFSALEPLVDLPIGINITRFQTLLALHRSYLTPGDSSSGWTAGAAAYYVGYLQPRTFLLKYNENGTITDAVDCALDPLSETKCTLKSFTVEKGIYQTSNFRVQPTESIVRFPNITNLCPFGEVFNATRFASVYAWNRKRISNCVADYSVLYNSASFSTFKCYGVSPTKLNDLCFTNVYADSFVIRGDEVRQIAPGQTGKIADYNYKLPDDFTGCVIAWNSNNLDSKVGGNYNYLYRLFRKSNLKPFERDISTEIYQAGSTPCNGVEGFNCYFPLQSYGFQPTNGVGYQPYRVVVLSFELLHAPATVCGPKKSTNLVKNKCVNFNFNGLTGTGVLTESNKKFLPFQQFGRDIADTTDAVRDPQTLEILDITPCSFGGVSVITPGTNTSNQVAVLYQDVNCTEVPVAIHADQLTPTWRVYSTGSNVFQTRAGCLIGAEHVNNSYECDIPIGAGICASYQTQTNSPRRARSVASQSIIAYTMSLGAENSVAYSNNSIAIPTNFTISVTTEILPVSMTKTSVDCTMYICGDSTECSNLLLQYGSFCTQLNRALTGIAVEQDKNTQEVFAQVKQIYKTPPIKDFGGFNFSQILPDPSKPSKRSFIEDLLFNKVTLADAGFIKQYGDCLGDIAARDLICAQKFNGLTVLPPLLTDEMIAQYTSALLAGTITSGWTFGAGAALQIPFAMQMAYRFNGCGVTQNVLYENQKLIANQFNSAIGKIQDSLSSTASALGKLQDVVNQNAQALNTLVKQLSSNFGAISSVLNDILSRLDKVEAEVQIDRLITGRLQSLQTYVTQQLIRAAEIRASANLAATKMSECVLGQSKRVDFCGKGCHLMSFPQSAPHGVVFLHVTYVPAQEKNFTTAPAICHDGKAHFPREGVFVSNGTHWFVTQRNFYEPQIITTDNTFVSGNCDVLIGIVNNTVYDPLQPELDSFKEELDKYFKNHTSPDVDLGDISGINASVVNIQKEIDRLNEVAKNLNESLIDLQELGKYEQYIKGGGGSDIDPYKEFGSSYQLLNFLPLDFFPDLNALVDTATALYEEELTGREHCSPHHTAIRQALVCWDELTKLIAWMSSNITSEQVRTIIVNHVNDTWGLKVRQSLWFHLSCLTFGQHTVQEFLVSFGVWIRTPAPYRPPNAPILSTLPEHTVIC

SEQ ID NO: 7247 - protein, 1365 aa, Artificial Sequence
  SARS-CoV-2/Shenzhen/SZTH-004/2020__EPI_ISL_406595 spike protein (1-1211)(I909C_Y1047C) WhcAg construct
MFVFLVLLPLVSSQCVNLTTRTQLPPAYTNSFTRGVYYPDKVFRSSVLHSTQDLFLPFFSNVTWFHAIHVSGTNGTKRFDNPVLPFNDGVYFASTEKSNIIRGWIFGTTLDSKTQSLLIVNNATNVVIKVCEFQFCNDPFLGVYYHKNNKSWMESEFRVYSSANNCTFEYVSQPFLMDLEGKQGNFKNLREFVFKNIDGYFKIYSKHTPINLVRDLPQGFSALEPLVDLPIGINITRFQTLLALHRSYLTPGDSSSGWTAGAAAYYVGYLQPRTFLLKYNENGTITDAVDCALDPLSETKCTLKSFTVEKGIYQTSNFRVQPTESIVRFPNITNLCPFGEVFNATRFASVYAWDRKRISNCVAYYSVLYNSASFSTFKCYGVSPTKLNDLCFTNVYADSFVIRGDEVRQIAPGQTGKIADYNYKLPDDFTGCVIAWNSNNLDSKVGGNYNYLYRLFRKSNLKPFERDISTEIYQAGSTPCNGVEGFNCYFPLQSYGFQPTNGVGYQPYRVVVLSFELLHAPATVCGPKKSTNLVKNKCVNFNFNGLTGTGVLTESNKKFLPFQQFGRDIADTTDAVRDPQTLEILDITPCSFGGVSVITPGTNTSNQVAVLYQDVNCTEVPVAIHADQLTPTWRVYSTGSNVFQTRAGCLIGAEHVNNSYECDIPIGAGICASYQTQTNSPRRARSVASQSIIAYTMSLGAENSVAYSNNSIAIPTNFTISVTTEILPVSMTKTSVDCTMYICGDSTECSNLLLQYGSFCTQLNRALTGIAVEQDKNTQEVFAQVKQIYKTPPIKDFGGFNFSQILPDPSKPSKRSFIEDLLFNKVTLADAGFIKQYGDCLGDIAARDLICAQKFNGLTVLPPLLTDEMIAQYTSALLAGTITSGWTFGAGAALQIPFAMQMAYRFNGCGVTQNVLYENQKLIANQFNSAIGKIQDSLSSTASALGKLQDVVNQNAQALNTLVKQLSSNFGAISSVLNDILSRLDKVEAEVQIDRLITGRLQSLQTYVTQQLIRAAEIRASANLAATKMSECVLGQSKRVDFCGKGCHLMSFPQSAPHGVVFLHVTYVPAQEKNFTTAPAICHDGKAHFPREGVFVSNGTHWFVTQRNFYEPQIITTDNTFVSGNCDVVIGIVNNTVYDPLQPELDSFKEELDKYFKNHTSPDVDLGDISGINASVVNIQKEIDRLNEVAKNLNESLIDLQELGKYEQYIKGGGGSDIDPYKEFGSSYQLLNFLPLDFFPDLNALVDTATALYEEELTGREHCSPHHTAIRQALVCWDELTKLIAWMSSNITSEQVRTIIVNHVNDTWGLKVRQSLWFHLSCLTFGQHTVQEFLVSFGVWIRTPAPYRPPNAPILSTLPEHTVIC

SEQ ID NO: 7248 - protein, 1365 aa, Artificial Sequence
  SARS-CoV-2/France/IDF0372/2020__EPI_ISL_406596 spike protein (1-1211)(I909C_Y1047C) WhcAg construct
MFVFLVLLPLVSSQCVNLTTRTQLPPAYTNSFTRGVYYPDKVFRSSVLHSTQDLFLPFFSNVTWFHAIHVSGTNGTKRFDNPVLPFNDGVYFASTEKSNIIRGWIFGTTLDSKTQSLLIVNNATNVVIKVCEFQFCNDPFLGVYYHKNNKSWMESEFRVYSSANNCTFEYVSQPFLMDLEGKQGNFKNLREFVFKNIDGYFKIYSKHTPINLVRDLPQGFSALEPLVDLPIGINITRFQTLLALHRSYLTPGDSSSGWTAGAAAYYVGYLQPRTFLLKYNENGTITDAVDCALDPLSETKCTLKSFTVEKGIYQTSNFRVQPTESIVRFPNITNLCPFGEVFNATRFASVYAWNRKRISNCVADYSFLYNSASFSTFKCYGVSPTKLNDLCFTNVYADSFVIRGDEVRQIAPGQTGKIADYNYKLPDDFTGCVIAWNSNNLDSKVGGNYNYLYRLFRKSNLKPFERDISTEIYQAGSTPCNGVEGFNCYFPLQSYGFQPTNGVGYQPYRVVVLSFELLHAPATVCGPKKSTNLVKNKCVNFNFNGLTGTGVLTESNKKFLPFQQFGRDIADTTDAVRDPQTLEILDITPCSFGGVSVITPGTNTSNQVAVLYQDVNCTEVPVAIHADQLTPTWRVYSTGSNVFQTRAGCLIGAEHVNNSYECDIPIGAGICASYQTQTNSPRRARSVASQSIIAYTMSLGAENSVAYSNNSIAIPTNFTISVTTEILPVSMTKTSVDCTMYICGDSTECSNLLLQYGSFCTQLNRALTGIAVEQDKNTQEVFAQVKQIYKTPPIKDFGGFNFSQILPDPSKPSKRSFIEDLLFNKVTLADAGFIKQYGDCLGDIAARDLICAQKFNGLTVLPPLLTDEMIAQYTSALLAGTITSGWTFGAGAALQIPFAMQMAYRFNGCGVTQNVLYENQKLIANQFNSAIGKIQDSLSSTASALGKLQDVVNQNAQALNTLVKQLSSNFGAISSVLNDILSRLDKVEAEVQIDRLITGRLQSLQTYVTQQLIRAAEIRASANLAATKMSECVLGQSKRVDFCGKGCHLMSFPQSAPHGVVFLHVTYVPAQEKNFTTAPAICHDGKAHFPREGVFVSNGTHWFVTQRNFYEPQIITTDNTFVSGNCDVVIGIVNNTVYDPLQPELDSFKEELDKYFKNHTSPDVDLGDISGINASVVNIQKEIDRLNEVAKNLNESLIDLQELGKYEQYIKGGGGSDIDPYKEFGSSYQLLNFLPLDFFPDLNALVDTATALYEEELTGREHCSPHHTAIRQALVCWDELTKLIAWMSSNITSEQVRTIIVNHVNDTWGLKVRQSLWFHLSCLTFGQHTVQEFLVSFGVWIRTPAPYRPPNAPILSTLPEHTVIC

SEQ ID NO: 7249 - protein, 1365 aa, Artificial Sequence
  SARS-CoV-2/Australia/VIC01/2020__EPI_ISL_406844 spike protein (1-1211)(I909C_Y1047C) WhcAg construct
MFVFLVLLPLVSSQCVNLTTRTQLPPAYTNSFTRGVYYPDKVFRSSVLHSTQDLFLPFFSNVTWFHAIHVSGTNGTKRFDNPVLPFNDGVYFASTEKSNIIRGWIFGTTLDSKTQSLLIVNNATNVVIKVCEFQFCNDPFLGVYYHKNNKSWMESEFRVYSSANNCTFEYVSQPFLMDLEGKQGNFKNLREFVFKNIDGYFKIYSKHTPINLVRDLPQGFSALEPLVDLPIGINITRFQTLLALHRRYLTPGDSSSGWTAGAAAYYVGYLQPRTFLLKYNENGTITDAVDCALDPLSETKCTLKSFTVEKGIYQTSNFRVQPTESIVRFPNITNLCPFGEVFNATRFASVYAWNRKRISNCVADYSVLYNSASFSTFKCYGVSPTKLNDLCFTNVYADSFVIRGDEVRQIAPGQTGKIADYNYKLPDDFTGCVIAWNSNNLDSKVGGNYNYLYRLFRKSNLKPFERDISTEIYQAGSTPCNGVEGFNCYFPLQSYGFQPTNGVGYQPYRVVVLSFELLHAPATVCGPKKSTNLVKNKCVNFNFNGLTGTGVLTESNKKFLPFQQFGRDIADTTDAVRDPQTLEILDITPCSFGGVSVITPGTNTSNQVAVLYQDVNCTEVPVAIHADQLTPTWRVYSTGSNVFQTRAGCLIGAEHVNNSYECDIPIGAGICASYQTQTNSPRRARSVASQSIIAYTMSLGAENSVAYSNNSIAIPTNFTISVTTEILPVSMTKTSVDCTMYICGDSTECSNLLLQYGSFCTQLNRALTGIAVEQDKNTQEVFAQVKQIYKTPPIKDFGGFNFSQILPDPSKPSKRSFIEDLLFNKVTLADAGFIKQYGDCLGDIAARDLICAQKFNGLTVLPPLLTDEMIAQYTSALLAGTITSGWTFGAGAALQIPFAMQMAYRFNGCGVTQNVLYENQKLIANQFNSAIGKIQDSLSSTASALGKLQDVVNQNAQALNTLVKQLSSNFGAISSVLNDILSRLDKVEAEVQIDRLITGRLQSLQTYVTQQLIRAAEIRASANLAATKMSECVLGQSKRVDFCGKGCHLMSFPQSAPHGVVFLHVTYVPAQEKNFTTAPAICHDGKAHFPREGVFVSNGTHWFVTQRNFYEPQIITTDNTFVSGNCDVVIGIVNNTVYDPLQPELDSFKEELDKYFKNHTSPDVDLGDISGINASVVNIQKEIDRLNEVAKNLNESLIDLQELGKYEQYIKGGGGSDIDPYKEFGSSYQLLNFLPLDFFPDLNALVDTATALYEEELTGREHCSPHHTAIRQALVCWDELTKLIAWMSSNITSEQVRTIIVNHVNDTWGLKVRQSLWFHLSCLTFGQHTVQEFLVSFGVWIRTPAPYRPPNAPILSTLPEHTVIC

SEQ ID NO: 7250 - protein, 1365 aa, Artificial Sequence
  SARS-CoV-2/Germany/BavPat1/2020__EPI_ISL_406862 spike protein (1-1211)(I909C_Y1047C) WhcAg construct
MFVFLVLLPLVSSQCVNLTTRTQLPPAYTNSFTRGVYYPDKVFRSSVLHSTQDLFLPFFSNVTWFHAIHVSGTNGTKRFDNPVLPFNDGVYFASTEKSNIIRGWIFGTTLDSKTQSLLIVNNATNVVIKVCEFQFCNDPFLGVYYHKNNKSWMESEFRVYSSANNCTFEYVSQPFLMDLEGKQGNFKNLREFVFKNIDGYFKIYSKHTPINLVRDLPQGFSALEPLVDLPIGINITRFQTLLALHRSYLTPGDSSSGWTAGAAAYYVGYLQPRTFLLKYNENGTITDAVDCALDPLSETKCTLKSFTVEKGIYQTSNFRVQPTESIVRFPNITNLCPFGEVFNATRFASVYAWNRKRISNCVADYSVLYNSASFSTFKCYGVSPTKLNDLCFTNVYADSFVIRGDEVRQIAPGQTGKIADYNYKLPDDFTGCVIAWNSNNLDSKVGGNYNYLYRLFRKSNLKPFERDISTEIYQAGSTPCNGVEGFNCYFPLQSYGFQPTNGVGYQPYRVVVLSFELLHAPATVCGPKKSTNLVKNKCVNFNFNGLTGTGVLTESNKKFLPFQQFGRDIADTTDAVRDPQTLEILDITPCSFGGVSVITPGTNTSNQVAVLYQGVNCTEVPVAIHADQLTPTWRVYSTGSNVFQTRAGCLIGAEHVNNSYECDIPIGAGICASYQTQTNSPRRARSVASQSIIAYTMSLGAENSVAYSNNSIAIPTNFTISVTTEILPVSMTKTSVDCTMYICGDSTECSNLLLQYGSFCTQLNRALTGIAVEQDKNTQEVFAQVKQIYKTPPIKDFGGFNFSQILPDPSKPSKRSFIEDLLFNKVTLADAGFIKQYGDCLGDIAARDLICAQKFNGLTVLPPLLTDEMIAQYTSALLAGTITSGWTFGAGAALQIPFAMQMAYRFNGCGVTQNVLYENQKLIANQFNSAIGKIQDSLSSTASALGKLQDVVNQNAQALNTLVKQLSSNFGAISSVLNDILSRLDKVEAEVQIDRLITGRLQSLQTYVTQQLIRAAEIRASANLAATKMSECVLGQSKRVDFCGKGCHLMSFPQSAPHGVVFLHVTYVPAQEKNFTTAPAICHDGKAHFPREGVFVSNGTHWFVTQRNFYEPQIITTDNTFVSGNCDVVIGIVNNTVYDPLQPELDSFKEELDKYFKNHTSPDVDLGDISGINASVVNIQKEIDRLNEVAKNLNESLIDLQELGKYEQYIKGGGGSDIDPYKEFGSSYQLLNFLPLDFFPDLNALVDTATALYEEELTGREHCSPHHTAIRQALVCWDELTKLIAWMSSNITSEQVRTIIVNHVNDTWGLKVRQSLWFHLSCLTFGQHTVQEFLVSFGVWIRTPAPYRPPNAPILSTLPEHTVIC

SEQ ID NO: 7251 - protein, 1365 aa, Artificial Sequence
  SARS-CoV-2/Wuhan/HBCDC-HB-02/2020__EPI_ISL_412978 spike protein (1-1211)(I909C_Y1047C) WhcAg construct
MFVFLVLLPLVSSQCVNLTTRTQLPPAYTNSFTRGVYYPDKVFRSSVLHSTQDLFLPFFSNVTWFHAIHVSGTNGTKRFDNPVLPFNDGVYFASTEKSNIIRGWIFGTTLDSKTQSLLIVNNATNVVIKVCEFQFCNDPFLGVYYHKNNKSWMESEFRVYSSANNCTFEYVSQPFLMDLEGKQGNFKNLREFVFKNIDGYFKIYSKHTPINLVRDLPQGFSALEPLVDLPIGINITRFQTLLALHRSYLTPGDSSSGWTAGAAAYYVGYLQPRTFLLKYNENGTITDAVDCALDPLSETKCTLKSFTVEKGIYQTSNFRVQPTESIVRFPNITNLCPFGEVFNATRFASVYAWNRKRISNCVADYSVLYNSASFSTFKCYGVSPTKLNDLCFTNVYADSFVIRGDEVRQIAPGQTGKIADYNYKLPDDFTGCVIAWNSNNLDSKVGGNYNYLYRLFRKSNLKPFERDISTEIYQAGSTPCNGVEGFNCYFPLQSYGFQPTNGVGYQPYRVVVLSFELLHAPATVCGPKKSTNLVKNKCVNFNFNGLTGTGVLTESNKKFLPFQQFGRDIADTTDAVRDPQTLEILDITPCSFGGVSVITPGTNTSNQVAVLYQDVNCTEVPVAIHADQLTPTWRVYSTGSNVFQTRAGCLIGAEHVNNSYECDIPIGAGICASYQTQTNSPRRARSVASQSIIAYTMSLGAENSVAYSNNSIAIPTNFTISVTTEILPVSMTKTSVDCTMYICGDSTECSNFLLQYGSFCTQLNRALTGIAVEQDKNTQEVFAQVKQIYKTPPIKDFGGFNFSQILPDPSKPSKRSFIEDLLFNKVTLADAGFIKQYGDCLGDIAARDLICAQKFNGLTVLPPLLTDEMIAQYTSALLAGTITSGWTFGAGAALQIPFAMQMAYRFNGCGVTQNVLYENQKLIANQFNSAIGKIQDSLSSTASALGKLQDVVNQNAQALNTLVKQLSSNFGAISSVLNDILSRLDKVEAEVQIDRLITGRLQSLQTYVTQQLIRAAEIRASANLAATKMSECVLGQSKRVDFCGKGCHLMSFPQSAPHGVVFLHVTYVPAQEKNFTTAPAICHDGKAHFPREGVFVSNGTHWFVTQRNFYEPQIITTDNTFVSGNCDVVIGIVNNTVYDPLQPELDSFKEELDKYFKNHTSPDVDLGDISGINASVVNIQKEIDRLNEVAKNLNESLIDLQELGKYEQYIKGGGGSDIDPYKEFGSSYQLLNFLPLDFFPDLNALVDTATALYEEELTGREHCSPHHTAIRQALVCWDELTKLIAWMSSNITSEQVRTIIVNHVNDTWGLKVRQSLWFHLSCLTFGQHTVQEFLVSFGVWIRTPAPYRPPNAPILSTLPEHTVIC

SEQ ID NO: 7252 - protein, 1365 aa, Artificial Sequence
  SARS-CoV-2/Australia/QLD02/2020__EPI_ISL_407896 spike protein (1-1211)(I909C_Y1047C) WhcAg construct
MFVFLVLLPLVSSQCVNLTTRTQLPPAYTNSFTRGVYYPDKVFRSSVLHSTQDLFLPFFSNVTWFHAIHVSGTNGTKRFDNPVLPFNDGVYFASTEKSNIIRGWIFGTTLDSKTQSLLIVNNATNVVIKVCEFQFCNDPFLGVYYHKNNKSWMESEFRVYSSANNCTFEYVSQPFLMDLEGKQGNFKNLREFVFKNIDGYFKIYSKHTPINLVRDLPQGFSALEPLVDLPIGINITRFQTLLALHRSYLTPGDSSSGWTAGAAAYYVGYLQPRTFLLKYNENGTITDAVDCALDPLSETKCTLKSFTVEKGIYQTSNFRVQPTESIVRFPNITNLCPFGEVFNATRFASVYAWNRKRISNCVADYSVLYNSASFSTFKCYGVSPTKLNDLCFTNVYADSFVIRGDEVRQIAPGQTGKIADYNYKLPDDFTGCVIAWNSNNLDSKVGGNYNYLYRLFRKSNLKPFERDISTEIYQAGSTPCNGVEGFNCYFPLQSYGFQPTNGVGYQPYRVVVLSFELLHAPATVCGPKKSTNLVKNKCVNFNFNGLTGTGVLTESNKKFLPFQQFGRDIADTTDAVRDPQTLEILDITPCSFGGVSVITPGTNTSNQVAVLYQDVNCTEVPVAIHADQLTPTWRVYSTGSNVFQTRAGCLIGAEHVNNSYECDIPIGAGICASYQTQTNSPRRARSVASQSIIAYTMSLGAENSVAYSNNSIAIPTNFTISVTTEILPVSMTKTSVDCTMYICGDSTECSNLLLQYGSFCTQLNRALTGIAVEQDKNTQEVFAQVKQIYKTPPIKDFGGFNFSQILPDPSKPSKRSFIEDLLFNKVTLADAGFIKQYGDCLGDIAARDLICAQKFNGLTVLPPLLTDEMIAQYTSALLAGTITSGWTFGAGAALQIPFAMQMAYRFNGCGVTQNVLYENQKLIANQFNSAIGKIQDSLSSTASALGKLQDVVNQNAQALNTLVKQLSSNFGAISSVLNDILSRLDKVEAEVQIDRLITGRLQSLQTYVTQQLIRAAEIRASANLAATKMSECVLGQSKRVDFCGKGCHLMSFPQSAPHGVVFLHVTYVPAQEKNFTTAPAICHDGKAHFPREGVFVSNGTHWFVTQRNFYEPQIITTDNTFVSGNCDVVIGIVNNTVYDPLQLELDSFKEELDKYFKNHTSPDVDLGDISGINASVVNIQKEIDRLNEVAKNLNESLIDLQELGKYEQYIKGGGGSDIDPYKEFGSSYQLLNFLPLDFFPDLNALVDTATALYEEELTGREHCSPHHTAIRQALVCWDELTKLIAWMSSNITSEQVRTIIVNHVNDTWGLKVRQSLWFHLSCLTFGQHTVQEFLVSFGVWIRTPAPYRPPNAPILSTLPEHTVIC

SEQ ID NO: 7253 - protein, 1365 aa, Artificial Sequence
  SARS-CoV-2/India/1-31/2020__EPI_ISL_413523 spike protein (1-1211)(I909C_Y1047C) WhcAg construct
MFVFLVLLPLVSSQCVNLTTRTQLPPAYTNSFTRGVYYPDKVFRSSVLHSTQDLFLPFFSNVTWFHAIHVSGTNGTKRFDNPVLPFNDGVYFASTEKSNIIRGWIFGTTLDSKTQSLLIVNNATNVVIKVCEFQFCNDPFLGVYYHKNNKSWMESEFRVYSSANNCTFEYVSQPFLMDLEGKQGNFKNLREFVFKNIDGYFKIYSKHTPINLVRDLPQGFSALEPLVDLPIGINITRFQTLLALHRSYLTPGDSSSGWTAGAAAYYVGYLQPRTFLLKYNENGTITDAVDCALDPLSETKCTLKSFTVEKGIYQTSNFRVQPTESIVRFPNITNLCPFGEVFNATRFASVYAWNRKRISNCVADYSVLYNSASFSTFKCYGVSPTKLNDLCFTNVYADSFVIRGDEVRQIAPGQTGKIADYNYKLPDDFTGCVIAWNSNNLDSKVGGNYNYLYRLFRKSNLKPFERDISTEIYQAGSTPCNGVEGFNCYFPLQSYGFQPTNGVGYQPYRVVVLSFELLHAPATVCGPKKSTNLVKNKCVNFNFNGLTGTGVLTESNKKFLPFQQFGRDIADTTDAVRDPQTLEILDITPCSFGGVSVITPGTNTSNQVAVLYQDVNCTEVPVAIHADQLTPTWRVYSTGSNVFQTRAGCLIGAEHVNNSYECDIPIGAGICASYQTQTNSPRRARSVASQSIIAYTMSLGAENSVAYSNNSIAIPTNFTISVTTEILPVSMTKTSVDCTMYICGDSTECSNLLLQYGSFCTQLNRALTGIAVEQDKNTQEVFAQVKQIYKTPPIKDFGGFNFSQILPDPSKPSKRSFIEDLLFNKVTLADAGFIKQYGDCLGDIAARDLICAQKFNGLTVLPPLLTDEMIAQYTSALLAGTITSGWTFGAGAALQIPFAMQMAYRFNGCGVTQNVLYENQKLIANQFNSVIGKIQDSLSSTASALGKLQDVVNQNAQALNTLVKQLSSNFGAISSVLNDILSRLDKVEAEVQIDRLITGRLQSLQTYVTQQLIRAAEIRASANLAATKMSECVLGQSKRVDFCGKGCHLMSFPQSAPHGVVFLHVTYVPAQEKNFTTAPAICHDGKAHFPREGVFVSNGTHWFVTQRNFYEPQIITTDNTFVSGNCDVVIGIVNNTVYDPLQPELDSFKEELDKYFKNHTSPDVDLGDISGINASVVNIQKEIDRLNEVAKNLNESLIDLQELGKYEQYIKGGGGSDIDPYKEFGSSYQLLNFLPLDFFPDLNALVDTATALYEEELTGREHCSPHHTAIRQALVCWDELTKLIAWMSSNITSEQVRTIIVNHVNDTWGLKVRQSLWFHLSCLTFGQHTVQEFLVSFGVWIRTPAPYRPPNAPILSTLPEHTVIC

SEQ ID NO: 7254 - protein, 1365 aa, Artificial Sequence
  SARS-CoV-2/Guangdong/GD2020087-P0008/2020__EPI_ISL_413863 spike protein (1-1211)(I909C_Y1047C) WhcAg construct
MFVFLVLLPLVSSQCVNLTTRTQLPPAYTNSFTRGVYYPDKVFRSSVLHSTQDLFLPFFSNVTWFHAIHVSGTNGTKRFDNPVLPFNDGVYFASTEKSNIIRGWIFGTTLDSKTQSLLIVNNATNVVIKVCEFQFCNDPFLGVYYHKNNKSWMESEFRVYSSANNCTFEYVSQPFLMDLEGKQGNFKNLREFVFKNIDGYFKIYSKHTPINLVRDLPQGFSALEPLVDLPIGINITRFQTLLALHRSYLTPGDSSSGWTAGAAAYYVGYLQPRTFLLKYNENGTITDAVDCALDPLSETKCTLKSFTVEKGIYQTSNFRVQPTESIVRFPNITNLCPFGEVFNATRFASVYAWNRKRISNCVADYSVLYNSASFSTFKCYGVSPTKLNDLCFTNVYADSFVIRGDEVREIAPGQTGKIADYNYKLPDDFTGCVIAWNSNNLDSKVGGNYNYLYRLFRKSNLKPFERDISTEIYQAGSTPCNGVEGFNCYFPLQSYGFQPTNGVGYQPYRVVVLSFELLHAPATVCGPKKSTNLVKNKCVNFNFNGLTGTGVLTESNKKFLPFQQFGRDIADTTDAVRDPQTLEILDITPCSFGGVSVITPGTNTSNQVAVLYQDVNCTEVPVAIHADQLTPTWRVYSTGSNVFQTRAGCLIGAEHVNNSYECDIPIGAGICASYQTQTNSPRRARSVASQSIIAYTMSLGAENSVAYSNNSIAIPTNFTISVTTEILPVSMTKTSVDCTMYICGDSTECSNLLLQYGSFCTQLNRALTGIAVEQDKNTQEVFAQVKQIYKTPPIKDFGGFNFSQILPDPSKPSKRSFIEDLLFNKVTLADAGFIKQYGDCLGDIAARDLICAQKFNGLTVLPPLLTDEMIAQYTSALLAGTITSGWTFGAGAALQIPFAMQMAYRFNGCGVTQNVLYENQKLIANQFNSAIGKIQDSLSSTASALGKLQDVVNQNAQALNTLVKQLSSNFGAISSVLNDILSRLDKVEAEVQIDRLITGRLQSLQTYVTQQLIRAAEIRASANLAATKMSECVLGQSKRVDFCGKGCHLMSFPQSAPHGVVFLHVTYVPAQEKNFTTAPAICHDGKAHFPREGVFVSNGTHWFVTQRNFYEPQIITTDNTFVSGNCDVVIGIVNNTVYDPLQPELDSFKEELDKYFKNHTSPDVDLGDISGINASVVNIQKEIDRLNEVAKNLNESLIDLQELGKYEQYIKGGGGSDIDPYKEFGSSYQLLNFLPLDFFPDLNALVDTATALYEEELTGREHCSPHHTAIRQALVCWDELTKLIAWMSSNITSEQVRTIIVNHVNDTWGLKVRQSLWFHLSCLTFGQHTVQEFLVSFGVWIRTPAPYRPPNAPILSTLPEHTVIC

SEQ ID NO: 7255 - protein, 1365 aa, Artificial Sequence
  SARS-CoV-2/Sweden/01/2020__EPI_ISL_411951 spike protein (1-1211)(I909C_Y1047C) WhcAg construct
MFVFLVLLPLVSSQCVNLTTRTQLPPAYTNSFTRGVYYPDKVFRSSVLHSTQDLFLPFFSNVTWFHAIHVSGTNGTKRFDNPVLPFNDGVYFASTEKSNIIRGWIFGTTLDSKTQSLLIVNNATNVVIKVCEFQFCNDPFLGVYYHKNNKSWMESEFRVYSSANNCTFEYVSQPFLMDLEGKQGNFKNLREFVFKNIDGYFKIYSKHTPINLVRDLPQGFSALEPLVDLPIGINITRFQTLLALHRSYLTPGDSSSGWTAGAAAYYVGYLQPRTFLLKYNENGTITDAVDCALDPLSETKCTLKSFTVEKGIYQTSNFRVQPTESIVRFPNITNLCPFGEVFNATRFASVYAWNRKRISNCVADYSVLYNSASFSTFKCYGVSPTKLNDLCFTNVYADSFVIRGDEVRQIAPGQTGKIADYNYKLPDDFTGCVIAWNSNNLDSKVGGNYNYLYRLFRKSNLKPFERDISTEIYQAGSTPCNGVEGFNCYFPLQSYGFQPTNGVGYQPYRVVVLSFELLHAPATVCGPKKSTNLVKNKCVNFNFNGLTGTGVLTESNKKFLPFQQFGRDIADTTDAVRDPQTLEILDITPCSFGGVSVITPGTNTSNQVAVLYQDVNCTEVPVAIHADQLTPTWRVYSTGSNVFQTRAGCLIGAEHVNNSYECDIPIGAGICASYQTQTNSPRRARSVASQSIIAYTMSLGAENSVAYSNNSIAIPTNFTISVTTEILPVSMTKTSVDCTMYICGDSTECSNLLLQYGSFCTQLNRALTGIAVEQDKNTQEVFAQVKQIYKTPPIKDCGGFNFSQILPDPSKPSKRSFIEDLLFNKVTLADAGFIKQYGDCLGDIAARDLICAQKFNGLTVLPPLLTDEMIAQYTSALLAGTITSGWTFGAGAALQIPFAMQMAYRFNGCGVTQNVLYENQKLIANQFNSAIGKIQDSLSSTASALGKLQDVVNQNAQALNTLVKQLSSNFGAISSVLNDILSRLDKVEAEVQIDRLITGRLQSLQTYVTQQLIRAAEIRASANLAATKMSECVLGQSKRVDFCGKGCHLMSFPQSAPHGVVFLHVTYVPAQEKNFTTAPAICHDGKAHFPREGVFVSNGTHWFVTQRNFYEPQIITTDNTFVSGNCDVVIGIVNNTVYDPLQPELDSFKEELDKYFKNHTSPDVDLGDISGINASVVNIQKEIDRLNEVAKNLNESLIDLQELGKYEQYIKGGGGSDIDPYKEFGSSYQLLNFLPLDFFPDLNALVDTATALYEEELTGREHCSPHHTAIRQALVCWDELTKLIAWMSSNITSEQVRTIIVNHVNDTWGLKVRQSLWFHLSCLTFGQHTVQEFLVSFGVWIRTPAPYRPPNAPILSTLPEHTVIC

SEQ ID NO: 7256 - protein, 1365 aa, Artificial Sequence
  SARS-CoV-2/Tianmen/HBCDC-HB-07/2020__EPI_ISL_412983 spike protein (1-1211)(I909C_Y1047C) WhcAg construct
MFVFLVLLPLVSSQCVNLTTRTQLPPAYTNSFTRGVYYPDKVFRSSVLHSTQDLFLPFFSNVTWFHAIHVSGTNGTKRFDNPVLPFNDGVYFASTEKSNIIRGWIFGTTLDSKTQSLLIVNNATNVVIKVCEFQFCNDPFLGVYYHKNNKSWMESEFRVYSSANNCTFEYVSQPFLMDLEGKQGNFKNLREFVFKNIDGYFKIYSKHTPINLVRDLPQGFSALEPLVDLPIGINITRFQTLLALHRSYLTPGDSSSGWTAGAAAYYVGYLQPRTFLLKYNENGTITDAVDCALDPLSETKCTLKSFTVEKGIYQTSNFRVQPTESIVRFPNITNLCPFGEVFNATRFASVYAWNRKRISNCVADYSVLYNSASFSTFKCYGVSPTKLNDLCFTNVYADSFVIRGDEVRQIAPGQTGKIADYNYKLPDDFTGCVIAWNSNNLDSKVGGNYNYLYRLFRKSNLKPFERDISTEIYQAGSTPCNGVEGFNCYFPLQSYGFQPTNGVGYQPYRVVVLSFELLHAPATVCGPKKSTNLVKNKCVNFNFNGLTGTGVLTESNKKFLPFQQFGRDIADTTDAVRDPQTLEILDITPCSFGGVSVITPGTNTSNQVAVLYQDLNCTEVPVAIHADQLTPTWRVYSTGSNVFQTRAGCLIGAEHVNNSYECDIPIGAGICASYQTQTNSPRRARSVASQSIIAYTMSLGAENSVAYSNNSIAIPTNFTISVTTEILPVSMTKTSVDCTMYICGDSTECSNLLLQYGSFCTQLNRALTGIAVEQDKNTQEVFAQVKQIYKTPPIKDFGGFNFSQILPDPSKPSKRSFIEDLLFNKVTLADAGFIKQYGDCLGDIAARDLICAQKFNGLTVLPPLLTDEMIAQYTSALLAGTITSGWTFGAGAALQIPFAMQMAYRFNGCGVTQNVLYENQKLIANQFNSAIGKIQDSLSSTASALGKLQDVVNQNAQALNTLVKQLSSNFGAISSVLNDILSRLDKVEAEVQIDRLITGRLQSLQTYVTQQLIRAAEIRASANLAATKMSECVLGQSKRVDFCGKGCHLMSFPQSAPHGVVFLHVTYVPAQEKNFTTAPAICHDGKAHFPREGVFVSNGTHWFVTQRNFYEPQIITTDNTFVSGNCDVVIGIVNNTVYDPLQPELDSFKEELDKYFKNHTSPDVDLGDISGINASVVNIQKEIDRLNEVAKNLNESLIDLQELGKYEQYIKGGGGSDIDPYKEFGSSYQLLNFLPLDFFPDLNALVDTATALYEEELTGREHCSPHHTAIRQALVCWDELTKLIAWMSSNITSEQVRTIIVNHVNDTWGLKVRQSLWFHLSCLTFGQHTVQEFLVSFGVWIRTPAPYRPPNAPILSTLPEHTVIC

SEQ ID NO: 7257 - protein, 1365 aa, Artificial Sequence
  SARS-CoV-2/Hong Kong/case42_VM20002493/2020__EPI_ISL_414527 spike protein (1-1211)(I909C_Y1047C) WhcAg construct
MFVFLVLLPLVSSQCVNLTTRTQLPPAYTNSFTRGVYYPDKVFRSSVLHSTQDLFLPFFSNVTWFHAIHVSGTNGTKRFDNPVLPFNDGVYFASTEKSNIIRGWIFGTTLDSKTQSLLIVNNATNVVIKVCEFQFCNDPFLGVYYHKNNKSWMESEFRVYSSANNCTFEYVSQPFLMDLEGKQGNFKNLREFVFKNIDGYFKIYSKHTPINLVRDLPQGFSALEPLVDLPIGINITRFQTLLALHRSYLTPGDSSSGWTAGAAAYYVGYLQPRTFLLKYNENGTITDAVDCALDPLSETKCTLKSFTVEKGIYQTSNFRVQPTESIVRFPNITNLCPFGEVFNATRFASVYAWNRKRISNCVADYSVLYNSASFSTFKCYGVSPTKLNDLCFTNVYADSFVIRGDEVRQIAPGQTGKIADYNYKLPDDFTGCVIAWNSNNLDSKVGGNYNYLYRLFRKSNLKPFERDISTEIYQAGSTPCNGVEGFNCYFPLQSYGFQPTNGVGYQPYRVVVLSFELLHAPATVCGPKKSTNLVKNKCVNFNFNGLTGTGVLTESNKKFLPFQQFGRDIADTTDAVRDPQTLEILDITPCSFGGVSVITPGTNTSNQVAVLYQDVNCTEVPVAIHADQLTPTWRVYSTGSNVFQTRAGCLIGAEHVNNSYECDIPIGAGICASYQTQTNSPRRARSVASQSIIAYTMSLGAENSVAYSNNSIAIPTNFAISVTTEILPVSMTKTSVDCTMYICGDSTECSNLLLQYGSFCTQLNRALTGIAVEQDKNTQEVFAQVKQIYKTPPIKDFGGFNFSQILPDPSKPSKRSFIEDLLFNKVTLADAGFIKQYGDCLGDIAARDLICAQKFNGLTVLPPLLTDEMIAQYTSALLAGTITSGWTFGAGAALQIPFAMQMAYRFNGCGVTQNVLYENQKLIANQFNSAIGKIQDSLSSTASALGKLQDVVNQNAQALNTLVKQLSSNFGAISSVLNDILSRLDKVEAEVQIDRLITGRLQSLQTYVTQQLIRAAEIRASANLAATKMSECVLGQSKRVDFCGKGCHLMSFPQSAPHGVVFLHVTYVPAQEKNFTTAPAICHDGKAHFPREGVFVSNGTHWFVTQRNFYEPQIITTDNTFVSGNCDVVIGIVNNTVYDPLQPELDSFKEELDKYFKNHTSPDVDLGDISGINASVVNIQKEIDRLNEVAKNLNESLIDLQELGKYEQYIKGGGGSDIDPYKEFGSSYQLLNFLPLDFFPDLNALVDTATALYEEELTGREHCSPHHTAIRQALVCWDELTKLIAWMSSNITSEQVRTIIVNHVNDTWGLKVRQSLWFHLSCLTFGQHTVQEFLVSFGVWIRTPAPYRPPNAPILSTLPEHTVIC

SEQ ID NO: 7258 - protein, 1365 aa, Artificial Sequence
  SARS-CoV-2/USA/CruiseA-23/2020__EPI_ISL_414482 spike protein (1-1211)(I909C_Y1047C) WhcAg construct
MFVFLVLLPLVSSQCVNLTTRTQLPPAYTNSFTRGVYYPDKVFRSSVLHSTQDLFLPFFSNVTWFHAIHVSGTNGTKRFDNPVLPFNDGVYFASTEKSNIIRGWIFGTTLDSKTQSLLIVNNATNVVIKVCEFQFCNDPFLGVYYHKNNKSWMESEFRVYSSANNCTFEYVSQPFLMDLEVKQGNFKNLREFVFKNIDGYFKIYSKHTPINLVRDLPQGFSALEPLVDLPIGINITRFQTLLALHRSYLTPGDSSSGWTAGAAAYYVGYLQPRTFLLKYNENGTITDAVDCALDPLSETKCTLKSFTVEKGIYQTSNFRVQPTESIVRFPNITNLCPFGEVFNATRFASVYAWNRKRISNCVADYSVLYNSASFSTFKCYGVSPTKLNDLCFTNVYADSFVIRGDEVRQIAPGQTGKIADYNYKLPDDFTGCVIAWNSNNLDSKVGGNYNYLYRLFRKSNLKPFERDISTEIYQAGSTPCNGVEGFNCYFPLQSYGFQPTNGVGYQPYRVVVLSFELLHAPATVCGPKKSTNLVKNKCVNFNFNGLTGTGVLTESNKKFLPFQQFGRDIADTTDAVRDPQTLEILDITPCSFGGVSVITPGTNTSNQVAVLYQDVNCTEVPVAIHADQLTPTWRVYSTGSNVFQTRAGCLIGAEHVNNSYECDIPIGAGICASYQTQTNSPRRARSVASQSIIAYTMSLGAENSVAYSNNSIAIPTNFTISVTTEILPVSMTKTSVDCTMYICGDSTECSNLLLQYGSFCTQLNRALTGIAVEQDKNTQEVFAQVKQIYKTPPIKDFGGFNFSQILPDPSKPSKRSFIEDLLFNKVTLADAGFIKQYGDCLGDIAARDLICAQKFNGLTVLPPLLTDEMIAQYTSALLAGTITSGWTFGAGAALQIPFAMQMAYRFNGCGVTQNVLYENQKLIANQFNSAIGKIQDSLSSTASALGKLQDVVNQNAQALNTLVKQLSSNFGAISSVLNDILSRLDKVEAEVQIDRLITGRLQSLQTYVTQQLIRAAEIRASANLAATKMSECVLGQSKRVDFCGKGCHLMSFPQSAPHGVVFLHVTYVPAQEKNFTTAPAICHDGKAHFPREGVFVSNGTHWFVTQRNFYEPQIITTDNTFVSGNCDVVIGIVNNTVYDPLQPELDSFKEELDKYFKNHTSPDVDLGDISGINASVVNIQKEIDRLNEVAKNLNESLIDLQELGKYEQYIKGGGGSDIDPYKEFGSSYQLLNFLPLDFFPDLNALVDTATALYEEELTGREHCSPHHTAIRQALVCWDELTKLIAWMSSNITSEQVRTIIVNHVNDTWGLKVRQSLWFHLSCLTFGQHTVQEFLVSFGVWIRTPAPYRPPNAPILSTLPEHTVIC

SEQ ID NO: 7259 - protein, 1365 aa, Artificial Sequence
  SARS-CoV-2/Hong Kong/case85_VM20002868/2020__EPI_ISL_414519 spike protein (1-1211)(I909C_Y1047C) WhcAg construct
MFVFLVLVPLVSSQCVNLTTRTQLPPAYTNSFTRGVYYPDKVFRSSVLHSTQDLFLPFFSNVTWFHAIHVSGTNGTKRFDNPVLPFNDGVYFASTEKSNIIRGWIFGTTLDSKTQSLLIVNNATNVVIKVCEFQFCNDPFLGVYYHKNNKSWMESEFRVYSSANNCTFEYVSQPFLMDLEGKQGNFKNLREFVFKNIDGYFKIYSKHTPINLVRDLPQGFSALEPLVDLPIGINITRFQTLLALHRSYLTPGDSSSGWTAGAAAYYVGYLQPRTFLLKYNENGTITDAVDCALDPLSETKCTLKSFTVEKGIYQTSNFRVQPTESIVRFPNITNLCPFGEVFNATRFASVYAWNRKRISNCVADYSVLYNSASFSTFKCYGVSPTKLNDLCFTNVYADSFVIRGDEVRQIAPGQTGKIADYNYKLPDDFTGCVIAWNSNNLDSKVGGNYNYLYRLFRKSNLKPFERDISTEIYQAGSTPCNGVEGFNCYFPLQSYGFQPTNGVGYQPYRVVVLSFELLHAPATVCGPKKSTNLVKNKCVNFNFNGLTGTGVLTESNKKFLPFQQFGRDIADTTDAVRDPQTLEILDITPCSFGGVSVITPGTNTSNQVAVLYQDVNCTEVPVAIHADQLTPTWRVYSTGSNVFQTRAGCLIGAEHVNNSYECDIPIGAGICASYQTQTNSPRRARSVASQSIIAYTMSLGAENSVAYSNNSIAIPTNFTISVTTEILPVSMTKTSVDCTMYICGDSTECSNLLLQYGSFCTQLNRALTGIAVEQDKNTQEVFAQVKQIYKTPPIKDFGGFNFSQILPDPSKPSKRSFIEDLLFNKVTLADAGFIKQYGDCLGDIAARDLICAQKFNGLTVLPPLLTDEMIAQYTSALLAGTITSGWTFGAGAALQIPFAMQMAYRFNGCGVTQNVLYENQKLIANQFNSAIGKIQDSLSSTASALGKLQDVVNQNAQALNTLVKQLSSNFGAISSVLNDILSRLDKVEAEVQIDRLITGRLQSLQTYVTQQLIRAAEIRASANLAATKMSECVLGQSKRVDFCGKGCHLMSFPQSAPHGVVFLHVTYVPAQEKNFTTAPAICHDGKAHFPREGVFVSNGTHWFVTQRNFYEPQIITTDNTFVSGNCDVVIGIVNNTVYDPLQPELDSFKEELDKYFKNHTSPDVDLGDISGINASVVNIQKEIDRLNEVAKNLNESLIDLQELGKYEQYIKGGGGSDIDPYKEFGSSYQLLNFLPLDFFPDLNALVDTATALYEEELTGREHCSPHHTAIRQALVCWDELTKLIAWMSSNITSEQVRTIIVNHVNDTWGLKVRQSLWFHLSCLTFGQHTVQEFLVSFGVWIRTPAPYRPPNAPILSTLPEHTVIC

SEQ ID NO: 7260 - protein, 1365 aa, Artificial Sequence; identical to SEQ ID NO: 7250
  SARS-CoV-2/England/200990660/2020__EPI_ISL_414523 spike protein (1-1211)(I909C_Y1047C) WhcAg construct

SEQ ID NO: 7261 - protein, 1365 aa, Artificial Sequence
  SARS-CoV-2/Australia/NSW09/2020__EPI_ISL_413595 spike protein (1-1211)(I909C_Y1047C) WhcAg construct
MFVFLVLLPLVSSQCVNLTTRTQLPPAYTNSFTRGVYYPDKVFRSSVLHSTQDLFLPFFSNVTWFHAIHVSGTNGTKRFDNPVLPFNDGVYFASTEKSNIIRGWIFGTTLDSKTQSLLIVNNATNVVIKVCEFQFCNDPFLGVYYHKNNKSWMESEFRVYSSANNCTFEYVSQPFLMDLEGKQGNFKNLREFVFKNIDGYFKIYSKHTPINLVRDLPQGFSALEPLVDLPIGINITRFQTLLALHRSYLTPGDSSSGWTAGAAAYYVGYLQPRTFLLKYNENGTITDAVDCALDPLSETKCTLKSFTVEKGIYQTSNFRVQPTESIVRFPNITNLCPFGEVFNATRFASVYAWNRKRISNCVADYSVLYNSASFSTFKCYGVSPTKLNDLCFTNVYADSFVIRGDEVRQIAPGQTGKIADYNYKLPDDFTGCVIAWNSNNLDSKVGGNYNYLYRLFRKSNLKPFERDISTEIYQAGSTPCNGVEGFNCYFPLQSYGFQPTNGVGYQPYRVVVLSFELLHAPATVCGPKKSTNLVKNKCVNFNFNGLTGTGVLTESNKKFLPFQQFGRDIADTTDAVRDPQTLEILDITPCSFGGVSVITPGTNTSNQVAVLYQDVNCTEVPVAIHADQLTPTWRVYSTGSNVFQTRAGCLIGAEHVNNSYECDIPIGAGICASYQTQTNSPRRARSVASQSIIAYTMSLGAENSVAYSNNSIAIPTNFTISVTTEILPVSMTKTSVDCTMYICGDSTECSNLLLQYGSFCTQLNRALTGIAVEQDKNTQEVFAQVKQIYKTPPIKDFGGFNFSQILPDPSKPSKRSFIEDLLFNKVTLADAGFIKQYGDCLGDIAARDLICAQKFNGLTVLPPLLTDEMIAQYTSALLAGTITSGWTFGAGAALQIPFAMQMAYRFNGCGVTQNVLYENQKLIANQFNSAIGKIQDSLSFTASALGKLQDVVNQNAQALNTLVKQLSSNFGAISSVLNDILSRLDKVEAEVQIDRLITGRLQSLQTYVTQQLIRAAEIRASANLAATKMSECVLGQSKRVDFCGKGCHLMSFPQSAPHGVVFLHVTYVPAQEKNFTTAPAICHDGKAHFPREGVFVSNGTHWFVTQRNFYEPQIITTDNTFVSGNCDVVIGIVNNTVYDPLQPELDSFKEELDKYFKNHTSPDVDLGDISGINASVVNIQKEIDRLNEVAKNLNESLIDLQELGKYEQYIKGGGGSDIDPYKEFGSSYQLLNFLPLDFFPDLNALVDTATALYEEELTGREHCSPHHTAIRQALVCWDELTKLIAWMSSNITSEQVRTIIVNHVNDTWGLKVRQSLWFHLSCLTFGQHTVQEFLVSFGVWIRTPAPYRPPNAPILSTLPEHTVIC

SEQ ID NO: 7262 - protein, 1365 aa, Artificial Sequence; identical to SEQ ID NO: 7242
  SARS-CoV-2/Australia/NSW10/2020__EPI_ISL_413596 spike protein (1-1211)(I909C_Y1047C) WhcAg construct

SEQ ID NO: 7263 - protein, 1365 aa, Artificial Sequence
  SARS-CoV-2/Switzerland/1000477797/2020__EPI_ISL_413023 spike protein (1-1211)(I909C_Y1047C) WhcAg construct
MFVFLVLLPLVSSQCVNLTTRTQLPPAYTNSFTRGVYYPDKVFRSSVLHSTQDLFLPFFSNVTWFHAIHVSGTNGTKRFDNPVLPFNDGVYFASTEKSNIIRGWIFGTTLDSKTQSLLIVNNATNVVIKVCEFQFCNDPFLGVYYHKNNKSWMESEFRVYSSANNCTFEYVSQPFLMDLEGKQGNFKNLREFVFKNIDGYFNIYSKHTPINLVRDLPQGFSALEPLVDLPIGINITRFQTLLALHRSYLTPGDSSSGWTAGAAAYYVGYLQPRTFLLKYNENGTITDAVDCALDPLSETKCTLKSFTVEKGIYQTSNFRVQPTESIVRFPNITNLCPFGEVFNATRFASVYAWNRKRISNCVADYSVLYNSASFSTFKCYGVSPTKLNDLCFTNVYADSFVIRGDEVRQIAPGQTGKIADYNYKLPDDFTGCVIAWNSNNLDSKVGGNYNYLYRLFRKSNLKPFERDISTEIYQAGSTPCNGVEGFNCYFPLQSYGFQPTNGVGYQPYRVVVLSFELLHAPATVCGPKKSTNLVKNKCVNFNFNGLTGTGVLTESNKKFLPFQQFGRDIADTTDAVRDPQTLEILDITPCSFGGVSVITPGTNTSNQVAVLYQGVNCTEVPVAIHADQLTPTWRVYSTGSNVFQTRAGCLIGAEHVNNSYECDIPIGAGICASYQTQTNSPRRARSVASQSIIAYTMSLGAENSVAYSNNSIAIPTNFTISVTTEILPVSMTKTSVDCTMYICGDSTECSNLLLQYGSFCTQLNRALTGIAVEQDKNTQEVFAQVKQIYKTPPIKDFGGFNFSQILPDPSKPSKRSFIEDLLFNKVTLADAGFIKQYGDCLGDIAARDLICAQKFNGLTVLPPLLTDEMIAQYTSALLAGTITSGWTFGAGAALQIPFAMQMAYRFNGCGVTQNVLYENQKLIANQFNSAIGKIQDSLSSTASALGKLQDVVNQNAQALNTLVKQLSSNFGAISSVLNDILSRLDKVEAEVQIDRLITGRLQSLQTYVTQQLIRAAEIRASANLAATKMSECVLGQSKRVDFCGKGCHLMSFPQSAPHGVVFLHVTYVPAQEKNFTTAPAICHDGKAHFPREGVFVSNGTHWFVTQRNFYEPQIITTDNTFVSGNCDVVIGIVNNTVYDPLQPELDSFKEELDKYFKNHTSPDVDLGDISGINASVVNIQKEIDRLNEVAKNLNESLIDLQELGKYEQYIKGGGGSDIDPYKEFGSSYQLLNFLPLDFFPDLNALVDTATALYEEELTGREHCSPHHTAIRQALVCWDELTKLIAWMSSNITSEQVRTIIVNHVNDTWGLKVRQSLWFHLSCLTFGQHTVQEFLVSFGVWIRTPAPYRPPNAPILSTLPEHTVIC

SEQ ID NO: 7264 - protein, 1365 aa, Artificial Sequence
  SARS-CoV-2/Belgium/BA-02291/2020__EPI_ISL_415159 spike protein (1-1211)(I909C_Y1047C) WhcAg construct
MFVFLVLLPLVSSQCVNLTTRTQLPPAYTNSFTRGVYYPDKVFRSSVLHSTQDLFLPFFSNVTWFHAIHVSGTNGTKRFDNPVLPFNDGVYFASTEKSNIIRGWIFGTTLDSKTQSLLIVNNATNVVIKVCEFQFCNDPFLGVYYHKNNKSWMESEFRVYSSANNCTFEYVSQPFLMDLEGKQGNFKNLREFVFKNIDGYFKIYSKHTPINLVRDLPQGFSALEPLVDLPIGINITRFQTLLALHRSYLTPGDSSSGWTAGAAAYYVGYLQPRTFLLKYNENGTITDAVDCALDPLSETKCTLKSFTVEKGIYQTSNFRVQPTESIVRFPNITNLCPFGEVFNATRFASVYAWNRKRISNCVADYSVLYNSASFSTFKCYGVSPTKLNDLCFTNVYADSFVIRGDEVRQIAPGQTGKIADYNYKLPDDFTGCVIAWNSNNLDSKVGGNYNYLYRLFRRSNLKPFERDISTEIYQAGSTPCNGVEGFNCYFPLQSYGFQPTNGVGYQPYRVVVLSFELLPAPATVCGPKKSTNLVKNKCVNFNFNGLTGTGVLTESNKKFLPFQQFGRDIADTTDAVRDPQTLEILDITPCSFGGVSVITPGTNTSNQVAVLYQGVNCTEVPVAIHADQLTPTWRVYSTGSNVFQTRAGCLIGAEHVNNSYECDIPIGAGICASYQTQTNSPRRARSVASQSIIAYTMSLGAENSVAYSNNSIAIPTNFTISVTTEILPVSMTKTSVDCTMYICGDSTECSNLLLQYGSFCTQLNRALTGIAVEQDKNTQEVFAQVKQIYKTPPIKDFGGFNFSQILPDPSKPSKRSFIEDLLFNKVTLADAGFIKQYGDCLGDIAARDLICAQKFNGLTVLPPLLTDEMIAQYTSALLAGTITSGWTFGAGAALQIPFAMQMAYRFNGCGVTQNVLYENQKLIANQFNSAIGKIQDSLSSAAPALGKLQDVVNQNAQALNTLVKQLSSNFGAISSVLNDILSRLDKVEAEVQIDRLITGRLQSLQTYVTQQLIRAAEIRASANLAATKMSECVLGQSKRVDFCGKGCHLMSFPQSAPHGVVFLHVTYVPAQEKNFTTAPAICHDGKAHFPREGVFVSNGTHWFVTQRNFYEPQIITTDNTFVSGNCDVVIGIVNNTVYDPLQPELDSFKEELDKYFKNHTSPDVDLGDISGINASVVNIQKEIDRLNEVAKNLNESLIDLQELGKYEQYIKGGGGSDIDPYKEFGSSYQLLNFLPLDFFPDLNALVDTATALYEEELTGREHCSPHHTAIRQALVCWDELTKLIAWMSSNITSEQVRTIIVNHVNDTWGLKVRQSLWFHLSCLTFGQHTVQEFLVSFGVWIRTPAPYRPPNAPILSTLPEHTVIC

SEQ ID NO: 7265 - protein, 1365 aa, Artificial Sequence
  SARS-CoV-2/USA/WA8-UW5/2020__EPI_ISL_413486 spike protein (1-1211)(I909C_Y1047C) WhcAg construct
MFVFLVLLPLVSSQCVNLTTRTQLPPAYTNSFTRGVYYPDKVFRSSVLHSTQDLFLPFFSNVTWFHAIHVSGTNGTKRFDNPVLPFNDGVYFASTEKSNIIRGWIFGTTLDSKTQSLLIVNNATNVVIKVCEFQFCNDPFLGVYYHKNNKSWMESEFRVYSSANNCTFEYVSQPFLMDLEGKQGNFKNLREFVFKNIDGYFKIYSKHTPINLVRDLPQGFSALEPLVDLPIGINITRFQTLLALHRSYLTPGDSSSGWTAGAAAYYVGYLQPRTFLLKYNENGTITDAVDCALDPLSETKCTLKSFTVEKGIYQTSNFRVQPTESIVRFPNITNLCPFGEVFNATRFASVYAWNRKRISNCVADYSVLYNSASFSTFKCYGVSPTKLNDLCFTNVYADSFVIRGDEVRQIAPGQTGKIADYNYKLPDDFTGCVIAWNSNNLDSKVGGNYNYLYRLFRKSNLKPFERDISTEIYQAGSTPCNGVEGFNCYFPLQSYGFQPTNGVGYQPYRVVVLSFELLHAPATVCGPKKSTNLVKNKCVNFNFNGLTGTGVLTESNKKFLPFQQFGRDIADTTDAVRDPQTLEILDITPCSFGGVSVITPGTNTSNQVAVLYQDVNCTEVPVAIHADQLTPTWRVYSTGSNVFQTRAGCLIGAEYVNNSYECDIPIGAGICASYQTQTNSPRRARSVASQSIIAYTMSLGAENSVAYSNNSIAIPTNFTISVTTEILPVSMTKTSVDCTMYICGDSTECSNLLLQYGSFCTQLNRALTGIAVEQDKNTQEVFAQVKQIYKTPPIKDFGGFNFSQILPDPSKPSKRSFIEDLLFNKVTLADAGFIKQYGDCLGDIAARDLICAQKFNGLTVLPPLLTDEMIAQYTSALLAGTITSGWTFGAGAALQIPFAMQMAYRFNGCGVTQNVLYENQKLIANQFNSAIGKIQDSLSSTASALGKLQDVVNQNAQALNTLVKQLSSNFGAISSVLNDILSRLDKVEAEVQIDRLITGRLQSLQTYVTQQLIRAAEIRASANLAATKMSECVLGQSKRVDFCGKGCHLMSFPQSAPHGVVFLHVTYVPAQEKNFTTAPAICHDGKAHFPREGVFVSNGTHWFVTQRNFYEPQIITTDNTFVSGNCDVVIGIVNNTVYDPLQPELDSFKEELDKYFKNHTSPDVDLGDISGINASVVNIQKEIDRLNEVAKNLNESLIDLQELGKYEQYIKGGGGSDIDPYKEFGSSYQLLNFLPLDFFPDLNALVDTATALYEEELTGREHCSPHHTAIRQALVCWDELTKLIAWMSSNITSEQVRTIIVNHVNDTWGLKVRQSLWFHLSCLTFGQHTVQEFLVSFGVWIRTPAPYRPPNAPILSTLPEHTVIC

SEQ ID NO: 7266 - protein, 1365 aa, Artificial Sequence
  SARS-CoV-2/England/20102000506/2020__EPI_ISL_415147 spike protein (1-1211)(I909C_Y1047C) WhcAg construct
MFVFLVLLPLVSSQCVNLTTRTQLPPAYTNSFTRGVYYPDKVFRSSVLHSTQDLFLPFFSNVTWFHAIHVSGTNGTKRFDNPVLPFNDGVYFASTEKSNIIRGWIFGTTLDSKTQSLLIVNNATNVVIKVCEFQFCNDPFLGVYYHKNNKSWMESEFRVYSSANNCTFEYVSQPFLMDLEGKQGNFKNLREFVFKNIDGYFKIYSKHTPINLVRDLPQGFSALEPLVDLPIGINITRFQTLLALHRSYLTPGDSSSGWTAGAAAYYVGYLQPRTFLLKYNENGTITDAVDCALDPLSETKCTLKSFTVEKGIYQTSNFRVQPTESIVRFPNITNLCPFGEVFNATRFASVYAWNRKRISNCVADYSVLYNSASFSTFKCYGVSPTKLNDLCFTNVYADSFVIRGDEVRQIAPGQTGKIADYNYKLPDDFTGCVIAWNSNNLDSKVGGNYNYLYRLFRKSNLKPFERDISTEIYQAGSTPCNGVEGFNCYFPLQSYGFQPTNGVGYQPYRVVVLSFELLHAPATVCGPKKSTNLVKNKCVNFNFNGLTGTGVLTESNKKFLPFQQFGRDIADTTDAVRDPQTLEILDITPCSFGGVSVITPGTNTSNQVAVLYQGVNCTEVPVAIHADQLTPTWRVYSTGSNVFQTRAGCLIGAEHVNNSYECDIPIGAGICASYQTQTNSPRRARSVASQSIIAYTMSLGAENSVAYSNNSIAIPTNFTISVTTEILPVSMTKTSVDCTMYICGDSTECSNLLLQYGSFCTQLNRALTGIAVEQDKNTQEVFAQVKQIYKTPPIKDFGGFNFSQILPDPSKPSKRSFIEDLLFNKVTLADAGFIKQYGYCLGDIAARDLICAQKFNGLTVLPPLLTDEMIAQYTSALLAGTITSGWTFGAGAALQIPFAMQMAYRFNGCGVTQNVLYENQKLIANQFNSAIGKIQDSLSSTASALGKLQDVVNQNAQALNTLVKQLSSNFGAISSVLNDILSRLDKVEAEVQIDRLITGRLQSLQTYVTQQLIRAAEIRASANLAATKMSECVLGQSKRVDFCGKGCHLMSFPQSAPHGVVFLHVTYVPAQEKNFTTAPAICHDGKAHFPREGVFVSNGTHWFVTQRNFYEPQIITTDNTFVSGNCDVVIGIVNNTVYDPLQPELDSFKEELDKYFKNHTSPDVDLGDISGINASVVNIQKEIDRLNEVAKNLNESLIDLQELGKYEQYIKGGGGSDIDPYKEFGSSYQLLNFLPLDFFPDLNALVDTATALYEEELTGREHCSPHHTAIRQALVCWDELTKLIAWMSSNITSEQVRTIIVNHVNDTWGLKVRQSLWFHLSCLTFGQHTVQEFLVSFGVWIRTPAPYRPPNAPILSTLPEHTVIC

SEQ ID NO: 7267 - protein, 1365 aa, Artificial Sequence
  SARS-CoV-2/Belgium/VAG-03013/2020__EPI_ISL_415155 spike protein (1-1211)(I909C_Y1047C) WhcAg construct
MFVFLVLLPLVSSQCVNLTTRTQLPPAYTNSFTRGVYYPDKVFRSSVLHSTQDLFLPFFSNVTWFHAIHVSGTNGTKRFDNPVLPFNDGVYFASTEKSNIIRGWIFGTTLDSKTQSLLIVNNATNVVIKVCEFQFCNDPFLGVYYHKNNKSWMESEFRVYSSANNCTFEYVSQPFLMDLEGKQGNFKNLREFVFKNIDGYFKIYSKHTPINLVRDLPQGFSALEPLVDLPIGINITRFQTLLALHRSYLTPGDSSSGWTAGAAAYYVGYLQPRTFLLKYNENGTITDAVDCALDPLSETKCTLKSFTVEKGIYQTSNFRVQPTESIVRFPNITNLCPFGEVFNATRFASVYAWNRKRISNCVADYSVLYNSASFSTFKCYGVSPTKLNDLCFTNVYADSFVIRGDEVRQIAPGQTGKIADYNYKLPDDFTGCVIAWNSNNLDSKVGGNYNYLYRLFRKSNLKPFERDISTEIYQAGSTPCNGVEGFNCYFPLQSYGFQPTNGVGYQPYRVVVLSFELLHAPATVCGPKKSTNLVKNKCVNFNFNGLTGTGVLTESNKKFLPFQQFGRDIADTTDAVRDPQTLEILDITPCSFGGVSVITPGTNTSNQVAVLYQGVNCTEVPVAIHADQLTPTWRVYSTGSNVFQTRAGCLIGAEHVNNSYECDIPIGAGICASYQTQTNSPRRARSVASQSIIAYTMSLGAENSVAYSNNSIAIPTNFTISVTTEILPVSMTKTSVDCTMYICGDSTECSNLLLQYGSFCTQLNRALTGIAVEQDKNTQEVFAQVKQIYKTPPIKDFGGFNFSQILPDPSKPSKRSFIEDLLFNKVTLADAGFIKQYGDCLGDIAARDLICAQKFNGLTVLPPLLTDEMIAQYTSALLAGTITSGWTFGAGAALQIPFAMQMAYRFNGCGVTQNVLYENQKLIANQFNSAIGKIQDSLSSTATALGKLQDVVNQNAQALNTLVKQLSSNFGAISSVLNDILSRLDKVEAEVQIDRLITGRLQSLQTYVTQQLIRAAEIRASANLAATKMSECVLGQSKRVDFCGKGCHLMSFPQSAPHGVVFLHVTYVPAQEKNFTTAPAICHDGKAHFPREGVFVSNGTHWFVTQRNFYEPQIITTDNTFVSGNCDVVIGIVNNTVYDPLQPELDSFKEELDKYFKNHTSPDVDLGDISGINASVVNIQKEIDRLNEVAKNLNESLIDLQELGKYEQYIKGGGGSDIDPYKEFGSSYQLLNFLPLDFFPDLNALVDTATALYEEELTGREHCSPHHTAIRQALVCWDELTKLIAWMSSNITSEQVRTIIVNHVNDTWGLKVRQSLWFHLSCLTFGQHTVQEFLVSFGVWIRTPAPYRPPNAPILSTLPEHTVIC

SEQ ID NO: 7268 - protein, 1365 aa, Artificial Sequence
  SARS-CoV-2/Belgium/BC-03016/2020__EPI_ISL_415157 spike protein (1-1211)(I909C_Y1047C) WhcAg construct
MFVFLVLLPLVSSQCVNLTTRTQLPPAYTNSFTRGVYYPDKVFRSSVLHSTQDLFLPFFSNVTWFHAIHVSGTNGTKRFDNPVLPFNDGVYFASTEKSNIIRGWIFGTTLDSKTQSLLIVNNATNVVIKVCEFQFCNDPFLGVYYHKNNKSWMESEFRVYSSANNCTFEYVSQPFLMDLEGKQGNFKNLREFVFKNIDGYFKIYSKHTPINLVRDLPQGFSALEPLVDLPIGINITRFQTLLALHRSYLTPGDSSSGWTAGAAAYYVGYLQPRTFLLKYNENGTITDAVDCALDPLSETKCTLKSFTVEKGIYQTSNFRVQPTESIVRFPNITNLCPFGEVFNATRFASVYAWNRKRISNCVADYSVLYNSASFSTFKCYGVSPTKLNDLCFTNVYADSFVIRGDEVRQIAPGQTGKIADYNYKLPDDFTGCVIAWNSNNLDSKVGGNYNYLYRLFRKSNLKPFERDISTEIYQAGSTPCNGVEGFNCYFPLQSYGFQPTNGVGYQPYRVVVLSFELLHAPATVCGPKKSTNLVKNKCVNFNFNGLTGTGVLTESNKKFLPFQQFGRDIADTTDAVRDPQTLEILDITPCSFGGVSVITPGTNTSNQVAVLYQGVNCTEVPVAIHADQLTPTWRVYSTGSNVFQTRAGCLIGAEHVNNSYECDIPIGAGICASYQTQTNSPRRARSVASQSIIAYTMSLGAENSVAYSNNSIAIPTNFTISVTTEILPVSMTKTSVDCTMYICGDSTECSNLLLQYGSFCTQLNRALTGIAVEQDKNTQEVFAQVKQIYKTPPIKDFGGFNFSQILPDPSKPSKRSFIEDLLFNKVTLADAGFIKQYGDCLGDIAARDLICAQKFNGLTVLPPLLTDEMIAQYTSALLAGTITSGWTFGAGAALQIPFAMQMAYRFNGCGVTQNVLYENQKLIANQFNSAIGKIQDSLSSTAPALGKLQDVVNQNAQALNTLVKQLSSNFGAISSVLNDILSRLDKVEAEVQIDRLITGRLQSLQTYVTQQLIRAAEIRASANLAATKMSECVLGQSKRVDFCGKGCHLMSFPQSAPHGVVFLHVTYVPAQEKNFTTAPAICHDGKAHFPREGVFVSNGTHWFVTQRNFYEPQIITTDNTFVSGNCDVVIGIVNNTVYDPLQPELDSFKEELDKYFKNHTSPDVDLGDISGINASVVNIQKEIDRLNEVAKNLNESLIDLQELGKYEQYIKGGGGSDIDPYKEFGSSYQLLNFLPLDFFPDLNALVDTATALYEEELTGREHCSPHHTAIRQALVCWDELTKLIAWMSSNITSEQVRTIIVNHVNDTWGLKVRQSLWFHLSCLTFGQHTVQEFLVSFGVWIRTPAPYRPPNAPILSTLPEHTVIC

SEQ ID NO: 7269 - protein, 1365 aa, Artificial Sequence
  SARS-CoV-2/Germany/BavPat3/2020__EPI_ISL_414521 spike protein (1-1211)(I909C_Y1047C) WhcAg construct
MFVFLVLLPLVSSQCVNLTTRTQLPPAYTNSFTRGVYYPDKVFRSSVLHSTQDLFLPFFSNVTWFHAIHVSGTNGTKRFDNPVLPFNDGVYFASTEKSNIIRGWIFGTTLDSKTQSLLIVNNATNVVIKVCEFQFCNDPFLGVYYHKNNKSWMESEFRVYSSANNCTFEYVSQPFLMDLEGKQGNFKNLREFVFKNIDGYFKIYSKHTPINLVRDLPQGFSALEPLVDLPIGINITRFQTLLALHRSYLTPGDSSSGWTAGAAAYYVGYLQPRTFLLKYNENGTITDAVDCALDPLSETKCTLKSFTVEKGIYQTSNFRVQPTESIVRFPNITNLCPFGEVFNATRFASVYAWNRKRISNCVADYSVLYNSASFSTFKCYGVSPTKLNDLCFTNVYADSFVIRGDEVRQIAPGQTGKIADYNYKLPDDFTGCVIAWNSNNLDSKVGGNYNYLYRLFRKSNLKPFERDISTEIYQAGSTPCNGVEGFNCYFPLQSYGFQPTNGVGYQPYRVVVLSFELLHAPATVCGPKKSTNLVKNKCVNFNFNGLTGTGVLTESNKKFLPFQQFGRDIADTTDAVRDPQTLEILDITPCSFGGVSVITPGTNTSNQVAVLYQDVNCTEVPVAIHADQLTPTWRVYSTGSNVFQTRAGCLIGAEHVNNSYECDIPIGAGICASYQTQTNSPRRARSVASQSIIAYTMSLGAENSVAYSNNSIAIPTNFTISVTTEILPVSMTKTSVDCTMYICGDSTECSNLLLQYGSFCTQLNRALTGIAVEQDKNTQQVFAQVKQIYKTPPIKDFGGFNFSQILPDPSKPSKRSFIEDLLFNKVTLADAGFIKQYGDCLGDIAARDLICAQKFNGLTVLPPLLTDEMIAQYTSALLAGTITSGWTFGAGAALQIPFAMQMAYRFNGCGVTQNVLYENQKLIANQFNSAIGKIQDSLSSTASALGKLQDVVNQNAQALNTLVKQLSSNFGAISSVLNDILSRLDKVEAEVQIDRLITGRLQSLQTYVTQQLIRAAEIRASANLAATKMSECVLGQSKRVDFCGKGCHLMSFPQSAPHGVVFLHVTYVPAQEKNFTTAPAICHDGKAHFPREGVFVSNGTHWFVTQRNFYEPQIITTDNTFVSGNCDVVIGIVNNTVYDPLQPELDSFKEELDKYFKNHTSPDVDLGDISGINASVVNIQKEIDRLNEVAKNLNESLIDLQELGKYEQYIKGGGGSDIDPYKEFGSSYQLLNFLPLDFFPDLNALVDTATALYEEELTGREHCSPHHTAIRQALVCWDELTKLIAWMSSNITSEQVRTIIVNHVNDTWGLKVRQSLWFHLSCLTFGQHTVQEFLVSFGVWIRTPAPYRPPNAPILSTLPEHTVIC

SEQ ID NO: 7270 - protein, 1365 aa, Artificial Sequence
  SARS-CoV-2/France/HF1805/2020__EPI_ISL_414628 spike protein (1-1211)(I909C_Y1047C) WhcAg construct
MFVFLVLLPLVSSQCVNLTTRTQLPPAYTNSFTRGVYYPDKVFRSSVLHSTQDLFLPFFSNVTWFHAIHVSGTNGTKRFDNPVLPFNDGVYFASTEKSNIIRGWIFGTTLDSKTQSLLIVNNATNVVIKVCEFQFCNDPFLGVYYHKNNKSWMESEFRVYSSANNCTFEYVSQPFLMDLEGKQGNFKNLREFVFKNIDGYFKIYSKHTPINLVRDLPQGFSALEPLVDLPIGINITRFQTLLALHRSYLTPGDSSSGWTAGAAAYYVGYLQPRTFLLKYNENGTITDAVDCALDPLSETKCTLKSFTVEKGIYQTSNFRVQPTESIVRFPNITNLCPFGEVFNATRFASVYAWNRKRISNCVADYSVLYNSASFSTFKCYGVSPTKLNDLCFTNVYADSFVIRGDEVRQIAPGQTGKIADYNYKLPDDFTGCVIAWNSNNLDSKVGGNYNYLYRLFRKSNLKPFERDISTEIYQAGSTPCNGVEGFNCYFPLQSYGFQPTNGVGYQPYRVVVLSFELLHAPATVCGPKKSTNLVKNKCVNFNFNGLTGTGVLTESNKKFLPFQQFGRDIADTTDAVRDPQTLEILDITPCSFGGVSVITPGTNTSNQVAVLYQGVNCTEVPVAIHADQLTPTWRVYSTGSNVFQTRAGCLIGAEHVNNSYECDIPIGAGICASYQTQTNSPRRARSVASQSIIAYTMSLGAENSVAYSNNSIAIPTNFTISVTTEILPVSMTKTSVDCTMYICGDSTECSNLLLQYGSFCTQLNRALTGIAVEQDKNTQEVFAQVKQIYKTPPIKDFGGFNFSQILPDPSKPSKRSFIEDLLFNKVTLADAGFIKQYGDCLGDIAARDLICAQKFNGLTVLPPLLTDEMIAQYTSALLAGTITSGWTFGAGAALQIPFAMQMAYRFNGCGVTQNVLYENQKLIANQFNSAIGKIQDSLSSTASALGKLQDVVNQNAQALNTLVKQLSSNFGAISSVLNDILSRLDKVEAEVQIDRLITGRLQSLQTYVTQQLIRAAEIRASANLAATKMSECVLGQSKRVDFCGKGCHLMSFPQSAPHGVVFLHVTYVPAQEKNFTTAPAICHDGKAHFPREGVFVSNGTHWFVTQRNFYEPQIITTDNTFVSGNCDVVIGVVNNTVYDPLQPELDSFKEELDKYFKNHTSPDVDLGDISGINASVVNIQKEIDRLNEVAKNLNESLIDLQELGKYEQYIKGGGGSDIDPYKEFGSSYQLLNFLPLDFFPDLNALVDTATALYEEELTGREHCSPHHTAIRQALVCWDELTKLIAWMSSNITSEQVRTIIVNHVNDTWGLKVRQSLWFHLSCLTFGQHTVQEFLVSFGVWIRTPAPYRPPNAPILSTLPEHTVIC

SEQ ID NO: 7271 - protein, 1365 aa, Artificial Sequence
  SARS-CoV-2/Netherlands/ZuidHolland_9/2020__EPI_ISL_414445 spike protein (1-1211)(I909C_Y1047C) WhcAg construct
MFVFLVLLPLVSSQCVNLTTRTQLPPAYTNSFTRGVYYPDKVFRSSVLHSTQDLFLPFFSNVTWFHAIHVSGTNGTKRFDNPVLPFNDGVYFASTEKSNIIRGWIFGTTLDSKTQSLLIVNNATNVVIKVCEFQFCNDPFLGVYYHKNNKSWMESEFRVYSSANNCTFEYVSQPFLMDLEGKQGNFKNLREFVFKNIDGYFKIYSKHTPINLVRDLPQGFSALEPLVDLPIGINITRFQTLLALHRSYLTPGDSSSGWTAGAAAYYVGYLQPRTFLLKYNENGTITDAVDCALDPLSETKCTLKSFTVEKGIYQTSNFRVQPTESIVRFPNITNLCPFGEVFNATRFASVYAWNRKRISNCVADYSVLYNSASFSTFKCYGVSPTKLNDLCFTNVYADSFVIRGDEVRQIAPGQTGKIADYNYKLPDDFTGCVIAWNSNNLDSKVGGNYNYLYRLFRKSNLKPFERDISTEIYQAGSTPCNGVEGFNCYFPLQSYGFQPTNGVGYQPYRVVVLSFELLHAPATVCGPKKSTNLVKNKCVNFNFNGLTGTGVLTESNKKFLPFQQFGRDIADTTDAVRDPQTLEILDITPCSFGGVSVITPGTNTSNQVAVLYQGVNCTEVPVAIHADQLTPTWRVYSTGSNVFQTRAGCLIGAEHVNNSYECDIPIGAGICASYQTQTNSPRRARSVASQSIIAYTMSLGAENSVAYSNNSIAIPTNFTISVTTEILPVSMTKTSVDCTMYICGDSTECSNLLLQYGSFCTQLNRALTGIAVEQDKNTQEVFAQVKQIYKTPPIKDFGGFNFSQILPDPSKPSKRSFIEDLLFNKVTLADAGFIKQYGDCLGDIAARDLICVQKFNGLTVLPPLLTDEMIAQYTSALLAGTITSGWTFGAGAALQIPFAMQMAYRFNGCGVTQNVLYENQKLIANQFNSAIGKIQDSLSSTASALGKLQDVVNQNAQALNTLVKQLSSNFGAISSVLNDILSRLDKVEAEVQIDRLITGRLQSLQTYVTQQLIRAAEIRASANLAATKMSECVLGQSKRVDFCGKGCHLMSFPQSAPHGVVFLHVTYVPAQEKNFTTAPAICHDGKAHFPREGVFVSNGTHWFVTQRNFYEPQIITTDNTFVSGNCDVVIGIVNNTVYDPLQPELDSFKEELDKYFKNHTSPDVDLGDISGINASVVNIQKEIDRLNEVAKNLNESLIDLQELGKYEQYIKGGGGSDIDPYKEFGSSYQLLNFLPLDFFPDLNALVDTATALYEEELTGREHCSPHHTAIRQALVCWDELTKLIAWMSSNITSEQVRTIIVNHVNDTWGLKVRQSLWFHLSCLTFGQHTVQEFLVSFGVWIRTPAPYRPPNAPILSTLPEHTVIC

SEQ ID NO: 7272 - protein, 1365 aa, Artificial Sequence
  SARS-CoV-2/Finland/FIN03032020A/2020__EPI_ISL_413602 spike protein (1-1211)(I909C_Y1047C) WhcAg construct
MFVFLVLLPLVSSQCVNLTTRTQLPPAYTNSFTRGVYYPDKVFRSSVLHSTQDLFLPFFSNVTWFHAIHVSGTNGTKRFDNPVLPFNDGVYFASTEKSNIIRGWIFGTTLDSKTQSLLIVNNATNVVIKVCEFQFCNDPFLGVYYHKNNKSWMESEFRVYSSANNCTFEYVSQPFLMDLEGKQGNFKNLREFVFKNIDGYFKIYSKHTPINLVRDLPQGFSALEPLVDLPIGINITRFQTLLALHRSYLTPGDSSSGWTAGAAAYYVGYLQPRTFLLKYNENGTITDAVDCALDPLSETKCTLKSFTVEKGIYQTSNFRVQPTESIVRFPNITNLCPFGEVFNATRFASVYAWNRKRISNCVADYSVLYNSASFSTFKCYGVSPTKLNDLCFTNVYADSFVIRGDEVRQIAPGQTGKIADYNYKLPDDFTGCVISWNSNNLDSKVGGNYNYLYRLFRKSNLKPFERDISTEIYQAGSTPCNGVEGFNCYFPLQSYGFQPTNGVGYQPYRVVVLSFELLHAPATVCGPKKSTNLVKNKCVNFNFNGLTGTGVLTESNKKFLPFQQFGRDIADTTDAVRDPQTLEILDITPCSFGGVSVITPGTNTSNQVAVLYQGVNCTEVPVAIHADQLTPTWRVYSTGSNVFQTRAGCLIGAEHVNNSYECDIPIGAGICASYQTQTNSPRRARSVASQSIIAYTMSLGAENSVAYSNNSIAIPTNFTISVTTEILPVSMTKTSVDCTMYICGDSTECSNLLLQYGSFCTQLNRALTGIAVEQDKNTQEVFAQVKQIYKTPPIKDFGGFNFSQILPDPSKPSKRSFIEDLLFNKVTLADAGFIKQYGDCLGDIAARDLICAQKFNGLTVLPPLLTDEMIAQYTSALLAGTITSGWTFGAGAALQIPFAMQMAYRFNGCGVTQNVLYENQKLIANQFNSAIGKIQDSLSSTASALGKLQDVVNQNAQALNTLVKQLSSNFGAISSVLNDILSRLDKVEAEVQIDRLITGRLQSLQTYVTQQLIRAAEIRASANLAATKMSECVLGQSKRVDFCGKGCHLMSFPQSAPHGVVFLHVTYVPAQEKNFTTAPAICHDGKAHFPREGVFVSNGTHWFVTQRNFYEPQIITTDNTFVSGNCDVVIGIVNNTVYDPLQPELDSFKEELDKYFKNHTSPDVDLGDISGINASVVNIQKEIDRLNEVAKNLNESLIDLQELGKYEQYIKGGGGSDIDPYKEFGSSYQLLNFLPLDFFPDLNALVDTATALYEEELTGREHCSPHHTAIRQALVCWDELTKLIAWMSSNITSEQVRTIIVNHVNDTWGLKVRQSLWFHLSCLTFGQHTVQEFLVSFGVWIRTPAPYRPPNAPILSTLPEHTVIC

SEQ ID NO: 7273 - protein, 1365 aa, Artificial Sequence
  SARS-CoV-2/France/GE1977/2020__EPI_ISL_414632 spike protein (1-1211)(I909C_Y1047C) WhcAg construct
MFVFLVLLPLVSSQCVNLTTRTQLPPAYTNSFTRGVYYPDKVFRSSVLHSTQDLFLPFFSNVTWFHAIHVSGTNGTKRFDNPVLPFNDGVYFASTEKSNIIRGWIFGTTLDSKTQSLLIVNNATNVVIKVCEFQFCNDPFLGVYYHKNNKSWMESEFRVYSSANNCTFEYVSQPFLMDLEGKQGNFKNLREFVFKNIDGYFKIYSKHTPINLVRDLPQGFSALEPLVDLPIGINITRFQTLLALHRSYLTPGDSSSGWTAGAAAYYVGYLQPRTFLLKYNENGTITDAVDCALDPLSETKCTLKSFTVEKGIYQTSNFRVQPTESIVRFPNITNLCPFGEVFNATRFASVYAWNRKRISNCVADYSVLYNSASFSTFKCYGVSPTKLNDLCFTNVYADSFVIRGDEVRQIAPGQTGKIADYNYKLPDDFTGCVIAWNSNNLDSKVGGNYNYLYRLFRKSNLKPFERDISTEIYQAGSTPCNGVEGFNCYFPLQSYGFQPTNGVGYQPYRVVVLSFELLHAPATVCGPKKSTNLVKNKCVNFNFNGLTGTGVLTESNKKFLPFQQFGRDIADTTDAVRDPQTLEILDITPCSFGGVSVITPGTNTSNQVAVLYQGVNCTEVPVAIHADQLTPTWRVYSTGSNVFQTRAGCLIGAEHVNNSYECDIPIGAGICASYQTQTNSPRRARSVASQSIIAYTMSLGAENSVAYSNNSIAIPTNFTISVTTEILPVSMTKTSVDCTMYICGDSTECSNLLLQYGSFCTQLNRALTGIAVEQDKNTQEVFAQVKQIYKTPPIKDFGGFNFSQILPDPSKPSKRSFIEDLLFNKVTLADAGFIKQYGDCLGDIAARDLICAQKFNGLTVLPPLLTDEMIAQYTSALLAGTITSGWTFGAGAALQIPFAMQMAYRFNGCGVTQNVLYENQKLIANQFNSAIGKIQDSLFSTASALGKLQDVVNQNAQALNTLVKQLSSNFGAISSVLNDILSRLDKVEAEVQIDRLITGRLQSLQTYVTQQLIRAAEIRASANLAATKMSECVLGQSKRVDFCGKGCHLMSFPQSAPHGVVFLHVTYVPAQEKNFTTAPAICHDGKAHFPREGVFVSNGTHWFVTQRNFYEPQIITTDNTFVSGNCDVVIGIVNNTVYDPLQPELDSFKEELDKYFKNHTSPDVDLGDISGINASVVNIQKEIDRLNEVAKNLNESLIDLQELGKYEQYIKGGGGSDIDPYKEFGSSYQLLNFLPLDFFPDLNALVDTATALYEEELTGREHCSPHHTAIRQALVCWDELTKLIAWMSSNITSEQVRTIIVNHVNDTWGLKVRQSLWFHLSCLTFGQHTVQEFLVSFGVWIRTPAPYRPPNAPILSTLPEHTVIC

SEQ ID NO: 7274 - protein, 1365 aa, Artificial Sequence
  SARS-CoV-2/Finland/FIN-313/2020__EPI_ISL_414641 spike protein (1-1211)(I909C_Y1047C) WhcAg construct
MFVFLVLLPLVSSQCVNLTTRTQLPPAYTNSFTRGVYYPDKVFRSSVLHSTQDLFLPFFSNVTWFHAIHVSGTNGTKRFDNPVLPFNDGVYFASTEKSNIIRGWIFGTTLDSKTQSLLIVNNATNVVIKVCEFQFCNDPFLGVYYHKNNKSWMESEFRVYSSANNCTFEYVSQPFLMDLEGKQGNFKNLREFVFKNIDGYFKIYSKHTPINLVRDLPQGFSALEPLVDLPIGINITRFKTLLALHRSYLTPGDSSSGWTAGAAAYYVGYLQPRTFLLKYNENGTITDAVDCALDPLSETKCTLKSFTVEKGIYQTSNFRVQPTESIVRFPNITNLCPFGEVFNATRFASVYAWNRKRISNCVADYSVLYNSASFSTFKCYGVSPTKLNDLCFTNVYADSFVIRGDEVRQIAPGQTGKIADYNYKLPDDFTGCVIAWNSNNLDSKVGGNYNYLYRLFRKSNLKPFERDISTEIYQAGSTPCNGVEGFNCYFPLQSYGFQPTNGVGYQPYRVVVLSFELLHAPATVCGPKKSTNLVKNKCVNFNFNGLTGTGVLTESNKKFLPFQQFGRDIADTTDAVRDPQTLEILDITPCSFGGVSVITPGTNTSNQVAVLYQGVNCTEVPVAIHADQLTPTWRVYSTGSNVFQTRAGCLIGAEHVNNSYECDIPIGAGICASYQTQTNSPRRARSVASQSIIAYTMSLGAENSVAYSNNSIAIPTNFTISVTTEILPVSMTKTSVDCTMYICGDSTECSNLLLQYGSFCTQLNRALTGIAVEQDKNTQEVFAQVKQIYKTPPIKDFGGFNFSQILPDPSKPSKRSFIEDLLFNKVTLADAGFIKQYGDCLGDIAARDLICAQKFNGLTVLPPLLTDEMIAQYTSALLAGTITSGWTFGAGAALQIPFAMQMAYRFNGCGVTQNVLYENQKLIANQFNSAIGKIQDSLSSTASALGKLQDVVNQNAQALNTLVKQLSSNFGAISSVLNDILSRLDKVEAEVQIDRLITGRLQSLQTYVTQQLIRAAEIRASANLAATKMSECVLGQSKRVDFCGKGCHLMSFPQSAPHGVVFLHVTYVPAQEKNFTTAPAICHDGKAHFPREGVFVSNGTHWFVTQRNFYEPQIITTDNTFVSGNCDVVIGIVNNTVYDPLQPELDSFKEELDKYFKNHTSPDVDLGDISGINASVVNIQKEIDRLNEVAKNLNESLIDLQELGKYEQYIKGGGGSDIDPYKEFGSSYQLLNFLPLDFFPDLNALVDTATALYEEELTGREHCSPHHTAIRQALVCWDELTKLIAWMSSNITSEQVRTIIVNHVNDTWGLKVRQSLWFHLSCLTFGQHTVQEFLVSFGVWIRTPAPYRPPNAPILSTLPEHTVIC

SEQ ID NO: 7275 - protein, 1365 aa, Artificial Sequence
  SARS-CoV-2/Netherlands/ZuidHolland_2/2020__EPI_ISL_414556 spike protein (1-1211)(I909C_Y1047C) WhcAg construct
MFVFLVLLPLVSSQCVNLTTRTQLPPAYTNSFTRGVYYPDKVFRSSVLHSTQDLFLPFFSNVTWFHAIHVSGTNGTKRFDNPVLPFNDGVYFASTEKSNIIRGWIFGTTLDSKTQSLLIVNNATNVVIKVCEFQFCNDPFLGVYYHKNNKSWMESEFRVYSSANNCTFEYVSQPFLMDLEGKQGNFKNLREFVFKNIDGYFKIYSKHTPINLVRDLPQGFSALEPLVDLPIGINITRFQTLLALHRSYLTPGDSSSGWTAGAAAYYVGYLQPRTFLLKYNENGTITDAVDCALDPLSETKCTLKSFTVEKGIYQTSNFRVQPTESIVRFPNITNLCPFGEVFNATRFASVYAWNRKRISNCVADYSVLYNSASFSTFKCYGVSPTKLNDLCFTNVYADSFVIRGDEVRQIAPGQTGKIADYNYKLPDDFTGCVIAWNSNNLDSKVGGNYNYLYRLFRKSNLKPFERDISTEIYQAGSTPCNGVEGFNCYFPLQSYGFQPTNGVGYQPYRVVVLSFELLHAPATVCGPKKSTNLVKNKCVNFNFNGLTGTGVLTESNKKFLPFQQFGRDIADTTDAVRDPQTLEILDITPCSFGGVSVITPGTNTSNQVAVLYQGVNCTEVPVAIHADQLTPTWRVYSTGSNVFQTRAGCLIGAEHVNNSYECDIPIGAGICASYQTQTNSPRRARSVASQSIIAYTMSLGAENSVAYSNNSIAIPTNFTISVTTEILPVSMTKTSVDCTMYICGDSTECSNLLLQYGSFCTQLNRALTGIALEQDKNTQEVFAQVKQIYKTPPIKDFGGFNFSQILPDPSKPSKRSFIEDLLFNKVTLADAGFIKQYGDCLGDIAARDLICAQKFNGLTVLPPLLTDEMIAQYTSALLAGTITSGWTFGAGAALQIPFAMQMAYRFNGCGVTQNVLYENQKLIANQFNSAIGKIQDSLSSTASALGKLQDVVNQNAQALNTLVKQLSSNFGAISSVLNDILSRLDKVEAEVQIDRLITGRLQSLQTYVTQQLIRAAEIRASANLAATKMSECVLGQSKRVDFCGKGCHLMSFPQSAPHGVVFLHVTYVPAQEKNFTTAPAICHDGKAHFPREGVFVSNGTHWFVTQRNFYEPQIITTDNTFVSGNCDVVIGIVNNTVYDPLQPELDSFKEELDKYFKNHTSPDVDLGDISGINASVVNIQKEIDRLNEVAKNLNESLIDLQELGKYEQYIKGGGGSDIDPYKEFGSSYQLLNFLPLDFFPDLNALVDTATALYEEELTGREHCSPHHTAIRQALVCWDELTKLIAWMSSNITSEQVRTIIVNHVNDTWGLKVRQSLWFHLSCLTFGQHTVQEFLVSFGVWIRTPAPYRPPNAPILSTLPEHTVIC

SEQ ID NO: 7276 - protein, 1365 aa, Artificial Sequence
  SARS-CoV-2/USA/WA-UW31/2020__EPI_ISL_414618 spike protein (1-1211)(I909C_Y1047C) WhcAg construct
MFVFLVLLPLVSSQCVNLTTRTQLPPAYTNSFTRGVYYPDKVFRSSVLHSTQDLFLPFFSNVTWFHAIHVSGTNGTKRFDNPVLPFNDGVYFASTEKSNIIRGWIFGTTLDSKTQSLLIVNNATNVVIKVCEFQFCNDPFLGVYYHKNNKSWMESEFRVYSSANNCTFEYVSQPFLMDLEGKQGNFKNLREFVFKNIDGYFKIYSKHTPINLVRDLPQGFSALEPLVDLPIGINITRFQTLLALHRSYLTPGDSSSGWTAGAAAYYVGYLQPRTFLLKYNENGTITDAVDCALDPLSETKCTLKSFTVEKGIYQTSNFRVQPTESIVRFPNITNLCPFGEVFNATRFASVYAWNRKRISNCVADYSVLYNSASFSTFKCYGVSPTKLNDLCFTNVYADSFVIRGDEVRQIAPGQTGKIADYNYKLPDDFTGCVIAWNSNNLDSKVGGNYNYLYRLFRKSNLKPFERDISTEIYQAGSTPCNGAEGFNCYFPLQSYGFQPTNGVGYQPYRVVVLSFELLHAPATVCGPKKSTNLVKNKCVNFNFNGLTGTGVLTESNKKFLPFQQFGRDIADTTDAVRDPQTLEILDITPCSFGGVSVITPGTNTSNQVAVLYQDVNCTEVPVAIHADQLTPTWRVYSTGSNVFQTRAGCLIGAEHVNNSYECDIPIGAGICASYQTQTNSPRRARSVASQSIIAYTMSLGAENSVAYSNNSIAIPTNFTISVTTEILPVSMTKTSVDCTMYICGDSTECSNLLLQYGSFCTQLNRALTGIAVEQDKNTQEVFAQVKQIYKTPPIKDFGGFNFSQILPDPSKPSKRSFIEDLLFNKVTLADAGFIKQYGDCLGDIAARDLICAQKFNGLTVLPPLLTDEMIAQYTSALLAGTITSGWTFGAGAALQIPFAMQMAYRFNGCGVTQNVLYENQKLIANQFNSAIGKIQDSLSSTASALGKLQDVVNQNAQALNTLVKQLSSNFGAISSVLNDILSRLDKVEAEVQIDRLITGRLQSLQTYVTQQLIRAAEIRASANLAATKMSECVLGQSKRVDFCGKGCHLMSFPQSAPHGVVFLHVTYVPAQEKNFTTAPAICHDGKAHFPREGVFVSNGTHWFVTQRNFYEPQIITTDNTFVSGNCDVVIGIVNNTVYDPLQPELDSFKEELDKYFKNHTSPDVDLGDISGINASVVNIQKEIDRLNEVAKNLNESLIDLQELGKYEQYIKGGGGSDIDPYKEFGSSYQLLNFLPLDFFPDLNALVDTATALYEEELTGREHCSPHHTAIRQALVCWDELTKLIAWMSSNITSEQVRTIIVNHVNDTWGLKVRQSLWFHLSCLTFGQHTVQEFLVSFGVWIRTPAPYRPPNAPILSTLPEHTVIC

SEQ ID NO: 7277 - protein, 1365 aa, Artificial Sequence
  SARS-CoV-2/South Korea/SNU01/2020__EPI_ISL_411929 spike protein (1-1211)(I909C_Y1047C) WhcAg construct
MFVFLVLLPLVSSQCVNLTTRTQLPPAYTNSFTRGVYYPDKVFRSSVLHSTQDLFLPFFSNVTWFHAIHVSGTNGTKRFDNPVLPFNDGVYFASTEKSNIIRGWIFGTTLDSKTQSLLIVNNATNVVIKVCEFQFCNDPFLGVYYHKNNKSWMESEFRVYSSANNCTFEYVSQPFLMDLEGKQGNFKNLREFVFKNIDGYFKIYSKHTPINLVRDLPQGFWALEPLVDLPIGINITRFQTLLALHRSYLTPGDSSSGWTAGAAAYYVGYLQPRTFLLKYNENGTITDAVDCALDPLSETKCTLKSFTVEKGIYQTSNFRVQPTESIVRFPNITNLCPFGEVFNATRFASVYAWNRKRISNCVADYSVLYNSASFSTFKCYGVSPTKLNDLCFTNVYADSFVIRGDEVRQIAPGQTGKIADYNYKLPDDFTGCVIAWNSNNLDSKVGGNYNYLYRLFRKSNLKPFERDISTEIYQAGSTPCNGVEGFNCYFPLQSYGFQPTNGVGYQPYRVVVLSFELLHAPATVCGPKKSTNLVKNKCVNFNFNGLTGTGVLTESNKKFLPFQQFGRDIADTTDAVRDPQTLEILDITPCSFGGVSVITPGTNTSNQVAVLYQDVNCTEVPVAIHADQLTPTWRVYSTGSNVFQTRAGCLIGAEHVNNSYECDIPIGAGICASYQTQTNSPRRARSVASQSIIAYTMSLGAENSVAYSNNSIAIPTNFTISVTTEILPVSMTKTSVDCTMYICGDSTECSNLLLQYGSFCTQLNRALTGIAVEQDKNTQEVFAQVKQIYKTPPIKDFGGFNFSQILPDPSKPSKRSFIEDLLFNKVTLADAGFIKQYGDCLGDIAARDLICAQKFNGLTVLPPLLTDEMIAQYTSALLAGTITSGWTFGAGAALQIPFAMQMAYRFNGCGVTQNVLYENQKLIANQFNSAIGKIQDSLSSTASALGKLQDVVNQNAQALNTLVKQLSSNFGAISSVLNDILSRLDKVEAEVQIDRLITGRLQSLQTYVTQQLIRAAEIRASANLAATKMSECVLGQSKRVDFCGKGCHLMSFPQSAPHGVVFLHVTYVPAQEKNFTTAPAICHDGKAHFPREGVFVSNGTHWFVTQRNFYEPQIITTDNTFVSGNCDVVIGIVNNTVYDPLQPELDSFKEELDKYFKNHTSPDVDLGDISGINASVVNIQKEIDRLNEVAKNLNESLIDLQELGKYEQYIKGGGGSDIDPYKEFGSSYQLLNFLPLDFFPDLNALVDTATALYEEELTGREHCSPHHTAIRQALVCWDELTKLIAWMSSNITSEQVRTIIVNHVNDTWGLKVRQSLWFHLSCLTFGQHTVQEFLVSFGVWIRTPAPYRPPNAPILSTLPEHTVIC

SEQ ID NO: 7278 - protein, 1365 aa, Artificial Sequence
  SARS-CoV-2/China/WF0004/2020__EPI_ISL_413694 spike protein (1-1211)(I909C_Y1047C) WhcAg construct
MFVFLVLLPLVSSQCVNLTTRTQLPPAYTNSFTRGVYYPDKVFRSSVLHSTQDLFLPFFSNVTWFHAIHVSGTNGTKRFDNPVLPFNDGVYFASTEKSNIIRGWIFGTTLDSKTQSLLIVNNATNVVIKVCEFQFCNDPFLGVYYHKNNKSWTESEFRVYSSANNCTFEYVSQPFLMDLEGKQGNFKNLREFVFKNIDGYFKIYSKHTPINLVRDLPQGFSALEPLVDLPIGINITRFQTLLALHRSYLTPGDSSSGWTAGAAAYYVGYLQPRTFLLKYNENGTITDAVDCALDPLSETKCTLKSFTVEKGIYQTSNFRVQPTESIVRFPNITNLCPFGEVFNATRFASVYAWNRKRISNCVADYSVLYNSASFSTFKCYGVSPTKLNDLCFTNVYADSFVIRGDEVRQIAPGQTGKIADYNYKLPDDFTGCVIAWNSNNLDSKVGGNYNYLYRLFRKSNLKPFERDISTEIYQAGSTPCNGVEGFNCYFPLQSYGFQPTNGVGYQPYRVVVLSFELLHAPATVCGPKKSTNLVKNKCVNFNFNGLTGTGVLTESNKKFLPFQQFGRDIADTTDAVRDPQTLEILDITPCSFGGVSVITPGTNTSNQVAVLYQDVNCTEVPVAIHADQLTPTWRVYSTGSNVFQTRAGCLIGAEHVNNSYECDIPIGAGICASYQTQTNSPRRARSVASQSIIAYTMSLGAENSVAYSNNSIAIPTNFTISVTTEILPVSMTKTSVDCTMYICGDSTECSNLLLQYGSFCTQLNRALTGIAVEQDKNTQEVFAQVKQIYKTPPIKDFGGFNFSQILPDPSKPSKRSFIEDLLFNKVTLADAGFIKQYGDCLGDIAARDLICAQKFNGLTVLPPLLTDEMIAQYTSALLAGTITSGWTFGAGAALQIPFAMQMAYRFNGCGVTQNVLYENQKLIANQFNSAIGKIQDSLSSTASALGKLQDVVNQNAQALNTLVKQLSSNFGAISSVLNDILSRLDKVEAEVQIDRLITGRLQSLQTYVTQQLIRAAEIRASANLAATKMSECVLGQSKRFDFCGKGCHLMSFPQSAPHGVVFLHVTYVPAQEKNFTTAPAICHDGKAHFPREGVFVSNGTHWFVTQRNFYEPQIITTDNTFVSGNCDVVIGIVNNTVYDPLQPELDSFKEELDKYFKNHTSPDVDLGDISGINASVVNIQKEIDRLNEVAKNLNESLIDLQELGKYEQYIKGGGGSDIDPYKEFGSSYQLLNFLPLDFFPDLNALVDTATALYEEELTGREHCSPHHTAIRQALVCWDELTKLIAWMSSNITSEQVRTIIVNHVNDTWGLKVRQSLWFHLSCLTFGQHTVQEFLVSFGVWIRTPAPYRPPNAPILSTLPEHTVIC

SEQ ID NO: 7279 - protein, 1365 aa, Artificial Sequence
  SARS-CoV-2/China/WF0028/2020__EPI_ISL_413791 spike protein (1-1211)(I909C_Y1047C) WhcAg construct
MFVFLVLLPLVSSQCVNLTTRTQLPPAYTNSFTRGVYYPDKVFRSSVLHSTQDLFLPFFSNVTWFHAIHVSGTNGTKRFDNPVLPFNDGVYFASTEKSNIIRGWIFGTTLDSKTQSLLIVNNATNVVIKVCEFQFCNDPFLGVYYHKNNKSWMESEFRVYSSANNCTFEYVSQPFLMDLEGKQGNFKNLREFVFKNIDGYFKIYSKHTPINLVRDLPQGFSALEPLVDLPIGINITRFQTLLALHRSYLTPGDSSSGWTAGAAAYYVGYLQPRTFLLKYNENGTITDAVDCALDPLSETKCTLKSFTVEKGIYQTSNFRVQPTESIVRFPNITNLCPFGEVFNATRFASVYAWNRKRISNCVADYSVLYNSASFSTFKCYGVSPTKLNDLCFTNVYADSFVIRGDEVRQIAPGQTGKIADYNYKLPDDFTGCVIAWNSNNLDSKVGGNYNYLYRLFRKSNLKPFERDISTEIYQAGSTPCNGVEGFNCYFPLQSYGFQPTNGVGYQPYRVVVLSFELLHAPATVCGPKKSTNLVKNKCVNFNFNGLTGTGVLTESNKKFLPFQQFGRDIADTTDAVRDPQTLEILDITPCSFGGVSVITPGTNTSNQVAVLYQDVNCTEVPVAIHADQLTPTWRVYSTGSNVFQTRAGCLIGAEHVNNSYECDIPIGAGICASYQTQTNSPRRARSVASQSIIAYTMSLGAENSVAYSNNSIAIPTNFTISVTTEILPVSMTKTSVDCTMYICGDSTECSNLLLQYGSFCTQLNRALTGIAVEQDKNTQEVFAQVKQIYKTPPIKDFGGFNFSQILPDPSKPSKRSFIEDLLFNKVTLADAGFIKQYGDCLGDIAARDLICAQKFNGLTVLPPLLTDEMIAQYTSALLAGTITSGWTFGAGAALQIPFAMQMAYRFNGCGVTQNVLYENQKLIANQFNSAIGKIQDSLSSTASALGKLQDVVNQNAQALNTLVKQLSSNFGAISSVLNDILSRLDKVEAEVQIDRLITGRLQSLQTYVTQQLIRAAEIRASANLAATKMSECVLGQSKRVDFCGKGCHLMSFPQSAPHGVVFLHVTYVPAQEKNFTTAPAICHDGKAHFPREGVFVSNGTHWFVTQRNFYEPQIITTDNTFVSGNCDVVIGIVNNTVYDPLQPELESFKEELDKYFKNHTSPDVDLGDISGINASVVNIQKEIDRLNEVAKNLNESLIDLQELGKYEQYIKGGGGSDIDPYKEFGSSYQLLNFLPLDFFPDLNALVDTATALYEEELTGREHCSPHHTAIRQALVCWDELTKLIAWMSSNITSEQVRTIIVNHVNDTWGLKVRQSLWFHLSCLTFGQHTVQEFLVSFGVWIRTPAPYRPPNAPILSTLPEHTVIC

SEQ ID NO: 7280 - protein, 1365 aa, Artificial Sequence
  SARS-CoV-2/2019-nCoV/USA-CruiseA-18/2020__MT159716.1 spike protein (1-1211)(I909C_Y1047C) WhcAg construct
MFVFLVLLPLVSSQCVNLTTRTQLPPAYTNSFTRGVYYPDKVFRSSVLHSTQDLFLPFFSNVTWFHAIHVSGTNGTKRFDNPVLPFNDGVYFASTEKSNIIRGWIFGTTLDSKTQSLLIVNNATNVVIKVCEFQFCNDPFLGVYYHKNNKSWMESELRVYSSANNCTFEYVSQPFLMDLEGKQGNFKNLREFVFKNIDGYFKIYSKHTPINLVRDLPQGFSALEPLVDLPIGINITRFQTLLALHRSYLTPGDSSSGWTAGAAAYYVGYLQPRTFLLKYNENGTITDAVDCALDPLSETKCTLKSFTVEKGIYQTSNFRVQPTESIVRFPNITNLCPFGEVFNATRFASVYAWNRKRISNCVADYSVLYNSASFSTFKCYGVSPTKLNDLCFTNVYADSFVIRGDEVRQIAPGQTGKIADYNYKLPDDFTGCVIAWNSNNLDSKVGGNYNYLYRLFRKSNLKPFERDISTEIYQAGSTPCNGVEGFNCYFPLQSYGFQPTNGVGYQPYRVVVLSFELLHAPATVCGPKKSTNLVKNKCVNFNFNGLTGTGVLTESNKKFLPFQQFGRDIADTTDAVRDPQTLEILDITPCSFGGVSVITPGTNTSNQVAVLYQDVNCTEVPVAIHADQLTPTWRVYSTGSNVFQTRAGCLIGAEHVNNSYECDIPIGAGICASYQTQTNSPRRARSVASQSIIAYTMSLGAENSVAYSNNSIAIPTNFTISVTTEILPVSMTKTSVDCTMYICGDSTECSNLLLQYGSFCTQLNRALTGIAVEQDKNTQEVFAQVKQIYKTPPIKDFGGFNFSQILPDPSKPSKRSFIEDLLFNKVTLADAGFIKQYGDCLGDIAARDLICAQKFNGLTVLPPLLTDEMIAQYTSALLAGTITSGWTFGAGAALQIPFAMQMAYRFNGCGVTQNVLYENQKLIANQFNSAIGKIQDSLSSTASALGKLQDVVNQNAQALNTLVKQLSSNFGAISSVLNDILSRLDKVEAEVQIDRLITGRLQSLQTYVTQQLIRAAEIRASANLAATKMSECVLGQSKRVDFCGKGCHLMSFPQSAPHGVVFLHVTYVPAQEKNFTTAPAICHDGKAHFPREGVFVSNGTHWFVTQRNFYEPQIITTDNTFVSGNCDVVIGIVNNTVYDPLQPELDSFKEELDKYFKNHTSPDVDLGDISGINASVVNIQKEIDRLNEVAKNLNESLIDLQELGKYEQYIKGGGGSDIDPYKEFGSSYQLLNFLPLDFFPDLNALVDTATALYEEELTGREHCSPHHTAIRQALVCWDELTKLIAWMSSNITSEQVRTIIVNHVNDTWGLKVRQSLWFHLSCLTFGQHTVQEFLVSFGVWIRTPAPYRPPNAPILSTLPEHTVIC

SEQ ID NO: 7281 - protein, 1365 aa, Artificial Sequence
  SARS-CoV-2/SARS-CoV-2/Yunnan-01/human/2020/CHN__MT049951.1 spike protein (1-1211)(I909C_Y1047C) WhcAg construct
MFVFLVLLPLVSSQCVNLTTRTQLPPANTNSFTRGVYYPDKVFRSSVLHSTQDLFLPFFSNVTWFHAIHVSGTNGTKRFDNPVLPFNDGVYFASTEKSNIIRGWIFGTTLDSKTQSLLIVNNATNVVIKVCEFQFCNDPFLGVYYHKNNKSWMESEFRVYSSANNCTFEYVSQPFLMDLEGKQGNFKNLREFVFKNIDGYFKIYSKHTPINLVRDLPQGFSALEPLVDLPIGINITRFQTLLALHRSYLTPGDSSSGWTAGAAAYYVGYLQPRTFLLKYNENGTITDAVDCALDPLSETKCTLKSFTVEKGIYQTSNFRVQPTESIVRFPNITNLCPFGEVFNATRFASVYAWNRKRISNCVADYSVLYNSASFSTFKCYGVSPTKLNDLCFTNVYADSFVIRGDEVRQIAPGQTGKIADYNYKLPDDFTGCVIAWNSNNLDSKVGGNYNYLYRLFRKSNLKPFERDISTEIYQAGSTPCNGVEGFNCYFPLQSYGFQPTNGVGYQPYRVVVLSFELLHAPATVCGPKKSTNLVKNKCVNFNFNGLTGTGVLTESNKKFLPFQQFGRDIADTTDAVRDPQTLEILDITPCSFGGVSVITPGTNTSNQVAVLYQDVNCTEVPVAIHADQLTPTWRVYSTGSNVFQTRAGCLIGAEHVNNSYECDIPIGAGICASYQTQTNSPRRARSVASQSIIAYTMSLGAENSVAYSNNSIAIPTNFTISVTTEILPVSMTKTSVDCTMYICGDSTECSNLLLQYGSFCTQLNRALTGIAVEQDKNTQEVFAQVKQIYKTPPIKDFGGFNFSQILPDPSKPSKRSFIEDLLFNKVTLADAGFIKQYGDCLGDIAARDLICAQKFNGLTVLPPLLTDEMIAQYTSALLAGTITSGWTFGAGAALQIPFAMQMAYRFNGCGVTQNVLYENQKLIANQFNSAIGKIQDSLSSTASALGKLQDVVNQNAQALNTLVKQLSSNFGAISSVLNDILSRLDKVEAEVQIDRLITGRLQSLQTYVTQQLIRAAEIRASANLAATKMSECVLGQSKRVDFCGKGCHLMSFPQSAPHGVVFLHVTYVPAQEKNFTTAPAICHDGKAHFPREGVFVSNGTHWFVTQRNFYEPQIITTDNTFVSGNCDVVIGIVNNTVYDPLQPELDSFKEELDKYFKNHTSPDVDLGDISGINASVVNIQKEIDRLNEVAKNLNESLIDLQELGKYEQYIKGGGGSDIDPYKEFGSSYQLLNFLPLDFFPDLNALVDTATALYEEELTGREHCSPHHTAIRQALVCWDELTKLIAWMSSNITSEQVRTIIVNHVNDTWGLKVRQSLWFHLSCLTFGQHTVQEFLVSFGVWIRTPAPYRPPNAPILSTLPEHTVIC

SEQ ID NO: 7282 - protein, 1365 aa, Artificial Sequence
  SARS-CoV-2/USA/WA-UW292/2020__EPI_ISL_418077 spike protein (1-1211)(I909C_Y1047C) WhcAg construct
MFVFLVLLPLVSSQCVNLTTRTQLPPAYTNSFTRGVYYPDKVFRSSVLHSTQDLFLPFFSNVTWFHAIHVSGTNGTKRFDNPVLPFNDGVYFASTEKSNIIRGWIFGTTLDSKTQSLLIVNNATNVVIKVCEFQFCNDPFLGVYYHKNNKSWMESEFRVYSSANNCTFEYVSQPFLMDLEGKQGNFKNLREFVFKNIDGYFKIYSKHTPINLVRDLPQGFSALEPLVDLPIGINITRFQTLLALHRSYLTPGDSSSGWTAGAAAYYVGYLQPRTFLLKYNENGTITDAVDCALDPLSETKCTLKSFTVEKGIYQTSNFRVQPTESIVRFPNITNLCPFGEVFNATRFASVYAWNRKRISNCVADYSVLYNSASFSTFKCYGVSPTKLNDLCFTNVYADSFVIRGDEVRQIAPGQTGKIADYNYKLPDDFTGCVIAWNSNNLDSKVGGNYNYLYRLFRKSNLKPFERDISTEIYQASSTPCNGVEGFNCYFPLQSYGFQPTNGVGYQPYRVVVLSFELLHAPATVCGPKKSTNLVKNKCVNFNFNGLTGTGVLTESNKKFLPFQQFGRDIADTTDAVRDPQTLEILDITPCSFGGVSVITPGTNTSNQVAVLYQDVNCTEVPVAIHADQLTPTWRVYSTGSNVFQTRAGCLIGAEHVNNSYECDIPIGAGICASYQTQTNSPRRARSVASQSIIAYTMSLGAENSVAYSNNSIAIPTNFTISVTTEILPVSMTKTSVDCTMYICGDSTECSNLLLQYGSFCTQLNRALTGIAVEQDKNTQEVFAQVKQIYKTPPIKDFGGFNFSQILPDPSKPSKRSFIEDLLFNKVTLADAGFIKQYGDCLGDIAARDLICAQKFNGLTVLPPLLTDEMIAQYTSALLAGTITSGWTFGAGAALQIPFAMQMAYRFNGCGVTQNVLYENQKLIANQFNSAIGKIQDSLSSTASALGKLQDVVNQNAQALNTLVKQLSSNFGAISSVLNDILSRLDKVEAEVQIDRLITGRLQSLQTYVTQQLIRAAEIRASANLAATKMSECVLGQSKRVDFCGKGCHLMSFPQSAPHGVVFLHVTYVPAQEKNFTTAPAICHDGKAHFPREGVFVSNGTHWFVTQRNFYEPQIITTDNTFVSGNCDVVIGIVNNTVYDPLQPELDSFKEELDKYFKNHTSPDVDLGDISGINASVVNIQKEIDRLNEVAKNLNESLIDLQELGKYEQYIKGGGGSDIDPYKEFGSSYQLLNFLPLDFFPDLNALVDTATALYEEELTGREHCSPHHTAIRQALVCWDELTKLIAWMSSNITSEQVRTIIVNHVNDTWGLKVRQSLWFHLSCLTFGQHTVQEFLVSFGVWIRTPAPYRPPNAPILSTLPEHTVIC

SEQ ID NO: 7283 - protein, 1365 aa, Artificial Sequence
  SARS-CoV-2/Iceland/192/2020__EPI_ISL_417819 spike protein (1-1211)(I909C_Y1047C) WhcAg construct
MFVFFVLLPLVSSQCVNLTTRTQLPPAYTNSFTRGVYYPDKVFRSSVLHSTQDLFLPFFSNVTWFHAIHVSGTNGTKRFDNPVLPFNDGVYFASTEKSNIIRGWIFGTTLDSKTQSLLIVNNATNVVIKVCEFQFCNDPFLGVYYHKNNKSWMESEFRVYSSANNCTFEYVSQPFLMDLEGKQGNFKNLREFVFKNIDGYFKIYSKHTPINLVRDLPQGFSALEPLVDLPIGINITRFQTLLALHRSYLTPGDSSSGWTAGAAAYYVGYLQPRTFLLKYNENGTITDAVDCALDPLSETKCTLKSFTVEKGIYQTSNFRVQPTESIVRFPNITNLCPFGEVFNATRFASVYAWNRKRISNCVADYSVLYNSASFSTFKCYGVSPTKLNDLCFTNVYADSFVIRGDEVRQIAPGQTGKIADYNYKLPDDFTGCVIAWNSNNLDSKVGGNYNYLYRLFRKSNLKPFERDISTEIYQAGSTPCNGVEGFNCYFPLQSYGFQPTNGVGYQPYRVVVLSFELLHAPATVCGPKKSTNLVKNKCVNFNFNGLTGTGVLTESNKKFLPFQQFGRDIADTTDAVRDPQTLEILDITPCSFGGVSVITPGTNTSNQVAVLYQGVNCTEVPVAIHADQLTPTWRVYSTGSNVFQTRAGCLIGAEHVNNSYECDIPIGAGICASYQTQTNSPRRARSVASQSIIAYTMSLGAENSVAYSNNSIAIPTNFTISVTTEILPVSMTKTSVDCTMYICGDSTECSNLLLQYGSFCTQLNRALTGIAVEQDKNTQEVFAQVKQIYKTPPIKDFGGFNFSQILPDPSKPSKRSFIEDLLFNKVTLADAGFIKQYGDCLGDIAARDLICAQKFNGLTVLPPLLTDEMIAQYTSALLAGTITSGWTFGAGAALQIPFAMQMAYRFNGCGVTQNVLYENQKLIANQFNSAIGKIQDSLSSTASALGKLQDVVNQNAQALNTLVKQLSSNFGAISSVLNDILSRLDKVEAEVQIDRLITGRLQSLQTYVTQQLIRAAEIRASANLAATKMSECVLGQSKRVDFCGKGCHLMSFPQSAPHGVVFLHVTYVPAQEKNFTTAPAICHDGKAHFPREGVFVSNGTHWFVTQRNFYEPQIITTDNTFVSGNCDVVIGIVNNTVYDPLQPELDSFKEELDKYFKNHTSPDVDLGDISGINASVVNIQKEIDRLNEVAKNLNESLIDLQELGKYEQYIKGGGGSDIDPYKEFGSSYQLLNFLPLDFFPDLNALVDTATALYEEELTGREHCSPHHTAIRQALVCWDELTKLIAWMSSNITSEQVRTIIVNHVNDTWGLKVRQSLWFHLSCLTFGQHTVQEFLVSFGVWIRTPAPYRPPNAPILSTLPEHTVIC

SEQ ID NO: 7284 - protein, 1365 aa, Artificial Sequence
  SARS-CoV-2/Belgium/ULG-6939/2020__EPI_ISL_417020 spike protein (1-1211)(I909C_Y1047C) WhcAg construct
MFVFLVLLPLVSSQCVNLTTRTQLPPAYTNSFTRGVYYPDKVFRSSVLHSTQDLFLPFFSNVTWFHAIHVSGTNGTKRFDNPVLPFNDGVYFASTEKSNIIRGWIFGTTLDSKTQSLLIVNNATNVVIKVCEFQFCNDPFLGVYYHKNNKSWMESEFRVYSSANNCTFEYVSQPFLMDLEGKQGNFKNLREFVFKNIDGYFKIYSKHTPINLVRDLPQGFSALEPLVDLPIGINITRFQTLLALHRSYLTPGDSSSGWTAGAAAYYVGYLQPRTFLLKYNENGTITDAVDCALDPLSETKCTLKSFTVEKGIYQTSNFRVQPTESIVRFPNITNLCPFGEVFNATRFASVYAWNRKRISNCVADYSVLYNSASFSTFKCYGVSPTKLNDLCFTNVYADSFVIRGDEVRQIAPGQTGKIADYNYKLPDDFTGCVIAWNSNNLDSKVGGNYNYLYRLFRKSNLKPFERDISTEIYQAGSTPCNGVEGFNCYFPLQSYGFQPTNGVGYQPYRVVVLSFELLHAPATVCGPKKSTNLVKNKCVNFNFNGLTGTGVLTESNKKFLPFQQFGRDIADTTDAVRDPQTLEILDITPCSFGGVSVITPGTNTSNQVAVLYQGVNCTEVPVAIHADQLTPTWRVYSTGSNVFQTRAGCLIGAEHVNNSYECDIPIGAGICASYQTQTNSPRRARSVASQSIIAYTMSLGAENSVVYSNNSIAIPTNFTISVTTEILPVSMTKTSVDCTMYICGDSTECSNLLLQYGSFCTQLNRALTGIAVEQDKNTQEVFAQVKQIYKTPPIKDFGGFNFSQILPDPSKPSKRSFIEDLLFNKVTLADAGFIKQYGDCLGDIAARDLICAQKFNGLTVLPPLLTDEMIAQYTSALLAGTITSGWTFGAGAALQIPFAMQMAYRFNGCGVTQNVLYENQKLIANQFNSAIGKIQDSLSSTASALGKLQDVVNQNAQALNTLVKQLSSNFGAISSVLNDILSRLDKVEAEVQIDRLITGRLQSLQTYVTQQLIRAAEIRASANLAATKMSECVLGQSKRVDFCGKGCHLMSFPQSAPHGVVFLHVTYVPAQEKNFTTAPAICHDGKAHFPREGVFVSNGTHWFVTQRNFYEPQIITTDNTFVSGNCDVVIGIVNNTVYDPLQPELDSFKEELDKYFKNHTSPDVDLGDISGINASVVNIQKEIDRLNEVAKNLNESLIDLQELGKYEQYIKGGGGSDIDPYKEFGSSYQLLNFLPLDFFPDLNALVDTATALYEEELTGREHCSPHHTAIRQALVCWDELTKLIAWMSSNITSEQVRTIIVNHVNDTWGLKVRQSLWFHLSCLTFGQHTVQEFLVSFGVWIRTPAPYRPPNAPILSTLPEHTVIC

SEQ ID NO: 7285 - protein, 1365 aa, Artificial Sequence
  SARS-CoV-2/France/HF2496/2020__EPI_ISL_418231 spike protein (1-1211)(I909C_Y1047C) WhcAg construct
MFVFLVLLPLVSSQCVNLTTRTQLPPAYTNSFTRGVYYPDKVFRSSVLHSTQDLFLPFFSNVTWFHAIHVSGTNGTKRFDNPVLPFNDGVYFASTEKSNIIRGWIFGTTLDSKTQSLLIVNNATNVVIKVCEFQFCNDPFLGVYYHKNNKSWMESEFRVYSSANNCTFEYVSQPFLMDLEGKQGNFKNLREFVFKNIDGYFKIYSKHTPINLVRDLPQGFSALEPLVDLPIGINITRFQTLLALHRSYLTPGDSSSGWTAGAAAYYVGYLQPRTFLLKYNENGTITDAVDCALDPLSETKCTLKSFTVEKGIYQTSNFRVQPTESIVRFPNITNLCPFGEVFNATRFASVYAWNRKRISNCVADYSVLYNSASFSTFKCYGVSPTKLNDLCFTNVYADSFVIRGDEVRQIAPGQTGKIADYNYKLPDDFTGCVIAWNSNNLDSKVGGNYNYLYRLFRKSNLKPFERDISTEIYQAGSTPCNGVEGFNCYFPLQSYGFQPTNGVGYQPYRVVVLSFELLHAPATVCGPKKSTNLVKNKCVNFNFNGLTGTGVLTESNKKFLPFQQFGRDIADTTDAVRDPQTLEILDITPCSFGGVSVITPGTNTSNQVAVLYQGVNCTEVPVAIHADQLTPTWRVYSTGSNVFQTRAGCLIGAEHVNNSYECDIPIGAGICASYQTQTNSPRRARSVASQSIIAYTMSLGAENSVAYSNNSIAIPTNFTISVTTEILPVSMTKTSVDCTMYICGDSTECSNLLLQYGSFCTQLNRALTGIAVEQDKNTQEVFAQVKQIYKTPPIKDFGGFNFSQILPDPSKPSKRSFIEDLLFNKVTLADAGFIKQYGDCLGDIVARDLICAQKFNGLTVLPPLLTDEMIAQYTSALLAGTITSGWTFGAGAALQIPFAMQMAYRFNGCGVTQNVLYENQKLIANQFNSAIGKIQDSLSSTASALGKLQDVVNQNAQALNTLVKQLSSNFGAISSVLNDILSRLDKVEAEVQIDRLITGRLQSLQTYVTQQLIRAAEIRASANLAATKMSECVLGQSKRVDFCGKGCHLMSFPQSAPHGVVFLHVTYVPAQEKNFTTAPAICHDGKAHFPREGVFVSNGTHWFVTQRNFYEPQIITTDNTFVSGNCDVVIGIVNNTVYDPLQPELDSFKEELDKYFKNHTSPDVDLGDISGINASVVNIQKEIDRLNEVAKNLNESLIDLQELGKYEQYIKGGGGSDIDPYKEFGSSYQLLNFLPLDFFPDLNALVDTATALYEEELTGREHCSPHHTAIRQALVCWDELTKLIAWMSSNITSEQVRTIIVNHVNDTWGLKVRQSLWFHLSCLTFGQHTVQEFLVSFGVWIRTPAPYRPPNAPILSTLPEHTVIC

SEQ ID NO: 7286 - protein, 1365 aa, Artificial Sequence
  SARS-CoV-2/USA/WA-UW291/2020__EPI_ISL_418076 spike protein (1-1211)(I909C_Y1047C) WhcAg construct
MFVFLVLLPLVSSQCVNLTTRTQLPPAYTNSFTRGVYYPDKVFRSSVLHSTQDLFLPFFSNVTWFHAIHVSGTNGTKRFDNPVLPFNDGVYFASTEKSNIIRGWIFGTTLDSKTQSLLIVNNATNVVIKVCEFQFCNDPFLGVYYHKNNKSWMESEFRVYSSANNCTFEYVSQPFLMDLEGKQGNFKNLREFVFKNIDGYFKIYSKHTPINLVRDLPQGFSALEPLVDLPIGINITRFQTLLALHRSYLTPGDSSSGWTAGAAAYYVGYLQPRTFLLKYNENGTITDAVDCALDPLSETKCTLKSFTVEKGIYQTSNFRVQPTESIVRFPNITNLCPFGEVFNATRFASVYAWNRKRISNCVADYSVLYNSASFSTFKCYGVSPTKLNDLCFTNVYADSFVIRGDEVRQIAPGQTGKIADYNYKLPDDFTGCVIAWNSNNLDSKVGGNYNYLYRLFRKSNLKPFERDISTEIYQAGSTPCNGVEGFNCYFPLQSYGFQPTNGVGYQPYRVVVLSFELLHAPATVCGPKKSTNLVKNKCVNFNFNGLTGTGVLTESNKKFLPFQQFGRDIADTTDAVRDPQTLEILDITPCSFGGVSVITPGTNTSNQVAVLYQGVNCTEVPVAIHADQLTPTWRVYSTGSNVFQTRAGCLIGAEHVNNSYECDIPIGAGICASYQTQTNSPRRARSVASQSIIAYTMSLGAENSVAYSNNSIAIPTNFTISVTTEILPVSMTKTSVDCTMYICGDSTECSNLLLQYGSFCTQLNRALTGIAVEQDKNTQEVFAQVKQIYKTPPIKDFGGFNFSQILPDPSKPSKRSFIEDLLFNKVTLADAGFIKQYGDCLGDIAARDLICAQKFNGLTVLPPLLTDEMIAQYTSALLAGTITSGWTFGAGAALQIPFAMQMAYRFNGCGVTQNVLYENQKLIANQFNSAIGKIQYSLSSTASALGKLQDVVNQNAQALNTLVKQLSSNFGAISSVLNDILSRLDKVEAEVQIDRLITGRLQSLQTYVTQQLIRAAEIRASANLAATKMSECVLGQSKRVDFCGKGCHLMSFPQSAPHGVVFLHVTYVPAQEKNFTTAPAICHDGKAHFPREGVFVSNGTHWFVTQRNFYEPQIITTDNTFVSGNCDVVIGIVNNTVYDPLQPELDSFKEELDKYFKNHTSPDVDLGDISGINASVVNIQKEIDRLNEVAKNLNESLIDLQELGKYEQYIKGGGGSDIDPYKEFGSSYQLLNFLPLDFFPDLNALVDTATALYEEELTGREHCSPHHTAIRQALVCWDELTKLIAWMSSNITSEQVRTIIVNHVNDTWGLKVRQSLWFHLSCLTFGQHTVQEFLVSFGVWIRTPAPYRPPNAPILSTLPEHTVIC

SEQ ID NO: 7287 - protein, 1365 aa, Artificial Sequence; identical to SEQ ID NO: 7250
  SARS-CoV-2/Portugal/PT0034/2020__EPI_ISL_418019 spike protein (1-1211)(I909C_Y1047C) WhcAg construct

SEQ ID NO: 7288 - protein, 1365 aa, Artificial Sequence
  SARS-CoV-2/Iceland/202/2020__EPI_ISL_417750 spike protein (1-1211)(I909C_Y1047C) WhcAg construct
MFVFLVLLPLVSSQCVNLTTRTQLPPAYTNSFTRGVYYPDKVFRSSVLHSTQDLFLPFFSNVTWFHAIHVSGTNGTKRFDNPVLPFNDGVYFASTEKSNIIRGWIFGTTLDSKTQSLLIVNNATNVVIKVCEFQFCNDPFLGVYYHKNNKSWMESEFRVYSSANNCTFEYVSQPFLMDLEGKQGNFKNLREFVFKNIDGYFKIYSKHTPINLVRDLPQGFSALEPLVDLPIGINITRFQTLLALHRSYLTPGDSSSGWTAGAAAYYVGYLQPRTFLLKYNENGTITDAVDCALDPLSETKCTLKSFTVEKGIYQTSNFRVQPTESIVRFPNITNLCPFGEVFNATRFASVYAWNRKRISNCVADYSVLYNSASFSTFKCYGVSPTKLNDLCFTNVYADSFVIRGDEVRQIAPGQTGKIADYNYKLPDDFTGCVIAWNSNNLDSKVGGNYNYLYRLFRKSNLKPFERDISTEIYQAGSTPCNGVEGFNCYFPLQSYGFQPTNGVGYQPYRVVVLSFELLHAPATVCGPKKSTNLVKNKCVNFNFNGLTGTGVLTESNKKFLPFQQFGRDIADTTDAVRDPQTLEILDITPCSFGGVSVITPGTNTSNQVAVLYQDVNCTEVPVAIHADQLTPTWRVYSTGSNVFQTRAGCLIGAEHVNNSYECDIPIGAGICASYQTQTNSPRRARSVASQSIIAYTMSLGAENSVAYSNNSIAIPTNFTISVTTEILPVSMTKTSVDCTMYICGDSTECSNLLLQYGSFCTQLNRALTGIAVEQDKNTQEVFAQVKQIYKTPPIKDFGGFNFSQILPDPSKPSKRSFIEDLLFNKVTLADAGFIKQYGDCLGDIAARDLICAQKFNGLTVLPPLLTDEMIAQYTSALLAGTITSGWTFGAGAALQIPFAMQMAYRFNGCGVTQNVLYENQKLIANQFNSAIGKIQDSLSSTASALGKLQDVVNQNAQALNTLVKQLSSNFGAISSVLNDILSRLDKVEAEVQIDRLITGRLQSLQTYVTQQLIRAAEIRASANLAATKMSECVLGQSKRVDFCGKGCHLMSFPQSAPHGVVFLHVTYVPAQEKNFTTAPAICHDGKAHFPREGVFVSNGTHWFVTQRNFYEPQIITTDNTFVSGNCDVVIGIVNNTVYDPLQPELDSFKEELDKYFKNHTSPDVDLGDIPGINASVVNIQKEIDRLNEVAKNLNESLIDLQELGKYEQYIKGGGGSDIDPYKEFGSSYQLLNFLPLDFFPDLNALVDTATALYEEELTGREHCSPHHTAIRQALVCWDELTKLIAWMSSNITSEQVRTIIVNHVNDTWGLKVRQSLWFHLSCLTFGQHTVQEFLVSFGVWIRTPAPYRPPNAPILSTLPEHTVIC

SEQ ID NO: 7289 - protein, 1365 aa, Artificial Sequence
  SARS-CoV-2/USA/WA-UW261/2020__EPI_ISL_418046 spike protein (1-1211)(I909C_Y1047C) WhcAg construct
MFVFLVLLPLVSSQCVNLTTRTQLPPAYTNSFTRGVYYPDKVFRSSVLHSTQDLFLPFFSNVTWFHAIHVSGTNGTKRFDNPVLPFNDGVYFASTEKSNIIRGWIFGTTLDSKTQSLLIVNNATNVVIKVCEFQFCNDPFLGVYYHKNNKSWMESEFRVYSSANNCTFEYVSQPFLMDLEGKQGNFKNLREFVFKNIDGYFKIYSKHTPINLVRDLPQGFSALEPLVDLPIGINITRFQTLLALHRSYLTPGDSSSGWTAGAAAYYVGYLQPRTFLLKYNENGTITDAVDCALDPLSETKCTLKSFTVEKGIYQTSNFRVQPTESIVRFPNITNLCPFGEVFNATRFTSVYAWNRKRISNCVADYSVLYNSASFSTFKCYGVSPTKLNDLCFTNVYADSFVIRGDEVRQIAPGQTGKIADYNYKLPDDFTGCVIAWNSNNLDSKVGGNYNYLYRLFRKSNLKPFERDISTEIYQAGSTPCNGVEGFNCYFPLQSYGFQPTNGVGYQPYRVVVLSFELLHAPATVCGPKKSTNLVKNKCVNFNFNGLTGTGVLTESNKKFLPFQQFGRDIADTTDAVRDPQTLEILDITPCSFGGVSVITPGTNTSNQVAVLYQDVNCTEVPVAIHADQLTPTWRVYSTGSNVFQTRAGCLIGAEHVNNSYECDIPIGAGICASYQTQTNSPRRARSVASQSIIAYTMSLGAENSVAYSNNSIAIPTNFTISVTTEILPVSMTKTSVDCTMYICGDSTECSNLLLQYGSFCTQLNRALTGIAVEQDKNTQEVFAQVKQIYKTPPIKDFGGFNFSQILPDPSKPSKRSFIEDLLFNKVTLADAGFIKQYGDCLGDIAARDLICAQKFNGLTVLPPLLTDEMIAQYTSALLAGTITSGWTFGAGAALQIPFAMQMAYRFNGCGVTQNVLYENQKLIANQFNSAIGKIQDSLSSTASALGKLQDVVNQNAQALNTLVKQLSSNFGAISSVLNDILSRLDKVEAEVQIDRLITGRLQSLQTYVTQQLIRAAEIRASANLAATKMSECVLGQSKRVDFCGKGCHLMSFPQSAPHGVVFLHVTYVPAQEKNFTTAPAICHDGKAHFPREGVFVSNGTHWFVTQRNFYEPQIITTDNTFVSGNCDVVIGIVNNTVYDPLQPELDSFKEELDKYFKNHTSPDVDLGDISGINASVVNIQKEIDRLNEVAKNLNESLIDLQELGKYEQYIKGGGGSDIDPYKEFGSSYQLLNFLPLDFFPDLNALVDTATALYEEELTGREHCSPHHTAIRQALVCWDELTKLIAWMSSNITSEQVRTIIVNHVNDTWGLKVRQSLWFHLSCLTFGQHTVQEFLVSFGVWIRTPAPYRPPNAPILSTLPEHTVIC

SEQ ID NO: 7290 - protein, 1365 aa, Artificial Sequence
  SARS-CoV-2/Portugal/PT0035/2020__EPI_ISL_418020 spike protein (1-1211)(I909C_Y1047C) WhcAg construct
MFVFLVLLPLVSSQCVNLTTRTQLPPAYTNSFTRGVYYPDKVFRSSVLHSTQDLFLPFFSNVTWFHAIHVSGTNGTKRFDNPVLPFNDGVYFASTEKSNIIRGWIFGTTLDSKTQSLLIVNNATNVVIKVCEFQFCNDPFLGVYYHKNNKSWMESEFRVYSSANNCTFEYVSQPFLMDLEGKQGNFKNLREFVFKNIDGYFKIYSKHTPINLVRDLPQGFSALEPLVDLPIGINITRFQTLLALHRSYLTPGDSSSGWTAGAAAYYVGYLQPRTFLLKYNENGTITDAVDCALDPLSETKCTLKSFTVEKGIYQTSNFRVQPTESIVRFPNITNLCPFGEVFNATRFASVYAWNRKRISNCVADYSVLYNSASFSTFKCYGVSPTKLNDLCFTNVYADSFVIRGDEVRQIAPGQTGKIADYNYKLPDDFTGCVIAWNSNNLDSKVGGNYNYLYRLFRKSNLKPFERDISTEIYQAGSTPCNGVEGFNCYFPLQSYGFQPTNGVGYQPYRVVVLSFELLHAPATVCGPKKSTNLVKNKCVNFNFNGLTGTGVLTESNKKFLPFQQFGRDIADTTDAVRDPQTLEILDITPCSFGGVSVITPGTNTSNQVAVLYQDVNCTEVPVAIHADQLTPTWRVYSTGSNVFQTRAGCLIGAEHVNNSYECDIPIGAGICASYQTQTNSPRRARSVASQSIIAYTMSLGAENSVAYSNNSIAIPTNFTISVTTEILPVSMTKTSVDCTMYICGDSTECSNLLLQYGSFCTQLNRALTGIAVEQDKNTQEVFAQVKQIYKTPPIKDFGGFNFSQILPDPSKPSKRSFIEDLLFNKVTLADAGFIKQYGDCLGDISARDLICAQKFNGLTVLPPLLTDEMIAQYTSALLAGTITSGWTFGAGAALQIPFAMQMAYRFNGCGVTQNVLYENQKLIANQFNSAIGKIQDSLSSTASALGKLQDVVNQNAQALNTLVKQLSSNFGAISSVLNDILSRLDKVEAEVQIDRLITGRLQSLQTYVTQQLIRAAEIRASANLAATKMSECVLGQSKRVDFCGKGCHLMSFPQSAPHGVVFLHVTYVPAQEKNFTTAPAICHDGKAHFPREGVFVSNGTHWFVTQRNFYEPQIITTDNTFVSGNCDVVIGIVNNTVYDPLQPELDSFKEELDKYFKNHTSPDVDLGDISGINASVVNIQKEIDRLNEVAKNLNESLIDLQELGKYEQYIKGGGGSDIDPYKEFGSSYQLLNFLPLDFFPDLNALVDTATALYEEELTGREHCSPHHTAIRQALVCWDELTKLIAWMSSNITSEQVRTIIVNHVNDTWGLKVRQSLWFHLSCLTFGQHTVQEFLVSFGVWIRTPAPYRPPNAPILSTLPEHTVIC

SEQ ID NO: 7291 - protein, 1365 aa, Artificial Sequence
  SARS-CoV-2/USA/NY-NYUMC7/2020__EPI_ISL_418192 spike protein (1-1211)(I909C_Y1047C) WhcAg construct
MFVFLVLLPLVSSQCVNLTTRTQLPPAYTNSFTRGVYYPDKVFRSSVLHSTQDLFLPFFSNVTWFHAIHVSGTNGTKRFDNPVLPFNDGVYFASTEKSNIIRGWIFGTTLDSKTQSLLIVNNATNVVIKVCEFQFCNDPFLGVYHHKNNKSWMESEFRVYSSANNCTFEYVSQPFLMDLEGKQGNFKNLREFVFKNIDGYFKIYSKHTPINLVRDLPQGFSALEPLVDLPIGINITRFQTLLALHRSYLTPGDSSSGWTAGAAAYYVGYLQPRTFLLKYNENGTITDAVDCALDPLSETKCTLKSFTVEKGIYQTSNFRVQPTESIVRFPNITNLCPFGEVFNATRFASVYAWNRKRISNCVADYSVLYNSASFSTFKCYGVSPTKLNDLCFTNVYADSFVIRGDEVRQIAPGQTGKIADYNYKLPDDFTGCVIAWNSNNLDSKVGGNYNYLYRLFRKSNLKPFERDISTEIYQAGSTPCNGVEGFNCYFPLQSYGFQPTNGVGYQPYRVVVLSFELLHAPATVCGPKKSTNLVKNKCVNFNFNGLTGTGVLTESNKKFLPFQQFGRDIADTTDAVRDPQTLEILDITPCSFGGVSVITPGTNTSNQVAVLYQGVNCTEVPVAIHADQLTPTWRVYSTGSNVFQTRAGCLIGAEHVNNSYECDIPIGAGICASYQTQTNSPRRARSVASQSIIAYTMSLGAENSVAYSNNSIAIPTNFTISVTTEILPVSMTKTSVDCTMYICGDSTECSNLLLQYGSFCTQLNRALTGIAVEQDKNTQEVFAQVKQIYKTPPIKDFGGFNFSQILPDPSKPSKRSFIEDLLFNKVTLADAGFIKQYGDCLGDIAARDLICAQKFNGLTVLPPLLTDEMIAQYTSALLAGTITSGWTFGAGAALQIPFAMQMAYRFNGCGVTQNVLYENQKLIANQFNSAIGKIQDSLSSTASALGKLQDVVNQNAQALNTLVKQLSSNFGAISSVLNDILSRLDKVEAEVQIDRLITGRLQSLQTYVTQQLIRAAEIRASANLAATKMSECVLGQSKRVDFCGKGCHLMSFPQSAPHGVVFLHVTYVPAQEKNFTTAPAICHDGKAHFPREGVFVSNGTHWFVTQRNFYEPQIITTDNTFVSGNCDVVIGIVNNTVYDPLQPELDSFKEELDKYFKNHTSPDVDLGDISGINASVVNIQKEIDRLNEVAKNLNESLIDLQELGKYEQYIKGGGGSDIDPYKEFGSSYQLLNFLPLDFFPDLNALVDTATALYEEELTGREHCSPHHTAIRQALVCWDELTKLIAWMSSNITSEQVRTIIVNHVNDTWGLKVRQSLWFHLSCLTFGQHTVQEFLVSFGVWIRTPAPYRPPNAPILSTLPEHTVIC

SEQ ID NO: 7292 - protein, 1365 aa, Artificial Sequence
  SARS-CoV-2/Iceland/189/2020__EPI_ISL_417709 spike protein (1-1211)(I909C_Y1047C) WhcAg construct
MFVFLVLLPLVSSQCVNLTTRTQLPPAYTNSFTRGVYYPDKVFRSSVLHSTQDLFLPFFSNVTWFHAIHVSGTNGTKRFDNPVLPFNDGVYFASTEKSNIIRGWIFGTTLDSKTQSLLIVNNATNVVIKVCEFQFCNDPFLGVYYHKNNKSWMESEFRVYSSANNCTFEYVSQPFLMDLEGKQGNFKNLREFVFKNIDGYFKIYSKHTPINLVRDLPQGFSALEPLVDLPIGINITRFQTLLALHRSYLTPGDSSSGWTAGAAAYYVGYLQPRTFLLKYNENGTITDAVDCALDPLSETKCTLKSFTVEKGIYQTSNFRVQPTESIVRFPNITNLCPFGEVFNATRFASVYAWNRKRISNCVADYSVLYNSASFSTFKCYGVSPTKLNDLCFTNVYADSFVIRGDEVRQIAPGQTGKIADYNYKLPDDFTGCVIAWNSNNLDSKVGGNYNYLYRLFRKSNLKPFERDISTEIYQAGSTPCNGVEGFNCYFPLQSYGFQPTNGVGYQPYRVVVLSFELLHAPATVCGPKKSTNLVKNKCVNFNFNGLTGTGVLTESNKKFLPFQQFGRDIADTTDAVRDPQTLEILDITPCSFGGVSVITPGTNTSNQVAVLYQGVNCTEVPVAIHADQLTPTWRVYSTGSNVFQTRAGCLIGAEHVNNSYECDIPIGAGICASYQTQTNSPRRARSVASQSIIAYTMSLGAENSVAYSNNSIAIPTNFTISVTTEILPVSMTKTSVDCTMYICGDSTECSNLLLQYGSFCTQLNRALTGIAVEQDKNTQEVFAQVKQIYKTPPIKDFGGFNFSQILPDPSKPSKRSFIEDLLFNKVTLADAGFTKQYGDCLGDIAARDLICAQKFNGLTVLPPLLTDEMIAQYTSALLAGTITSGWTFGAGAALQIPFAMQMAYRFNGCGVTQNVLYENQKLIANQFNSAIGKIQDSLSSTASALGKLQDVVNQNAQALNTLVKQLSSNFGAISSVLNDILSRLDKVEAEVQIDRLITGRLQSLQTYVTQQLIRAAEIRASANLAATKMSECVLGQSKRVDFCGKGCHLMSFPQSAPHGVVFLHVTYVPAQEKNFTTAPAICHDGKAHFPREGVFVSNGTHWFVTQRNFYEPQIITTDNTFVSGNCDVVIGIVNNTVYDPLQPELDSFKEELDKYFKNHTSPDVDLGDISGINASVVNIQKEIDRLNEVAKNLNESLIDLQELGKYEQYIKGGGGSDIDPYKEFGSSYQLLNFLPLDFFPDLNALVDTATALYEEELTGREHCSPHHTAIRQALVCWDELTKLIAWMSSNITSEQVRTIIVNHVNDTWGLKVRQSLWFHLSCLTFGQHTVQEFLVSFGVWIRTPAPYRPPNAPILSTLPEHTVIC

SEQ ID NO: 7293 - protein, 1365 aa, Artificial Sequence
  SARS-CoV-2/Australia/NSW56/2020__EPI_ISL_417408 spike protein (1-1211)(I909C_Y1047C) WhcAg construct
MFVFLVLLPLVSSQCVNLTTRTQLPPAYTNSFTRGVYYPDKVFRSSVLHSTQDLFLPFFSNVTWFHAIHVSGTNGTKRFDNPVLPFNDGVYFASTEKSNIIRGWIFGTTLDSKTQSLLIVNNATNVVIKVCEFQFCNDPFLGVYYHKNNKSWMESEFRVYSSANNCTFEYVSQPFLMDLEGKQGNFKNLREFVFKNIDGYFKIYSKHTPINLVRDLPQGFSALEPLVDLPIGINITRFQTLLALHRSYLTPGDSSSGWTAGAAAYYVGYLQPRTFLLKYNENGTITDAVDCALDPLSETKCTLKSFTVEKGIYQTSNFRVQPTESIVRFPNITNLCPFGEVFNATRFASVYAWNRKRISNCVADYSVLYNSASFSTFKCYGVSPTKLNDLCFTNVYADSFVIRGDEVRQIAPGQTGKIADYNYKLPDDFTGCVIAWNSNNLDSKVGGNYNYLYRLFRKSNLKPFERDISTEIYQAGSTPCNGVEGFNCYFPLQSYGFQPTNGVGYQPYRVVVLSFELLHAPATVCGPKKSTNLVKNKCVNFNFNGLTGTGVLTESNKKFLPFQQFGRDIADTTDAVRDPQTLEILDITPCSFGGVSVITPGTNTSNQVAVLYQDVNCTEVPVAIHADQLTPTWRVYSTGSNVFQTRAGCLIGAEHVNNSYECDIPIGAGICASYQTQTNSPRRARSVASQSIIAYTMSLGAENSVAYSNNSIAIPTNFTISVTTEILPVSMTKTSVDCTMYICGDSTECSNLLLQYGSFCTQLNRALTGIAVEQDKNTQEVFAQVKQIYKTPPIKDFGGFNFSQILPDSSKPSKRSFIEDLLFNKVTLADAGFIKQYGDCLGDIAARDLICAQKFNGLTVLPPLLTDEMIAQYTSALLAGTITSGWTFGAGAALQIPFAMQMAYRFNGCGVTQNVLYENQKLIANQFNSAIGKIQDSLSSTASALGKLQDVVNQNAQALNTLVKQLSSNFGAISSVLNDILSRLDKVEAEVQIDRLITGRLQSLQTYVTQQLIRAAEIRASANLAATKMSECVLGQSKRVDFCGKGCHLMSFPQSAPHGVVFLHVTYVPAQEKNFTTAPAICHDGKAHFPREGVFVSNGTHWFVTQRNFYEPQIITTDNTFVSGNCDVVIGIVNNTVYDPLQPELDSFKEELDKYFKNHTSPDVDLGDISGINASVVNIQKEIDRLNEVAKNLNESLIDLQELGKYEQYIKGGGGSDIDPYKEFGSSYQLLNFLPLDFFPDLNALVDTATALYEEELTGREHCSPHHTAIRQALVCWDELTKLIAWMSSNITSEQVRTIIVNHVNDTWGLKVRQSLWFHLSCLTFGQHTVQEFLVSFGVWIRTPAPYRPPNAPILSTLPEHTVIC

SEQ ID NO: 7294 - protein, 1365 aa, Artificial Sequence
  SARS-CoV-2/Iceland/280/2020__EPI_ISL_417608 spike protein (1-1211)(I909C_Y1047C) WhcAg construct
MFVFLVLLPLVSSQCVNLTTRTQLPPAYTNSFTRGVYYPDKVFRSSVLHSTQDLFLPFFSNVTWFHAIHVSGTNGTKRFDNPVLPFNDGVYFASTEKSNIIRGWIFGTTLDSKTQSLLIVNNATNVVIKVCEFQFCNDPFLGVYYHKNNKSWMESEFRVYSSANNCTFEYVSQPFLMDLEGKQGNFKNLREFVFKNIDGYFKIYSKHTPINLVRDLPQGFSALEPLVDLPIGINITRFQTLLALHRSYLTPGDSSSGWTAGAAAYYVGYLQPRTFLLKYNENGTITDAVDCALDPLSETKCTLKSFTVEKGIYQTSNFRVQPTESIVRFPNITNLCPFGEVFNATRFASVYAWNRKRISNCVADYSVLYNSASFSTFKCYGVSPTKLNDLCFTNVYADSFVIRGDEVRQIAPGQTGKIADYNYKLPDDFTGCVIAWNSNNLDSKVGGNYNYLYRLFRKSNLKPFERDISTEIYQAGSTPCNGVEGFNCYFPLQSYGFQPTNGVGYQPYRVVVLSFELLHAPATVCGPKKSTNLVKNKCVNFNFNGLTGTGVLTESNKKFLPFQQFGRDIADTTDAVRDPQTLEILDITPCSFGGVSVITPGTNTSNQVAVLYQGVNCTEVPVAIHADQLTPTWRVYSTGSNVFQTRAGCLIGAEHVNNSYECDIPIGAGICASYHTQTNSPRRARSVASQSIIAYTMSLGAENSVAYSNNSIAIPTNFTISVTTEILPVSMTKTSVDCTMYICGDSTECSNLLLQYGSFCTQLNRALTGIAVEQDKNTQEVFAQVKQIYKTPPIKDFGGFNFSQILPDPSKPSKRSFIEDLLFNKVTLADAGFIKQYGDCLGDIAARDLICAQKFNGLTVLPPLLTDEMIAQYTSALLAGTITSGWTFGAGAALQIPFAMQMAYRFNGCGVTQNVLYENQKLIANQFNSAIGKIQDSLSSTASALGKLQDVVNQNAQALNTLVKQLSSNFGAISSVLNDILSRLDKVEAEVQIDRLITGRLQSLQTYVTQQLIRAAEIRASANLAATKMSECVLGQSKRVDFCGKGCHLMSFPQSAPHGVVFLHVTYVPAQEKNFTTAPAICHDGKAHFPREGVFVSNGTHWFVTQRNFYEPQIITTDNTFVSGNCDVVIGIVNNTVYDPLQPELDSFKEELDKYFKNHTSPDVDLGDISGINASVVNIQKEIDRLNEVAKNLNESLIDLQELGKYEQYIKGGGGSDIDPYKEFGSSYQLLNFLPLDFFPDLNALVDTATALYEEELTGREHCSPHHTAIRQALVCWDELTKLIAWMSSNITSEQVRTIIVNHVNDTWGLKVRQSLWFHLSCLTFGQHTVQEFLVSFGVWIRTPAPYRPPNAPILSTLPEHTVIC

SEQ ID NO: 7295 - protein, 1365 aa, Artificial Sequence; identical to SEQ ID NO: 7250
  SARS-CoV-2/Iceland/247/2020__EPI_ISL_417575 spike protein (1-1211)(I909C_Y1047C) WhcAg construct

SEQ ID NO: 7296 - protein, 1365 aa, Artificial Sequence
  SARS-CoV-2/Iceland/238/2020__EPI_ISL_417566 spike protein (1-1211)(I909C_Y1047C) WhcAg construct
MFVFLVLLPLVSSQCVNLTTRTQLPPAYTNSFTRGVYYPDKVFRSSVLHSTQDLFLPFFSNVTWFHAIHVSGTNGTKRFDNPVLPFNDGVYFASTEKSNIIRGWIFGTTLDSKTQSLLIVNNATNVVIKVCEFQFCNDPFLGVYYHKNNKSWMESEFRVYSSANNCTFEYVSQPFLMDLEGKQGNFKNLREFVFKNIDGYFKIYSKHTPINLVRDLPQGFSALEPLVDLPIGINITRFQTLLALHRSYLTPGDSSSGWTAGAAAYYVGYLQPRTFLLKYNENGTITDAVDCALDPLSETKCTLKSFTVEKGIYQTSNFRVQPTESIVRFPNITNLCPFGEVFNATRFASVYAWNRKRISNCVADYSVLYNSASFSTFKCYGVSPTKLNDLCFTNVYADSFVIRGDEVRQIAPGQTGKIADYNYKLPDDFTGCVIAWNSNNLDSKVGGNYNYLYRLFRKSNLKPFERDISTEIYQAGSTPCNGVEGFNCYFPLQSYGFQPTNGVGYQPYRVVVLSFELLHAPATVCGPKKSTNLVKNKCVNFNFNGLTGTGVLTESNKKFLPFQQFGRDIADTTDAVRDPQTLEILDITPCSFGGVSVITPGTNTSNQVAVLYQGVNCTEVPVAIHADQLTPTWRVYSTGSNVFQTRAGCLIGAEHVNNSYECDIPIGAGICASYQTQTNSPRRARSVASQSIIAYTMSLGAENSVAYSNNSIAIPTNFTISVTTEILPVSMTKTSVDCTMYICGDSTECSNLLLQYGSFCTQLNRALTGIAVEQDKNTQEVFAQVKQIYKTPPIKDFGGFNFSQILPDPSKPSKRSFIEDLLFNKVTLADVGFIKQYGDCLGDIAARDLICAQKFNGLTVLPPLLTDEMIAQYTSALLAGTITSGWTFGAGAALQIPFAMQMAYRFNGCGVTQNVLYENQKLIANQFNSAIGKIQDSLSSTASALGKLQDVVNQNAQALNTLVKQLSSNFGAISSVLNDILSRLDKVEAEVQIDRLITGRLQSLQTYVTQQLIRAAEIRASANLAATKMSECVLGQSKRVDFCGKGCHLMSFPQSAPHGVVFLHVTYVPAQEKNFTTAPAICHDGKAHFPREGVFVSNGTHWFVTQRNFYEPQIITTDNTFVSGNCDVVIGIVNNTVYDPLQPELDSFKEELDKYFKNHTSPDVDLGDISGINASVVNIQKEIDRLNEVAKNLNESLIDLQELGKYEQYIKGGGGSDIDPYKEFGSSYQLLNFLPLDFFPDLNALVDTATALYEEELTGREHCSPHHTAIRQALVCWDELTKLIAWMSSNITSEQVRTIIVNHVNDTWGLKVRQSLWFHLSCLTFGQHTVQEFLVSFGVWIRTPAPYRPPNAPILSTLPEHTVIC

SEQ ID NO: 7297 - protein, 1365 aa, Artificial Sequence
  SARS-CoV-2/Greece/16/2020__EPI_ISL_418265 spike protein (1-1211)(I909C_Y1047C) WhcAg construct
MFVFLVLLPLVSSQCVNLTTRTQLPPAYTNSFTRGVYYPDKVFRSSVLHSTQDLFLPFFSNVTWFHAIHVSGTNGTKRFDNPVLPFNDGVYFASTEKSNIIRGWIFGTTLDSKTQSLLIVNNATNVVIKVCEFQFCNDPFLGVYYHKNNKSWMESEFRVYSSANNCTFEYVSQPFLMDLEGKQGNFKNLREFVFKNVDGYFKIYSKHTPINLVRDLPQGFSALEPLVDLPIGINITRFQTLLALHRSYLTPGDSSSGWTAGAAAYYVGYLQPRTFLLKYNENGTITDAVDCALDPLSETKCTLKSFTVEKGIYQTSNFRVQPTESIVRFPNITNLCPFGEVFNATRFASVYAWNRKRISNCVADYSVLYNSASFSTFKCYGVSPTKLNDLCFTNVYADSFVIRGDEVRQIAPGQTGKIADYNYKLPDDFTGCVIAWNSNNLDSKVGGNYNYLYRLFRKSNLKPFERDISTEIYQAGSTPCNGVEGFNCYFPLQSYGFQPTNGVGYQPYRVVVLSFELLHAPATVCGPKKSTNLVKNKCVNFNFNGLTGTGVLTESNKKFLPFQQFGRDIADTTDAVRDPQTLEILDITPCSFGGVSVITPGTNTSNQVAVLYQDVNCTEVPVAIHADQLTPTWRVYSTGSNVFQTRAGCLIGAEHVNNSYECDIPIGAGICASYQTQTNSPRRARSVASQSIIAYTMSLGAENSVAYSNNSIAIPTNFTISVTTEILPVSMTKTSVDCTMYICGDSTECSNLLLQYGSFCTQLNRALTGIAVEQDKNTQEVFAQVKQIYKTPPIKDFGGFNFSQILPDPSKPSKRSFIEDLLFNKVTLADAGFIKQYGDCLGDIAARDLICAQKFNGLTVLPPLLTDEMIAQYTSALLAGTITSGWTFGAGAALQIPFAMQMAYRFNGCGVTQNVLYENQKLIANQFNSAIGKIQDSLSSTASALGKLQDVVNQNAQALNTLVKQLSSNFGAISSVLNDILSRLDKVEAEVQIDRLITGRLQSLQTYVTQQLIRAAEIRASANLAATKMSECVLGQSKRVDFCGKGCHLMSFPQSAPHGVVFLHVTYVPAQEKNFTTAPAICHDGKAHFPREGVFVSNGTHWFVTQRNFYEPQIITTDNTFVSGNCDVVIGIVNNTVYDPLQPELDSFKEELDKYFKNHTSPDVDLGDISGINASVVNIQKEIDRLNEVAKNLNESLIDLQELGKYEQYIKGGGGSDIDPYKEFGSSYQLLNFLPLDFFPDLNALVDTATALYEEELTGREHCSPHHTAIRQALVCWDELTKLIAWMSSNITSEQVRTIIVNHVNDTWGLKVRQSLWFHLSCLTFGQHTVQEFLVSFGVWIRTPAPYRPPNAPILSTLPEHTVIC

SEQ ID NO: 7298 - protein, 1365 aa, Artificial Sequence
  SARS-CoV-2/Iceland/319/2020__EPI_ISL_417648 spike protein (1-1211)(I909C_Y1047C) WhcAg construct
MFVFLVLLPLVSSQCVNLTTRTQLPPAYTNSFTRGVYYPDKVFRSSVLHSTQDLFLPFFSNVTWFHAIHVSGTNGTKRFDNPVLPFNDGVYFASTEKSNIIRGWIFGTTLDSKTQSLLIVNNATNVVIKVCEFQFCNDPFLGVYYHKNNKSWMESEFRVYSSANNCTFEYVSQPFLIDLEGKQGNFKNLREFVFKNIDGYFKIYSKHTPINLVRDLPQGFSALEPLVDLPIGINITRFQTLLALHRSYLTPGDSSSGWTAGAAAYYVGYLQPRTFLLKYNENGTITDAVDCALDPLSETKCTLKSFTVEKGIYQTSNFRVQPTESIVRFPNITNLCPFGEVFNATRFASVYAWNRKRISNCVADYSVLYNSASFSTFKCYGVSPTKLNDLCFTNVYADSFVIRGDEVRQIAPGQTGKIADYNYKLPDDFTGCVIAWNSNNLDSKVGGNYNYLYRLFRKSNLKPFERDISTEIYQAGSTPCNGVEGFNCYFPLQSYGFQPTNGVGYQPYRVVVLSFELLHAPATVCGPKKSTNLVKNKCVNFNFNGLTGTGVLTESNKKFLPFQQFGRDIADTTDAVRDPQTLEILDITPCSFGGVSVITPGTNTSNQVAVLYQGVNCTEVPVAIHADQLTPTWRVYSTGSNVFQTRAGCLIGAEHVNNSYECDIPIGAGICASYQTQTNSPRRARSVASQSIIAYTMSLGAENSVAYSNNSIAIPTNFTISVTTEILPVSMTKTSVDCTMYICGDSTECSNLLLQYGSFCTQLNRALTGIAVEQDKNTQEVFAQVKQIYKTPPIKDFGGFNFSQILPDPSKPSKRSFIEDLLFNKVTLADAGFIKQYGDCLGDIAARDLICAQKFNGLTVLPPLLTDEMIAQYTSALLAGTITSGWTFGAGAALQIPFAMQMAYRFNGCGVTQNVLYENQKLIANQFNSAIGKIQDSLSSTASALGKLQDVVNQNAQALNTLVKQLSSNFGAISSVLNDILSRLDKVEAEVQIDRLITGRLQSLQTYVTQQLIRAAEIRASANLAATKMSECVLGQSKRVDFCGKGCHLMSFPQSAPHGVVFLHVTYVPAQEKNFTTAPAICHDGKAHFPREGVFVSNGTHWFVTQRNFYEPQIITTDNTFVSGNCDVVIGIVNNTVYDPLQPELDSFKEELDKYFKNHTSPDVDLGDISGINASVVNIQKEIDRLNEVAKNLNESLIDLQELGKYEQYIKGGGGSDIDPYKEFGSSYQLLNFLPLDFFPDLNALVDTATALYEEELTGREHCSPHHTAIRQALVCWDELTKLIAWMSSNITSEQVRTIIVNHVNDTWGLKVRQSLWFHLSCLTFGQHTVQEFLVSFGVWIRTPAPYRPPNAPILSTLPEHTVIC

SEQ ID NO: 7299 - protein, 1365 aa, Artificial Sequence
  SARS-CoV-2/Congo/94/2020__EPI_ISL_417947 spike protein (1-1211)(I909C_Y1047C) WhcAg construct
MFVFLVLLPLVSSQCVNLTTRTQLPPAYTNSFTRGVYYPDKVFRSSVLHSTQDLFLPFFSNVTWFHAIHVSGTNGTKRFDNPVLPFNDGVYFASTEKSNIIRGWIFGTTLDSKTQSLLIVNNATNVVIKVCEFQFCNDPFLGVYYHKNNKSWMESEFRVYSSANNCTFEYVSQPFLMDLEGKQGNFKNLREFVFKNIDGYFKIYSKHTPINLVRDLPQGFSALEPLVDLPIGINITRFQTLLALHRSYLTPGDSSSGWTAGAAAYYVGYLQPRTFLLKYNENGTITDAVDCALDPLSETKCTLKSFTVEKGIYQTSNFRVQPTESIVRFPNITNLCPFGEVFNATRFASVYAWNRKRISNCVADYSVLYNSASFSTFKCYGVSPTKLNDLCFTNVYADSFVIRGDEVRQIAPGQTGKIADYNYKLPDDFTGCVIAWNSNNLDSKVGGNYNYLYRLFRKSNLKPFERDISTEIYQAGSTPCNGVEGFNCYFPLQSYGFQPTNGVGYQPYRVVVLSFELLHAPATVCGPKKSTNLVKNKCVNFNFNGLTGTGVLTESNKKFLPFQQFGRDIADTTDAVRDPQTLEILDITPCSFGGVSVITPGTNTSNQVAVLYQGVNCTEVPVAIHADQLTPTWRVYSTGSNVFQTRAGCLIGAEHVNNSYECDIPIGAGICASYQTQTNSPRRARSVASQSIIAYTMSLGAENSVAYSNNSIAIPTNFTISVTTEILPVSMTKTSVDCTMYICGDSTECSNLLLQYGSFCTQLNRALTGIAVEQDKNTQEVFAQVKQIYKTPPIKDFGGFNFSQILPDPSKPSKRSFIEDILFNKVTLADAGFIKQYGDCLGDIAARDLICAQKFNGLTVLPPLLTDEMIAQYTSALLAGTITSGWTFGAGAALQIPFAMQMAYRFNGCGVTQNVLYENQKLIANQFNSAIGKIQDSLSSTASALGKLQDVVNQNAQALNTLVKQLSSNFGAISSVLNDILSRLDKVEAEVQIDRLITGRLQSLQTYVTQQLIRAAEIRASANLAATKMSECVLGQSKRVDFCGKGCHLMSFPQSAPHGVVFLHVTYVPAQEKNFTTAPAICHDGKAHFPREGVFVSNGTHWFVTQRNFYEPQIITTDNTFVSGNCDVVIGIVNNTVYDPLQPELDSFKEELDKYFKNHTSPDVDLGDISGINASVVNIQKEIDRLNEVAKNLNESLIDLQELGKYEQYIKGGGGSDIDPYKEFGSSYQLLNFLPLDFFPDLNALVDTATALYEEELTGREHCSPHHTAIRQALVCWDELTKLIAWMSSNITSEQVRTIIVNHVNDTWGLKVRQSLWFHLSCLTFGQHTVQEFLVSFGVWIRTPAPYRPPNAPILSTLPEHTVIC

SEQ ID NO: 7300 - protein, 1365 aa, Artificial Sequence
  SARS-CoV-2/Congo/158/2020__EPI_ISL_417950 spike protein (1-1211)(I909C_Y1047C) WhcAg construct
MFVFLVLLPLVSSQCVNLTTRTQLPPAYTNSFTRGVYYPDKVFRSSVLHSTQDLFLPFFSNVTWFHAIHVSGTNGTKRFDNPVLPFNDGVYFASTEKSNIIRGWIFGTTLDSKTQSLLIVNNATNVVIKVCEFQFCNDPFLGVYYHKNNKSWMESEFRVYSSANNCTFEYVSQPFLMDLEGKQGNFKNLREFVFKNIDGYFKIYSKHTPINLVRDLPQGFSALEPLVDLPIGINITRFQTLLALHRSYLTPGDSSSGWTAGAAAYYVGYLQPRTFLLKYNENGTITDAVDCALDPLSETKCTLKSFTVEKGIYQTSNFRVQPTESIVRFPNITNLCPFGEVFNATRFASVYAWNRKRISNCVADYSVLYNSASFSTFKCYGVSPTKLNDLCFTNVYADSFVIRGDEVRQIAPGQTGKIADYNYKLPDDFTGCVIAWNSNNLDSKVGGNYNYLYRLFRKSNLKPFERDISTEIYQAGSTPCNGVEGFNCYFPLQSYGFQPTNGVGYQPYRVVVLSFELLHAPATVCGPKKSTNLVKNKCVNFNFNGLTGTGVLTESNKKFLPFQQFGRDIADTTDAVRDPQTLEILDITPCSFGGVSVITPGTNTSNQVAVLYQDVNCTEVPVAIHADQLTPTWRVYSTGSNVFQTRAGCLIGAEHVNNSYECDIPIGAGICASYQTQTNSPRRARSVASQSIIAYTMSLGAENSVAYSNNSIAIPTNFTISVTTEILPVSMTKTSVDCTMYICGDSTECSNLLLQYGSFCTQLNRALTGIAVEQDKNTQEVFAQVKQIYKTPPIKDFGGFNFSQILPDPSKPSKRSFIEDLLFNKVTLADAGFIKQYGDCLGDIAARDLICAQKFNGLTVLPPLLTDEMIAQYTSALLAGTITSGWTFGAGAALQIPFAMQMAYRFNGCGVTQNVLYENQKLIANQFNSAIGKIQDSLSSTASALGKLQDVVNQNAQALNTLVKQLSSNFGAISSVLNDILSRLDKVEAEVQIDRLITGRLQSLQTYVTQQLIRAAEIRASANLAATKMSECVLGQSKRVDFCGKGCHLMSFPQSAPHGVVFLHVTYVPAQEKNFTTAPAICHDGKAHFPREGVFVSNGTHWFVTQRNFYEPQIITTDNTFLSGNCDVVIGIVNNTVYDPLQPELDSFKEELDKYFKNHTSPDVDLGDISGINASVVNIQKEIDRLNEVAKNLNESLIDLQELGKYEQYIKGGGGSDIDPYKEFGSSYQLLNFLPLDFFPDLNALVDTATALYEEELTGREHCSPHHTAIRQALVCWDELTKLIAWMSSNITSEQVRTIIVNHVNDTWGLKVRQSLWFHLSCLTFGQHTVQEFLVSFGVWIRTPAPYRPPNAPILSTLPEHTVIC

SEQ ID NO: 7301 - protein, 1365 aa, Artificial Sequence
  SARS-CoV-2/USA/UT-00034/2020__EPI_ISL_417977 spike protein (1-1211)(I909C_Y1047C) WhcAg construct
MFVFLVLLPLVSSQCVNLTTRTQLPPAYTNSFTRGVYYPDKVFRSSVLHSTQDLFLPFFSNVTWFHAIHVSGTNGTKRFDNPVLPFNDGVYFASTEKSNIIRGWIFGTTLDSKTQSLLIVNNATNVVIKVCEFQFCNDPFLGVYYYKNNKSWMESEFRVYSSANNCTFEYVSQPFLMDLEGKQGNFKNLREFVFKNIDGYFKIYSKHTPINLVRDLPQGFSALEPLVDLPIGINITRFQTLLALHRSYLTPGDSSSGWTAGAAAYYVGYLQPRTFLLKYNENGTITDAVDCALDPLSETKCTLKSFTVEKGIYQTSNFRVQPTESIVRFPNITNLCPFGEVFNATRFASVYAWNRKRISNCVADYSVLYNSASFSTFKCYGVSPTKLNDLCFTNVYADSFVIRGDEVRQIAPGQTGKIADYNYKLPDDFTGCVIAWNSNNLDSKVGGNYNYLYRLFRKSNLKPFERDISTEIYQAGSTPCNGVEGFNCYFPLQSYGFQPTNGVGYQPYRVVVLSFELLHAPATVCGPKKSTNLVKNKCVNFNFNGLTGTGVLTESNKKFLPFQQFGRDIADTTDAVRDPQTLEILDITPCSFGGVSVITPGTNTSNQVAVLYQGVNCTEVPVAIHADQLTPTWRVYSTGSNVFQTRAGCLIGAEHVNNSYECDIPIGAGICASYQTQTNSPRRARSVASQSIIAYTMSLGAENSVAYSNNSIAIPTNFTISVTTEILPVSMTKTSVDCTMYICGDSTECSNLLLQYGSFCTQLNRALTGIAVEQDKNTQEVFAQVKQIYKTPPIKDFGGFNFSQILPDPSKPSKRSFIEDLLFNKVTLADAGFIKQYGDCLGDIAARDLICAQKFNGLTVLPPLLTDEMIAQYTSALLAGTITSGWTFGAGAALQIPFAMQMAYRFNGCGVTQNVLYENQKLIANQFNSAIGKIQDSLSSTASALGKLQDVVNQNAQALNTLVKQLSSNFGAISSVLNDILSRLDKVEAEVQIDRLITGRLQSLQTYVTQQLIRAAEIRASANLAATKMSECVLGQSKRVDFCGKGCHLMSFPQSAPHGVVFLHVTYVPAQEKNFTTAPAICHDGKAHFPREGVFVSNGTHWFVTQRNFYEPQIITTDNTFVSGNCDVVIGIVNNTVYDPLQPELDSFKEELDKYFKNHTSPDVDLGDISGINASVVNIQKEIDRLNEVAKNLNESLIDLQELGKYEQYIKGGGGSDIDPYKEFGSSYQLLNFLPLDFFPDLNALVDTATALYEEELTGREHCSPHHTAIRQALVCWDELTKLIAWMSSNITSEQVRTIIVNHVNDTWGLKVRQSLWFHLSCLTFGQHTVQEFLVSFGVWIRTPAPYRPPNAPILSTLPEHTVIC

SEQ ID NO: 7302 - protein, 1365 aa, Artificial Sequence
  SARS-CoV-2/USA/UT-00033/2020__EPI_ISL_417976 spike protein (1-1211)(I909C_Y1047C) WhcAg construct
MFVFLVLLPLVSSQCVNLTTRTQLPPAYTNSFTRGVYYPDKVFRSSVLHSTQDLFLPFFSNVTWFHAIHVSGTNGTKRFDNPVLPFNDGVYFASTEKSNIIRGWIFGTTLDSKTQSLLIVNNATNVVIKVCEFQFCNDPFLGVYYHKNNKSWMESEFRVYSSANNCTFEYVSQPFLMDLEGKQGNFKNLREFVFKNIDGYFKIYSKHTPINLVRDLPQGFSALEPLVDLPIGINITRFQTLLALHRSYLTPGDSSSGLTAGAAAYYVGYLQPRTFLLKYNENGTITDAVDCALDPLSETKCTLKSFTVEKGIYQTSNFRVQPTESIVRFPNITNLCPFGEVFNATRFASVYAWNRKRISNCVADYSVLYNSASFSTFKCYGVSPTKLNDLCFTNVYADSFVIRGDEVRQIAPGQTGKIADYNYKLPDDFTGCVIAWNSNNLDSKVGGNYNYLYRLFRKSNLKPFERDISTEIYQAGSTPCNGVEGFNCYFPLQSYGFQPTNGVGYQPYRVVVLSFELLHAPATVCGPKKSTNLVKNKCVNFNFNGLTGTGVLTESNKKFLPFQQFGRDIADTTDAVRDPQTLEILDITPCSFGGVSVITPGTNTSNQVAVLYQGVNCTEVPVAIHADQLTPTWRVYSTGSNVFQTRAGCLIGAEHVNNSYECDIPIGAGICASYQTQTNSPRRARSVASQSIIAYTMSLGAENSVAYSNNSIAIPTNFTISVTTEILPVSMTKTSVDCTMYICGDSTECSNLLLQYGSFCTQLNRALTGIAVEQDKNTQEVFAQVKQIYKTPPIKDFGGFNFSQILPDPSKPSKRSFIEDLLFNKVTLADAGFIKQYGDCLGDIAARDLICAQKFNGLTVLPPLLTDEMIAQYTSALLAGTITSGWTFGAGAALQIPFAMQMAYRFNGCGVTQNVLYENQKLIANQFNSAIGKIQDSLSSTASALGKLQDVVNQNAQALNTLVKQLSSNFGAISSVLNDILSRLDKVEAEVQIDRLITGRLQSLQTYVTQQLIRAAEIRASANLAATKMSECVLGQSKRVDFCGKGCHLMSFPQSAPHGVVFLHVTYVPAQEKNFTTAPAICHDGKAHFPREGVFVSNGTHWFVTQRNFYEPQIITTDNTFVSGNCDVVIGIVNNTVYDPLQPELDSFKEELDKYFKNHTSPDVDLGDISGINASVVNIQKEIDRLNEVAKNLNESLIDLQELGKYEQYIKGGGGSDIDPYKEFGSSYQLLNFLPLDFFPDLNALVDTATALYEEELTGREHCSPHHTAIRQALVCWDELTKLIAWMSSNITSEQVRTIIVNHVNDTWGLKVRQSLWFHLSCLTFGQHTVQEFLVSFGVWIRTPAPYRPPNAPILSTLPEHTVIC

SEQ ID NO: 7303 - protein, 1365 aa, Artificial Sequence
  SARS-CoV-2/USA/WI-13/2020__EPI_ISL_417516 spike protein (1-1211)(I909C_Y1047C) WhcAg construct
MFVFLVLLPLVSSQCVNLTTRTQLPPAYTNSFTRGVYYPDKVFRSSVLHSTQDLFLPFFSNVTWFHAIHVSGTNGTKRFDNPVLPFNDGVYFASTEKSNIIRGWIFGTTLDSKTQSLLIVNNATNVVIKVCEFQFCNDPFLGVYYHKNNKSWMESEFRVYSSANNCTFEYVSQPFLMDLEGKQGNFKNLREFVFKNIDGYFKIYSKHTPINLVRDLPQGFSALEPLVDLPIGINITRFQTLLALHRSYLTPGDSSSGWTAGAAAYYVGYLQPRTFLLKYNENGTITDAVDCALDPLSETKCTLKSFTVEKGIYQTSNFRVLPTESIVRFPNITNLCPFGEVFNATRFASVYAWNRKRISNCVADYSVLYNSASFSTFKCYGVSPTKLNDLCFTNVYADSFVIRGDEVRQIAPGQTGKIADYNYKLPDDFTGCVIAWNSNNLDSKVGGNYNYLYRLFRKSNLKPFERDISTEIYQAGSTPCNGVEGFNCYFPLQSYGFQPTNGVGYQPYRVVVLSFELLHAPATVCGPKKSTNLVKNKCVNFNFNGLTGTGVLTESNKKFLPFQQFGRDIADTTDAVRDPQTLEILDITPCSFGGVSVITPGTNTSNQVAVLYQGVNCTEVPVAIHADQLTPTWRVYSTGSNVFQTRAGCLIGAEHVNNSYECDIPIGAGICASYQTQTNSPRRARSVASQSIIAYTMSLGAENSVAYSNNSIAIPTNFTISVTTEILPVSMTKTSVDCTMYICGDSTECSNLLLQYGSFCTQLNRALTGIAVEQDKNTQEVFAQVKQIYKTPPIKDFGGFNFSQILPDPSKPSKRSFIEDLLFNKVTLADAGFIKQYGDCLGDIAARDLICAQKFNGLTVLPPLLTDEMIAQYTSALLAGTITSGWTFGAGAALQIPFAMQMAYRFNGCGVTQNVLYENQKLIANQFNSAIGKIQDSLSSTASALGKLQDVVNQNAQALNTLVKQLSSNFGAISSVLNDILSRLDKVEAEVQIDRLITGRLQSLQTYVTQQLIRAAEIRASANLAATKMSECVLGQSKRVDFCGKGCHLMSFPQSAPHGVVFLHVTYVPAQEKNFTTAPAICHDGKAHFPREGVFVSNGTHWFVTQRNFYEPQIITTDNTFVSGNCDVVIGIVNNTVYDPLQPELDSFKEELDKYFKNHTSPDVDLGDISGINASVVNIQKEIDRLNEVAKNLNESLIDLQELGKYEQYIKGGGGSDIDPYKEFGSSYQLLNFLPLDFFPDLNALVDTATALYEEELTGREHCSPHHTAIRQALVCWDELTKLIAWMSSNITSEQVRTIIVNHVNDTWGLKVRQSLWFHLSCLTFGQHTVQEFLVSFGVWIRTPAPYRPPNAPILSTLPEHTVIC

SEQ ID NO: 7304 - protein, 1364 aa, Artificial Sequence
  SARS-CoV-2/India/1-27/2020__EPI_ISL_413522 spike protein (1-1210)(I908C_Y1046C) WhcAg construct
MFVFLVLLPLVSSQCVNLTTRTQLPPAYTNSFTRGVYYPDKVFRSSVLHSTQDLFLPFFSNVTWFHAIHVSGTNGTKRFDNPVLPFNDGVYFASTEKSNIIRGWIFGTTLDSKTQSLLIVNNATNVVIKVCEFQFCNDPFLGVYHKNNKSWMESEFRVYSSANNCTFEYVSQPFLMDLEGKQGNFKNLREFVFKNIDGYFKIYSKHTPINLVRDLPQGFSALEPLVDLPIGINITRFQTLLALHRSYLTPGDSSSGWTAGAAAYYVGYLQPRTFLLKYNENGTITDAVDCALDPLSETKCTLKSFTVEKGIYQTSNFRVQPTESIVRFPNITNLCPFGEVFNATRFASVYAWNRKRISNCVADYSVLYNSASFSTFKCYGVSPTKLNDLCFTNVYADSFVIRGDEVIQIAPGQTGKIADYNYKLPDDFTGCVIAWNSNNLDSKVGGNYNYLYRLFRKSNLKPFERDISTEIYQAGSTPCNGVEGFNCYFPLQSYGFQPTNGVGYQPYRVVVLSFELLHAPATVCGPKKSTNLVKNKCVNFNFNGLTGTGVLTESNKKFLPFQQFGRDIADTTDAVRDPQTLEILDITPCSFGGVSVITPGTNTSNQVAVLYQDVNCTEVPVAIHADQLTPTWRVYSTGSNVFQTRAGCLIGAEHVNNSYECDIPIGAGICASYQTQTNSPRRARSVASQSIIAYTMSLGAENSVAYSNNSIAIPTNFTISVTTEILPVSMTKTSVDCTMYICGDSTECSNLLLQYGSFCTQLNRALTGIAVEQDKNTQEVFAQVKQIYKTPPIKDFGGFNFSQILPDPSKPSKRSFIEDLLFNKVTLADAGFIKQYGDCLGDIAARDLICAQKFNGLTVLPPLLTDEMIAQYTSALLAGTITSGWTFGAGAALQIPFAMQMAYRFNGCGVTQNVLYENQKLIANQFNSAIGKIQDSLSSTASALGKLQDVVNQNAQALNTLVKQLSSNFGAISSVLNDILSRLDKVEAEVQIDRLITGRLQSLQTYVTQQLIRAAEIRASANLAATKMSECVLGQSKRVDFCGKGCHLMSFPQSAPHGVVFLHVTYVPAQEKNFTTAPAICHDGKAHFPREGVFVSNGTHWFVTQRNFYEPQIITTDNTFVSGNCDVVIGIVNNTVYDPLQPELDSFKEELDKYFKNHTSPDVDLGDISGINASVVNIQKEIDRLNEVAKNLNESLIDLQELGKYEQYIKGGGGSDIDPYKEFGSSYQLLNFLPLDFFPDLNALVDTATALYEEELTGREHCSPHHTAIRQALVCWDELTKLIAWMSSNITSEQVRTIIVNHVNDTWGLKVRQSLWFHLSCLTFGQHTVQEFLVSFGVWIRTPAPYRPPNAPILSTLPEHTVIC

SEQ ID NO: 7305 - protein, 1359 aa, Artificial Sequence
  SARS-CoV-2/pangolin/Guangxi/P4L/2017__EPI_ISL_410538 spike protein (1-1205)(I903C_Y1041C) WhcAg construct
MFVFLFVLPLVSSQCVNLTTRTGIPPGYTNSSTRGVYYPDKVFRSSILHLTQDLFLPFFSNVTWFNTINYQGGFKKFDNPVLPFNDGVYFASTEKSNIIRGWIFGTTLDARTQSLLIVNNATNVVIKVCEFQFCTDPFLGVYYHNNNKTWVENEFRVYSSANNCTFEYISQPFLMDLEGKQGNFKNLREFVFKNVDGYFKIYSKHTPIDLVRDLPRGFAALEPLVDLPIGINITRFQTLLALHRSYLTPGNLESGWTTGAAAYYVGYLQQRTFLLSYNQNGTITDAVDCSLDPLSETKCTLKSLTVEKGIYQTSNFRVQPTISIVRFPNITNLCPFGEVFNASKFASVYAWNRKRISNCVADYSVLYNSTSFSTFKCYGVSPTKLNDLCFTNVYADSFVVKGDEVRQIAPGQTGVIADYNYKLPDDFTGCVIAWNSVKQDALTGGNYGYLYRLFRKSKLKPFERDISTEIYQAGSTPCNGQVGLNCYYPLERYGFHPTTGVNYQPFRVVVLSFELLNGPATVCGPKLSTTLVKDKCVNFNFNGLTGTGVLTTSKKQFLPFQQFGRDISDTTDAVRDPQTLEILDITPCSFGGVSVITPGTNTSNQVAVLYQDVNCTEVPMAIHAEQLTPAWRVYSAGANVFQTRAGCLVGAEHVNNSYECDIPVGAGICASYHSMSSLRSVNQRSIIAYTMSLGAENSVAYSNNSIAIPTNFTISVTTEILPVSMTKTSVDCTMYICGDSIECSNLLLQYGSFCTQLNRALTGIAVEQDKNTQEVFAQVKQIYKTPPIKDFGGFNFSQILPDPSKPSKRSFIEDLLFNKVTLADAGFIKQYGDCLGDIAARDLICAQKFNGLTVLPPLLTDEMIAQYTSALLAGTITSGWTFGAGAALQIPFAMQMAYRFNGCGVTQNVLYENQKLIANQFNSAIGKIQDSLSSTASALGKLQDVVNQNAQALNTLVKQLSSNFGAISSVLNDILSRLDKVEAEVQIDRLITGRLQSLQTYVTQQLIRAAEIRASANLAATKMSECVLGQSKRVDFCGKGCHLMSFPQSAPHGVVFLHVTYVPAQEKNFTTAPAICHEGKAHFPREGVFVSNGTHWFITQRNFYEPQIITTDNTFVSGSCDVVIGIVNNTVYDPLQPELDSFKEELDKYFKNHTSPDVDLGDISGINASVVNIQKEIDRLNEVAKNLNESPIDLQELGKYEQYIKGGGGSDIDPYKEFGSSYQLLNFLPLDFFPDLNALVDTATALYEEELTGREHCSPHHTAIRQALVCWDELTKLIAWMSSNITSEQVRTIIVNHVNDTWGLKVRQSLWFHLSCLTFGQHTVQEFLVSFGVWIRTPAPYRPPNAPILSTLPEHTVIC

SEQ ID NO: 7306 - protein, 1359 aa, Artificial Sequence
  SARS-CoV-2/pangolin/Guangxi/P5L/2017__EPI_ISL_410540 spike protein (1-1205)(I903C_Y1041C) WhcAg construct
MFVFLFVLPLVSSQCVNLTTRTGIPPGYTNSSTRGVYYPDKVFRSSILHLTQDLFLPFFSNVTWFNTINYQGGFKKFDNPVLPFNDGVYFASTEKSNIIRGWIFGTTLDARTQSLLIVNNATNVVIKVCEFQFCTDPFLGVYYHNNNKTWVENEFRVYSSANNCTFEYISQPFLMDLEGKQGNFKNLREFVFKNVDGYFKIYSKHTPIDLVRDLPRGFAALEPLVDLPIGINITRFQTLLALHRSYLTPGKLESGWTTGAAAYYVGYLQQRTFLLSYNQNGTITDAVDCSLDPLSETKCTLKSLTVEKGIYQTSNFRVQPTISIVRFPNITNLCPFGEVFNASKFASVYAWNRKRISNCVADYSVLYNSTSFSTFKCYGVSPTKLNDLCFTNVYADSFVVKGDEVRQIAPGQTGVIADYNYKLPDDFTGCVIAWNSVKQDALTGGNYGYLYRLFRKSKLKPFERDISTEIYQAGSTPCNGQVGLNCYYPLERYGFHPTTGVNYQPFRVVVLSFELLNGPATVCGPKLSTTLVKDKCVNFNFNGLTGTGVLTTSKKQFLPFQQFGRDISDTTDAVRDPQTLEILDITPCSFGGVSVITPGTNTSNQVAVLYQDVNCTEVPMAIHAEQLTPAWRVYSAGANVFQTRAGCLVGAEHVNNSYECDIPVGAGICASYHSMSSFRSVNQRSIIAYTMSLGAENSVAYSNNSIAIPTNFTISVTTEILPVSMTKTSVDCTMYICGDSIECSNLLLQYGSFCTQLNRALTGIAVEQDKNTQEVFAQVKQIYKTPPIKDFGGFNFSQILPDPSKPSKRSFIEDLLFNKVTLADAGFIKQYGDCLGDIAARDLICAQKFNGLTVLPPLLTDEMIAQYTSALLAGTITSGWTFGAGAALQIPFAMQMAYRFNGCGVTQNVLYENQKLIANQFNSAIGKIQDSLSSTASALGKLQDVVNQNAQALNTLVKQLSSNFGAISSVLNDILSRLDKVEAEVQIDRLITGRLQSLQTYVTQQLIRAAEIRASANLAATKMSECVLGQSKRVDFCGKGCHLMSFPQSAPHGVVFLHVTYVPAQEKNFTTAPAICHEGKAHFPREGVFVSNGTHWFITQRNFYEPQIITTDNTFVSGSCDVVIGIVNNTVYDPLQPELDSFKEELDKYFKNHTSPDVDLGDISGINASVVNIQKEIDRLNEVAKNLNESLIDLQELGKYEQYIKGGGGSDIDPYKEFGSSYQLLNFLPLDFFPDLNALVDTATALYEEELTGREHCSPHHTAIRQALVCWDELTKLIAWMSSNITSEQVRTIIVNHVNDTWGLKVRQSLWFHLSCLTFGQHTVQEFLVSFGVWIRTPAPYRPPNAPILSTLPEHTVIC

SEQ ID NO: 7307 - protein, 1359 aa, Artificial Sequence
  SARS-CoV-2/pangolin/Guangxi/P5E/2017__EPI_ISL_410541 spike protein (1-1205)(I903C_Y1041C) WhcAg construct
MFVFLFVLPLVSSQCVNLTTRTGIPPGYTNSSTRGVYYPDKVFRSSILHLTQDLFLPFFSNVTWFNTITYQGGSKKFDNPVLPFNDGVYFASTEKSNIIRGWIFGTTLDARTQSLLIVNNATNVVIKVCEFQFCTDPFLGVYYHNNNKTWVENEFRVYSSANNCTFEYISQPFLMDLEGKQGNFKNLREFVFKNVDGYFKIYSKHTPIDLVRDLPRGFAALEPLVDLPIGINITRFQTLLALHRSYLTPGKLESGWTTGAAAYYVGYLQQRTFLLSYNQNGTITDAVDCSLDPLSETKCTLKSLTVEKGIYQTSNFRVQPTISIVRFPNITNLCPFGEVFNASKFASVYAWNRKRISNCVADYSVLYNSTSFSTFKCYGVSPTKLNDLCFTNVYADSFVVKGDEVRQIAPGQTGVIADYNYKLPDDFTGCVIAWNSVKQDALTGDNYGYLYRLFRKSKLKPFERDISTEIYQAGSTPCNGQVGLNCYYPLERYGFHPTTGVNYQPFRVVVLSFELLNGPATVCGPKLSTTLVKDKCVNFNFNGLTGTGVLTTSKKQFLPFQQFGRDISDTTDAVRDPQTLEILDITPCSFGGVSVITPGTNTSNQVAVLYQDVNCTEVPMAIHAEQLTPAWRVYSAGANVFQTRAGCLVGAEHVNNSYECDIPVGAGICASYHSMSSFRSVNQRSIIAYTMSLGAENSVAYSNNSIAIPTNFTISVTTEILPVSMTKTSVDCTMYICGDSIECSNLLLQYGSFCTQLNRALTGIAVEQDKNTQEVFAQVKQIYKTPPIKDFGGFNFSQILPDPSKPSKRSFIEDLLFNKVTLADAGFIKQYGDCLGDIAARDLICAQKFNGLTVLPPLLTDEMIAQYTSALLAGTITSGWTFGAGAALQIPFAMQMAYRFNGCGVTQNVLYENQKLIANQFNSAIGKIQDSLSSTASALGKLQDVVNQNAQALNTLVKQLSSNFGAISSVLNDILSRLDKVEAEVQIDRLITGRLQSLQTYVTQQLIRAAEIRASANLAATKMSECVLGQSKRVDFCGKGCHLMSFPQSAPHGVVFLHVTYVPAQEKNFTTAPAICHEGKAHFPREGVFVSNGTHWFITQRNFYEPQIITTDNTFVSGSCDVVIGIVNNTVYDPLQPELDSFKEELDKYFKNHTSPDVDLGDISGINASVVNIQKEIDRLNEVAKNLNESLIDLQELGKYEQYIKGGGGSDIDPYKEFGSSYQLLNFLPLDFFPDLNALVDTATALYEEELTGREHCSPHHTAIRQALVCWDELTKLIAWMSSNITSEQVRTIIVNHVNDTWGLKVRQSLWFHLSCLTFGQHTVQEFLVSFGVWIRTPAPYRPPNAPILSTLPEHTVIC

SEQ ID NO: 7308 - protein, 1357 aa, Artificial Sequence
  SARS-CoV-2/pangolin/Guangxi/P1E/2017__EPI_ISL_410539 spike protein (1-1203)(I901C_Y1039C) WhcAg construct
MFVFLFVLPLVSSQCVNLTTRTGIQPGYTNSSTRGVYYPDKVFRSSILHLTQDLFLPFFSNVTWFNTINYQGGFKKFDNPVLPFNDGVYFASTEKSNIIRGWIFGTTLDARTQSLLIVNNATNVVIKVCEFQFCTDPFLGVYYHNNNKTWVENEFRVYSSANNCTFEYISQPFLMDLEGKQGNFKNLREFVFKNVDGYFKIYSKHTPIDLVRDLPRGFAALEPLVDLPIGINITRFQTLLALHRSYLTPGKLESGWTTGAAAYYVGYLQQRTFLLSYNQNGTITDAVDCSLDPLSETKCTLKSLTVEKGIYQTSNFRVQPTISIVRFPNITNLCPFGEVFNASKFASVYAWNRKRISNCVADYSVLYNSTSFSTFKCYGVSPTKLNDLCFTNVYADSFVVKGDEVRQIAPGQTGVIADYNYKLPDDFTGCVIAWNSVKQDALTGGNYLYRLFRKSKLKPFERDISTEIYQAGSTPCNGQVGLNCYYPLERYGFHPTTGVNYQPFRVVVLSFELLNGPATVCGPKLSTTLVKDKCVNFNFNGLTGTGVLTTSKKQFLPFQQFGRDISDTTDAVRDPQTLEILDITPCSFGGVSVITPGTNTSNQVAVLYQDVNCTEVPMAIHAEQLTPAWRVYSAGANVFQTRAGCLVGAEHVNNSYECDIPVGAGICASYHSMSSLRSVNQRSIIAYTMSLGAENSVAYSNNSIAIPTNFTISVTTEILPVSMTKTSVDCTMYICGDSIECSNLLLQYGSFCTQLNRALTGIAVEQDKNTQEVFAQVKQIYKTPPIKDFGGFNFSQILPDPSKPSKRSFIEDLLFNKVTLADAGFIKQYGDCLGDIAARDLICAQKFNGLTVLPPLLTDEMIAQYTSALLAGTITSGWTFGAGAALQIPFAMQMAYRFNGCGVTQNVLYENQKLIANQFNSAIGKIQDSLSSTASALGKLQDVVNQNAQALNTLVKQLSSNFGAISSVLNDILSRLDKVEAEVQIDRLITGRLQSLQTYVTQQLIRAAEIRASANLAATKMSECVLGQSKRVDFCGKGCHLMSFPQSAPHGVVFLHVTYVPAQEKNFTTAPAICHEGKAHFPREGVFVSNGTHWFITQRNFYEPQIITTDNTFVSGSCDVVIGIVNNTVYDPLQPELDSFKEELDKYFKNHTSPDVDLGDISGINASVVNIQKEIDRLNEVAKNLNESLIDLQELGKYEQYIKGGGGSDIDPYKEFGSSYQLLNFLPLDFFPDLNALVDTATALYEEELTGREHCSPHHTAIRQALVCWDELTKLIAWMSSNITSEQVRTIIVNHVNDTWGLKVRQSLWFHLSCLTFGQHTVQEFLVSFGVWIRTPAPYRPPNAPILSTLPEHTVIC

SEQ ID NO: 7309 - protein, 1365 aa, Artificial Sequence
  SARS-CoV-2/Wuhan/WIV05/2019__EPI_ISL_402128 spike protein (1-1211)(Q965C_S1003C) WhcAg construct
MFVFLVLLPLVSSQCVNLTTRTQLPPAYTNSFTRGVYYPDKVFRSSVLHSTQDLFLPFFSNVTWFHAIHVSGTNGTKRFDNPVLPFNDGVYFASTEKSNIIRGWIFGTTLDSKTQSLLIVNNATNVVIKVCEFQFCNDPFLGVYYHKNNKSWMESEFRVYSSANNCTFEYVSQPFLMDLEGKQGNFKNLREFVFKNIDGYFKIYSKHTPINLVRDLPQGFSALEPLVDLPIGINITRFQTLLALHRSYLTPGDSSSGWTAGAAAYYVGYLQPRTFLLKYNENGTITDAVDCALDPLSETKCTLKSFTVEKGIYQTSNFRVQPTESIVRFPNITNLCPFGEVFNATRFASVYAWNRKRISNCVADYSVLYNSASFSTFKCYGVSPTKLNDLCFTNVYADSFVIRGDEVRQIAPGQTGKIADYNYKLPDDFTGCVIAWNSNNLDSKVGGNYNYLYRLFRKSNLKPFERDISTEIYQAGSTPCNGVEGFNCYFPLQSYGFQPTNGVGYQPYRVVVLSFELLHAPATVCGPKKSTNLVKNKCVNFNFNGLTGTGVLTESNKKFLPFQQFGRDIADTTDAVRDPQTLEILDITPCSFGGVSVITPGTNTSNQVAVLYQDVNCTEVPVAIHADQLTPTWRVYSTGSNVFQTRAGCLIGAEHVNNSYECDIPIGAGICASYQTQTNSPRRARSVASQSIIAYTMSLGAENSVAYSNNSIAIPTNFTISVTTEILPVSMTKTSVDCTMYICGDSTECSNLLLQYGSFCTQLNRALTGIAVEQDKNTQEVFAQVKQIYKTPPIKDFGGFNFSQILPDPSKPSKRSFIEDLLFNKVTLADAGFIKQYGDCLGDIAARDLICAQKFNGLTVLPPLLTDEMIAQYTSALLAGTITSGWTFGAGAALQIPFAMQMAYRFNGIGVTQNVLYENQKLIANQFNSAIGKIQDSLSSTASALGKLQDVVNQNAQALNTLVKCLSSNFGAISSVLNDILSRLDKVEAEVQIDRLITGRLQCLQTYVTQQLIRAAEIRASANLAATKMSECVLGQSKRVDFCGKGYHLMSFPQSAPHGVVFLHVTYVPAQEKNFTTAPAICHDGKAHFPREGVFVSNGTHWFVTQRNFYEPQIITTDNTFVSGNCDVVIGIVNNTVYDPLQPELDSFKEELDKYFKNHTSPDVDLGDISGINASVVNIQKEIDRLNEVAKNLNESLIDLQELGKYEQYIKGGGGSDIDPYKEFGSSYQLLNFLPLDFFPDLNALVDTATALYEEELTGREHCSPHHTAIRQALVCWDELTKLIAWMSSNITSEQVRTIIVNHVNDTWGLKVRQSLWFHLSCLTFGQHTVQEFLVSFGVWIRTPAPYRPPNAPILSTLPEHTVIC

SEQ ID NO: 7310 - protein, 1361 aa, Artificial Sequence
  SARS-CoV-2/bat/Yunnan/RaTG13/2013__EPI_ISL_402131 spike protein (1-1207)(Q961C_S999C) WhcAg construct
MFVFLVLLPLVSSQCVNLTTRTQLPPAYTNSSTRGVYYPDKVFRSSVLHLTQDLFLPFFSNVTWFHAIHVSGTNGIKRFDNPVLPFNDGVYFASTEKSNIIRGWIFGTTLDSKTQSLLIVNNATNVVIKVCEFQFCNDPFLGVYYHKNNKSWMESEFRVYSSANNCTFEYVSQPFLMDLEGKQGNFKNLREFVFKNIDGYFKIYSKHTPINLVRDLPPGFSALEPLVDLPIGINITRFQTLLALHRSYLTPGDSSSGWTAGAAAYYVGYLQPRTFLLKYNENGTITDAVDCALDPLSETKCTLKSFTVEKGIYQTSNFRVQPTDSIVRFPNITNLCPFGEVFNATTFASVYAWNRKRISNCVADYSVLYNSTSFSTFKCYGVSPTKLNDLCFTNVYADSFVITGDEVRQIAPGQTGKIADYNYKLPDDFTGCVIAWNSKHIDAKEGGNFNYLYRLFRKANLKPFERDISTEIYQAGSKPCNGQTGLNCYYPLYRYGFYPTDGVGHQPYRVVVLSFELLNAPATVCGPKKSTNLVKNKCVNFNFNGLTGTGVLTESNKKFLPFQQFGRDIADTTDAVRDPQTLEILDITPCSFGGVSVITPGTNASNQVAVLYQDVNCTEVPVAIHADQLTPTWRVYSTGSNVFQTRAGCLIGAEHVNNSYECDIPIGAGICASYQTQTNSRSVASQSIIAYTMSLGAENSVAYSNNSIAIPTNFTISVTTEILPVSMTKTSVDCTMYICGDSTECSNLLLQYGSFCTQLNRALTGIAVEQDKNTQEVFAQVKQIYKTPPIKDFGGFNFSQILPDPSKPSKRSFIEDLLFNKVTLADAGFIKQYGDCLGDIAARDLICAQKFNGLTVLPPLLTDEMIAQYTSALLAGTITSGWTFGAGAALQIPFAMQMAYRFNGIGVTQNVLYENQKLIANQFNSAIGKIQDSLSSTASALGKLQDVVNQNAQALNTLVKCLSSNFGAISSVLNDILSRLDKVEAEVQIDRLITGRLQCLQTYVTQQLIRAAEIRASANLAATKMSECVLGQSKRVDFCGKGYHLMSFPQSAPHGVVFLHVTYVPAQEKNFTTAPAICHDGKAHFPREGVFVSNGTHWFVTQRNFYEPQIITTDNTFVSGSCDVVIGIVNNTVYDPLQPELDSFKEELDKYFKNHTSPDVDLGDISGINASVVNIQKEIDRLNEVAKNLNESLIDLQELGKYEQYIKGGGGSDIDPYKEFGSSYQLLNFLPLDFFPDLNALVDTATALYEEELTGREHCSPHHTAIRQALVCWDELTKLIAWMSSNITSEQVRTIIVNHVNDTWGLKVRQSLWFHLSCLTFGQHTVQEFLVSFGVWIRTPAPYRPPNAPILSTLPEHTVIC

SEQ ID NO: 7311 - protein, 1365 aa, Artificial Sequence
  SARS-CoV-2/Wuhan/HBCDC-HB-01/2019__EPI_ISL_402132 spike protein (1-1211)(Q965C_S1003C) WhcAg construct
MFVFLVLLPLVSSQCVNLTTRTQLPPAYTNSITRGVYYPDKVFRSSVLHSTQDLFLPFFSNVTWFHAIHVSGTNGTKRFDNPVLPFNDGVYFASTEKSNIIRGWIFGTTLDSKTQSLLIVNNATNVVIKVCEFQFCNDPFLGVYYHKNNKSWMESEFRVYSSANNCTFEYVSQPFLMDLEGKQGNFKNLREFVFKNIDGYFKIYSKHTPINLVRDLPQGFSALEPLVDLPIGINITRFQTLLALHRSYLTPGDSSSGWTAGAAAYYVGYLQPRTFLLKYNENGTITDAVDCALDPLSETKCTLKSFTVEKGIYQTSNFRVQPTESIVRFPNITNLCPFGEVFNATRFASVYAWNRKRISNCVADYSVLYNSASFSTFKCYGVSPTKLNDLCFTNVYADSFVIRGDEVRQIAPGQTGKIADYNYKLPDDFTGCVIAWNSNNLDSKVGGNYNYLYRLFRKSNLKPFERDISTEIYQAGSTPCNGVEGFNCYFPLQSYGFQPTNGVGYQPYRVVVLSFELLHAPATVCGPKKSTNLVKNKCVNFNFNGLTGTGVLTESNKKFLPFQQFGRDIADTTDAVRDPQTLEILDITPCSFGGVSVITPGTNTSNQVAVLYQDVNCTEVPVAIHADQLTPTWRVYSTGSNVFQTRAGCLIGAEHVNNSYECDIPIGAGICASYQTQTNSPRRARSVASQSIIAYTMSLGAENSVAYSNNSIAIPTNFTISVTTEILPVSMTKTSVDCTMYICGDSTECSNLLLQYGSFCTQLNRALTGIAVEQDKNTQEVFAQVKQIYKTPPIKDFGGFNFSQILPDPSKPSKRSFIEDLLFNKVTLADAGFIKQYGDCLGDIAARDLICAQKFNGLTVLPPLLTDEMIAQYTSALLAGTITSGWTFGAGAALQIPFAMQMAYRFNGIGVTQNVLYENQKLIANQFNSAIGKIQDSLSSTASALGKLQDVVNQNAQALNTLVKCLSSNFGAISSVLNDILSRLDKVEAEVQIDRLITGRLQCLQTYVTQQLIRAAEIRASANLAATKMSECVLGQSKRVDFCGKGYHLMSFPQSAPHGVVFLHVTYVPAQEKNFTTAPAICHDGKAHFPREGVFVSNGTHWFVTQRNFYEPQIITTDNTFVSGNCDVVIGIVNNTVYDPLQPELDSFKEELDKYFKNHTSPDVDLGDISGINASVVNIQKEIDRLNEVAKNLNESLIDLQELGKYEQYIKGGGGSDIDPYKEFGSSYQLLNFLPLDFFPDLNALVDTATALYEEELTGREHCSPHHTAIRQALVCWDELTKLIAWMSSNITSEQVRTIIVNHVNDTWGLKVRQSLWFHLSCLTFGQHTVQEFLVSFGVWIRTPAPYRPPNAPILSTLPEHTVIC

SEQ ID NO: 7312 - protein, 1365 aa, Artificial Sequence
  SARS-CoV-2/Guangdong/20SF028/2020__EPI_ISL_403936 spike protein (1-1211)(Q965C_S1003C) WhcAg construct
MFVFLVLLPLVSSQCVNLTTRTQLPPAYTNSFTRGVYYPDKVFRSSVLYSTQDLFLPFFSNVTWFHAIHVSGTNGTKRFDNPVLPFNDGVYFASTEKSNIIRGWIFGTTLDSKTQSLLIVNNATNVVIKVCEFQFCNDPFLGVYYHKNNKSWMESEFRVYSSANNCTFEYVSQPFLMDLEGKQGNFKNLREFVFKNIDGYFKIYSKHTPINLVRDLPQGFSALEPLVDLPIGINITRFQTLLALHRSYLTPGDSSSGWTAGAAAYYVGYLQPRTFLLKYNENGTITDAVDCALDPLSETKCTLKSFTVEKGIYQTSNFRVQPTESIVRFPNITNLCPFGEVFNATRFASVYAWNRKRISNCVADYSVLYNSASFSTFKCYGVSPTKLNDLCFTNVYADSFVIRGDEVRQIAPGQTGKIADYNYKLPDDFTGCVIAWNSNNLDSKVGGNYNYLYRLFRKSNLKPFERDISTEIYQAGSTPCNGVEGFNCYFPLQSYGFQPTNGVGYQPYRVVVLSFELLHAPATVCGPKKSTNLVKNKCVNFNFNGLTGTGVLTESNKKFLPFQQFGRDIADTTDAVRDPQTLEILDITPCSFGGVSVITPGTNTSNQVAVLYQDVNCTEVPVAIHADQLTPTWRVYSTGSNVFQTRAGCLIGAEHVNNSYECDIPIGAGICASYQTQTNSPRRARSVASQSIIAYTMSLGAENSVAYSNNSIAIPTNFTISVTTEILPVSMTKTSVDCTMYICGDSTECSNLLLQYGSFCTQLNRALTGIAVEQDKNTQEVFAQVKQIYKTPPIKDFGGFNFSQILPDPSKPSKRSFIEDLLFNKVTLADAGFIKQYGDCLGDIAARDLICAQKFNGLTVLPPLLTDEMIAQYTSALLAGTITSGWTFGAGAALQIPFAMQMAYRFNGIGVTQNVLYENQKLIANQFNSAIGKIQDSLSSTASALGKLQDVVNQNAQALNTLVKCLSSNFGAISSVLNDILSRLDKVEAEVQIDRLITGRLQCLQTYVTQQLIRAAEIRASANLAATKMSECVLGQSKRVDFCGKGYHLMSFPQSAPHGVVFLHVTYVPAQEKNFTTAPAICHDGKAHFPREGVFVSNGTHWFVTQRNFYEPQIITTDNTFVSGNCDVVIGIVNNTVYDPLQPELDSFKEELDKYFKNHTSPDVDLGDISGINASVVNIQKEIDRLNEVAKNLNESLIDLQELGKYEQYIKGGGGSDIDPYKEFGSSYQLLNFLPLDFFPDLNALVDTATALYEEELTGREHCSPHHTAIRQALVCWDELTKLIAWMSSNITSEQVRTIIVNHVNDTWGLKVRQSLWFHLSCLTFGQHTVQEFLVSFGVWIRTPAPYRPPNAPILSTLPEHTVIC

SEQ ID NO: 7313 - protein, 1365 aa, Artificial Sequence
  SARS-CoV-2/Shenzhen/SZTH-001/2020__EPI_ISL_406592 spike protein (1-1211)(Q965C_S1003C) WhcAg construct
MFVFLVLLPLVSSQCVNLTTRTQLPPAYTNSFTRGVYYPDKVFRSSVLHSTQDLFLPFFSNVTWFHAIHVSGTNGTKRFDNPVLPFNDGVYFASTEKSNIIRGWIFGTTLDSKTQSLLIVNNATNVVIKVCEFQFCNDPFLGVYYHKNNKSWMESEFRVYSSANNCTFEYVSQPFLMDLEGKQGNFKNLREFVFKNIDGYFKIYSKHTPINLVRDLPQGFSALEPLVDLPIGINITRFQTLLALHRSYLTPGDSSSGWTAGAAAYYVGYLQPRTFLLKYNENGTITDAVDCALDPLSETKCTLKSFTVEKGIYQTSNFRVQPTESIVRFPNITNLCPFGEVFNATRFASVYAWNRKRISNCVADYSVLYNSASFSTFKCYGVSPTKLNDLCFTNVYADSFVIRGDEVRQIAPGQTGKIADYNYKLPDDFTGCVIAWNSNNLDSKVGGNYNYLYRLFRKSNLKPFERDISTEIYQAGSTPCNGVEGFNCYFPLQSYGFQPTNGVGYQPYRVVVLSFELLHAPATVCGPKKSTNLVKNKCVNFNFNGLTGTGVLTESNKKFLPFQQFGRDIADTTDAVRDPQTLEILDITPCSFGGVSVITPGTNTSNQVAVLYQDVNCTEVPVAIHADQLTPTWRVYSTGSNVFQTRAGCLIGAEHVNNSYECDIPIGAGICASYQTQTNSPRRARSVASQSIIAYTMSLGAENSVAYSNNSIAIPTNFTISVTTEILPVSMTKTSVDCTMYICGDSTECSNLLLQYGSFCTQLNRALTGIAVEQDKNTQEVFAQVKQIYKTPPIKDFGGFNFSQILPDPSKPSKRSFIEDLLFNKVTLADAGFIKQYGDCLGDIAARDLICAQKFNGLTVLPPLLTDEMIAQYTSALLAGTITSGWTFGAGAALQIPFAMQMAYRFNGIGVTQNVLYENQKLIANQFNSAIGKIQDSLSSTASALGKLQDVVNQNAQALNTLVKCLSSNFGAISSVLNDILSRLDKVEAEVQIDRLITGRLQCLQTYVTQQLIRAAEIRASANLAATKMSECVLGQSKRVDFCGKGYHLMSFPQSAPHGVVFLHVTYVPAQEKNFTTAPAICHDGKAHFPREGVFVSNGTHWFVTQRNFYEPQIITTDNTFVSGNCDVLIGIVNNTVYDPLQPELDSFKEELDKYFKNHTSPDVDLGDISGINASVVNIQKEIDRLNEVAKNLNESLIDLQELGKYEQYIKGGGGSDIDPYKEFGSSYQLLNFLPLDFFPDLNALVDTATALYEEELTGREHCSPHHTAIRQALVCWDELTKLIAWMSSNITSEQVRTIIVNHVNDTWGLKVRQSLWFHLSCLTFGQHTVQEFLVSFGVWIRTPAPYRPPNAPILSTLPEHTVIC

SEQ ID NO: 7314 - protein, 1365 aa, Artificial Sequence
  SARS-CoV-2/Shenzhen/SZTH-004/2020__EPI_ISL_406595 spike protein (1-1211)(Q965C_S1003C) WhcAg construct
MFVFLVLLPLVSSQCVNLTTRTQLPPAYTNSFTRGVYYPDKVFRSSVLHSTQDLFLPFFSNVTWFHAIHVSGTNGTKRFDNPVLPFNDGVYFASTEKSNIIRGWIFGTTLDSKTQSLLIVNNATNVVIKVCEFQFCNDPFLGVYYHKNNKSWMESEFRVYSSANNCTFEYVSQPFLMDLEGKQGNFKNLREFVFKNIDGYFKIYSKHTPINLVRDLPQGFSALEPLVDLPIGINITRFQTLLALHRSYLTPGDSSSGWTAGAAAYYVGYLQPRTFLLKYNENGTITDAVDCALDPLSETKCTLKSFTVEKGIYQTSNFRVQPTESIVRFPNITNLCPFGEVFNATRFASVYAWDRKRISNCVAYYSVLYNSASFSTFKCYGVSPTKLNDLCFTNVYADSFVIRGDEVRQIAPGQTGKIADYNYKLPDDFTGCVIAWNSNNLDSKVGGNYNYLYRLFRKSNLKPFERDISTEIYQAGSTPCNGVEGFNCYFPLQSYGFQPTNGVGYQPYRVVVLSFELLHAPATVCGPKKSTNLVKNKCVNFNFNGLTGTGVLTESNKKFLPFQQFGRDIADTTDAVRDPQTLEILDITPCSFGGVSVITPGTNTSNQVAVLYQDVNCTEVPVAIHADQLTPTWRVYSTGSNVFQTRAGCLIGAEHVNNSYECDIPIGAGICASYQTQTNSPRRARSVASQSIIAYTMSLGAENSVAYSNNSIAIPTNFTISVTTEILPVSMTKTSVDCTMYICGDSTECSNLLLQYGSFCTQLNRALTGIAVEQDKNTQEVFAQVKQIYKTPPIKDFGGFNFSQILPDPSKPSKRSFIEDLLFNKVTLADAGFIKQYGDCLGDIAARDLICAQKFNGLTVLPPLLTDEMIAQYTSALLAGTITSGWTFGAGAALQIPFAMQMAYRFNGIGVTQNVLYENQKLIANQFNSAIGKIQDSLSSTASALGKLQDVVNQNAQALNTLVKCLSSNFGAISSVLNDILSRLDKVEAEVQIDRLITGRLQCLQTYVTQQLIRAAEIRASANLAATKMSECVLGQSKRVDFCGKGYHLMSFPQSAPHGVVFLHVTYVPAQEKNFTTAPAICHDGKAHFPREGVFVSNGTHWFVTQRNFYEPQIITTDNTFVSGNCDVVIGIVNNTVYDPLQPELDSFKEELDKYFKNHTSPDVDLGDISGINASVVNIQKEIDRLNEVAKNLNESLIDLQELGKYEQYIKGGGGSDIDPYKEFGSSYQLLNFLPLDFFPDLNALVDTATALYEEELTGREHCSPHHTAIRQALVCWDELTKLIAWMSSNITSEQVRTIIVNHVNDTWGLKVRQSLWFHLSCLTFGQHTVQEFLVSFGVWIRTPAPYRPPNAPILSTLPEHTVIC

SEQ ID NO: 7315 - protein, 1365 aa, Artificial Sequence
  SARS-CoV-2/France/IDF0372/2020__EPI_ISL_406596 spike protein (1-1211)(Q965C_S1003C) WhcAg construct
MFVFLVLLPLVSSQCVNLTTRTQLPPAYTNSFTRGVYYPDKVFRSSVLHSTQDLFLPFFSNVTWFHAIHVSGTNGTKRFDNPVLPFNDGVYFASTEKSNIIRGWIFGTTLDSKTQSLLIVNNATNVVIKVCEFQFCNDPFLGVYYHKNNKSWMESEFRVYSSANNCTFEYVSQPFLMDLEGKQGNFKNLREFVFKNIDGYFKIYSKHTPINLVRDLPQGFSALEPLVDLPIGINITRFQTLLALHRSYLTPGDSSSGWTAGAAAYYVGYLQPRTFLLKYNENGTITDAVDCALDPLSETKCTLKSFTVEKGIYQTSNFRVQPTESIVRFPNITNLCPFGEVFNATRFASVYAWNRKRISNCVADYSFLYNSASFSTFKCYGVSPTKLNDLCFTNVYADSFVIRGDEVRQIAPGQTGKIADYNYKLPDDFTGCVIAWNSNNLDSKVGGNYNYLYRLFRKSNLKPFERDISTEIYQAGSTPCNGVEGFNCYFPLQSYGFQPTNGVGYQPYRVVVLSFELLHAPATVCGPKKSTNLVKNKCVNFNFNGLTGTGVLTESNKKFLPFQQFGRDIADTTDAVRDPQTLEILDITPCSFGGVSVITPGTNTSNQVAVLYQDVNCTEVPVAIHADQLTPTWRVYSTGSNVFQTRAGCLIGAEHVNNSYECDIPIGAGICASYQTQTNSPRRARSVASQSIIAYTMSLGAENSVAYSNNSIAIPTNFTISVTTEILPVSMTKTSVDCTMYICGDSTECSNLLLQYGSFCTQLNRALTGIAVEQDKNTQEVFAQVKQIYKTPPIKDFGGFNFSQILPDPSKPSKRSFIEDLLFNKVTLADAGFIKQYGDCLGDIAARDLICAQKFNGLTVLPPLLTDEMIAQYTSALLAGTITSGWTFGAGAALQIPFAMQMAYRFNGIGVTQNVLYENQKLIANQFNSAIGKIQDSLSSTASALGKLQDVVNQNAQALNTLVKCLSSNFGAISSVLNDILSRLDKVEAEVQIDRLITGRLQCLQTYVTQQLIRAAEIRASANLAATKMSECVLGQSKRVDFCGKGYHLMSFPQSAPHGVVFLHVTYVPAQEKNFTTAPAICHDGKAHFPREGVFVSNGTHWFVTQRNFYEPQIITTDNTFVSGNCDVVIGIVNNTVYDPLQPELDSFKEELDKYFKNHTSPDVDLGDISGINASVVNIQKEIDRLNEVAKNLNESLIDLQELGKYEQYIKGGGGSDIDPYKEFGSSYQLLNFLPLDFFPDLNALVDTATALYEEELTGREHCSPHHTAIRQALVCWDELTKLIAWMSSNITSEQVRTIIVNHVNDTWGLKVRQSLWFHLSCLTFGQHTVQEFLVSFGVWIRTPAPYRPPNAPILSTLPEHTVIC

SEQ ID NO: 7316 - protein, 1365 aa, Artificial Sequence
  SARS-CoV-2/Australia/VIC01/2020__EPI_ISL_406844 spike protein (1-1211)(Q965C_S1003C) WhcAg construct
MFVFLVLLPLVSSQCVNLTTRTQLPPAYTNSFTRGVYYPDKVFRSSVLHSTQDLFLPFFSNVTWFHAIHVSGTNGTKRFDNPVLPFNDGVYFASTEKSNIIRGWIFGTTLDSKTQSLLIVNNATNVVIKVCEFQFCNDPFLGVYYHKNNKSWMESEFRVYSSANNCTFEYVSQPFLMDLEGKQGNFKNLREFVFKNIDGYFKIYSKHTPINLVRDLPQGFSALEPLVDLPIGINITRFQTLLALHRRYLTPGDSSSGWTAGAAAYYVGYLQPRTFLLKYNENGTITDAVDCALDPLSETKCTLKSFTVEKGIYQTSNFRVQPTESIVRFPNITNLCPFGEVFNATRFASVYAWNRKRISNCVADYSVLYNSASFSTFKCYGVSPTKLNDLCFTNVYADSFVIRGDEVRQIAPGQTGKIADYNYKLPDDFTGCVIAWNSNNLDSKVGGNYNYLYRLFRKSNLKPFERDISTEIYQAGSTPCNGVEGFNCYFPLQSYGFQPTNGVGYQPYRVVVLSFELLHAPATVCGPKKSTNLVKNKCVNFNFNGLTGTGVLTESNKKFLPFQQFGRDIADTTDAVRDPQTLEILDITPCSFGGVSVITPGTNTSNQVAVLYQDVNCTEVPVAIHADQLTPTWRVYSTGSNVFQTRAGCLIGAEHVNNSYECDIPIGAGICASYQTQTNSPRRARSVASQSIIAYTMSLGAENSVAYSNNSIAIPTNFTISVTTEILPVSMTKTSVDCTMYICGDSTECSNLLLQYGSFCTQLNRALTGIAVEQDKNTQEVFAQVKQIYKTPPIKDFGGFNFSQILPDPSKPSKRSFIEDLLFNKVTLADAGFIKQYGDCLGDIAARDLICAQKFNGLTVLPPLLTDEMIAQYTSALLAGTITSGWTFGAGAALQIPFAMQMAYRFNGIGVTQNVLYENQKLIANQFNSAIGKIQDSLSSTASALGKLQDVVNQNAQALNTLVKCLSSNFGAISSVLNDILSRLDKVEAEVQIDRLITGRLQCLQTYVTQQLIRAAEIRASANLAATKMSECVLGQSKRVDFCGKGYHLMSFPQSAPHGVVFLHVTYVPAQEKNFTTAPAICHDGKAHFPREGVFVSNGTHWFVTQRNFYEPQIITTDNTFVSGNCDVVIGIVNNTVYDPLQPELDSFKEELDKYFKNHTSPDVDLGDISGINASVVNIQKEIDRLNEVAKNLNESLIDLQELGKYEQYIKGGGGSDIDPYKEFGSSYQLLNFLPLDFFPDLNALVDTATALYEEELTGREHCSPHHTAIRQALVCWDELTKLIAWMSSNITSEQVRTIIVNHVNDTWGLKVRQSLWFHLSCLTFGQHTVQEFLVSFGVWIRTPAPYRPPNAPILSTLPEHTVIC

SEQ ID NO: 7317 - protein, 1365 aa, Artificial Sequence
  SARS-CoV-2/Germany/BavPat1/2020__EPI_ISL_406862 spike protein (1-1211)(Q965C_S1003C) WhcAg construct
MFVFLVLLPLVSSQCVNLTTRTQLPPAYTNSFTRGVYYPDKVFRSSVLHSTQDLFLPFFSNVTWFHAIHVSGTNGTKRFDNPVLPFNDGVYFASTEKSNIIRGWIFGTTLDSKTQSLLIVNNATNVVIKVCEFQFCNDPFLGVYYHKNNKSWMESEFRVYSSANNCTFEYVSQPFLMDLEGKQGNFKNLREFVFKNIDGYFKIYSKHTPINLVRDLPQGFSALEPLVDLPIGINITRFQTLLALHRSYLTPGDSSSGWTAGAAAYYVGYLQPRTFLLKYNENGTITDAVDCALDPLSETKCTLKSFTVEKGIYQTSNFRVQPTESIVRFPNITNLCPFGEVFNATRFASVYAWNRKRISNCVADYSVLYNSASFSTFKCYGVSPTKLNDLCFTNVYADSFVIRGDEVRQIAPGQTGKIADYNYKLPDDFTGCVIAWNSNNLDSKVGGNYNYLYRLFRKSNLKPFERDISTEIYQAGSTPCNGVEGFNCYFPLQSYGFQPTNGVGYQPYRVVVLSFELLHAPATVCGPKKSTNLVKNKCVNFNFNGLTGTGVLTESNKKFLPFQQFGRDIADTTDAVRDPQTLEILDITPCSFGGVSVITPGTNTSNQVAVLYQGVNCTEVPVAIHADQLTPTWRVYSTGSNVFQTRAGCLIGAEHVNNSYECDIPIGAGICASYQTQTNSPRRARSVASQSIIAYTMSLGAENSVAYSNNSIAIPTNFTISVTTEILPVSMTKTSVDCTMYICGDSTECSNLLLQYGSFCTQLNRALTGIAVEQDKNTQEVFAQVKQIYKTPPIKDFGGFNFSQILPDPSKPSKRSFIEDLLFNKVTLADAGFIKQYGDCLGDIAARDLICAQKFNGLTVLPPLLTDEMIAQYTSALLAGTITSGWTFGAGAALQIPFAMQMAYRFNGIGVTQNVLYENQKLIANQFNSAIGKIQDSLSSTASALGKLQDVVNQNAQALNTLVKCLSSNFGAISSVLNDILSRLDKVEAEVQIDRLITGRLQCLQTYVTQQLIRAAEIRASANLAATKMSECVLGQSKRVDFCGKGYHLMSFPQSAPHGVVFLHVTYVPAQEKNFTTAPAICHDGKAHFPREGVFVSNGTHWFVTQRNFYEPQIITTDNTFVSGNCDVVIGIVNNTVYDPLQPELDSFKEELDKYFKNHTSPDVDLGDISGINASVVNIQKEIDRLNEVAKNLNESLIDLQELGKYEQYIKGGGGSDIDPYKEFGSSYQLLNFLPLDFFPDLNALVDTATALYEEELTGREHCSPHHTAIRQALVCWDELTKLIAWMSSNITSEQVRTIIVNHVNDTWGLKVRQSLWFHLSCLTFGQHTVQEFLVSFGVWIRTPAPYRPPNAPILSTLPEHTVIC

SEQ ID NO: 7318 - protein, 1365 aa, Artificial Sequence
  SARS-CoV-2/Wuhan/HBCDC-HB-02/2020__EPI_ISL_412978 spike protein (1-1211)(Q965C_S1003C) WhcAg construct
MFVFLVLLPLVSSQCVNLTTRTQLPPAYTNSFTRGVYYPDKVFRSSVLHSTQDLFLPFFSNVTWFHAIHVSGTNGTKRFDNPVLPFNDGVYFASTEKSNIIRGWIFGTTLDSKTQSLLIVNNATNVVIKVCEFQFCNDPFLGVYYHKNNKSWMESEFRVYSSANNCTFEYVSQPFLMDLEGKQGNFKNLREFVFKNIDGYFKIYSKHTPINLVRDLPQGFSALEPLVDLPIGINITRFQTLLALHRSYLTPGDSSSGWTAGAAAYYVGYLQPRTFLLKYNENGTITDAVDCALDPLSETKCTLKSFTVEKGIYQTSNFRVQPTESIVRFPNITNLCPFGEVFNATRFASVYAWNRKRISNCVADYSVLYNSASFSTFKCYGVSPTKLNDLCFTNVYADSFVIRGDEVRQIAPGQTGKIADYNYKLPDDFTGCVIAWNSNNLDSKVGGNYNYLYRLFRKSNLKPFERDISTEIYQAGSTPCNGVEGFNCYFPLQSYGFQPTNGVGYQPYRVVVLSFELLHAPATVCGPKKSTNLVKNKCVNFNFNGLTGTGVLTESNKKFLPFQQFGRDIADTTDAVRDPQTLEILDITPCSFGGVSVITPGTNTSNQVAVLYQDVNCTEVPVAIHADQLTPTWRVYSTGSNVFQTRAGCLIGAEHVNNSYECDIPIGAGICASYQTQTNSPRRARSVASQSIIAYTMSLGAENSVAYSNNSIAIPTNFTISVTTEILPVSMTKTSVDCTMYICGDSTECSNFLLQYGSFCTQLNRALTGIAVEQDKNTQEVFAQVKQIYKTPPIKDFGGFNFSQILPDPSKPSKRSFIEDLLFNKVTLADAGFIKQYGDCLGDIAARDLICAQKFNGLTVLPPLLTDEMIAQYTSALLAGTITSGWTFGAGAALQIPFAMQMAYRFNGIGVTQNVLYENQKLIANQFNSAIGKIQDSLSSTASALGKLQDVVNQNAQALNTLVKCLSSNFGAISSVLNDILSRLDKVEAEVQIDRLITGRLQCLQTYVTQQLIRAAEIRASANLAATKMSECVLGQSKRVDFCGKGYHLMSFPQSAPHGVVFLHVTYVPAQEKNFTTAPAICHDGKAHFPREGVFVSNGTHWFVTQRNFYEPQIITTDNTFVSGNCDVVIGIVNNTVYDPLQPELDSFKEELDKYFKNHTSPDVDLGDISGINASVVNIQKEIDRLNEVAKNLNESLIDLQELGKYEQYIKGGGGSDIDPYKEFGSSYQLLNFLPLDFFPDLNALVDTATALYEEELTGREHCSPHHTAIRQALVCWDELTKLIAWMSSNITSEQVRTIIVNHVNDTWGLKVRQSLWFHLSCLTFGQHTVQEFLVSFGVWIRTPAPYRPPNAPILSTLPEHTVIC

SEQ ID NO: 7319 - protein, 1365 aa, Artificial Sequence
  SARS-CoV-2/Australia/QLD02/2020__EPI_ISL_407896 spike protein (1-1211)(Q965C_S1003C) WhcAg construct
MFVFLVLLPLVSSQCVNLTTRTQLPPAYTNSFTRGVYYPDKVFRSSVLHSTQDLFLPFFSNVTWFHAIHVSGTNGTKRFDNPVLPFNDGVYFASTEKSNIIRGWIFGTTLDSKTQSLLIVNNATNVVIKVCEFQFCNDPFLGVYYHKNNKSWMESEFRVYSSANNCTFEYVSQPFLMDLEGKQGNFKNLREFVFKNIDGYFKIYSKHTPINLVRDLPQGFSALEPLVDLPIGINITRFQTLLALHRSYLTPGDSSSGWTAGAAAYYVGYLQPRTFLLKYNENGTITDAVDCALDPLSETKCTLKSFTVEKGIYQTSNFRVQPTESIVRFPNITNLCPFGEVFNATRFASVYAWNRKRISNCVADYSVLYNSASFSTFKCYGVSPTKLNDLCFTNVYADSFVIRGDEVRQIAPGQTGKIADYNYKLPDDFTGCVIAWNSNNLDSKVGGNYNYLYRLFRKSNLKPFERDISTEIYQAGSTPCNGVEGFNCYFPLQSYGFQPTNGVGYQPYRVVVLSFELLHAPATVCGPKKSTNLVKNKCVNFNFNGLTGTGVLTESNKKFLPFQQFGRDIADTTDAVRDPQTLEILDITPCSFGGVSVITPGTNTSNQVAVLYQDVNCTEVPVAIHADQLTPTWRVYSTGSNVFQTRAGCLIGAEHVNNSYECDIPIGAGICASYQTQTNSPRRARSVASQSIIAYTMSLGAENSVAYSNNSIAIPTNFTISVTTEILPVSMTKTSVDCTMYICGDSTECSNLLLQYGSFCTQLNRALTGIAVEQDKNTQEVFAQVKQIYKTPPIKDFGGFNFSQILPDPSKPSKRSFIEDLLFNKVTLADAGFIKQYGDCLGDIAARDLICAQKFNGLTVLPPLLTDEMIAQYTSALLAGTITSGWTFGAGAALQIPFAMQMAYRFNGIGVTQNVLYENQKLIANQFNSAIGKIQDSLSSTASALGKLQDVVNQNAQALNTLVKCLSSNFGAISSVLNDILSRLDKVEAEVQIDRLITGRLQCLQTYVTQQLIRAAEIRASANLAATKMSECVLGQSKRVDFCGKGYHLMSFPQSAPHGVVFLHVTYVPAQEKNFTTAPAICHDGKAHFPREGVFVSNGTHWFVTQRNFYEPQIITTDNTFVSGNCDVVIGIVNNTVYDPLQLELDSFKEELDKYFKNHTSPDVDLGDISGINASVVNIQKEIDRLNEVAKNLNESLIDLQELGKYEQYIKGGGGSDIDPYKEFGSSYQLLNFLPLDFFPDLNALVDTATALYEEELTGREHCSPHHTAIRQALVCWDELTKLIAWMSSNITSEQVRTIIVNHVNDTWGLKVRQSLWFHLSCLTFGQHTVQEFLVSFGVWIRTPAPYRPPNAPILSTLPEHTVIC

SEQ ID NO: 7320 - protein, 1365 aa, Artificial Sequence
  SARS-CoV-2/India/1-31/2020__EPI_ISL_413523 spike protein (1-1211)(Q965C_S1003C) WhcAg construct
MFVFLVLLPLVSSQCVNLTTRTQLPPAYTNSFTRGVYYPDKVFRSSVLHSTQDLFLPFFSNVTWFHAIHVSGTNGTKRFDNPVLPFNDGVYFASTEKSNIIRGWIFGTTLDSKTQSLLIVNNATNVVIKVCEFQFCNDPFLGVYYHKNNKSWMESEFRVYSSANNCTFEYVSQPFLMDLEGKQGNFKNLREFVFKNIDGYFKIYSKHTPINLVRDLPQGFSALEPLVDLPIGINITRFQTLLALHRSYLTPGDSSSGWTAGAAAYYVGYLQPRTFLLKYNENGTITDAVDCALDPLSETKCTLKSFTVEKGIYQTSNFRVQPTESIVRFPNITNLCPFGEVFNATRFASVYAWNRKRISNCVADYSVLYNSASFSTFKCYGVSPTKLNDLCFTNVYADSFVIRGDEVRQIAPGQTGKIADYNYKLPDDFTGCVIAWNSNNLDSKVGGNYNYLYRLFRKSNLKPFERDISTEIYQAGSTPCNGVEGFNCYFPLQSYGFQPTNGVGYQPYRVVVLSFELLHAPATVCGPKKSTNLVKNKCVNFNFNGLTGTGVLTESNKKFLPFQQFGRDIADTTDAVRDPQTLEILDITPCSFGGVSVITPGTNTSNQVAVLYQDVNCTEVPVAIHADQLTPTWRVYSTGSNVFQTRAGCLIGAEHVNNSYECDIPIGAGICASYQTQTNSPRRARSVASQSIIAYTMSLGAENSVAYSNNSIAIPTNFTISVTTEILPVSMTKTSVDCTMYICGDSTECSNLLLQYGSFCTQLNRALTGIAVEQDKNTQEVFAQVKQIYKTPPIKDFGGFNFSQILPDPSKPSKRSFIEDLLFNKVTLADAGFIKQYGDCLGDIAARDLICAQKFNGLTVLPPLLTDEMIAQYTSALLAGTITSGWTFGAGAALQIPFAMQMAYRFNGIGVTQNVLYENQKLIANQFNSVIGKIQDSLSSTASALGKLQDVVNQNAQALNTLVKCLSSNFGAISSVLNDILSRLDKVEAEVQIDRLITGRLQCLQTYVTQQLIRAAEIRASANLAATKMSECVLGQSKRVDFCGKGYHLMSFPQSAPHGVVFLHVTYVPAQEKNFTTAPAICHDGKAHFPREGVFVSNGTHWFVTQRNFYEPQIITTDNTFVSGNCDVVIGIVNNTVYDPLQPELDSFKEELDKYFKNHTSPDVDLGDISGINASVVNIQKEIDRLNEVAKNLNESLIDLQELGKYEQYIKGGGGSDIDPYKEFGSSYQLLNFLPLDFFPDLNALVDTATALYEEELTGREHCSPHHTAIRQALVCWDELTKLIAWMSSNITSEQVRTIIVNHVNDTWGLKVRQSLWFHLSCLTFGQHTVQEFLVSFGVWIRTPAPYRPPNAPILSTLPEHTVIC

SEQ ID NO: 7321 - protein, 1365 aa, Artificial Sequence
  SARS-CoV-2/Guangdong/GD2020087-P0008/2020__EPI_ISL_413863 spike protein (1-1211)(Q965C_S1003C) WhcAg construct
MFVFLVLLPLVSSQCVNLTTRTQLPPAYTNSFTRGVYYPDKVFRSSVLHSTQDLFLPFFSNVTWFHAIHVSGTNGTKRFDNPVLPFNDGVYFASTEKSNIIRGWIFGTTLDSKTQSLLIVNNATNVVIKVCEFQFCNDPFLGVYYHKNNKSWMESEFRVYSSANNCTFEYVSQPFLMDLEGKQGNFKNLREFVFKNIDGYFKIYSKHTPINLVRDLPQGFSALEPLVDLPIGINITRFQTLLALHRSYLTPGDSSSGWTAGAAAYYVGYLQPRTFLLKYNENGTITDAVDCALDPLSETKCTLKSFTVEKGIYQTSNFRVQPTESIVRFPNITNLCPFGEVFNATRFASVYAWNRKRISNCVADYSVLYNSASFSTFKCYGVSPTKLNDLCFTNVYADSFVIRGDEVREIAPGQTGKIADYNYKLPDDFTGCVIAWNSNNLDSKVGGNYNYLYRLFRKSNLKPFERDISTEIYQAGSTPCNGVEGFNCYFPLQSYGFQPTNGVGYQPYRVVVLSFELLHAPATVCGPKKSTNLVKNKCVNFNFNGLTGTGVLTESNKKFLPFQQFGRDIADTTDAVRDPQTLEILDITPCSFGGVSVITPGTNTSNQVAVLYQDVNCTEVPVAIHADQLTPTWRVYSTGSNVFQTRAGCLIGAEHVNNSYECDIPIGAGICASYQTQTNSPRRARSVASQSIIAYTMSLGAENSVAYSNNSIAIPTNFTISVTTEILPVSMTKTSVDCTMYICGDSTECSNLLLQYGSFCTQLNRALTGIAVEQDKNTQEVFAQVKQIYKTPPIKDFGGFNFSQILPDPSKPSKRSFIEDLLFNKVTLADAGFIKQYGDCLGDIAARDLICAQKFNGLTVLPPLLTDEMIAQYTSALLAGTITSGWTFGAGAALQIPFAMQMAYRFNGIGVTQNVLYENQKLIANQFNSAIGKIQDSLSSTASALGKLQDVVNQNAQALNTLVKCLSSNFGAISSVLNDILSRLDKVEAEVQIDRLITGRLQCLQTYVTQQLIRAAEIRASANLAATKMSECVLGQSKRVDFCGKGYHLMSFPQSAPHGVVFLHVTYVPAQEKNFTTAPAICHDGKAHFPREGVFVSNGTHWFVTQRNFYEPQIITTDNTFVSGNCDVVIGIVNNTVYDPLQPELDSFKEELDKYFKNHTSPDVDLGDISGINASVVNIQKEIDRLNEVAKNLNESLIDLQELGKYEQYIKGGGGSDIDPYKEFGSSYQLLNFLPLDFFPDLNALVDTATALYEEELTGREHCSPHHTAIRQALVCWDELTKLIAWMSSNITSEQVRTIIVNHVNDTWGLKVRQSLWFHLSCLTFGQHTVQEFLVSFGVWIRTPAPYRPPNAPILSTLPEHTVIC

SEQ ID NO: 7322 - protein, 1365 aa, Artificial Sequence
  SARS-CoV-2/Sweden/01/2020__EPI_ISL_411951 spike protein (1-1211)(Q965C_S1003C) WhcAg construct
MFVFLVLLPLVSSQCVNLTTRTQLPPAYTNSFTRGVYYPDKVFRSSVLHSTQDLFLPFFSNVTWFHAIHVSGTNGTKRFDNPVLPFNDGVYFASTEKSNIIRGWIFGTTLDSKTQSLLIVNNATNVVIKVCEFQFCNDPFLGVYYHKNNKSWMESEFRVYSSANNCTFEYVSQPFLMDLEGKQGNFKNLREFVFKNIDGYFKIYSKHTPINLVRDLPQGFSALEPLVDLPIGINITRFQTLLALHRSYLTPGDSSSGWTAGAAAYYVGYLQPRTFLLKYNENGTITDAVDCALDPLSETKCTLKSFTVEKGIYQTSNFRVQPTESIVRFPNITNLCPFGEVFNATRFASVYAWNRKRISNCVADYSVLYNSASFSTFKCYGVSPTKLNDLCFTNVYADSFVIRGDEVRQIAPGQTGKIADYNYKLPDDFTGCVIAWNSNNLDSKVGGNYNYLYRLFRKSNLKPFERDISTEIYQAGSTPCNGVEGFNCYFPLQSYGFQPTNGVGYQPYRVVVLSFELLHAPATVCGPKKSTNLVKNKCVNFNFNGLTGTGVLTESNKKFLPFQQFGRDIADTTDAVRDPQTLEILDITPCSFGGVSVITPGTNTSNQVAVLYQDVNCTEVPVAIHADQLTPTWRVYSTGSNVFQTRAGCLIGAEHVNNSYECDIPIGAGICASYQTQTNSPRRARSVASQSIIAYTMSLGAENSVAYSNNSIAIPTNFTISVTTEILPVSMTKTSVDCTMYICGDSTECSNLLLQYGSFCTQLNRALTGIAVEQDKNTQEVFAQVKQIYKTPPIKDCGGFNFSQILPDPSKPSKRSFIEDLLFNKVTLADAGFIKQYGDCLGDIAARDLICAQKFNGLTVLPPLLTDEMIAQYTSALLAGTITSGWTFGAGAALQIPFAMQMAYRFNGIGVTQNVLYENQKLIANQFNSAIGKIQDSLSSTASALGKLQDVVNQNAQALNTLVKCLSSNFGAISSVLNDILSRLDKVEAEVQIDRLITGRLQCLQTYVTQQLIRAAEIRASANLAATKMSECVLGQSKRVDFCGKGYHLMSFPQSAPHGVVFLHVTYVPAQEKNFTTAPAICHDGKAHFPREGVFVSNGTHWFVTQRNFYEPQIITTDNTFVSGNCDVVIGIVNNTVYDPLQPELDSFKEELDKYFKNHTSPDVDLGDISGINASVVNIQKEIDRLNEVAKNLNESLIDLQELGKYEQYIKGGGGSDIDPYKEFGSSYQLLNFLPLDFFPDLNALVDTATALYEEELTGREHCSPHHTAIRQALVCWDELTKLIAWMSSNITSEQVRTIIVNHVNDTWGLKVRQSLWFHLSCLTFGQHTVQEFLVSFGVWIRTPAPYRPPNAPILSTLPEHTVIC

SEQ ID NO: 7323 - protein, 1365 aa, Artificial Sequence
  SARS-CoV-2/Tianmen/HBCDC-HB-07/2020__EPI_ISL_412983 spike protein (1-1211)(Q965C_S1003C) WhcAg construct
MFVFLVLLPLVSSQCVNLTTRTQLPPAYTNSFTRGVYYPDKVFRSSVLHSTQDLFLPFFSNVTWFHAIHVSGTNGTKRFDNPVLPFNDGVYFASTEKSNIIRGWIFGTTLDSKTQSLLIVNNATNVVIKVCEFQFCNDPFLGVYYHKNNKSWMESEFRVYSSANNCTFEYVSQPFLMDLEGKQGNFKNLREFVFKNIDGYFKIYSKHTPINLVRDLPQGFSALEPLVDLPIGINITRFQTLLALHRSYLTPGDSSSGWTAGAAAYYVGYLQPRTFLLKYNENGTITDAVDCALDPLSETKCTLKSFTVEKGIYQTSNFRVQPTESIVRFPNITNLCPFGEVFNATRFASVYAWNRKRISNCVADYSVLYNSASFSTFKCYGVSPTKLNDLCFTNVYADSFVIRGDEVRQIAPGQTGKIADYNYKLPDDFTGCVIAWNSNNLDSKVGGNYNYLYRLFRKSNLKPFERDISTEIYQAGSTPCNGVEGFNCYFPLQSYGFQPTNGVGYQPYRVVVLSFELLHAPATVCGPKKSTNLVKNKCVNFNFNGLTGTGVLTESNKKFLPFQQFGRDIADTTDAVRDPQTLEILDITPCSFGGVSVITPGTNTSNQVAVLYQDLNCTEVPVAIHADQLTPTWRVYSTGSNVFQTRAGCLIGAEHVNNSYECDIPIGAGICASYQTQTNSPRRARSVASQSIIAYTMSLGAENSVAYSNNSIAIPTNFTISVTTEILPVSMTKTSVDCTMYICGDSTECSNLLLQYGSFCTQLNRALTGIAVEQDKNTQEVFAQVKQIYKTPPIKDFGGFNFSQILPDPSKPSKRSFIEDLLFNKVTLADAGFIKQYGDCLGDIAARDLICAQKFNGLTVLPPLLTDEMIAQYTSALLAGTITSGWTFGAGAALQIPFAMQMAYRFNGIGVTQNVLYENQKLIANQFNSAIGKIQDSLSSTASALGKLQDVVNQNAQALNTLVKCLSSNFGAISSVLNDILSRLDKVEAEVQIDRLITGRLQCLQTYVTQQLIRAAEIRASANLAATKMSECVLGQSKRVDFCGKGYHLMSFPQSAPHGVVFLHVTYVPAQEKNFTTAPAICHDGKAHFPREGVFVSNGTHWFVTQRNFYEPQIITTDNTFVSGNCDVVIGIVNNTVYDPLQPELDSFKEELDKYFKNHTSPDVDLGDISGINASVVNIQKEIDRLNEVAKNLNESLIDLQELGKYEQYIKGGGGSDIDPYKEFGSSYQLLNFLPLDFFPDLNALVDTATALYEEELTGREHCSPHHTAIRQALVCWDELTKLIAWMSSNITSEQVRTIIVNHVNDTWGLKVRQSLWFHLSCLTFGQHTVQEFLVSFGVWIRTPAPYRPPNAPILSTLPEHTVIC

SEQ ID NO: 7324 - protein, 1365 aa, Artificial Sequence
  SARS-CoV-2/Hong Kong/case42_VM20002493/2020__EPI_ISL_414527 spike protein (1-1211)(Q965C_S1003C) WhcAg construct
MFVFLVLLPLVSSQCVNLTTRTQLPPAYTNSFTRGVYYPDKVFRSSVLHSTQDLFLPFFSNVTWFHAIHVSGTNGTKRFDNPVLPFNDGVYFASTEKSNIIRGWIFGTTLDSKTQSLLIVNNATNVVIKVCEFQFCNDPFLGVYYHKNNKSWMESEFRVYSSANNCTFEYVSQPFLMDLEGKQGNFKNLREFVFKNIDGYFKIYSKHTPINLVRDLPQGFSALEPLVDLPIGINITRFQTLLALHRSYLTPGDSSSGWTAGAAAYYVGYLQPRTFLLKYNENGTITDAVDCALDPLSETKCTLKSFTVEKGIYQTSNFRVQPTESIVRFPNITNLCPFGEVFNATRFASVYAWNRKRISNCVADYSVLYNSASFSTFKCYGVSPTKLNDLCFTNVYADSFVIRGDEVRQIAPGQTGKIADYNYKLPDDFTGCVIAWNSNNLDSKVGGNYNYLYRLFRKSNLKPFERDISTEIYQAGSTPCNGVEGFNCYFPLQSYGFQPTNGVGYQPYRVVVLSFELLHAPATVCGPKKSTNLVKNKCVNFNFNGLTGTGVLTESNKKFLPFQQFGRDIADTTDAVRDPQTLEILDITPCSFGGVSVITPGTNTSNQVAVLYQDVNCTEVPVAIHADQLTPTWRVYSTGSNVFQTRAGCLIGAEHVNNSYECDIPIGAGICASYQTQTNSPRRARSVASQSIIAYTMSLGAENSVAYSNNSIAIPTNFAISVTTEILPVSMTKTSVDCTMYICGDSTECSNLLLQYGSFCTQLNRALTGIAVEQDKNTQEVFAQVKQIYKTPPIKDFGGFNFSQILPDPSKPSKRSFIEDLLFNKVTLADAGFIKQYGDCLGDIAARDLICAQKFNGLTVLPPLLTDEMIAQYTSALLAGTITSGWTFGAGAALQIPFAMQMAYRFNGIGVTQNVLYENQKLIANQFNSAIGKIQDSLSSTASALGKLQDVVNQNAQALNTLVKCLSSNFGAISSVLNDILSRLDKVEAEVQIDRLITGRLQCLQTYVTQQLIRAAEIRASANLAATKMSECVLGQSKRVDFCGKGYHLMSFPQSAPHGVVFLHVTYVPAQEKNFTTAPAICHDGKAHFPREGVFVSNGTHWFVTQRNFYEPQIITTDNTFVSGNCDVVIGIVNNTVYDPLQPELDSFKEELDKYFKNHTSPDVDLGDISGINASVVNIQKEIDRLNEVAKNLNESLIDLQELGKYEQYIKGGGGSDIDPYKEFGSSYQLLNFLPLDFFPDLNALVDTATALYEEELTGREHCSPHHTAIRQALVCWDELTKLIAWMSSNITSEQVRTIIVNHVNDTWGLKVRQSLWFHLSCLTFGQHTVQEFLVSFGVWIRTPAPYRPPNAPILSTLPEHTVIC

SEQ ID NO: 7325 - protein, 1365 aa, Artificial Sequence
  SARS-CoV-2/USA/CruiseA-23/2020__EPI_ISL_414482 spike protein (1-1211)(Q965C_S1003C) WhcAg construct
MFVFLVLLPLVSSQCVNLTTRTQLPPAYTNSFTRGVYYPDKVFRSSVLHSTQDLFLPFFSNVTWFHAIHVSGTNGTKRFDNPVLPFNDGVYFASTEKSNIIRGWIFGTTLDSKTQSLLIVNNATNVVIKVCEFQFCNDPFLGVYYHKNNKSWMESEFRVYSSANNCTFEYVSQPFLMDLEVKQGNFKNLREFVFKNIDGYFKIYSKHTPINLVRDLPQGFSALEPLVDLPIGINITRFQTLLALHRSYLTPGDSSSGWTAGAAAYYVGYLQPRTFLLKYNENGTITDAVDCALDPLSETKCTLKSFTVEKGIYQTSNFRVQPTESIVRFPNITNLCPFGEVFNATRFASVYAWNRKRISNCVADYSVLYNSASFSTFKCYGVSPTKLNDLCFTNVYADSFVIRGDEVRQIAPGQTGKIADYNYKLPDDFTGCVIAWNSNNLDSKVGGNYNYLYRLFRKSNLKPFERDISTEIYQAGSTPCNGVEGFNCYFPLQSYGFQPTNGVGYQPYRVVVLSFELLHAPATVCGPKKSTNLVKNKCVNFNFNGLTGTGVLTESNKKFLPFQQFGRDIADTTDAVRDPQTLEILDITPCSFGGVSVITPGTNTSNQVAVLYQDVNCTEVPVAIHADQLTPTWRVYSTGSNVFQTRAGCLIGAEHVNNSYECDIPIGAGICASYQTQTNSPRRARSVASQSIIAYTMSLGAENSVAYSNNSIAIPTNFTISVTTEILPVSMTKTSVDCTMYICGDSTECSNLLLQYGSFCTQLNRALTGIAVEQDKNTQEVFAQVKQIYKTPPIKDFGGFNFSQILPDPSKPSKRSFIEDLLFNKVTLADAGFIKQYGDCLGDIAARDLICAQKFNGLTVLPPLLTDEMIAQYTSALLAGTITSGWTFGAGAALQIPFAMQMAYRFNGIGVTQNVLYENQKLIANQFNSAIGKIQDSLSSTASALGKLQDVVNQNAQALNTLVKCLSSNFGAISSVLNDILSRLDKVEAEVQIDRLITGRLQCLQTYVTQQLIRAAEIRASANLAATKMSECVLGQSKRVDFCGKGYHLMSFPQSAPHGVVFLHVTYVPAQEKNFTTAPAICHDGKAHFPREGVFVSNGTHWFVTQRNFYEPQIITTDNTFVSGNCDVVIGIVNNTVYDPLQPELDSFKEELDKYFKNHTSPDVDLGDISGINASVVNIQKEIDRLNEVAKNLNESLIDLQELGKYEQYIKGGGGSDIDPYKEFGSSYQLLNFLPLDFFPDLNALVDTATALYEEELTGREHCSPHHTAIRQALVCWDELTKLIAWMSSNITSEQVRTIIVNHVNDTWGLKVRQSLWFHLSCLTFGQHTVQEFLVSFGVWIRTPAPYRPPNAPILSTLPEHTVIC

SEQ ID NO: 7326 - protein, 1365 aa, Artificial Sequence
  SARS-CoV-2/Hong Kong/case85_VM20002868/2020__EPI_ISL_414519 spike protein (1-1211)(Q965C_S1003C) WhcAg construct
MFVFLVLVPLVSSQCVNLTTRTQLPPAYTNSFTRGVYYPDKVFRSSVLHSTQDLFLPFFSNVTWFHAIHVSGTNGTKRFDNPVLPFNDGVYFASTEKSNIIRGWIFGTTLDSKTQSLLIVNNATNVVIKVCEFQFCNDPFLGVYYHKNNKSWMESEFRVYSSANNCTFEYVSQPFLMDLEGKQGNFKNLREFVFKNIDGYFKIYSKHTPINLVRDLPQGFSALEPLVDLPIGINITRFQTLLALHRSYLTPGDSSSGWTAGAAAYYVGYLQPRTFLLKYNENGTITDAVDCALDPLSETKCTLKSFTVEKGIYQTSNFRVQPTESIVRFPNITNLCPFGEVFNATRFASVYAWNRKRISNCVADYSVLYNSASFSTFKCYGVSPTKLNDLCFTNVYADSFVIRGDEVRQIAPGQTGKIADYNYKLPDDFTGCVIAWNSNNLDSKVGGNYNYLYRLFRKSNLKPFERDISTEIYQAGSTPCNGVEGFNCYFPLQSYGFQPTNGVGYQPYRVVVLSFELLHAPATVCGPKKSTNLVKNKCVNFNFNGLTGTGVLTESNKKFLPFQQFGRDIADTTDAVRDPQTLEILDITPCSFGGVSVITPGTNTSNQVAVLYQDVNCTEVPVAIHADQLTPTWRVYSTGSNVFQTRAGCLIGAEHVNNSYECDIPIGAGICASYQTQTNSPRRARSVASQSIIAYTMSLGAENSVAYSNNSIAIPTNFTISVTTEILPVSMTKTSVDCTMYICGDSTECSNLLLQYGSFCTQLNRALTGIAVEQDKNTQEVFAQVKQIYKTPPIKDFGGFNFSQILPDPSKPSKRSFIEDLLFNKVTLADAGFIKQYGDCLGDIAARDLICAQKFNGLTVLPPLLTDEMIAQYTSALLAGTITSGWTFGAGAALQIPFAMQMAYRFNGIGVTQNVLYENQKLIANQFNSAIGKIQDSLSSTASALGKLQDVVNQNAQALNTLVKCLSSNFGAISSVLNDILSRLDKVEAEVQIDRLITGRLQCLQTYVTQQLIRAAEIRASANLAATKMSECVLGQSKRVDFCGKGYHLMSFPQSAPHGVVFLHVTYVPAQEKNFTTAPAICHDGKAHFPREGVFVSNGTHWFVTQRNFYEPQIITTDNTFVSGNCDVVIGIVNNTVYDPLQPELDSFKEELDKYFKNHTSPDVDLGDISGINASVVNIQKEIDRLNEVAKNLNESLIDLQELGKYEQYIKGGGGSDIDPYKEFGSSYQLLNFLPLDFFPDLNALVDTATALYEEELTGREHCSPHHTAIRQALVCWDELTKLIAWMSSNITSEQVRTIIVNHVNDTWGLKVRQSLWFHLSCLTFGQHTVQEFLVSFGVWIRTPAPYRPPNAPILSTLPEHTVIC

SEQ ID NO: 7327 - protein, 1365 aa, Artificial Sequence; identical to SEQ ID NO: 7317
  SARS-CoV-2/England/200990660/2020__EPI_ISL_414523 spike protein (1-1211)(Q965C_S1003C) WhcAg construct

SEQ ID NO: 7328 - protein, 1365 aa, Artificial Sequence
  SARS-CoV-2/Australia/NSW09/2020__EPI_ISL_413595 spike protein (1-1211)(Q965C_S1003C) WhcAg construct
MFVFLVLLPLVSSQCVNLTTRTQLPPAYTNSFTRGVYYPDKVFRSSVLHSTQDLFLPFFSNVTWFHAIHVSGTNGTKRFDNPVLPFNDGVYFASTEKSNIIRGWIFGTTLDSKTQSLLIVNNATNVVIKVCEFQFCNDPFLGVYYHKNNKSWMESEFRVYSSANNCTFEYVSQPFLMDLEGKQGNFKNLREFVFKNIDGYFKIYSKHTPINLVRDLPQGFSALEPLVDLPIGINITRFQTLLALHRSYLTPGDSSSGWTAGAAAYYVGYLQPRTFLLKYNENGTITDAVDCALDPLSETKCTLKSFTVEKGIYQTSNFRVQPTESIVRFPNITNLCPFGEVFNATRFASVYAWNRKRISNCVADYSVLYNSASFSTFKCYGVSPTKLNDLCFTNVYADSFVIRGDEVRQIAPGQTGKIADYNYKLPDDFTGCVIAWNSNNLDSKVGGNYNYLYRLFRKSNLKPFERDISTEIYQAGSTPCNGVEGFNCYFPLQSYGFQPTNGVGYQPYRVVVLSFELLHAPATVCGPKKSTNLVKNKCVNFNFNGLTGTGVLTESNKKFLPFQQFGRDIADTTDAVRDPQTLEILDITPCSFGGVSVITPGTNTSNQVAVLYQDVNCTEVPVAIHADQLTPTWRVYSTGSNVFQTRAGCLIGAEHVNNSYECDIPIGAGICASYQTQTNSPRRARSVASQSIIAYTMSLGAENSVAYSNNSIAIPTNFTISVTTEILPVSMTKTSVDCTMYICGDSTECSNLLLQYGSFCTQLNRALTGIAVEQDKNTQEVFAQVKQIYKTPPIKDFGGFNFSQILPDPSKPSKRSFIEDLLFNKVTLADAGFIKQYGDCLGDIAARDLICAQKFNGLTVLPPLLTDEMIAQYTSALLAGTITSGWTFGAGAALQIPFAMQMAYRFNGIGVTQNVLYENQKLIANQFNSAIGKIQDSLSFTASALGKLQDVVNQNAQALNTLVKCLSSNFGAISSVLNDILSRLDKVEAEVQIDRLITGRLQCLQTYVTQQLIRAAEIRASANLAATKMSECVLGQSKRVDFCGKGYHLMSFPQSAPHGVVFLHVTYVPAQEKNFTTAPAICHDGKAHFPREGVFVSNGTHWFVTQRNFYEPQIITTDNTFVSGNCDVVIGIVNNTVYDPLQPELDSFKEELDKYFKNHTSPDVDLGDISGINASVVNIQKEIDRLNEVAKNLNESLIDLQELGKYEQYIKGGGGSDIDPYKEFGSSYQLLNFLPLDFFPDLNALVDTATALYEEELTGREHCSPHHTAIRQALVCWDELTKLIAWMSSNITSEQVRTIIVNHVNDTWGLKVRQSLWFHLSCLTFGQHTVQEFLVSFGVWIRTPAPYRPPNAPILSTLPEHTVIC

SEQ ID NO: 7329 - protein, 1365 aa, Artificial Sequence; identical to SEQ ID NO: 7309
  SARS-CoV-2/Australia/NSW10/2020__EPI_ISL_413596 spike protein (1-1211)(Q965C_S1003C) WhcAg construct

SEQ ID NO: 7330 - protein, 1365 aa, Artificial Sequence
  SARS-CoV-2/Switzerland/1000477797/2020__EPI_ISL_413023 spike protein (1-1211)(Q965C_S1003C) WhcAg construct
MFVFLVLLPLVSSQCVNLTTRTQLPPAYTNSFTRGVYYPDKVFRSSVLHSTQDLFLPFFSNVTWFHAIHVSGTNGTKRFDNPVLPFNDGVYFASTEKSNIIRGWIFGTTLDSKTQSLLIVNNATNVVIKVCEFQFCNDPFLGVYYHKNNKSWMESEFRVYSSANNCTFEYVSQPFLMDLEGKQGNFKNLREFVFKNIDGYFNIYSKHTPINLVRDLPQGFSALEPLVDLPIGINITRFQTLLALHRSYLTPGDSSSGWTAGAAAYYVGYLQPRTFLLKYNENGTITDAVDCALDPLSETKCTLKSFTVEKGIYQTSNFRVQPTESIVRFPNITNLCPFGEVFNATRFASVYAWNRKRISNCVADYSVLYNSASFSTFKCYGVSPTKLNDLCFTNVYADSFVIRGDEVRQIAPGQTGKIADYNYKLPDDFTGCVIAWNSNNLDSKVGGNYNYLYRLFRKSNLKPFERDISTEIYQAGSTPCNGVEGFNCYFPLQSYGFQPTNGVGYQPYRVVVLSFELLHAPATVCGPKKSTNLVKNKCVNFNFNGLTGTGVLTESNKKFLPFQQFGRDIADTTDAVRDPQTLEILDITPCSFGGVSVITPGTNTSNQVAVLYQGVNCTEVPVAIHADQLTPTWRVYSTGSNVFQTRAGCLIGAEHVNNSYECDIPIGAGICASYQTQTNSPRRARSVASQSIIAYTMSLGAENSVAYSNNSIAIPTNFTISVTTEILPVSMTKTSVDCTMYICGDSTECSNLLLQYGSFCTQLNRALTGIAVEQDKNTQEVFAQVKQIYKTPPIKDFGGFNFSQILPDPSKPSKRSFIEDLLFNKVTLADAGFIKQYGDCLGDIAARDLICAQKFNGLTVLPPLLTDEMIAQYTSALLAGTITSGWTFGAGAALQIPFAMQMAYRFNGIGVTQNVLYENQKLIANQFNSAIGKIQDSLSSTASALGKLQDVVNQNAQALNTLVKCLSSNFGAISSVLNDILSRLDKVEAEVQIDRLITGRLQCLQTYVTQQLIRAAEIRASANLAATKMSECVLGQSKRVDFCGKGYHLMSFPQSAPHGVVFLHVTYVPAQEKNFTTAPAICHDGKAHFPREGVFVSNGTHWFVTQRNFYEPQIITTDNTFVSGNCDVVIGIVNNTVYDPLQPELDSFKEELDKYFKNHTSPDVDLGDISGINASVVNIQKEIDRLNEVAKNLNESLIDLQELGKYEQYIKGGGGSDIDPYKEFGSSYQLLNFLPLDFFPDLNALVDTATALYEEELTGREHCSPHHTAIRQALVCWDELTKLIAWMSSNITSEQVRTIIVNHVNDTWGLKVRQSLWFHLSCLTFGQHTVQEFLVSFGVWIRTPAPYRPPNAPILSTLPEHTVIC

SEQ ID NO: 7331 - protein, 1365 aa, Artificial Sequence
  SARS-CoV-2/Belgium/BA-02291/2020__EPI_ISL_415159 spike protein (1-1211)(Q965C_S1003C) WhcAg construct
MFVFLVLLPLVSSQCVNLTTRTQLPPAYTNSFTRGVYYPDKVFRSSVLHSTQDLFLPFFSNVTWFHAIHVSGTNGTKRFDNPVLPFNDGVYFASTEKSNIIRGWIFGTTLDSKTQSLLIVNNATNVVIKVCEFQFCNDPFLGVYYHKNNKSWMESEFRVYSSANNCTFEYVSQPFLMDLEGKQGNFKNLREFVFKNIDGYFKIYSKHTPINLVRDLPQGFSALEPLVDLPIGINITRFQTLLALHRSYLTPGDSSSGWTAGAAAYYVGYLQPRTFLLKYNENGTITDAVDCALDPLSETKCTLKSFTVEKGIYQTSNFRVQPTESIVRFPNITNLCPFGEVFNATRFASVYAWNRKRISNCVADYSVLYNSASFSTFKCYGVSPTKLNDLCFTNVYADSFVIRGDEVRQIAPGQTGKIADYNYKLPDDFTGCVIAWNSNNLDSKVGGNYNYLYRLFRRSNLKPFERDISTEIYQAGSTPCNGVEGFNCYFPLQSYGFQPTNGVGYQPYRVVVLSFELLPAPATVCGPKKSTNLVKNKCVNFNFNGLTGTGVLTESNKKFLPFQQFGRDIADTTDAVRDPQTLEILDITPCSFGGVSVITPGTNTSNQVAVLYQGVNCTEVPVAIHADQLTPTWRVYSTGSNVFQTRAGCLIGAEHVNNSYECDIPIGAGICASYQTQTNSPRRARSVASQSIIAYTMSLGAENSVAYSNNSIAIPTNFTISVTTEILPVSMTKTSVDCTMYICGDSTECSNLLLQYGSFCTQLNRALTGIAVEQDKNTQEVFAQVKQIYKTPPIKDFGGFNFSQILPDPSKPSKRSFIEDLLFNKVTLADAGFIKQYGDCLGDIAARDLICAQKFNGLTVLPPLLTDEMIAQYTSALLAGTITSGWTFGAGAALQIPFAMQMAYRFNGIGVTQNVLYENQKLIANQFNSAIGKIQDSLSSAAPALGKLQDVVNQNAQALNTLVKCLSSNFGAISSVLNDILSRLDKVEAEVQIDRLITGRLQCLQTYVTQQLIRAAEIRASANLAATKMSECVLGQSKRVDFCGKGYHLMSFPQSAPHGVVFLHVTYVPAQEKNFTTAPAICHDGKAHFPREGVFVSNGTHWFVTQRNFYEPQIITTDNTFVSGNCDVVIGIVNNTVYDPLQPELDSFKEELDKYFKNHTSPDVDLGDISGINASVVNIQKEIDRLNEVAKNLNESLIDLQELGKYEQYIKGGGGSDIDPYKEFGSSYQLLNFLPLDFFPDLNALVDTATALYEEELTGREHCSPHHTAIRQALVCWDELTKLIAWMSSNITSEQVRTIIVNHVNDTWGLKVRQSLWFHLSCLTFGQHTVQEFLVSFGVWIRTPAPYRPPNAPILSTLPEHTVIC

SEQ ID NO: 7332 - protein, 1365 aa, Artificial Sequence
  SARS-CoV-2/USA/WA8-UW5/2020__EPI_ISL_413486 spike protein (1-1211)(Q965C_S1003C) WhcAg construct
MFVFLVLLPLVSSQCVNLTTRTQLPPAYTNSFTRGVYYPDKVFRSSVLHSTQDLFLPFFSNVTWFHAIHVSGTNGTKRFDNPVLPFNDGVYFASTEKSNIIRGWIFGTTLDSKTQSLLIVNNATNVVIKVCEFQFCNDPFLGVYYHKNNKSWMESEFRVYSSANNCTFEYVSQPFLMDLEGKQGNFKNLREFVFKNIDGYFKIYSKHTPINLVRDLPQGFSALEPLVDLPIGINITRFQTLLALHRSYLTPGDSSSGWTAGAAAYYVGYLQPRTFLLKYNENGTITDAVDCALDPLSETKCTLKSFTVEKGIYQTSNFRVQPTESIVRFPNITNLCPFGEVFNATRFASVYAWNRKRISNCVADYSVLYNSASFSTFKCYGVSPTKLNDLCFTNVYADSFVIRGDEVRQIAPGQTGKIADYNYKLPDDFTGCVIAWNSNNLDSKVGGNYNYLYRLFRKSNLKPFERDISTEIYQAGSTPCNGVEGFNCYFPLQSYGFQPTNGVGYQPYRVVVLSFELLHAPATVCGPKKSTNLVKNKCVNFNFNGLTGTGVLTESNKKFLPFQQFGRDIADTTDAVRDPQTLEILDITPCSFGGVSVITPGTNTSNQVAVLYQDVNCTEVPVAIHADQLTPTWRVYSTGSNVFQTRAGCLIGAEYVNNSYECDIPIGAGICASYQTQTNSPRRARSVASQSIIAYTMSLGAENSVAYSNNSIAIPTNFTISVTTEILPVSMTKTSVDCTMYICGDSTECSNLLLQYGSFCTQLNRALTGIAVEQDKNTQEVFAQVKQIYKTPPIKDFGGFNFSQILPDPSKPSKRSFIEDLLFNKVTLADAGFIKQYGDCLGDIAARDLICAQKFNGLTVLPPLLTDEMIAQYTSALLAGTITSGWTFGAGAALQIPFAMQMAYRFNGIGVTQNVLYENQKLIANQFNSAIGKIQDSLSSTASALGKLQDVVNQNAQALNTLVKCLSSNFGAISSVLNDILSRLDKVEAEVQIDRLITGRLQCLQTYVTQQLIRAAEIRASANLAATKMSECVLGQSKRVDFCGKGYHLMSFPQSAPHGVVFLHVTYVPAQEKNFTTAPAICHDGKAHFPREGVFVSNGTHWFVTQRNFYEPQIITTDNTFVSGNCDVVIGIVNNTVYDPLQPELDSFKEELDKYFKNHTSPDVDLGDISGINASVVNIQKEIDRLNEVAKNLNESLIDLQELGKYEQYIKGGGGSDIDPYKEFGSSYQLLNFLPLDFFPDLNALVDTATALYEEELTGREHCSPHHTAIRQALVCWDELTKLIAWMSSNITSEQVRTIIVNHVNDTWGLKVRQSLWFHLSCLTFGQHTVQEFLVSFGVWIRTPAPYRPPNAPILSTLPEHTVIC

SEQ ID NO: 7333 - protein, 1365 aa, Artificial Sequence
  SARS-CoV-2/England/20102000506/2020__EPI_ISL_415147 spike protein (1-1211)(Q965C_S1003C) WhcAg construct
MFVFLVLLPLVSSQCVNLTTRTQLPPAYTNSFTRGVYYPDKVFRSSVLHSTQDLFLPFFSNVTWFHAIHVSGTNGTKRFDNPVLPFNDGVYFASTEKSNIIRGWIFGTTLDSKTQSLLIVNNATNVVIKVCEFQFCNDPFLGVYYHKNNKSWMESEFRVYSSANNCTFEYVSQPFLMDLEGKQGNFKNLREFVFKNIDGYFKIYSKHTPINLVRDLPQGFSALEPLVDLPIGINITRFQTLLALHRSYLTPGDSSSGWTAGAAAYYVGYLQPRTFLLKYNENGTITDAVDCALDPLSETKCTLKSFTVEKGIYQTSNFRVQPTESIVRFPNITNLCPFGEVFNATRFASVYAWNRKRISNCVADYSVLYNSASFSTFKCYGVSPTKLNDLCFTNVYADSFVIRGDEVRQIAPGQTGKIADYNYKLPDDFTGCVIAWNSNNLDSKVGGNYNYLYRLFRKSNLKPFERDISTEIYQAGSTPCNGVEGFNCYFPLQSYGFQPTNGVGYQPYRVVVLSFELLHAPATVCGPKKSTNLVKNKCVNFNFNGLTGTGVLTESNKKFLPFQQFGRDIADTTDAVRDPQTLEILDITPCSFGGVSVITPGTNTSNQVAVLYQGVNCTEVPVAIHADQLTPTWRVYSTGSNVFQTRAGCLIGAEHVNNSYECDIPIGAGICASYQTQTNSPRRARSVASQSIIAYTMSLGAENSVAYSNNSIAIPTNFTISVTTEILPVSMTKTSVDCTMYICGDSTECSNLLLQYGSFCTQLNRALTGIAVEQDKNTQEVFAQVKQIYKTPPIKDFGGFNFSQILPDPSKPSKRSFIEDLLFNKVTLADAGFIKQYGYCLGDIAARDLICAQKFNGLTVLPPLLTDEMIAQYTSALLAGTITSGWTFGAGAALQIPFAMQMAYRFNGIGVTQNVLYENQKLIANQFNSAIGKIQDSLSSTASALGKLQDVVNQNAQALNTLVKCLSSNFGAISSVLNDILSRLDKVEAEVQIDRLITGRLQCLQTYVTQQLIRAAEIRASANLAATKMSECVLGQSKRVDFCGKGYHLMSFPQSAPHGVVFLHVTYVPAQEKNFTTAPAICHDGKAHFPREGVFVSNGTHWFVTQRNFYEPQIITTDNTFVSGNCDVVIGIVNNTVYDPLQPELDSFKEELDKYFKNHTSPDVDLGDISGINASVVNIQKEIDRLNEVAKNLNESLIDLQELGKYEQYIKGGGGSDIDPYKEFGSSYQLLNFLPLDFFPDLNALVDTATALYEEELTGREHCSPHHTAIRQALVCWDELTKLIAWMSSNITSEQVRTIIVNHVNDTWGLKVRQSLWFHLSCLTFGQHTVQEFLVSFGVWIRTPAPYRPPNAPILSTLPEHTVIC

SEQ ID NO: 7334 - protein, 1365 aa, Artificial Sequence
  SARS-CoV-2/Belgium/VAG-03013/2020__EPI_ISL_415155 spike protein (1-1211)(Q965C_S1003C) WhcAg construct
MFVFLVLLPLVSSQCVNLTTRTQLPPAYTNSFTRGVYYPDKVFRSSVLHSTQDLFLPFFSNVTWFHAIHVSGTNGTKRFDNPVLPFNDGVYFASTEKSNIIRGWIFGTTLDSKTQSLLIVNNATNVVIKVCEFQFCNDPFLGVYYHKNNKSWMESEFRVYSSANNCTFEYVSQPFLMDLEGKQGNFKNLREFVFKNIDGYFKIYSKHTPINLVRDLPQGFSALEPLVDLPIGINITRFQTLLALHRSYLTPGDSSSGWTAGAAAYYVGYLQPRTFLLKYNENGTITDAVDCALDPLSETKCTLKSFTVEKGIYQTSNFRVQPTESIVRFPNITNLCPFGEVFNATRFASVYAWNRKRISNCVADYSVLYNSASFSTFKCYGVSPTKLNDLCFTNVYADSFVIRGDEVRQIAPGQTGKIADYNYKLPDDFTGCVIAWNSNNLDSKVGGNYNYLYRLFRKSNLKPFERDISTEIYQAGSTPCNGVEGFNCYFPLQSYGFQPTNGVGYQPYRVVVLSFELLHAPATVCGPKKSTNLVKNKCVNFNFNGLTGTGVLTESNKKFLPFQQFGRDIADTTDAVRDPQTLEILDITPCSFGGVSVITPGTNTSNQVAVLYQGVNCTEVPVAIHADQLTPTWRVYSTGSNVFQTRAGCLIGAEHVNNSYECDIPIGAGICASYQTQTNSPRRARSVASQSIIAYTMSLGAENSVAYSNNSIAIPTNFTISVTTEILPVSMTKTSVDCTMYICGDSTECSNLLLQYGSFCTQLNRALTGIAVEQDKNTQEVFAQVKQIYKTPPIKDFGGFNFSQILPDPSKPSKRSFIEDLLFNKVTLADAGFIKQYGDCLGDIAARDLICAQKFNGLTVLPPLLTDEMIAQYTSALLAGTITSGWTFGAGAALQIPFAMQMAYRFNGIGVTQNVLYENQKLIANQFNSAIGKIQDSLSSTATALGKLQDVVNQNAQALNTLVKCLSSNFGAISSVLNDILSRLDKVEAEVQIDRLITGRLQCLQTYVTQQLIRAAEIRASANLAATKMSECVLGQSKRVDFCGKGYHLMSFPQSAPHGVVFLHVTYVPAQEKNFTTAPAICHDGKAHFPREGVFVSNGTHWFVTQRNFYEPQIITTDNTFVSGNCDVVIGIVNNTVYDPLQPELDSFKEELDKYFKNHTSPDVDLGDISGINASVVNIQKEIDRLNEVAKNLNESLIDLQELGKYEQYIKGGGGSDIDPYKEFGSSYQLLNFLPLDFFPDLNALVDTATALYEEELTGREHCSPHHTAIRQALVCWDELTKLIAWMSSNITSEQVRTIIVNHVNDTWGLKVRQSLWFHLSCLTFGQHTVQEFLVSFGVWIRTPAPYRPPNAPILSTLPEHTVIC

SEQ ID NO: 7335 - protein, 1365 aa, Artificial Sequence
  SARS-CoV-2/Belgium/BC-03016/2020__EPI_ISL_415157 spike protein (1-1211)(Q965C_S1003C) WhcAg construct
MFVFLVLLPLVSSQCVNLTTRTQLPPAYTNSFTRGVYYPDKVFRSSVLHSTQDLFLPFFSNVTWFHAIHVSGTNGTKRFDNPVLPFNDGVYFASTEKSNIIRGWIFGTTLDSKTQSLLIVNNATNVVIKVCEFQFCNDPFLGVYYHKNNKSWMESEFRVYSSANNCTFEYVSQPFLMDLEGKQGNFKNLREFVFKNIDGYFKIYSKHTPINLVRDLPQGFSALEPLVDLPIGINITRFQTLLALHRSYLTPGDSSSGWTAGAAAYYVGYLQPRTFLLKYNENGTITDAVDCALDPLSETKCTLKSFTVEKGIYQTSNFRVQPTESIVRFPNITNLCPFGEVFNATRFASVYAWNRKRISNCVADYSVLYNSASFSTFKCYGVSPTKLNDLCFTNVYADSFVIRGDEVRQIAPGQTGKIADYNYKLPDDFTGCVIAWNSNNLDSKVGGNYNYLYRLFRKSNLKPFERDISTEIYQAGSTPCNGVEGFNCYFPLQSYGFQPTNGVGYQPYRVVVLSFELLHAPATVCGPKKSTNLVKNKCVNFNFNGLTGTGVLTESNKKFLPFQQFGRDIADTTDAVRDPQTLEILDITPCSFGGVSVITPGTNTSNQVAVLYQGVNCTEVPVAIHADQLTPTWRVYSTGSNVFQTRAGCLIGAEHVNNSYECDIPIGAGICASYQTQTNSPRRARSVASQSIIAYTMSLGAENSVAYSNNSIAIPTNFTISVTTEILPVSMTKTSVDCTMYICGDSTECSNLLLQYGSFCTQLNRALTGIAVEQDKNTQEVFAQVKQIYKTPPIKDFGGFNFSQILPDPSKPSKRSFIEDLLFNKVTLADAGFIKQYGDCLGDIAARDLICAQKFNGLTVLPPLLTDEMIAQYTSALLAGTITSGWTFGAGAALQIPFAMQMAYRFNGIGVTQNVLYENQKLIANQFNSAIGKIQDSLSSTAPALGKLQDVVNQNAQALNTLVKCLSSNFGAISSVLNDILSRLDKVEAEVQIDRLITGRLQCLQTYVTQQLIRAAEIRASANLAATKMSECVLGQSKRVDFCGKGYHLMSFPQSAPHGVVFLHVTYVPAQEKNFTTAPAICHDGKAHFPREGVFVSNGTHWFVTQRNFYEPQIITTDNTFVSGNCDVVIGIVNNTVYDPLQPELDSFKEELDKYFKNHTSPDVDLGDISGINASVVNIQKEIDRLNEVAKNLNESLIDLQELGKYEQYIKGGGGSDIDPYKEFGSSYQLLNFLPLDFFPDLNALVDTATALYEEELTGREHCSPHHTAIRQALVCWDELTKLIAWMSSNITSEQVRTIIVNHVNDTWGLKVRQSLWFHLSCLTFGQHTVQEFLVSFGVWIRTPAPYRPPNAPILSTLPEHTVIC

SEQ ID NO: 7336 - protein, 1365 aa, Artificial Sequence
  SARS-CoV-2/Germany/BavPat3/2020__EPI_ISL_414521 spike protein (1-1211)(Q965C_S1003C) WhcAg construct
MFVFLVLLPLVSSQCVNLTTRTQLPPAYTNSFTRGVYYPDKVFRSSVLHSTQDLFLPFFSNVTWFHAIHVSGTNGTKRFDNPVLPFNDGVYFASTEKSNIIRGWIFGTTLDSKTQSLLIVNNATNVVIKVCEFQFCNDPFLGVYYHKNNKSWMESEFRVYSSANNCTFEYVSQPFLMDLEGKQGNFKNLREFVFKNIDGYFKIYSKHTPINLVRDLPQGFSALEPLVDLPIGINITRFQTLLALHRSYLTPGDSSSGWTAGAAAYYVGYLQPRTFLLKYNENGTITDAVDCALDPLSETKCTLKSFTVEKGIYQTSNFRVQPTESIVRFPNITNLCPFGEVFNATRFASVYAWNRKRISNCVADYSVLYNSASFSTFKCYGVSPTKLNDLCFTNVYADSFVIRGDEVRQIAPGQTGKIADYNYKLPDDFTGCVIAWNSNNLDSKVGGNYNYLYRLFRKSNLKPFERDISTEIYQAGSTPCNGVEGFNCYFPLQSYGFQPTNGVGYQPYRVVVLSFELLHAPATVCGPKKSTNLVKNKCVNFNFNGLTGTGVLTESNKKFLPFQQFGRDIADTTDAVRDPQTLEILDITPCSFGGVSVITPGTNTSNQVAVLYQDVNCTEVPVAIHADQLTPTWRVYSTGSNVFQTRAGCLIGAEHVNNSYECDIPIGAGICASYQTQTNSPRRARSVASQSIIAYTMSLGAENSVAYSNNSIAIPTNFTISVTTEILPVSMTKTSVDCTMYICGDSTECSNLLLQYGSFCTQLNRALTGIAVEQDKNTQQVFAQVKQIYKTPPIKDFGGFNFSQILPDPSKPSKRSFIEDLLFNKVTLADAGFIKQYGDCLGDIAARDLICAQKFNGLTVLPPLLTDEMIAQYTSALLAGTITSGWTFGAGAALQIPFAMQMAYRFNGIGVTQNVLYENQKLIANQFNSAIGKIQDSLSSTASALGKLQDVVNQNAQALNTLVKCLSSNFGAISSVLNDILSRLDKVEAEVQIDRLITGRLQCLQTYVTQQLIRAAEIRASANLAATKMSECVLGQSKRVDFCGKGYHLMSFPQSAPHGVVFLHVTYVPAQEKNFTTAPAICHDGKAHFPREGVFVSNGTHWFVTQRNFYEPQIITTDNTFVSGNCDVVIGIVNNTVYDPLQPELDSFKEELDKYFKNHTSPDVDLGDISGINASVVNIQKEIDRLNEVAKNLNESLIDLQELGKYEQYIKGGGGSDIDPYKEFGSSYQLLNFLPLDFFPDLNALVDTATALYEEELTGREHCSPHHTAIRQALVCWDELTKLIAWMSSNITSEQVRTIIVNHVNDTWGLKVRQSLWFHLSCLTFGQHTVQEFLVSFGVWIRTPAPYRPPNAPILSTLPEHTVIC

SEQ ID NO: 7337 - protein, 1365 aa, Artificial Sequence
  SARS-CoV-2/France/HF1805/2020__EPI_ISL_414628 spike protein (1-1211)(Q965C_S1003C) WhcAg construct
MFVFLVLLPLVSSQCVNLTTRTQLPPAYTNSFTRGVYYPDKVFRSSVLHSTQDLFLPFFSNVTWFHAIHVSGTNGTKRFDNPVLPFNDGVYFASTEKSNIIRGWIFGTTLDSKTQSLLIVNNATNVVIKVCEFQFCNDPFLGVYYHKNNKSWMESEFRVYSSANNCTFEYVSQPFLMDLEGKQGNFKNLREFVFKNIDGYFKIYSKHTPINLVRDLPQGFSALEPLVDLPIGINITRFQTLLALHRSYLTPGDSSSGWTAGAAAYYVGYLQPRTFLLKYNENGTITDAVDCALDPLSETKCTLKSFTVEKGIYQTSNFRVQPTESIVRFPNITNLCPFGEVFNATRFASVYAWNRKRISNCVADYSVLYNSASFSTFKCYGVSPTKLNDLCFTNVYADSFVIRGDEVRQIAPGQTGKIADYNYKLPDDFTGCVIAWNSNNLDSKVGGNYNYLYRLFRKSNLKPFERDISTEIYQAGSTPCNGVEGFNCYFPLQSYGFQPTNGVGYQPYRVVVLSFELLHAPATVCGPKKSTNLVKNKCVNFNFNGLTGTGVLTESNKKFLPFQQFGRDIADTTDAVRDPQTLEILDITPCSFGGVSVITPGTNTSNQVAVLYQGVNCTEVPVAIHADQLTPTWRVYSTGSNVFQTRAGCLIGAEHVNNSYECDIPIGAGICASYQTQTNSPRRARSVASQSIIAYTMSLGAENSVAYSNNSIAIPTNFTISVTTEILPVSMTKTSVDCTMYICGDSTECSNLLLQYGSFCTQLNRALTGIAVEQDKNTQEVFAQVKQIYKTPPIKDFGGFNFSQILPDPSKPSKRSFIEDLLFNKVTLADAGFIKQYGDCLGDIAARDLICAQKFNGLTVLPPLLTDEMIAQYTSALLAGTITSGWTFGAGAALQIPFAMQMAYRFNGIGVTQNVLYENQKLIANQFNSAIGKIQDSLSSTASALGKLQDVVNQNAQALNTLVKCLSSNFGAISSVLNDILSRLDKVEAEVQIDRLITGRLQCLQTYVTQQLIRAAEIRASANLAATKMSECVLGQSKRVDFCGKGYHLMSFPQSAPHGVVFLHVTYVPAQEKNFTTAPAICHDGKAHFPREGVFVSNGTHWFVTQRNFYEPQIITTDNTFVSGNCDVVIGVVNNTVYDPLQPELDSFKEELDKYFKNHTSPDVDLGDISGINASVVNIQKEIDRLNEVAKNLNESLIDLQELGKYEQYIKGGGGSDIDPYKEFGSSYQLLNFLPLDFFPDLNALVDTATALYEEELTGREHCSPHHTAIRQALVCWDELTKLIAWMSSNITSEQVRTIIVNHVNDTWGLKVRQSLWFHLSCLTFGQHTVQEFLVSFGVWIRTPAPYRPPNAPILSTLPEHTVIC

SEQ ID NO: 7338 - protein, 1365 aa, Artificial Sequence
  SARS-CoV-2/Netherlands/ZuidHolland_9/2020__EPI_ISL_414445 spike protein (1-1211)(Q965C_S1003C) WhcAg construct
MFVFLVLLPLVSSQCVNLTTRTQLPPAYTNSFTRGVYYPDKVFRSSVLHSTQDLFLPFFSNVTWFHAIHVSGTNGTKRFDNPVLPFNDGVYFASTEKSNIIRGWIFGTTLDSKTQSLLIVNNATNVVIKVCEFQFCNDPFLGVYYHKNNKSWMESEFRVYSSANNCTFEYVSQPFLMDLEGKQGNFKNLREFVFKNIDGYFKIYSKHTPINLVRDLPQGFSALEPLVDLPIGINITRFQTLLALHRSYLTPGDSSSGWTAGAAAYYVGYLQPRTFLLKYNENGTITDAVDCALDPLSETKCTLKSFTVEKGIYQTSNFRVQPTESIVRFPNITNLCPFGEVFNATRFASVYAWNRKRISNCVADYSVLYNSASFSTFKCYGVSPTKLNDLCFTNVYADSFVIRGDEVRQIAPGQTGKIADYNYKLPDDFTGCVIAWNSNNLDSKVGGNYNYLYRLFRKSNLKPFERDISTEIYQAGSTPCNGVEGFNCYFPLQSYGFQPTNGVGYQPYRVVVLSFELLHAPATVCGPKKSTNLVKNKCVNFNFNGLTGTGVLTESNKKFLPFQQFGRDIADTTDAVRDPQTLEILDITPCSFGGVSVITPGTNTSNQVAVLYQGVNCTEVPVAIHADQLTPTWRVYSTGSNVFQTRAGCLIGAEHVNNSYECDIPIGAGICASYQTQTNSPRRARSVASQSIIAYTMSLGAENSVAYSNNSIAIPTNFTISVTTEILPVSMTKTSVDCTMYICGDSTECSNLLLQYGSFCTQLNRALTGIAVEQDKNTQEVFAQVKQIYKTPPIKDFGGFNFSQILPDPSKPSKRSFIEDLLFNKVTLADAGFIKQYGDCLGDIAARDLICVQKFNGLTVLPPLLTDEMIAQYTSALLAGTITSGWTFGAGAALQIPFAMQMAYRFNGIGVTQNVLYENQKLIANQFNSAIGKIQDSLSSTASALGKLQDVVNQNAQALNTLVKCLSSNFGAISSVLNDILSRLDKVEAEVQIDRLITGRLQCLQTYVTQQLIRAAEIRASANLAATKMSECVLGQSKRVDFCGKGYHLMSFPQSAPHGVVFLHVTYVPAQEKNFTTAPAICHDGKAHFPREGVFVSNGTHWFVTQRNFYEPQIITTDNTFVSGNCDVVIGIVNNTVYDPLQPELDSFKEELDKYFKNHTSPDVDLGDISGINASVVNIQKEIDRLNEVAKNLNESLIDLQELGKYEQYIKGGGGSDIDPYKEFGSSYQLLNFLPLDFFPDLNALVDTATALYEEELTGREHCSPHHTAIRQALVCWDELTKLIAWMSSNITSEQVRTIIVNHVNDTWGLKVRQSLWFHLSCLTFGQHTVQEFLVSFGVWIRTPAPYRPPNAPILSTLPEHTVIC

SEQ ID NO: 7339 - protein, 1365 aa, Artificial Sequence
  SARS-CoV-2/Finland/FIN03032020A/2020__EPI_ISL_413602 spike protein (1-1211)(Q965C_S1003C) WhcAg construct
MFVFLVLLPLVSSQCVNLTTRTQLPPAYTNSFTRGVYYPDKVFRSSVLHSTQDLFLPFFSNVTWFHAIHVSGTNGTKRFDNPVLPFNDGVYFASTEKSNIIRGWIFGTTLDSKTQSLLIVNNATNVVIKVCEFQFCNDPFLGVYYHKNNKSWMESEFRVYSSANNCTFEYVSQPFLMDLEGKQGNFKNLREFVFKNIDGYFKIYSKHTPINLVRDLPQGFSALEPLVDLPIGINITRFQTLLALHRSYLTPGDSSSGWTAGAAAYYVGYLQPRTFLLKYNENGTITDAVDCALDPLSETKCTLKSFTVEKGIYQTSNFRVQPTESIVRFPNITNLCPFGEVFNATRFASVYAWNRKRISNCVADYSVLYNSASFSTFKCYGVSPTKLNDLCFTNVYADSFVIRGDEVRQIAPGQTGKIADYNYKLPDDFTGCVISWNSNNLDSKVGGNYNYLYRLFRKSNLKPFERDISTEIYQAGSTPCNGVEGFNCYFPLQSYGFQPTNGVGYQPYRVVVLSFELLHAPATVCGPKKSTNLVKNKCVNFNFNGLTGTGVLTESNKKFLPFQQFGRDIADTTDAVRDPQTLEILDITPCSFGGVSVITPGTNTSNQVAVLYQGVNCTEVPVAIHADQLTPTWRVYSTGSNVFQTRAGCLIGAEHVNNSYECDIPIGAGICASYQTQTNSPRRARSVASQSIIAYTMSLGAENSVAYSNNSIAIPTNFTISVTTEILPVSMTKTSVDCTMYICGDSTECSNLLLQYGSFCTQLNRALTGIAVEQDKNTQEVFAQVKQIYKTPPIKDFGGFNFSQILPDPSKPSKRSFIEDLLFNKVTLADAGFIKQYGDCLGDIAARDLICAQKFNGLTVLPPLLTDEMIAQYTSALLAGTITSGWTFGAGAALQIPFAMQMAYRFNGIGVTQNVLYENQKLIANQFNSAIGKIQDSLSSTASALGKLQDVVNQNAQALNTLVKCLSSNFGAISSVLNDILSRLDKVEAEVQIDRLITGRLQCLQTYVTQQLIRAAEIRASANLAATKMSECVLGQSKRVDFCGKGYHLMSFPQSAPHGVVFLHVTYVPAQEKNFTTAPAICHDGKAHFPREGVFVSNGTHWFVTQRNFYEPQIITTDNTFVSGNCDVVIGIVNNTVYDPLQPELDSFKEELDKYFKNHTSPDVDLGDISGINASVVNIQKEIDRLNEVAKNLNESLIDLQELGKYEQYIKGGGGSDIDPYKEFGSSYQLLNFLPLDFFPDLNALVDTATALYEEELTGREHCSPHHTAIRQALVCWDELTKLIAWMSSNITSEQVRTIIVNHVNDTWGLKVRQSLWFHLSCLTFGQHTVQEFLVSFGVWIRTPAPYRPPNAPILSTLPEHTVIC

SEQ ID NO: 7340 - protein, 1365 aa, Artificial Sequence
  SARS-CoV-2/France/GE1977/2020__EPI_ISL_414632 spike protein (1-1211)(Q965C_S1003C) WhcAg construct
MFVFLVLLPLVSSQCVNLTTRTQLPPAYTNSFTRGVYYPDKVFRSSVLHSTQDLFLPFFSNVTWFHAIHVSGTNGTKRFDNPVLPFNDGVYFASTEKSNIIRGWIFGTTLDSKTQSLLIVNNATNVVIKVCEFQFCNDPFLGVYYHKNNKSWMESEFRVYSSANNCTFEYVSQPFLMDLEGKQGNFKNLREFVFKNIDGYFKIYSKHTPINLVRDLPQGFSALEPLVDLPIGINITRFQTLLALHRSYLTPGDSSSGWTAGAAAYYVGYLQPRTFLLKYNENGTITDAVDCALDPLSETKCTLKSFTVEKGIYQTSNFRVQPTESIVRFPNITNLCPFGEVFNATRFASVYAWNRKRISNCVADYSVLYNSASFSTFKCYGVSPTKLNDLCFTNVYADSFVIRGDEVRQIAPGQTGKIADYNYKLPDDFTGCVIAWNSNNLDSKVGGNYNYLYRLFRKSNLKPFERDISTEIYQAGSTPCNGVEGFNCYFPLQSYGFQPTNGVGYQPYRVVVLSFELLHAPATVCGPKKSTNLVKNKCVNFNFNGLTGTGVLTESNKKFLPFQQFGRDIADTTDAVRDPQTLEILDITPCSFGGVSVITPGTNTSNQVAVLYQGVNCTEVPVAIHADQLTPTWRVYSTGSNVFQTRAGCLIGAEHVNNSYECDIPIGAGICASYQTQTNSPRRARSVASQSIIAYTMSLGAENSVAYSNNSIAIPTNFTISVTTEILPVSMTKTSVDCTMYICGDSTECSNLLLQYGSFCTQLNRALTGIAVEQDKNTQEVFAQVKQIYKTPPIKDFGGFNFSQILPDPSKPSKRSFIEDLLFNKVTLADAGFIKQYGDCLGDIAARDLICAQKFNGLTVLPPLLTDEMIAQYTSALLAGTITSGWTFGAGAALQIPFAMQMAYRFNGIGVTQNVLYENQKLIANQFNSAIGKIQDSLFSTASALGKLQDVVNQNAQALNTLVKCLSSNFGAISSVLNDILSRLDKVEAEVQIDRLITGRLQCLQTYVTQQLIRAAEIRASANLAATKMSECVLGQSKRVDFCGKGYHLMSFPQSAPHGVVFLHVTYVPAQEKNFTTAPAICHDGKAHFPREGVFVSNGTHWFVTQRNFYEPQIITTDNTFVSGNCDVVIGIVNNTVYDPLQPELDSFKEELDKYFKNHTSPDVDLGDISGINASVVNIQKEIDRLNEVAKNLNESLIDLQELGKYEQYIKGGGGSDIDPYKEFGSSYQLLNFLPLDFFPDLNALVDTATALYEEELTGREHCSPHHTAIRQALVCWDELTKLIAWMSSNITSEQVRTIIVNHVNDTWGLKVRQSLWFHLSCLTFGQHTVQEFLVSFGVWIRTPAPYRPPNAPILSTLPEHTVIC

SEQ ID NO: 7341 - protein, 1365 aa, Artificial Sequence
  SARS-CoV-2/Finland/FIN-313/2020__EPI_ISL_414641 spike protein (1-1211)(Q965C_S1003C) WhcAg construct
MFVFLVLLPLVSSQCVNLTTRTQLPPAYTNSFTRGVYYPDKVFRSSVLHSTQDLFLPFFSNVTWFHAIHVSGTNGTKRFDNPVLPFNDGVYFASTEKSNIIRGWIFGTTLDSKTQSLLIVNNATNVVIKVCEFQFCNDPFLGVYYHKNNKSWMESEFRVYSSANNCTFEYVSQPFLMDLEGKQGNFKNLREFVFKNIDGYFKIYSKHTPINLVRDLPQGFSALEPLVDLPIGINITRFKTLLALHRSYLTPGDSSSGWTAGAAAYYVGYLQPRTFLLKYNENGTITDAVDCALDPLSETKCTLKSFTVEKGIYQTSNFRVQPTESIVRFPNITNLCPFGEVFNATRFASVYAWNRKRISNCVADYSVLYNSASFSTFKCYGVSPTKLNDLCFTNVYADSFVIRGDEVRQIAPGQTGKIADYNYKLPDDFTGCVIAWNSNNLDSKVGGNYNYLYRLFRKSNLKPFERDISTEIYQAGSTPCNGVEGFNCYFPLQSYGFQPTNGVGYQPYRVVVLSFELLHAPATVCGPKKSTNLVKNKCVNFNFNGLTGTGVLTESNKKFLPFQQFGRDIADTTDAVRDPQTLEILDITPCSFGGVSVITPGTNTSNQVAVLYQGVNCTEVPVAIHADQLTPTWRVYSTGSNVFQTRAGCLIGAEHVNNSYECDIPIGAGICASYQTQTNSPRRARSVASQSIIAYTMSLGAENSVAYSNNSIAIPTNFTISVTTEILPVSMTKTSVDCTMYICGDSTECSNLLLQYGSFCTQLNRALTGIAVEQDKNTQEVFAQVKQIYKTPPIKDFGGFNFSQILPDPSKPSKRSFIEDLLFNKVTLADAGFIKQYGDCLGDIAARDLICAQKFNGLTVLPPLLTDEMIAQYTSALLAGTITSGWTFGAGAALQIPFAMQMAYRFNGIGVTQNVLYENQKLIANQFNSAIGKIQDSLSSTASALGKLQDVVNQNAQALNTLVKCLSSNFGAISSVLNDILSRLDKVEAEVQIDRLITGRLQCLQTYVTQQLIRAAEIRASANLAATKMSECVLGQSKRVDFCGKGYHLMSFPQSAPHGVVFLHVTYVPAQEKNFTTAPAICHDGKAHFPREGVFVSNGTHWFVTQRNFYEPQIITTDNTFVSGNCDVVIGIVNNTVYDPLQPELDSFKEELDKYFKNHTSPDVDLGDISGINASVVNIQKEIDRLNEVAKNLNESLIDLQELGKYEQYIKGGGGSDIDPYKEFGSSYQLLNFLPLDFFPDLNALVDTATALYEEELTGREHCSPHHTAIRQALVCWDELTKLIAWMSSNITSEQVRTIIVNHVNDTWGLKVRQSLWFHLSCLTFGQHTVQEFLVSFGVWIRTPAPYRPPNAPILSTLPEHTVIC

SEQ ID NO: 7342 - protein, 1365 aa, Artificial Sequence
  SARS-CoV-2/Netherlands/ZuidHolland_2/2020__EPI_ISL_414556 spike protein (1-1211)(Q965C_S1003C) WhcAg construct
MFVFLVLLPLVSSQCVNLTTRTQLPPAYTNSFTRGVYYPDKVFRSSVLHSTQDLFLPFFSNVTWFHAIHVSGTNGTKRFDNPVLPFNDGVYFASTEKSNIIRGWIFGTTLDSKTQSLLIVNNATNVVIKVCEFQFCNDPFLGVYYHKNNKSWMESEFRVYSSANNCTFEYVSQPFLMDLEGKQGNFKNLREFVFKNIDGYFKIYSKHTPINLVRDLPQGFSALEPLVDLPIGINITRFQTLLALHRSYLTPGDSSSGWTAGAAAYYVGYLQPRTFLLKYNENGTITDAVDCALDPLSETKCTLKSFTVEKGIYQTSNFRVQPTESIVRFPNITNLCPFGEVFNATRFASVYAWNRKRISNCVADYSVLYNSASFSTFKCYGVSPTKLNDLCFTNVYADSFVIRGDEVRQIAPGQTGKIADYNYKLPDDFTGCVIAWNSNNLDSKVGGNYNYLYRLFRKSNLKPFERDISTEIYQAGSTPCNGVEGFNCYFPLQSYGFQPTNGVGYQPYRVVVLSFELLHAPATVCGPKKSTNLVKNKCVNFNFNGLTGTGVLTESNKKFLPFQQFGRDIADTTDAVRDPQTLEILDITPCSFGGVSVITPGTNTSNQVAVLYQGVNCTEVPVAIHADQLTPTWRVYSTGSNVFQTRAGCLIGAEHVNNSYECDIPIGAGICASYQTQTNSPRRARSVASQSIIAYTMSLGAENSVAYSNNSIAIPTNFTISVTTEILPVSMTKTSVDCTMYICGDSTECSNLLLQYGSFCTQLNRALTGIALEQDKNTQEVFAQVKQIYKTPPIKDFGGFNFSQILPDPSKPSKRSFIEDLLFNKVTLADAGFIKQYGDCLGDIAARDLICAQKFNGLTVLPPLLTDEMIAQYTSALLAGTITSGWTFGAGAALQIPFAMQMAYRFNGIGVTQNVLYENQKLIANQFNSAIGKIQDSLSSTASALGKLQDVVNQNAQALNTLVKCLSSNFGAISSVLNDILSRLDKVEAEVQIDRLITGRLQCLQTYVTQQLIRAAEIRASANLAATKMSECVLGQSKRVDFCGKGYHLMSFPQSAPHGVVFLHVTYVPAQEKNFTTAPAICHDGKAHFPREGVFVSNGTHWFVTQRNFYEPQIITTDNTFVSGNCDVVIGIVNNTVYDPLQPELDSFKEELDKYFKNHTSPDVDLGDISGINASVVNIQKEIDRLNEVAKNLNESLIDLQELGKYEQYIKGGGGSDIDPYKEFGSSYQLLNFLPLDFFPDLNALVDTATALYEEELTGREHCSPHHTAIRQALVCWDELTKLIAWMSSNITSEQVRTIIVNHVNDTWGLKVRQSLWFHLSCLTFGQHTVQEFLVSFGVWIRTPAPYRPPNAPILSTLPEHTVIC

SEQ ID NO: 7343 - protein, 1365 aa, Artificial Sequence
  SARS-CoV-2/USA/WA-UW31/2020__EPI_ISL_414618 spike protein (1-1211)(Q965C_S1003C) WhcAg construct
MFVFLVLLPLVSSQCVNLTTRTQLPPAYTNSFTRGVYYPDKVFRSSVLHSTQDLFLPFFSNVTWFHAIHVSGTNGTKRFDNPVLPFNDGVYFASTEKSNIIRGWIFGTTLDSKTQSLLIVNNATNVVIKVCEFQFCNDPFLGVYYHKNNKSWMESEFRVYSSANNCTFEYVSQPFLMDLEGKQGNFKNLREFVFKNIDGYFKIYSKHTPINLVRDLPQGFSALEPLVDLPIGINITRFQTLLALHRSYLTPGDSSSGWTAGAAAYYVGYLQPRTFLLKYNENGTITDAVDCALDPLSETKCTLKSFTVEKGIYQTSNFRVQPTESIVRFPNITNLCPFGEVFNATRFASVYAWNRKRISNCVADYSVLYNSASFSTFKCYGVSPTKLNDLCFTNVYADSFVIRGDEVRQIAPGQTGKIADYNYKLPDDFTGCVIAWNSNNLDSKVGGNYNYLYRLFRKSNLKPFERDISTEIYQAGSTPCNGAEGFNCYFPLQSYGFQPTNGVGYQPYRVVVLSFELLHAPATVCGPKKSTNLVKNKCVNFNFNGLTGTGVLTESNKKFLPFQQFGRDIADTTDAVRDPQTLEILDITPCSFGGVSVITPGTNTSNQVAVLYQDVNCTEVPVAIHADQLTPTWRVYSTGSNVFQTRAGCLIGAEHVNNSYECDIPIGAGICASYQTQTNSPRRARSVASQSIIAYTMSLGAENSVAYSNNSIAIPTNFTISVTTEILPVSMTKTSVDCTMYICGDSTECSNLLLQYGSFCTQLNRALTGIAVEQDKNTQEVFAQVKQIYKTPPIKDFGGFNFSQILPDPSKPSKRSFIEDLLFNKVTLADAGFIKQYGDCLGDIAARDLICAQKFNGLTVLPPLLTDEMIAQYTSALLAGTITSGWTFGAGAALQIPFAMQMAYRFNGIGVTQNVLYENQKLIANQFNSAIGKIQDSLSSTASALGKLQDVVNQNAQALNTLVKCLSSNFGAISSVLNDILSRLDKVEAEVQIDRLITGRLQCLQTYVTQQLIRAAEIRASANLAATKMSECVLGQSKRVDFCGKGYHLMSFPQSAPHGVVFLHVTYVPAQEKNFTTAPAICHDGKAHFPREGVFVSNGTHWFVTQRNFYEPQIITTDNTFVSGNCDVVIGIVNNTVYDPLQPELDSFKEELDKYFKNHTSPDVDLGDISGINASVVNIQKEIDRLNEVAKNLNESLIDLQELGKYEQYIKGGGGSDIDPYKEFGSSYQLLNFLPLDFFPDLNALVDTATALYEEELTGREHCSPHHTAIRQALVCWDELTKLIAWMSSNITSEQVRTIIVNHVNDTWGLKVRQSLWFHLSCLTFGQHTVQEFLVSFGVWIRTPAPYRPPNAPILSTLPEHTVIC

SEQ ID NO: 7344 - protein, 1365 aa, Artificial Sequence
  SARS-CoV-2/South Korea/SNU01/2020__EPI_ISL_411929 spike protein (1-1211)(Q965C_S1003C) WhcAg construct
MFVFLVLLPLVSSQCVNLTTRTQLPPAYTNSFTRGVYYPDKVFRSSVLHSTQDLFLPFFSNVTWFHAIHVSGTNGTKRFDNPVLPFNDGVYFASTEKSNIIRGWIFGTTLDSKTQSLLIVNNATNVVIKVCEFQFCNDPFLGVYYHKNNKSWMESEFRVYSSANNCTFEYVSQPFLMDLEGKQGNFKNLREFVFKNIDGYFKIYSKHTPINLVRDLPQGFWALEPLVDLPIGINITRFQTLLALHRSYLTPGDSSSGWTAGAAAYYVGYLQPRTFLLKYNENGTITDAVDCALDPLSETKCTLKSFTVEKGIYQTSNFRVQPTESIVRFPNITNLCPFGEVFNATRFASVYAWNRKRISNCVADYSVLYNSASFSTFKCYGVSPTKLNDLCFTNVYADSFVIRGDEVRQIAPGQTGKIADYNYKLPDDFTGCVIAWNSNNLDSKVGGNYNYLYRLFRKSNLKPFERDISTEIYQAGSTPCNGVEGFNCYFPLQSYGFQPTNGVGYQPYRVVVLSFELLHAPATVCGPKKSTNLVKNKCVNFNFNGLTGTGVLTESNKKFLPFQQFGRDIADTTDAVRDPQTLEILDITPCSFGGVSVITPGTNTSNQVAVLYQDVNCTEVPVAIHADQLTPTWRVYSTGSNVFQTRAGCLIGAEHVNNSYECDIPIGAGICASYQTQTNSPRRARSVASQSIIAYTMSLGAENSVAYSNNSIAIPTNFTISVTTEILPVSMTKTSVDCTMYICGDSTECSNLLLQYGSFCTQLNRALTGIAVEQDKNTQEVFAQVKQIYKTPPIKDFGGFNFSQILPDPSKPSKRSFIEDLLFNKVTLADAGFIKQYGDCLGDIAARDLICAQKFNGLTVLPPLLTDEMIAQYTSALLAGTITSGWTFGAGAALQIPFAMQMAYRFNGIGVTQNVLYENQKLIANQFNSAIGKIQDSLSSTASALGKLQDVVNQNAQALNTLVKCLSSNFGAISSVLNDILSRLDKVEAEVQIDRLITGRLQCLQTYVTQQLIRAAEIRASANLAATKMSECVLGQSKRVDFCGKGYHLMSFPQSAPHGVVFLHVTYVPAQEKNFTTAPAICHDGKAHFPREGVFVSNGTHWFVTQRNFYEPQIITTDNTFVSGNCDVVIGIVNNTVYDPLQPELDSFKEELDKYFKNHTSPDVDLGDISGINASVVNIQKEIDRLNEVAKNLNESLIDLQELGKYEQYIKGGGGSDIDPYKEFGSSYQLLNFLPLDFFPDLNALVDTATALYEEELTGREHCSPHHTAIRQALVCWDELTKLIAWMSSNITSEQVRTIIVNHVNDTWGLKVRQSLWFHLSCLTFGQHTVQEFLVSFGVWIRTPAPYRPPNAPILSTLPEHTVIC

SEQ ID NO: 7345 - protein, 1365 aa, Artificial Sequence
  SARS-CoV-2/China/WF0004/2020__EPI_ISL_413694 spike protein (1-1211)(Q965C_S1003C) WhcAg construct
MFVFLVLLPLVSSQCVNLTTRTQLPPAYTNSFTRGVYYPDKVFRSSVLHSTQDLFLPFFSNVTWFHAIHVSGTNGTKRFDNPVLPFNDGVYFASTEKSNIIRGWIFGTTLDSKTQSLLIVNNATNVVIKVCEFQFCNDPFLGVYYHKNNKSWTESEFRVYSSANNCTFEYVSQPFLMDLEGKQGNFKNLREFVFKNIDGYFKIYSKHTPINLVRDLPQGFSALEPLVDLPIGINITRFQTLLALHRSYLTPGDSSSGWTAGAAAYYVGYLQPRTFLLKYNENGTITDAVDCALDPLSETKCTLKSFTVEKGIYQTSNFRVQPTESIVRFPNITNLCPFGEVFNATRFASVYAWNRKRISNCVADYSVLYNSASFSTFKCYGVSPTKLNDLCFTNVYADSFVIRGDEVRQIAPGQTGKIADYNYKLPDDFTGCVIAWNSNNLDSKVGGNYNYLYRLFRKSNLKPFERDISTEIYQAGSTPCNGVEGFNCYFPLQSYGFQPTNGVGYQPYRVVVLSFELLHAPATVCGPKKSTNLVKNKCVNFNFNGLTGTGVLTESNKKFLPFQQFGRDIADTTDAVRDPQTLEILDITPCSFGGVSVITPGTNTSNQVAVLYQDVNCTEVPVAIHADQLTPTWRVYSTGSNVFQTRAGCLIGAEHVNNSYECDIPIGAGICASYQTQTNSPRRARSVASQSIIAYTMSLGAENSVAYSNNSIAIPTNFTISVTTEILPVSMTKTSVDCTMYICGDSTECSNLLLQYGSFCTQLNRALTGIAVEQDKNTQEVFAQVKQIYKTPPIKDFGGFNFSQILPDPSKPSKRSFIEDLLFNKVTLADAGFIKQYGDCLGDIAARDLICAQKFNGLTVLPPLLTDEMIAQYTSALLAGTITSGWTFGAGAALQIPFAMQMAYRFNGIGVTQNVLYENQKLIANQFNSAIGKIQDSLSSTASALGKLQDVVNQNAQALNTLVKCLSSNFGAISSVLNDILSRLDKVEAEVQIDRLITGRLQCLQTYVTQQLIRAAEIRASANLAATKMSECVLGQSKRFDFCGKGYHLMSFPQSAPHGVVFLHVTYVPAQEKNFTTAPAICHDGKAHFPREGVFVSNGTHWFVTQRNFYEPQIITTDNTFVSGNCDVVIGIVNNTVYDPLQPELDSFKEELDKYFKNHTSPDVDLGDISGINASVVNIQKEIDRLNEVAKNLNESLIDLQELGKYEQYIKGGGGSDIDPYKEFGSSYQLLNFLPLDFFPDLNALVDTATALYEEELTGREHCSPHHTAIRQALVCWDELTKLIAWMSSNITSEQVRTIIVNHVNDTWGLKVRQSLWFHLSCLTFGQHTVQEFLVSFGVWIRTPAPYRPPNAPILSTLPEHTVIC

SEQ ID NO: 7346 - protein, 1365 aa, Artificial Sequence
  SARS-CoV-2/China/WF0028/2020__EPI_ISL_413791 spike protein (1-1211)(Q965C_S1003C) WhcAg construct
MFVFLVLLPLVSSQCVNLTTRTQLPPAYTNSFTRGVYYPDKVFRSSVLHSTQDLFLPFFSNVTWFHAIHVSGTNGTKRFDNPVLPFNDGVYFASTEKSNIIRGWIFGTTLDSKTQSLLIVNNATNVVIKVCEFQFCNDPFLGVYYHKNNKSWMESEFRVYSSANNCTFEYVSQPFLMDLEGKQGNFKNLREFVFKNIDGYFKIYSKHTPINLVRDLPQGFSALEPLVDLPIGINITRFQTLLALHRSYLTPGDSSSGWTAGAAAYYVGYLQPRTFLLKYNENGTITDAVDCALDPLSETKCTLKSFTVEKGIYQTSNFRVQPTESIVRFPNITNLCPFGEVFNATRFASVYAWNRKRISNCVADYSVLYNSASFSTFKCYGVSPTKLNDLCFTNVYADSFVIRGDEVRQIAPGQTGKIADYNYKLPDDFTGCVIAWNSNNLDSKVGGNYNYLYRLFRKSNLKPFERDISTEIYQAGSTPCNGVEGFNCYFPLQSYGFQPTNGVGYQPYRVVVLSFELLHAPATVCGPKKSTNLVKNKCVNFNFNGLTGTGVLTESNKKFLPFQQFGRDIADTTDAVRDPQTLEILDITPCSFGGVSVITPGTNTSNQVAVLYQDVNCTEVPVAIHADQLTPTWRVYSTGSNVFQTRAGCLIGAEHVNNSYECDIPIGAGICASYQTQTNSPRRARSVASQSIIAYTMSLGAENSVAYSNNSIAIPTNFTISVTTEILPVSMTKTSVDCTMYICGDSTECSNLLLQYGSFCTQLNRALTGIAVEQDKNTQEVFAQVKQIYKTPPIKDFGGFNFSQILPDPSKPSKRSFIEDLLFNKVTLADAGFIKQYGDCLGDIAARDLICAQKFNGLTVLPPLLTDEMIAQYTSALLAGTITSGWTFGAGAALQIPFAMQMAYRFNGIGVTQNVLYENQKLIANQFNSAIGKIQDSLSSTASALGKLQDVVNQNAQALNTLVKCLSSNFGAISSVLNDILSRLDKVEAEVQIDRLITGRLQCLQTYVTQQLIRAAEIRASANLAATKMSECVLGQSKRVDFCGKGYHLMSFPQSAPHGVVFLHVTYVPAQEKNFTTAPAICHDGKAHFPREGVFVSNGTHWFVTQRNFYEPQIITTDNTFVSGNCDVVIGIVNNTVYDPLQPELESFKEELDKYFKNHTSPDVDLGDISGINASVVNIQKEIDRLNEVAKNLNESLIDLQELGKYEQYIKGGGGSDIDPYKEFGSSYQLLNFLPLDFFPDLNALVDTATALYEEELTGREHCSPHHTAIRQALVCWDELTKLIAWMSSNITSEQVRTIIVNHVNDTWGLKVRQSLWFHLSCLTFGQHTVQEFLVSFGVWIRTPAPYRPPNAPILSTLPEHTVIC

SEQ ID NO: 7347 - protein, 1365 aa, Artificial Sequence
  SARS-CoV-2/2019-nCoV/USA-CruiseA-18/2020__MT159716.1 spike protein (1-1211)(Q965C_S1003C) WhcAg construct
MFVFLVLLPLVSSQCVNLTTRTQLPPAYTNSFTRGVYYPDKVFRSSVLHSTQDLFLPFFSNVTWFHAIHVSGTNGTKRFDNPVLPFNDGVYFASTEKSNIIRGWIFGTTLDSKTQSLLIVNNATNVVIKVCEFQFCNDPFLGVYYHKNNKSWMESELRVYSSANNCTFEYVSQPFLMDLEGKQGNFKNLREFVFKNIDGYFKIYSKHTPINLVRDLPQGFSALEPLVDLPIGINITRFQTLLALHRSYLTPGDSSSGWTAGAAAYYVGYLQPRTFLLKYNENGTITDAVDCALDPLSETKCTLKSFTVEKGIYQTSNFRVQPTESIVRFPNITNLCPFGEVFNATRFASVYAWNRKRISNCVADYSVLYNSASFSTFKCYGVSPTKLNDLCFTNVYADSFVIRGDEVRQIAPGQTGKIADYNYKLPDDFTGCVIAWNSNNLDSKVGGNYNYLYRLFRKSNLKPFERDISTEIYQAGSTPCNGVEGFNCYFPLQSYGFQPTNGVGYQPYRVVVLSFELLHAPATVCGPKKSTNLVKNKCVNFNFNGLTGTGVLTESNKKFLPFQQFGRDIADTTDAVRDPQTLEILDITPCSFGGVSVITPGTNTSNQVAVLYQDVNCTEVPVAIHADQLTPTWRVYSTGSNVFQTRAGCLIGAEHVNNSYECDIPIGAGICASYQTQTNSPRRARSVASQSIIAYTMSLGAENSVAYSNNSIAIPTNFTISVTTEILPVSMTKTSVDCTMYICGDSTECSNLLLQYGSFCTQLNRALTGIAVEQDKNTQEVFAQVKQIYKTPPIKDFGGFNFSQILPDPSKPSKRSFIEDLLFNKVTLADAGFIKQYGDCLGDIAARDLICAQKFNGLTVLPPLLTDEMIAQYTSALLAGTITSGWTFGAGAALQIPFAMQMAYRFNGIGVTQNVLYENQKLIANQFNSAIGKIQDSLSSTASALGKLQDVVNQNAQALNTLVKCLSSNFGAISSVLNDILSRLDKVEAEVQIDRLITGRLQCLQTYVTQQLIRAAEIRASANLAATKMSECVLGQSKRVDFCGKGYHLMSFPQSAPHGVVFLHVTYVPAQEKNFTTAPAICHDGKAHFPREGVFVSNGTHWFVTQRNFYEPQIITTDNTFVSGNCDVVIGIVNNTVYDPLQPELDSFKEELDKYFKNHTSPDVDLGDISGINASVVNIQKEIDRLNEVAKNLNESLIDLQELGKYEQYIKGGGGSDIDPYKEFGSSYQLLNFLPLDFFPDLNALVDTATALYEEELTGREHCSPHHTAIRQALVCWDELTKLIAWMSSNITSEQVRTIIVNHVNDTWGLKVRQSLWFHLSCLTFGQHTVQEFLVSFGVWIRTPAPYRPPNAPILSTLPEHTVIC

SEQ ID NO: 7348 - protein, 1365 aa, Artificial Sequence
  SARS-CoV-2/SARS-CoV-2/Yunnan-01/human/2020/CHN__MT049951.1 spike protein (1-1211)(Q965C_S1003C) WhcAg construct
MFVFLVLLPLVSSQCVNLTTRTQLPPANTNSFTRGVYYPDKVFRSSVLHSTQDLFLPFFSNVTWFHAIHVSGTNGTKRFDNPVLPFNDGVYFASTEKSNIIRGWIFGTTLDSKTQSLLIVNNATNVVIKVCEFQFCNDPFLGVYYHKNNKSWMESEFRVYSSANNCTFEYVSQPFLMDLEGKQGNFKNLREFVFKNIDGYFKIYSKHTPINLVRDLPQGFSALEPLVDLPIGINITRFQTLLALHRSYLTPGDSSSGWTAGAAAYYVGYLQPRTFLLKYNENGTITDAVDCALDPLSETKCTLKSFTVEKGIYQTSNFRVQPTESIVRFPNITNLCPFGEVFNATRFASVYAWNRKRISNCVADYSVLYNSASFSTFKCYGVSPTKLNDLCFTNVYADSFVIRGDEVRQIAPGQTGKIADYNYKLPDDFTGCVIAWNSNNLDSKVGGNYNYLYRLFRKSNLKPFERDISTEIYQAGSTPCNGVEGFNCYFPLQSYGFQPTNGVGYQPYRVVVLSFELLHAPATVCGPKKSTNLVKNKCVNFNFNGLTGTGVLTESNKKFLPFQQFGRDIADTTDAVRDPQTLEILDITPCSFGGVSVITPGTNTSNQVAVLYQDVNCTEVPVAIHADQLTPTWRVYSTGSNVFQTRAGCLIGAEHVNNSYECDIPIGAGICASYQTQTNSPRRARSVASQSIIAYTMSLGAENSVAYSNNSIAIPTNFTISVTTEILPVSMTKTSVDCTMYICGDSTECSNLLLQYGSFCTQLNRALTGIAVEQDKNTQEVFAQVKQIYKTPPIKDFGGFNFSQILPDPSKPSKRSFIEDLLFNKVTLADAGFIKQYGDCLGDIAARDLICAQKFNGLTVLPPLLTDEMIAQYTSALLAGTITSGWTFGAGAALQIPFAMQMAYRFNGIGVTQNVLYENQKLIANQFNSAIGKIQDSLSSTASALGKLQDVVNQNAQALNTLVKCLSSNFGAISSVLNDILSRLDKVEAEVQIDRLITGRLQCLQTYVTQQLIRAAEIRASANLAATKMSECVLGQSKRVDFCGKGYHLMSFPQSAPHGVVFLHVTYVPAQEKNFTTAPAICHDGKAHFPREGVFVSNGTHWFVTQRNFYEPQIITTDNTFVSGNCDVVIGIVNNTVYDPLQPELDSFKEELDKYFKNHTSPDVDLGDISGINASVVNIQKEIDRLNEVAKNLNESLIDLQELGKYEQYIKGGGGSDIDPYKEFGSSYQLLNFLPLDFFPDLNALVDTATALYEEELTGREHCSPHHTAIRQALVCWDELTKLIAWMSSNITSEQVRTIIVNHVNDTWGLKVRQSLWFHLSCLTFGQHTVQEFLVSFGVWIRTPAPYRPPNAPILSTLPEHTVIC

SEQ ID NO: 7349 - protein, 1365 aa, Artificial Sequence
  SARS-CoV-2/USA/WA-UW292/2020__EPI_ISL_418077 spike protein (1-1211)(Q965C_S1003C) WhcAg construct
MFVFLVLLPLVSSQCVNLTTRTQLPPAYTNSFTRGVYYPDKVFRSSVLHSTQDLFLPFFSNVTWFHAIHVSGTNGTKRFDNPVLPFNDGVYFASTEKSNIIRGWIFGTTLDSKTQSLLIVNNATNVVIKVCEFQFCNDPFLGVYYHKNNKSWMESEFRVYSSANNCTFEYVSQPFLMDLEGKQGNFKNLREFVFKNIDGYFKIYSKHTPINLVRDLPQGFSALEPLVDLPIGINITRFQTLLALHRSYLTPGDSSSGWTAGAAAYYVGYLQPRTFLLKYNENGTITDAVDCALDPLSETKCTLKSFTVEKGIYQTSNFRVQPTESIVRFPNITNLCPFGEVFNATRFASVYAWNRKRISNCVADYSVLYNSASFSTFKCYGVSPTKLNDLCFTNVYADSFVIRGDEVRQIAPGQTGKIADYNYKLPDDFTGCVIAWNSNNLDSKVGGNYNYLYRLFRKSNLKPFERDISTEIYQASSTPCNGVEGFNCYFPLQSYGFQPTNGVGYQPYRVVVLSFELLHAPATVCGPKKSTNLVKNKCVNFNFNGLTGTGVLTESNKKFLPFQQFGRDIADTTDAVRDPQTLEILDITPCSFGGVSVITPGTNTSNQVAVLYQDVNCTEVPVAIHADQLTPTWRVYSTGSNVFQTRAGCLIGAEHVNNSYECDIPIGAGICASYQTQTNSPRRARSVASQSIIAYTMSLGAENSVAYSNNSIAIPTNFTISVTTEILPVSMTKTSVDCTMYICGDSTECSNLLLQYGSFCTQLNRALTGIAVEQDKNTQEVFAQVKQIYKTPPIKDFGGFNFSQILPDPSKPSKRSFIEDLLFNKVTLADAGFIKQYGDCLGDIAARDLICAQKFNGLTVLPPLLTDEMIAQYTSALLAGTITSGWTFGAGAALQIPFAMQMAYRFNGIGVTQNVLYENQKLIANQFNSAIGKIQDSLSSTASALGKLQDVVNQNAQALNTLVKCLSSNFGAISSVLNDILSRLDKVEAEVQIDRLITGRLQCLQTYVTQQLIRAAEIRASANLAATKMSECVLGQSKRVDFCGKGYHLMSFPQSAPHGVVFLHVTYVPAQEKNFTTAPAICHDGKAHFPREGVFVSNGTHWFVTQRNFYEPQIITTDNTFVSGNCDVVIGIVNNTVYDPLQPELDSFKEELDKYFKNHTSPDVDLGDISGINASVVNIQKEIDRLNEVAKNLNESLIDLQELGKYEQYIKGGGGSDIDPYKEFGSSYQLLNFLPLDFFPDLNALVDTATALYEEELTGREHCSPHHTAIRQALVCWDELTKLIAWMSSNITSEQVRTIIVNHVNDTWGLKVRQSLWFHLSCLTFGQHTVQEFLVSFGVWIRTPAPYRPPNAPILSTLPEHTVIC

SEQ ID NO: 7350 - protein, 1365 aa, Artificial Sequence
  SARS-CoV-2/Iceland/192/2020__EPI_ISL_417819 spike protein (1-1211)(Q965C_S1003C) WhcAg construct
MFVFFVLLPLVSSQCVNLTTRTQLPPAYTNSFTRGVYYPDKVFRSSVLHSTQDLFLPFFSNVTWFHAIHVSGTNGTKRFDNPVLPFNDGVYFASTEKSNIIRGWIFGTTLDSKTQSLLIVNNATNVVIKVCEFQFCNDPFLGVYYHKNNKSWMESEFRVYSSANNCTFEYVSQPFLMDLEGKQGNFKNLREFVFKNIDGYFKIYSKHTPINLVRDLPQGFSALEPLVDLPIGINITRFQTLLALHRSYLTPGDSSSGWTAGAAAYYVGYLQPRTFLLKYNENGTITDAVDCALDPLSETKCTLKSFTVEKGIYQTSNFRVQPTESIVRFPNITNLCPFGEVFNATRFASVYAWNRKRISNCVADYSVLYNSASFSTFKCYGVSPTKLNDLCFTNVYADSFVIRGDEVRQIAPGQTGKIADYNYKLPDDFTGCVIAWNSNNLDSKVGGNYNYLYRLFRKSNLKPFERDISTEIYQAGSTPCNGVEGFNCYFPLQSYGFQPTNGVGYQPYRVVVLSFELLHAPATVCGPKKSTNLVKNKCVNFNFNGLTGTGVLTESNKKFLPFQQFGRDIADTTDAVRDPQTLEILDITPCSFGGVSVITPGTNTSNQVAVLYQGVNCTEVPVAIHADQLTPTWRVYSTGSNVFQTRAGCLIGAEHVNNSYECDIPIGAGICASYQTQTNSPRRARSVASQSIIAYTMSLGAENSVAYSNNSIAIPTNFTISVTTEILPVSMTKTSVDCTMYICGDSTECSNLLLQYGSFCTQLNRALTGIAVEQDKNTQEVFAQVKQIYKTPPIKDFGGFNFSQILPDPSKPSKRSFIEDLLFNKVTLADAGFIKQYGDCLGDIAARDLICAQKFNGLTVLPPLLTDEMIAQYTSALLAGTITSGWTFGAGAALQIPFAMQMAYRFNGIGVTQNVLYENQKLIANQFNSAIGKIQDSLSSTASALGKLQDVVNQNAQALNTLVKCLSSNFGAISSVLNDILSRLDKVEAEVQIDRLITGRLQCLQTYVTQQLIRAAEIRASANLAATKMSECVLGQSKRVDFCGKGYHLMSFPQSAPHGVVFLHVTYVPAQEKNFTTAPAICHDGKAHFPREGVFVSNGTHWFVTQRNFYEPQIITTDNTFVSGNCDVVIGIVNNTVYDPLQPELDSFKEELDKYFKNHTSPDVDLGDISGINASVVNIQKEIDRLNEVAKNLNESLIDLQELGKYEQYIKGGGGSDIDPYKEFGSSYQLLNFLPLDFFPDLNALVDTATALYEEELTGREHCSPHHTAIRQALVCWDELTKLIAWMSSNITSEQVRTIIVNHVNDTWGLKVRQSLWFHLSCLTFGQHTVQEFLVSFGVWIRTPAPYRPPNAPILSTLPEHTVIC

SEQ ID NO: 7351 - protein, 1365 aa, Artificial Sequence
  SARS-CoV-2/Belgium/ULG-6939/2020__EPI_ISL_417020 spike protein (1-1211)(Q965C_S1003C) WhcAg construct
MFVFLVLLPLVSSQCVNLTTRTQLPPAYTNSFTRGVYYPDKVFRSSVLHSTQDLFLPFFSNVTWFHAIHVSGTNGTKRFDNPVLPFNDGVYFASTEKSNIIRGWIFGTTLDSKTQSLLIVNNATNVVIKVCEFQFCNDPFLGVYYHKNNKSWMESEFRVYSSANNCTFEYVSQPFLMDLEGKQGNFKNLREFVFKNIDGYFKIYSKHTPINLVRDLPQGFSALEPLVDLPIGINITRFQTLLALHRSYLTPGDSSSGWTAGAAAYYVGYLQPRTFLLKYNENGTITDAVDCALDPLSETKCTLKSFTVEKGIYQTSNFRVQPTESIVRFPNITNLCPFGEVFNATRFASVYAWNRKRISNCVADYSVLYNSASFSTFKCYGVSPTKLNDLCFTNVYADSFVIRGDEVRQIAPGQTGKIADYNYKLPDDFTGCVIAWNSNNLDSKVGGNYNYLYRLFRKSNLKPFERDISTEIYQAGSTPCNGVEGFNCYFPLQSYGFQPTNGVGYQPYRVVVLSFELLHAPATVCGPKKSTNLVKNKCVNFNFNGLTGTGVLTESNKKFLPFQQFGRDIADTTDAVRDPQTLEILDITPCSFGGVSVITPGTNTSNQVAVLYQGVNCTEVPVAIHADQLTPTWRVYSTGSNVFQTRAGCLIGAEHVNNSYECDIPIGAGICASYQTQTNSPRRARSVASQSIIAYTMSLGAENSVVYSNNSIAIPTNFTISVTTEILPVSMTKTSVDCTMYICGDSTECSNLLLQYGSFCTQLNRALTGIAVEQDKNTQEVFAQVKQIYKTPPIKDFGGFNFSQILPDPSKPSKRSFIEDLLFNKVTLADAGFIKQYGDCLGDIAARDLICAQKFNGLTVLPPLLTDEMIAQYTSALLAGTITSGWTFGAGAALQIPFAMQMAYRFNGIGVTQNVLYENQKLIANQFNSAIGKIQDSLSSTASALGKLQDVVNQNAQALNTLVKCLSSNFGAISSVLNDILSRLDKVEAEVQIDRLITGRLQCLQTYVTQQLIRAAEIRASANLAATKMSECVLGQSKRVDFCGKGYHLMSFPQSAPHGVVFLHVTYVPAQEKNFTTAPAICHDGKAHFPREGVFVSNGTHWFVTQRNFYEPQIITTDNTFVSGNCDVVIGIVNNTVYDPLQPELDSFKEELDKYFKNHTSPDVDLGDISGINASVVNIQKEIDRLNEVAKNLNESLIDLQELGKYEQYIKGGGGSDIDPYKEFGSSYQLLNFLPLDFFPDLNALVDTATALYEEELTGREHCSPHHTAIRQALVCWDELTKLIAWMSSNITSEQVRTIIVNHVNDTWGLKVRQSLWFHLSCLTFGQHTVQEFLVSFGVWIRTPAPYRPPNAPILSTLPEHTVIC

SEQ ID NO: 7352 - protein, 1365 aa, Artificial Sequence
  SARS-CoV-2/France/HF2496/2020__EPI_ISL_418231 spike protein (1-1211)(Q965C_S1003C) WhcAg construct
MFVFLVLLPLVSSQCVNLTTRTQLPPAYTNSFTRGVYYPDKVFRSSVLHSTQDLFLPFFSNVTWFHAIHVSGTNGTKRFDNPVLPFNDGVYFASTEKSNIIRGWIFGTTLDSKTQSLLIVNNATNVVIKVCEFQFCNDPFLGVYYHKNNKSWMESEFRVYSSANNCTFEYVSQPFLMDLEGKQGNFKNLREFVFKNIDGYFKIYSKHTPINLVRDLPQGFSALEPLVDLPIGINITRFQTLLALHRSYLTPGDSSSGWTAGAAAYYVGYLQPRTFLLKYNENGTITDAVDCALDPLSETKCTLKSFTVEKGIYQTSNFRVQPTESIVRFPNITNLCPFGEVFNATRFASVYAWNRKRISNCVADYSVLYNSASFSTFKCYGVSPTKLNDLCFTNVYADSFVIRGDEVRQIAPGQTGKIADYNYKLPDDFTGCVIAWNSNNLDSKVGGNYNYLYRLFRKSNLKPFERDISTEIYQAGSTPCNGVEGFNCYFPLQSYGFQPTNGVGYQPYRVVVLSFELLHAPATVCGPKKSTNLVKNKCVNFNFNGLTGTGVLTESNKKFLPFQQFGRDIADTTDAVRDPQTLEILDITPCSFGGVSVITPGTNTSNQVAVLYQGVNCTEVPVAIHADQLTPTWRVYSTGSNVFQTRAGCLIGAEHVNNSYECDIPIGAGICASYQTQTNSPRRARSVASQSIIAYTMSLGAENSVAYSNNSIAIPTNFTISVTTEILPVSMTKTSVDCTMYICGDSTECSNLLLQYGSFCTQLNRALTGIAVEQDKNTQEVFAQVKQIYKTPPIKDFGGFNFSQILPDPSKPSKRSFIEDLLFNKVTLADAGFIKQYGDCLGDIVARDLICAQKFNGLTVLPPLLTDEMIAQYTSALLAGTITSGWTFGAGAALQIPFAMQMAYRFNGIGVTQNVLYENQKLIANQFNSAIGKIQDSLSSTASALGKLQDVVNQNAQALNTLVKCLSSNFGAISSVLNDILSRLDKVEAEVQIDRLITGRLQCLQTYVTQQLIRAAEIRASANLAATKMSECVLGQSKRVDFCGKGYHLMSFPQSAPHGVVFLHVTYVPAQEKNFTTAPAICHDGKAHFPREGVFVSNGTHWFVTQRNFYEPQIITTDNTFVSGNCDVVIGIVNNTVYDPLQPELDSFKEELDKYFKNHTSPDVDLGDISGINASVVNIQKEIDRLNEVAKNLNESLIDLQELGKYEQYIKGGGGSDIDPYKEFGSSYQLLNFLPLDFFPDLNALVDTATALYEEELTGREHCSPHHTAIRQALVCWDELTKLIAWMSSNITSEQVRTIIVNHVNDTWGLKVRQSLWFHLSCLTFGQHTVQEFLVSFGVWIRTPAPYRPPNAPILSTLPEHTVIC

SEQ ID NO: 7353 - protein, 1365 aa, Artificial Sequence
  SARS-CoV-2/USA/WA-UW291/2020__EPI_ISL_418076 spike protein (1-1211)(Q965C_S1003C) WhcAg construct
MFVFLVLLPLVSSQCVNLTTRTQLPPAYTNSFTRGVYYPDKVFRSSVLHSTQDLFLPFFSNVTWFHAIHVSGTNGTKRFDNPVLPFNDGVYFASTEKSNIIRGWIFGTTLDSKTQSLLIVNNATNVVIKVCEFQFCNDPFLGVYYHKNNKSWMESEFRVYSSANNCTFEYVSQPFLMDLEGKQGNFKNLREFVFKNIDGYFKIYSKHTPINLVRDLPQGFSALEPLVDLPIGINITRFQTLLALHRSYLTPGDSSSGWTAGAAAYYVGYLQPRTFLLKYNENGTITDAVDCALDPLSETKCTLKSFTVEKGIYQTSNFRVQPTESIVRFPNITNLCPFGEVFNATRFASVYAWNRKRISNCVADYSVLYNSASFSTFKCYGVSPTKLNDLCFTNVYADSFVIRGDEVRQIAPGQTGKIADYNYKLPDDFTGCVIAWNSNNLDSKVGGNYNYLYRLFRKSNLKPFERDISTEIYQAGSTPCNGVEGFNCYFPLQSYGFQPTNGVGYQPYRVVVLSFELLHAPATVCGPKKSTNLVKNKCVNFNFNGLTGTGVLTESNKKFLPFQQFGRDIADTTDAVRDPQTLEILDITPCSFGGVSVITPGTNTSNQVAVLYQGVNCTEVPVAIHADQLTPTWRVYSTGSNVFQTRAGCLIGAEHVNNSYECDIPIGAGICASYQTQTNSPRRARSVASQSIIAYTMSLGAENSVAYSNNSIAIPTNFTISVTTEILPVSMTKTSVDCTMYICGDSTECSNLLLQYGSFCTQLNRALTGIAVEQDKNTQEVFAQVKQIYKTPPIKDFGGFNFSQILPDPSKPSKRSFIEDLLFNKVTLADAGFIKQYGDCLGDIAARDLICAQKFNGLTVLPPLLTDEMIAQYTSALLAGTITSGWTFGAGAALQIPFAMQMAYRFNGIGVTQNVLYENQKLIANQFNSAIGKIQYSLSSTASALGKLQDVVNQNAQALNTLVKCLSSNFGAISSVLNDILSRLDKVEAEVQIDRLITGRLQCLQTYVTQQLIRAAEIRASANLAATKMSECVLGQSKRVDFCGKGYHLMSFPQSAPHGVVFLHVTYVPAQEKNFTTAPAICHDGKAHFPREGVFVSNGTHWFVTQRNFYEPQIITTDNTFVSGNCDVVIGIVNNTVYDPLQPELDSFKEELDKYFKNHTSPDVDLGDISGINASVVNIQKEIDRLNEVAKNLNESLIDLQELGKYEQYIKGGGGSDIDPYKEFGSSYQLLNFLPLDFFPDLNALVDTATALYEEELTGREHCSPHHTAIRQALVCWDELTKLIAWMSSNITSEQVRTIIVNHVNDTWGLKVRQSLWFHLSCLTFGQHTVQEFLVSFGVWIRTPAPYRPPNAPILSTLPEHTVIC

SEQ ID NO: 7354 - protein, 1365 aa, Artificial Sequence; identical to SEQ ID NO: 7317
  SARS-CoV-2/Portugal/PT0034/2020__EPI_ISL_418019 spike protein (1-1211)(Q965C_S1003C) WhcAg construct

SEQ ID NO: 7355 - protein, 1365 aa, Artificial Sequence
  SARS-CoV-2/Iceland/202/2020__EPI_ISL_417750 spike protein (1-1211)(Q965C_S1003C) WhcAg construct
MFVFLVLLPLVSSQCVNLTTRTQLPPAYTNSFTRGVYYPDKVFRSSVLHSTQDLFLPFFSNVTWFHAIHVSGTNGTKRFDNPVLPFNDGVYFASTEKSNIIRGWIFGTTLDSKTQSLLIVNNATNVVIKVCEFQFCNDPFLGVYYHKNNKSWMESEFRVYSSANNCTFEYVSQPFLMDLEGKQGNFKNLREFVFKNIDGYFKIYSKHTPINLVRDLPQGFSALEPLVDLPIGINITRFQTLLALHRSYLTPGDSSSGWTAGAAAYYVGYLQPRTFLLKYNENGTITDAVDCALDPLSETKCTLKSFTVEKGIYQTSNFRVQPTESIVRFPNITNLCPFGEVFNATRFASVYAWNRKRISNCVADYSVLYNSASFSTFKCYGVSPTKLNDLCFTNVYADSFVIRGDEVRQIAPGQTGKIADYNYKLPDDFTGCVIAWNSNNLDSKVGGNYNYLYRLFRKSNLKPFERDISTEIYQAGSTPCNGVEGFNCYFPLQSYGFQPTNGVGYQPYRVVVLSFELLHAPATVCGPKKSTNLVKNKCVNFNFNGLTGTGVLTESNKKFLPFQQFGRDIADTTDAVRDPQTLEILDITPCSFGGVSVITPGTNTSNQVAVLYQDVNCTEVPVAIHADQLTPTWRVYSTGSNVFQTRAGCLIGAEHVNNSYECDIPIGAGICASYQTQTNSPRRARSVASQSIIAYTMSLGAENSVAYSNNSIAIPTNFTISVTTEILPVSMTKTSVDCTMYICGDSTECSNLLLQYGSFCTQLNRALTGIAVEQDKNTQEVFAQVKQIYKTPPIKDFGGFNFSQILPDPSKPSKRSFIEDLLFNKVTLADAGFIKQYGDCLGDIAARDLICAQKFNGLTVLPPLLTDEMIAQYTSALLAGTITSGWTFGAGAALQIPFAMQMAYRFNGIGVTQNVLYENQKLIANQFNSAIGKIQDSLSSTASALGKLQDVVNQNAQALNTLVKCLSSNFGAISSVLNDILSRLDKVEAEVQIDRLITGRLQCLQTYVTQQLIRAAEIRASANLAATKMSECVLGQSKRVDFCGKGYHLMSFPQSAPHGVVFLHVTYVPAQEKNFTTAPAICHDGKAHFPREGVFVSNGTHWFVTQRNFYEPQIITTDNTFVSGNCDVVIGIVNNTVYDPLQPELDSFKEELDKYFKNHTSPDVDLGDIPGINASVVNIQKEIDRLNEVAKNLNESLIDLQELGKYEQYIKGGGGSDIDPYKEFGSSYQLLNFLPLDFFPDLNALVDTATALYEEELTGREHCSPHHTAIRQALVCWDELTKLIAWMSSNITSEQVRTIIVNHVNDTWGLKVRQSLWFHLSCLTFGQHTVQEFLVSFGVWIRTPAPYRPPNAPILSTLPEHTVIC

SEQ ID NO: 7356 - protein, 1365 aa, Artificial Sequence
  SARS-CoV-2/USA/WA-UW261/2020__EPI_ISL_418046 spike protein (1-1211)(Q965C_S1003C) WhcAg construct
MFVFLVLLPLVSSQCVNLTTRTQLPPAYTNSFTRGVYYPDKVFRSSVLHSTQDLFLPFFSNVTWFHAIHVSGTNGTKRFDNPVLPFNDGVYFASTEKSNIIRGWIFGTTLDSKTQSLLIVNNATNVVIKVCEFQFCNDPFLGVYYHKNNKSWMESEFRVYSSANNCTFEYVSQPFLMDLEGKQGNFKNLREFVFKNIDGYFKIYSKHTPINLVRDLPQGFSALEPLVDLPIGINITRFQTLLALHRSYLTPGDSSSGWTAGAAAYYVGYLQPRTFLLKYNENGTITDAVDCALDPLSETKCTLKSFTVEKGIYQTSNFRVQPTESIVRFPNITNLCPFGEVFNATRFTSVYAWNRKRISNCVADYSVLYNSASFSTFKCYGVSPTKLNDLCFTNVYADSFVIRGDEVRQIAPGQTGKIADYNYKLPDDFTGCVIAWNSNNLDSKVGGNYNYLYRLFRKSNLKPFERDISTEIYQAGSTPCNGVEGFNCYFPLQSYGFQPTNGVGYQPYRVVVLSFELLHAPATVCGPKKSTNLVKNKCVNFNFNGLTGTGVLTESNKKFLPFQQFGRDIADTTDAVRDPQTLEILDITPCSFGGVSVITPGTNTSNQVAVLYQDVNCTEVPVAIHADQLTPTWRVYSTGSNVFQTRAGCLIGAEHVNNSYECDIPIGAGICASYQTQTNSPRRARSVASQSIIAYTMSLGAENSVAYSNNSIAIPTNFTISVTTEILPVSMTKTSVDCTMYICGDSTECSNLLLQYGSFCTQLNRALTGIAVEQDKNTQEVFAQVKQIYKTPPIKDFGGFNFSQILPDPSKPSKRSFIEDLLFNKVTLADAGFIKQYGDCLGDIAARDLICAQKFNGLTVLPPLLTDEMIAQYTSALLAGTITSGWTFGAGAALQIPFAMQMAYRFNGIGVTQNVLYENQKLIANQFNSAIGKIQDSLSSTASALGKLQDVVNQNAQALNTLVKCLSSNFGAISSVLNDILSRLDKVEAEVQIDRLITGRLQCLQTYVTQQLIRAAEIRASANLAATKMSECVLGQSKRVDFCGKGYHLMSFPQSAPHGVVFLHVTYVPAQEKNFTTAPAICHDGKAHFPREGVFVSNGTHWFVTQRNFYEPQIITTDNTFVSGNCDVVIGIVNNTVYDPLQPELDSFKEELDKYFKNHTSPDVDLGDISGINASVVNIQKEIDRLNEVAKNLNESLIDLQELGKYEQYIKGGGGSDIDPYKEFGSSYQLLNFLPLDFFPDLNALVDTATALYEEELTGREHCSPHHTAIRQALVCWDELTKLIAWMSSNITSEQVRTIIVNHVNDTWGLKVRQSLWFHLSCLTFGQHTVQEFLVSFGVWIRTPAPYRPPNAPILSTLPEHTVIC

SEQ ID NO: 7357 - protein, 1365 aa, Artificial Sequence
  SARS-CoV-2/Portugal/PT0035/2020__EPI_ISL_418020 spike protein (1-1211)(Q965C_S1003C) WhcAg construct
MFVFLVLLPLVSSQCVNLTTRTQLPPAYTNSFTRGVYYPDKVFRSSVLHSTQDLFLPFFSNVTWFHAIHVSGTNGTKRFDNPVLPFNDGVYFASTEKSNIIRGWIFGTTLDSKTQSLLIVNNATNVVIKVCEFQFCNDPFLGVYYHKNNKSWMESEFRVYSSANNCTFEYVSQPFLMDLEGKQGNFKNLREFVFKNIDGYFKIYSKHTPINLVRDLPQGFSALEPLVDLPIGINITRFQTLLALHRSYLTPGDSSSGWTAGAAAYYVGYLQPRTFLLKYNENGTITDAVDCALDPLSETKCTLKSFTVEKGIYQTSNFRVQPTESIVRFPNITNLCPFGEVFNATRFASVYAWNRKRISNCVADYSVLYNSASFSTFKCYGVSPTKLNDLCFTNVYADSFVIRGDEVRQIAPGQTGKIADYNYKLPDDFTGCVIAWNSNNLDSKVGGNYNYLYRLFRKSNLKPFERDISTEIYQAGSTPCNGVEGFNCYFPLQSYGFQPTNGVGYQPYRVVVLSFELLHAPATVCGPKKSTNLVKNKCVNFNFNGLTGTGVLTESNKKFLPFQQFGRDIADTTDAVRDPQTLEILDITPCSFGGVSVITPGTNTSNQVAVLYQDVNCTEVPVAIHADQLTPTWRVYSTGSNVFQTRAGCLIGAEHVNNSYECDIPIGAGICASYQTQTNSPRRARSVASQSIIAYTMSLGAENSVAYSNNSIAIPTNFTISVTTEILPVSMTKTSVDCTMYICGDSTECSNLLLQYGSFCTQLNRALTGIAVEQDKNTQEVFAQVKQIYKTPPIKDFGGFNFSQILPDPSKPSKRSFIEDLLFNKVTLADAGFIKQYGDCLGDISARDLICAQKFNGLTVLPPLLTDEMIAQYTSALLAGTITSGWTFGAGAALQIPFAMQMAYRFNGIGVTQNVLYENQKLIANQFNSAIGKIQDSLSSTASALGKLQDVVNQNAQALNTLVKCLSSNFGAISSVLNDILSRLDKVEAEVQIDRLITGRLQCLQTYVTQQLIRAAEIRASANLAATKMSECVLGQSKRVDFCGKGYHLMSFPQSAPHGVVFLHVTYVPAQEKNFTTAPAICHDGKAHFPREGVFVSNGTHWFVTQRNFYEPQIITTDNTFVSGNCDVVIGIVNNTVYDPLQPELDSFKEELDKYFKNHTSPDVDLGDISGINASVVNIQKEIDRLNEVAKNLNESLIDLQELGKYEQYIKGGGGSDIDPYKEFGSSYQLLNFLPLDFFPDLNALVDTATALYEEELTGREHCSPHHTAIRQALVCWDELTKLIAWMSSNITSEQVRTIIVNHVNDTWGLKVRQSLWFHLSCLTFGQHTVQEFLVSFGVWIRTPAPYRPPNAPILSTLPEHTVIC

SEQ ID NO: 7358 - protein, 1365 aa, Artificial Sequence
  SARS-CoV-2/USA/NY-NYUMC7/2020__EPI_ISL_418192 spike protein (1-1211)(Q965C_S1003C) WhcAg construct
MFVFLVLLPLVSSQCVNLTTRTQLPPAYTNSFTRGVYYPDKVFRSSVLHSTQDLFLPFFSNVTWFHAIHVSGTNGTKRFDNPVLPFNDGVYFASTEKSNIIRGWIFGTTLDSKTQSLLIVNNATNVVIKVCEFQFCNDPFLGVYHHKNNKSWMESEFRVYSSANNCTFEYVSQPFLMDLEGKQGNFKNLREFVFKNIDGYFKIYSKHTPINLVRDLPQGFSALEPLVDLPIGINITRFQTLLALHRSYLTPGDSSSGWTAGAAAYYVGYLQPRTFLLKYNENGTITDAVDCALDPLSETKCTLKSFTVEKGIYQTSNFRVQPTESIVRFPNITNLCPFGEVFNATRFASVYAWNRKRISNCVADYSVLYNSASFSTFKCYGVSPTKLNDLCFTNVYADSFVIRGDEVRQIAPGQTGKIADYNYKLPDDFTGCVIAWNSNNLDSKVGGNYNYLYRLFRKSNLKPFERDISTEIYQAGSTPCNGVEGFNCYFPLQSYGFQPTNGVGYQPYRVVVLSFELLHAPATVCGPKKSTNLVKNKCVNFNFNGLTGTGVLTESNKKFLPFQQFGRDIADTTDAVRDPQTLEILDITPCSFGGVSVITPGTNTSNQVAVLYQGVNCTEVPVAIHADQLTPTWRVYSTGSNVFQTRAGCLIGAEHVNNSYECDIPIGAGICASYQTQTNSPRRARSVASQSIIAYTMSLGAENSVAYSNNSIAIPTNFTISVTTEILPVSMTKTSVDCTMYICGDSTECSNLLLQYGSFCTQLNRALTGIAVEQDKNTQEVFAQVKQIYKTPPIKDFGGFNFSQILPDPSKPSKRSFIEDLLFNKVTLADAGFIKQYGDCLGDIAARDLICAQKFNGLTVLPPLLTDEMIAQYTSALLAGTITSGWTFGAGAALQIPFAMQMAYRFNGIGVTQNVLYENQKLIANQFNSAIGKIQDSLSSTASALGKLQDVVNQNAQALNTLVKCLSSNFGAISSVLNDILSRLDKVEAEVQIDRLITGRLQCLQTYVTQQLIRAAEIRASANLAATKMSECVLGQSKRVDFCGKGYHLMSFPQSAPHGVVFLHVTYVPAQEKNFTTAPAICHDGKAHFPREGVFVSNGTHWFVTQRNFYEPQIITTDNTFVSGNCDVVIGIVNNTVYDPLQPELDSFKEELDKYFKNHTSPDVDLGDISGINASVVNIQKEIDRLNEVAKNLNESLIDLQELGKYEQYIKGGGGSDIDPYKEFGSSYQLLNFLPLDFFPDLNALVDTATALYEEELTGREHCSPHHTAIRQALVCWDELTKLIAWMSSNITSEQVRTIIVNHVNDTWGLKVRQSLWFHLSCLTFGQHTVQEFLVSFGVWIRTPAPYRPPNAPILSTLPEHTVIC

SEQ ID NO: 7359 - protein, 1365 aa, Artificial Sequence
  SARS-CoV-2/Iceland/189/2020__EPI_ISL_417709 spike protein (1-1211)(Q965C_S1003C) WhcAg construct
MFVFLVLLPLVSSQCVNLTTRTQLPPAYTNSFTRGVYYPDKVFRSSVLHSTQDLFLPFFSNVTWFHAIHVSGTNGTKRFDNPVLPFNDGVYFASTEKSNIIRGWIFGTTLDSKTQSLLIVNNATNVVIKVCEFQFCNDPFLGVYYHKNNKSWMESEFRVYSSANNCTFEYVSQPFLMDLEGKQGNFKNLREFVFKNIDGYFKIYSKHTPINLVRDLPQGFSALEPLVDLPIGINITRFQTLLALHRSYLTPGDSSSGWTAGAAAYYVGYLQPRTFLLKYNENGTITDAVDCALDPLSETKCTLKSFTVEKGIYQTSNFRVQPTESIVRFPNITNLCPFGEVFNATRFASVYAWNRKRISNCVADYSVLYNSASFSTFKCYGVSPTKLNDLCFTNVYADSFVIRGDEVRQIAPGQTGKIADYNYKLPDDFTGCVIAWNSNNLDSKVGGNYNYLYRLFRKSNLKPFERDISTEIYQAGSTPCNGVEGFNCYFPLQSYGFQPTNGVGYQPYRVVVLSFELLHAPATVCGPKKSTNLVKNKCVNFNFNGLTGTGVLTESNKKFLPFQQFGRDIADTTDAVRDPQTLEILDITPCSFGGVSVITPGTNTSNQVAVLYQGVNCTEVPVAIHADQLTPTWRVYSTGSNVFQTRAGCLIGAEHVNNSYECDIPIGAGICASYQTQTNSPRRARSVASQSIIAYTMSLGAENSVAYSNNSIAIPTNFTISVTTEILPVSMTKTSVDCTMYICGDSTECSNLLLQYGSFCTQLNRALTGIAVEQDKNTQEVFAQVKQIYKTPPIKDFGGFNFSQILPDPSKPSKRSFIEDLLFNKVTLADAGFTKQYGDCLGDIAARDLICAQKFNGLTVLPPLLTDEMIAQYTSALLAGTITSGWTFGAGAALQIPFAMQMAYRFNGIGVTQNVLYENQKLIANQFNSAIGKIQDSLSSTASALGKLQDVVNQNAQALNTLVKCLSSNFGAISSVLNDILSRLDKVEAEVQIDRLITGRLQCLQTYVTQQLIRAAEIRASANLAATKMSECVLGQSKRVDFCGKGYHLMSFPQSAPHGVVFLHVTYVPAQEKNFTTAPAICHDGKAHFPREGVFVSNGTHWFVTQRNFYEPQIITTDNTFVSGNCDVVIGIVNNTVYDPLQPELDSFKEELDKYFKNHTSPDVDLGDISGINASVVNIQKEIDRLNEVAKNLNESLIDLQELGKYEQYIKGGGGSDIDPYKEFGSSYQLLNFLPLDFFPDLNALVDTATALYEEELTGREHCSPHHTAIRQALVCWDELTKLIAWMSSNITSEQVRTIIVNHVNDTWGLKVRQSLWFHLSCLTFGQHTVQEFLVSFGVWIRTPAPYRPPNAPILSTLPEHTVIC

SEQ ID NO: 7360 - protein, 1365 aa, Artificial Sequence
  SARS-CoV-2/Australia/NSW56/2020__EPI_ISL_417408 spike protein (1-1211)(Q965C_S1003C) WhcAg construct
MFVFLVLLPLVSSQCVNLTTRTQLPPAYTNSFTRGVYYPDKVFRSSVLHSTQDLFLPFFSNVTWFHAIHVSGTNGTKRFDNPVLPFNDGVYFASTEKSNIIRGWIFGTTLDSKTQSLLIVNNATNVVIKVCEFQFCNDPFLGVYYHKNNKSWMESEFRVYSSANNCTFEYVSQPFLMDLEGKQGNFKNLREFVFKNIDGYFKIYSKHTPINLVRDLPQGFSALEPLVDLPIGINITRFQTLLALHRSYLTPGDSSSGWTAGAAAYYVGYLQPRTFLLKYNENGTITDAVDCALDPLSETKCTLKSFTVEKGIYQTSNFRVQPTESIVRFPNITNLCPFGEVFNATRFASVYAWNRKRISNCVADYSVLYNSASFSTFKCYGVSPTKLNDLCFTNVYADSFVIRGDEVRQIAPGQTGKIADYNYKLPDDFTGCVIAWNSNNLDSKVGGNYNYLYRLFRKSNLKPFERDISTEIYQAGSTPCNGVEGFNCYFPLQSYGFQPTNGVGYQPYRVVVLSFELLHAPATVCGPKKSTNLVKNKCVNFNFNGLTGTGVLTESNKKFLPFQQFGRDIADTTDAVRDPQTLEILDITPCSFGGVSVITPGTNTSNQVAVLYQDVNCTEVPVAIHADQLTPTWRVYSTGSNVFQTRAGCLIGAEHVNNSYECDIPIGAGICASYQTQTNSPRRARSVASQSIIAYTMSLGAENSVAYSNNSIAIPTNFTISVTTEILPVSMTKTSVDCTMYICGDSTECSNLLLQYGSFCTQLNRALTGIAVEQDKNTQEVFAQVKQIYKTPPIKDFGGFNFSQILPDSSKPSKRSFIEDLLFNKVTLADAGFIKQYGDCLGDIAARDLICAQKFNGLTVLPPLLTDEMIAQYTSALLAGTITSGWTFGAGAALQIPFAMQMAYRFNGIGVTQNVLYENQKLIANQFNSAIGKIQDSLSSTASALGKLQDVVNQNAQALNTLVKCLSSNFGAISSVLNDILSRLDKVEAEVQIDRLITGRLQCLQTYVTQQLIRAAEIRASANLAATKMSECVLGQSKRVDFCGKGYHLMSFPQSAPHGVVFLHVTYVPAQEKNFTTAPAICHDGKAHFPREGVFVSNGTHWFVTQRNFYEPQIITTDNTFVSGNCDVVIGIVNNTVYDPLQPELDSFKEELDKYFKNHTSPDVDLGDISGINASVVNIQKEIDRLNEVAKNLNESLIDLQELGKYEQYIKGGGGSDIDPYKEFGSSYQLLNFLPLDFFPDLNALVDTATALYEEELTGREHCSPHHTAIRQALVCWDELTKLIAWMSSNITSEQVRTIIVNHVNDTWGLKVRQSLWFHLSCLTFGQHTVQEFLVSFGVWIRTPAPYRPPNAPILSTLPEHTVIC

SEQ ID NO: 7361 - protein, 1365 aa, Artificial Sequence
  SARS-CoV-2/Iceland/280/2020__EPI_ISL_417608 spike protein (1-1211)(Q965C_S1003C) WhcAg construct
MFVFLVLLPLVSSQCVNLTTRTQLPPAYTNSFTRGVYYPDKVFRSSVLHSTQDLFLPFFSNVTWFHAIHVSGTNGTKRFDNPVLPFNDGVYFASTEKSNIIRGWIFGTTLDSKTQSLLIVNNATNVVIKVCEFQFCNDPFLGVYYHKNNKSWMESEFRVYSSANNCTFEYVSQPFLMDLEGKQGNFKNLREFVFKNIDGYFKIYSKHTPINLVRDLPQGFSALEPLVDLPIGINITRFQTLLALHRSYLTPGDSSSGWTAGAAAYYVGYLQPRTFLLKYNENGTITDAVDCALDPLSETKCTLKSFTVEKGIYQTSNFRVQPTESIVRFPNITNLCPFGEVFNATRFASVYAWNRKRISNCVADYSVLYNSASFSTFKCYGVSPTKLNDLCFTNVYADSFVIRGDEVRQIAPGQTGKIADYNYKLPDDFTGCVIAWNSNNLDSKVGGNYNYLYRLFRKSNLKPFERDISTEIYQAGSTPCNGVEGFNCYFPLQSYGFQPTNGVGYQPYRVVVLSFELLHAPATVCGPKKSTNLVKNKCVNFNFNGLTGTGVLTESNKKFLPFQQFGRDIADTTDAVRDPQTLEILDITPCSFGGVSVITPGTNTSNQVAVLYQGVNCTEVPVAIHADQLTPTWRVYSTGSNVFQTRAGCLIGAEHVNNSYECDIPIGAGICASYHTQTNSPRRARSVASQSIIAYTMSLGAENSVAYSNNSIAIPTNFTISVTTEILPVSMTKTSVDCTMYICGDSTECSNLLLQYGSFCTQLNRALTGIAVEQDKNTQEVFAQVKQIYKTPPIKDFGGFNFSQILPDPSKPSKRSFIEDLLFNKVTLADAGFIKQYGDCLGDIAARDLICAQKFNGLTVLPPLLTDEMIAQYTSALLAGTITSGWTFGAGAALQIPFAMQMAYRFNGIGVTQNVLYENQKLIANQFNSAIGKIQDSLSSTASALGKLQDVVNQNAQALNTLVKCLSSNFGAISSVLNDILSRLDKVEAEVQIDRLITGRLQCLQTYVTQQLIRAAEIRASANLAATKMSECVLGQSKRVDFCGKGYHLMSFPQSAPHGVVFLHVTYVPAQEKNFTTAPAICHDGKAHFPREGVFVSNGTHWFVTQRNFYEPQIITTDNTFVSGNCDVVIGIVNNTVYDPLQPELDSFKEELDKYFKNHTSPDVDLGDISGINASVVNIQKEIDRLNEVAKNLNESLIDLQELGKYEQYIKGGGGSDIDPYKEFGSSYQLLNFLPLDFFPDLNALVDTATALYEEELTGREHCSPHHTAIRQALVCWDELTKLIAWMSSNITSEQVRTIIVNHVNDTWGLKVRQSLWFHLSCLTFGQHTVQEFLVSFGVWIRTPAPYRPPNAPILSTLPEHTVIC

SEQ ID NO: 7362 - protein, 1365 aa, Artificial Sequence; identical to SEQ ID NO: 7317
  SARS-CoV-2/Iceland/247/2020__EPI_ISL_417575 spike protein (1-1211)(Q965C_S1003C) WhcAg construct

SEQ ID NO: 7363 - protein, 1365 aa, Artificial Sequence
  SARS-CoV-2/Iceland/238/2020__EPI_ISL_417566 spike protein (1-1211)(Q965C_S1003C) WhcAg construct
MFVFLVLLPLVSSQCVNLTTRTQLPPAYTNSFTRGVYYPDKVFRSSVLHSTQDLFLPFFSNVTWFHAIHVSGTNGTKRFDNPVLPFNDGVYFASTEKSNIIRGWIFGTTLDSKTQSLLIVNNATNVVIKVCEFQFCNDPFLGVYYHKNNKSWMESEFRVYSSANNCTFEYVSQPFLMDLEGKQGNFKNLREFVFKNIDGYFKIYSKHTPINLVRDLPQGFSALEPLVDLPIGINITRFQTLLALHRSYLTPGDSSSGWTAGAAAYYVGYLQPRTFLLKYNENGTITDAVDCALDPLSETKCTLKSFTVEKGIYQTSNFRVQPTESIVRFPNITNLCPFGEVFNATRFASVYAWNRKRISNCVADYSVLYNSASFSTFKCYGVSPTKLNDLCFTNVYADSFVIRGDEVRQIAPGQTGKIADYNYKLPDDFTGCVIAWNSNNLDSKVGGNYNYLYRLFRKSNLKPFERDISTEIYQAGSTPCNGVEGFNCYFPLQSYGFQPTNGVGYQPYRVVVLSFELLHAPATVCGPKKSTNLVKNKCVNFNFNGLTGTGVLTESNKKFLPFQQFGRDIADTTDAVRDPQTLEILDITPCSFGGVSVITPGTNTSNQVAVLYQGVNCTEVPVAIHADQLTPTWRVYSTGSNVFQTRAGCLIGAEHVNNSYECDIPIGAGICASYQTQTNSPRRARSVASQSIIAYTMSLGAENSVAYSNNSIAIPTNFTISVTTEILPVSMTKTSVDCTMYICGDSTECSNLLLQYGSFCTQLNRALTGIAVEQDKNTQEVFAQVKQIYKTPPIKDFGGFNFSQILPDPSKPSKRSFIEDLLFNKVTLADVGFIKQYGDCLGDIAARDLICAQKFNGLTVLPPLLTDEMIAQYTSALLAGTITSGWTFGAGAALQIPFAMQMAYRFNGIGVTQNVLYENQKLIANQFNSAIGKIQDSLSSTASALGKLQDVVNQNAQALNTLVKCLSSNFGAISSVLNDILSRLDKVEAEVQIDRLITGRLQCLQTYVTQQLIRAAEIRASANLAATKMSECVLGQSKRVDFCGKGYHLMSFPQSAPHGVVFLHVTYVPAQEKNFTTAPAICHDGKAHFPREGVFVSNGTHWFVTQRNFYEPQIITTDNTFVSGNCDVVIGIVNNTVYDPLQPELDSFKEELDKYFKNHTSPDVDLGDISGINASVVNIQKEIDRLNEVAKNLNESLIDLQELGKYEQYIKGGGGSDIDPYKEFGSSYQLLNFLPLDFFPDLNALVDTATALYEEELTGREHCSPHHTAIRQALVCWDELTKLIAWMSSNITSEQVRTIIVNHVNDTWGLKVRQSLWFHLSCLTFGQHTVQEFLVSFGVWIRTPAPYRPPNAPILSTLPEHTVIC

SEQ ID NO: 7364 - protein, 1365 aa, Artificial Sequence
  SARS-CoV-2/Greece/16/2020__EPI_ISL_418265 spike protein (1-1211)(Q965C_S1003C) WhcAg construct
MFVFLVLLPLVSSQCVNLTTRTQLPPAYTNSFTRGVYYPDKVFRSSVLHSTQDLFLPFFSNVTWFHAIHVSGTNGTKRFDNPVLPFNDGVYFASTEKSNIIRGWIFGTTLDSKTQSLLIVNNATNVVIKVCEFQFCNDPFLGVYYHKNNKSWMESEFRVYSSANNCTFEYVSQPFLMDLEGKQGNFKNLREFVFKNVDGYFKIYSKHTPINLVRDLPQGFSALEPLVDLPIGINITRFQTLLALHRSYLTPGDSSSGWTAGAAAYYVGYLQPRTFLLKYNENGTITDAVDCALDPLSETKCTLKSFTVEKGIYQTSNFRVQPTESIVRFPNITNLCPFGEVFNATRFASVYAWNRKRISNCVADYSVLYNSASFSTFKCYGVSPTKLNDLCFTNVYADSFVIRGDEVRQIAPGQTGKIADYNYKLPDDFTGCVIAWNSNNLDSKVGGNYNYLYRLFRKSNLKPFERDISTEIYQAGSTPCNGVEGFNCYFPLQSYGFQPTNGVGYQPYRVVVLSFELLHAPATVCGPKKSTNLVKNKCVNFNFNGLTGTGVLTESNKKFLPFQQFGRDIADTTDAVRDPQTLEILDITPCSFGGVSVITPGTNTSNQVAVLYQDVNCTEVPVAIHADQLTPTWRVYSTGSNVFQTRAGCLIGAEHVNNSYECDIPIGAGICASYQTQTNSPRRARSVASQSIIAYTMSLGAENSVAYSNNSIAIPTNFTISVTTEILPVSMTKTSVDCTMYICGDSTECSNLLLQYGSFCTQLNRALTGIAVEQDKNTQEVFAQVKQIYKTPPIKDFGGFNFSQILPDPSKPSKRSFIEDLLFNKVTLADAGFIKQYGDCLGDIAARDLICAQKFNGLTVLPPLLTDEMIAQYTSALLAGTITSGWTFGAGAALQIPFAMQMAYRFNGIGVTQNVLYENQKLIANQFNSAIGKIQDSLSSTASALGKLQDVVNQNAQALNTLVKCLSSNFGAISSVLNDILSRLDKVEAEVQIDRLITGRLQCLQTYVTQQLIRAAEIRASANLAATKMSECVLGQSKRVDFCGKGYHLMSFPQSAPHGVVFLHVTYVPAQEKNFTTAPAICHDGKAHFPREGVFVSNGTHWFVTQRNFYEPQIITTDNTFVSGNCDVVIGIVNNTVYDPLQPELDSFKEELDKYFKNHTSPDVDLGDISGINASVVNIQKEIDRLNEVAKNLNESLIDLQELGKYEQYIKGGGGSDIDPYKEFGSSYQLLNFLPLDFFPDLNALVDTATALYEEELTGREHCSPHHTAIRQALVCWDELTKLIAWMSSNITSEQVRTIIVNHVNDTWGLKVRQSLWFHLSCLTFGQHTVQEFLVSFGVWIRTPAPYRPPNAPILSTLPEHTVIC

SEQ ID NO: 7365 - protein, 1365 aa, Artificial Sequence
  SARS-CoV-2/Iceland/319/2020__EPI_ISL_417648 spike protein (1-1211)(Q965C_S1003C) WhcAg construct
MFVFLVLLPLVSSQCVNLTTRTQLPPAYTNSFTRGVYYPDKVFRSSVLHSTQDLFLPFFSNVTWFHAIHVSGTNGTKRFDNPVLPFNDGVYFASTEKSNIIRGWIFGTTLDSKTQSLLIVNNATNVVIKVCEFQFCNDPFLGVYYHKNNKSWMESEFRVYSSANNCTFEYVSQPFLIDLEGKQGNFKNLREFVFKNIDGYFKIYSKHTPINLVRDLPQGFSALEPLVDLPIGINITRFQTLLALHRSYLTPGDSSSGWTAGAAAYYVGYLQPRTFLLKYNENGTITDAVDCALDPLSETKCTLKSFTVEKGIYQTSNFRVQPTESIVRFPNITNLCPFGEVFNATRFASVYAWNRKRISNCVADYSVLYNSASFSTFKCYGVSPTKLNDLCFTNVYADSFVIRGDEVRQIAPGQTGKIADYNYKLPDDFTGCVIAWNSNNLDSKVGGNYNYLYRLFRKSNLKPFERDISTEIYQAGSTPCNGVEGFNCYFPLQSYGFQPTNGVGYQPYRVVVLSFELLHAPATVCGPKKSTNLVKNKCVNFNFNGLTGTGVLTESNKKFLPFQQFGRDIADTTDAVRDPQTLEILDITPCSFGGVSVITPGTNTSNQVAVLYQGVNCTEVPVAIHADQLTPTWRVYSTGSNVFQTRAGCLIGAEHVNNSYECDIPIGAGICASYQTQTNSPRRARSVASQSIIAYTMSLGAENSVAYSNNSIAIPTNFTISVTTEILPVSMTKTSVDCTMYICGDSTECSNLLLQYGSFCTQLNRALTGIAVEQDKNTQEVFAQVKQIYKTPPIKDFGGFNFSQILPDPSKPSKRSFIEDLLFNKVTLADAGFIKQYGDCLGDIAARDLICAQKFNGLTVLPPLLTDEMIAQYTSALLAGTITSGWTFGAGAALQIPFAMQMAYRFNGIGVTQNVLYENQKLIANQFNSAIGKIQDSLSSTASALGKLQDVVNQNAQALNTLVKCLSSNFGAISSVLNDILSRLDKVEAEVQIDRLITGRLQCLQTYVTQQLIRAAEIRASANLAATKMSECVLGQSKRVDFCGKGYHLMSFPQSAPHGVVFLHVTYVPAQEKNFTTAPAICHDGKAHFPREGVFVSNGTHWFVTQRNFYEPQIITTDNTFVSGNCDVVIGIVNNTVYDPLQPELDSFKEELDKYFKNHTSPDVDLGDISGINASVVNIQKEIDRLNEVAKNLNESLIDLQELGKYEQYIKGGGGSDIDPYKEFGSSYQLLNFLPLDFFPDLNALVDTATALYEEELTGREHCSPHHTAIRQALVCWDELTKLIAWMSSNITSEQVRTIIVNHVNDTWGLKVRQSLWFHLSCLTFGQHTVQEFLVSFGVWIRTPAPYRPPNAPILSTLPEHTVIC

SEQ ID NO: 7366 - protein, 1365 aa, Artificial Sequence
  SARS-CoV-2/Congo/94/2020__EPI_ISL_417947 spike protein (1-1211)(Q965C_S1003C) WhcAg construct
MFVFLVLLPLVSSQCVNLTTRTQLPPAYTNSFTRGVYYPDKVFRSSVLHSTQDLFLPFFSNVTWFHAIHVSGTNGTKRFDNPVLPFNDGVYFASTEKSNIIRGWIFGTTLDSKTQSLLIVNNATNVVIKVCEFQFCNDPFLGVYYHKNNKSWMESEFRVYSSANNCTFEYVSQPFLMDLEGKQGNFKNLREFVFKNIDGYFKIYSKHTPINLVRDLPQGFSALEPLVDLPIGINITRFQTLLALHRSYLTPGDSSSGWTAGAAAYYVGYLQPRTFLLKYNENGTITDAVDCALDPLSETKCTLKSFTVEKGIYQTSNFRVQPTESIVRFPNITNLCPFGEVFNATRFASVYAWNRKRISNCVADYSVLYNSASFSTFKCYGVSPTKLNDLCFTNVYADSFVIRGDEVRQIAPGQTGKIADYNYKLPDDFTGCVIAWNSNNLDSKVGGNYNYLYRLFRKSNLKPFERDISTEIYQAGSTPCNGVEGFNCYFPLQSYGFQPTNGVGYQPYRVVVLSFELLHAPATVCGPKKSTNLVKNKCVNFNFNGLTGTGVLTESNKKFLPFQQFGRDIADTTDAVRDPQTLEILDITPCSFGGVSVITPGTNTSNQVAVLYQGVNCTEVPVAIHADQLTPTWRVYSTGSNVFQTRAGCLIGAEHVNNSYECDIPIGAGICASYQTQTNSPRRARSVASQSIIAYTMSLGAENSVAYSNNSIAIPTNFTISVTTEILPVSMTKTSVDCTMYICGDSTECSNLLLQYGSFCTQLNRALTGIAVEQDKNTQEVFAQVKQIYKTPPIKDFGGFNFSQILPDPSKPSKRSFIEDILFNKVTLADAGFIKQYGDCLGDIAARDLICAQKFNGLTVLPPLLTDEMIAQYTSALLAGTITSGWTFGAGAALQIPFAMQMAYRFNGIGVTQNVLYENQKLIANQFNSAIGKIQDSLSSTASALGKLQDVVNQNAQALNTLVKCLSSNFGAISSVLNDILSRLDKVEAEVQIDRLITGRLQCLQTYVTQQLIRAAEIRASANLAATKMSECVLGQSKRVDFCGKGYHLMSFPQSAPHGVVFLHVTYVPAQEKNFTTAPAICHDGKAHFPREGVFVSNGTHWFVTQRNFYEPQIITTDNTFVSGNCDVVIGIVNNTVYDPLQPELDSFKEELDKYFKNHTSPDVDLGDISGINASVVNIQKEIDRLNEVAKNLNESLIDLQELGKYEQYIKGGGGSDIDPYKEFGSSYQLLNFLPLDFFPDLNALVDTATALYEEELTGREHCSPHHTAIRQALVCWDELTKLIAWMSSNITSEQVRTIIVNHVNDTWGLKVRQSLWFHLSCLTFGQHTVQEFLVSFGVWIRTPAPYRPPNAPILSTLPEHTVIC

SEQ ID NO: 7367 - protein, 1365 aa, Artificial Sequence
  SARS-CoV-2/Congo/158/2020__EPI_ISL_417950 spike protein (1-1211)(Q965C_S1003C) WhcAg construct
MFVFLVLLPLVSSQCVNLTTRTQLPPAYTNSFTRGVYYPDKVFRSSVLHSTQDLFLPFFSNVTWFHAIHVSGTNGTKRFDNPVLPFNDGVYFASTEKSNIIRGWIFGTTLDSKTQSLLIVNNATNVVIKVCEFQFCNDPFLGVYYHKNNKSWMESEFRVYSSANNCTFEYVSQPFLMDLEGKQGNFKNLREFVFKNIDGYFKIYSKHTPINLVRDLPQGFSALEPLVDLPIGINITRFQTLLALHRSYLTPGDSSSGWTAGAAAYYVGYLQPRTFLLKYNENGTITDAVDCALDPLSETKCTLKSFTVEKGIYQTSNFRVQPTESIVRFPNITNLCPFGEVFNATRFASVYAWNRKRISNCVADYSVLYNSASFSTFKCYGVSPTKLNDLCFTNVYADSFVIRGDEVRQIAPGQTGKIADYNYKLPDDFTGCVIAWNSNNLDSKVGGNYNYLYRLFRKSNLKPFERDISTEIYQAGSTPCNGVEGFNCYFPLQSYGFQPTNGVGYQPYRVVVLSFELLHAPATVCGPKKSTNLVKNKCVNFNFNGLTGTGVLTESNKKFLPFQQFGRDIADTTDAVRDPQTLEILDITPCSFGGVSVITPGTNTSNQVAVLYQDVNCTEVPVAIHADQLTPTWRVYSTGSNVFQTRAGCLIGAEHVNNSYECDIPIGAGICASYQTQTNSPRRARSVASQSIIAYTMSLGAENSVAYSNNSIAIPTNFTISVTTEILPVSMTKTSVDCTMYICGDSTECSNLLLQYGSFCTQLNRALTGIAVEQDKNTQEVFAQVKQIYKTPPIKDFGGFNFSQILPDPSKPSKRSFIEDLLFNKVTLADAGFIKQYGDCLGDIAARDLICAQKFNGLTVLPPLLTDEMIAQYTSALLAGTITSGWTFGAGAALQIPFAMQMAYRFNGIGVTQNVLYENQKLIANQFNSAIGKIQDSLSSTASALGKLQDVVNQNAQALNTLVKCLSSNFGAISSVLNDILSRLDKVEAEVQIDRLITGRLQCLQTYVTQQLIRAAEIRASANLAATKMSECVLGQSKRVDFCGKGYHLMSFPQSAPHGVVFLHVTYVPAQEKNFTTAPAICHDGKAHFPREGVFVSNGTHWFVTQRNFYEPQIITTDNTFLSGNCDVVIGIVNNTVYDPLQPELDSFKEELDKYFKNHTSPDVDLGDISGINASVVNIQKEIDRLNEVAKNLNESLIDLQELGKYEQYIKGGGGSDIDPYKEFGSSYQLLNFLPLDFFPDLNALVDTATALYEEELTGREHCSPHHTAIRQALVCWDELTKLIAWMSSNITSEQVRTIIVNHVNDTWGLKVRQSLWFHLSCLTFGQHTVQEFLVSFGVWIRTPAPYRPPNAPILSTLPEHTVIC

SEQ ID NO: 7368 - protein, 1365 aa, Artificial Sequence
  SARS-CoV-2/USA/UT-00034/2020__EPI_ISL_417977 spike protein (1-1211)(Q965C_S1003C) WhcAg construct
MFVFLVLLPLVSSQCVNLTTRTQLPPAYTNSFTRGVYYPDKVFRSSVLHSTQDLFLPFFSNVTWFHAIHVSGTNGTKRFDNPVLPFNDGVYFASTEKSNIIRGWIFGTTLDSKTQSLLIVNNATNVVIKVCEFQFCNDPFLGVYYYKNNKSWMESEFRVYSSANNCTFEYVSQPFLMDLEGKQGNFKNLREFVFKNIDGYFKIYSKHTPINLVRDLPQGFSALEPLVDLPIGINITRFQTLLALHRSYLTPGDSSSGWTAGAAAYYVGYLQPRTFLLKYNENGTITDAVDCALDPLSETKCTLKSFTVEKGIYQTSNFRVQPTESIVRFPNITNLCPFGEVFNATRFASVYAWNRKRISNCVADYSVLYNSASFSTFKCYGVSPTKLNDLCFTNVYADSFVIRGDEVRQIAPGQTGKIADYNYKLPDDFTGCVIAWNSNNLDSKVGGNYNYLYRLFRKSNLKPFERDISTEIYQAGSTPCNGVEGFNCYFPLQSYGFQPTNGVGYQPYRVVVLSFELLHAPATVCGPKKSTNLVKNKCVNFNFNGLTGTGVLTESNKKFLPFQQFGRDIADTTDAVRDPQTLEILDITPCSFGGVSVITPGTNTSNQVAVLYQGVNCTEVPVAIHADQLTPTWRVYSTGSNVFQTRAGCLIGAEHVNNSYECDIPIGAGICASYQTQTNSPRRARSVASQSIIAYTMSLGAENSVAYSNNSIAIPTNFTISVTTEILPVSMTKTSVDCTMYICGDSTECSNLLLQYGSFCTQLNRALTGIAVEQDKNTQEVFAQVKQIYKTPPIKDFGGFNFSQILPDPSKPSKRSFIEDLLFNKVTLADAGFIKQYGDCLGDIAARDLICAQKFNGLTVLPPLLTDEMIAQYTSALLAGTITSGWTFGAGAALQIPFAMQMAYRFNGIGVTQNVLYENQKLIANQFNSAIGKIQDSLSSTASALGKLQDVVNQNAQALNTLVKCLSSNFGAISSVLNDILSRLDKVEAEVQIDRLITGRLQCLQTYVTQQLIRAAEIRASANLAATKMSECVLGQSKRVDFCGKGYHLMSFPQSAPHGVVFLHVTYVPAQEKNFTTAPAICHDGKAHFPREGVFVSNGTHWFVTQRNFYEPQIITTDNTFVSGNCDVVIGIVNNTVYDPLQPELDSFKEELDKYFKNHTSPDVDLGDISGINASVVNIQKEIDRLNEVAKNLNESLIDLQELGKYEQYIKGGGGSDIDPYKEFGSSYQLLNFLPLDFFPDLNALVDTATALYEEELTGREHCSPHHTAIRQALVCWDELTKLIAWMSSNITSEQVRTIIVNHVNDTWGLKVRQSLWFHLSCLTFGQHTVQEFLVSFGVWIRTPAPYRPPNAPILSTLPEHTVIC

SEQ ID NO: 7369 - protein, 1365 aa, Artificial Sequence
  SARS-CoV-2/USA/UT-00033/2020__EPI_ISL_417976 spike protein (1-1211)(Q965C_S1003C) WhcAg construct
MFVFLVLLPLVSSQCVNLTTRTQLPPAYTNSFTRGVYYPDKVFRSSVLHSTQDLFLPFFSNVTWFHAIHVSGTNGTKRFDNPVLPFNDGVYFASTEKSNIIRGWIFGTTLDSKTQSLLIVNNATNVVIKVCEFQFCNDPFLGVYYHKNNKSWMESEFRVYSSANNCTFEYVSQPFLMDLEGKQGNFKNLREFVFKNIDGYFKIYSKHTPINLVRDLPQGFSALEPLVDLPIGINITRFQTLLALHRSYLTPGDSSSGLTAGAAAYYVGYLQPRTFLLKYNENGTITDAVDCALDPLSETKCTLKSFTVEKGIYQTSNFRVQPTESIVRFPNITNLCPFGEVFNATRFASVYAWNRKRISNCVADYSVLYNSASFSTFKCYGVSPTKLNDLCFTNVYADSFVIRGDEVRQIAPGQTGKIADYNYKLPDDFTGCVIAWNSNNLDSKVGGNYNYLYRLFRKSNLKPFERDISTEIYQAGSTPCNGVEGFNCYFPLQSYGFQPTNGVGYQPYRVVVLSFELLHAPATVCGPKKSTNLVKNKCVNFNFNGLTGTGVLTESNKKFLPFQQFGRDIADTTDAVRDPQTLEILDITPCSFGGVSVITPGTNTSNQVAVLYQGVNCTEVPVAIHADQLTPTWRVYSTGSNVFQTRAGCLIGAEHVNNSYECDIPIGAGICASYQTQTNSPRRARSVASQSIIAYTMSLGAENSVAYSNNSIAIPTNFTISVTTEILPVSMTKTSVDCTMYICGDSTECSNLLLQYGSFCTQLNRALTGIAVEQDKNTQEVFAQVKQIYKTPPIKDFGGFNFSQILPDPSKPSKRSFIEDLLFNKVTLADAGFIKQYGDCLGDIAARDLICAQKFNGLTVLPPLLTDEMIAQYTSALLAGTITSGWTFGAGAALQIPFAMQMAYRFNGIGVTQNVLYENQKLIANQFNSAIGKIQDSLSSTASALGKLQDVVNQNAQALNTLVKCLSSNFGAISSVLNDILSRLDKVEAEVQIDRLITGRLQCLQTYVTQQLIRAAEIRASANLAATKMSECVLGQSKRVDFCGKGYHLMSFPQSAPHGVVFLHVTYVPAQEKNFTTAPAICHDGKAHFPREGVFVSNGTHWFVTQRNFYEPQIITTDNTFVSGNCDVVIGIVNNTVYDPLQPELDSFKEELDKYFKNHTSPDVDLGDISGINASVVNIQKEIDRLNEVAKNLNESLIDLQELGKYEQYIKGGGGSDIDPYKEFGSSYQLLNFLPLDFFPDLNALVDTATALYEEELTGREHCSPHHTAIRQALVCWDELTKLIAWMSSNITSEQVRTIIVNHVNDTWGLKVRQSLWFHLSCLTFGQHTVQEFLVSFGVWIRTPAPYRPPNAPILSTLPEHTVIC

SEQ ID NO: 7370 - protein, 1365 aa, Artificial Sequence
  SARS-CoV-2/USA/WI-13/2020__EPI_ISL_417516 spike protein (1-1211)(Q965C_S1003C) WhcAg construct
MFVFLVLLPLVSSQCVNLTTRTQLPPAYTNSFTRGVYYPDKVFRSSVLHSTQDLFLPFFSNVTWFHAIHVSGTNGTKRFDNPVLPFNDGVYFASTEKSNIIRGWIFGTTLDSKTQSLLIVNNATNVVIKVCEFQFCNDPFLGVYYHKNNKSWMESEFRVYSSANNCTFEYVSQPFLMDLEGKQGNFKNLREFVFKNIDGYFKIYSKHTPINLVRDLPQGFSALEPLVDLPIGINITRFQTLLALHRSYLTPGDSSSGWTAGAAAYYVGYLQPRTFLLKYNENGTITDAVDCALDPLSETKCTLKSFTVEKGIYQTSNFRVLPTESIVRFPNITNLCPFGEVFNATRFASVYAWNRKRISNCVADYSVLYNSASFSTFKCYGVSPTKLNDLCFTNVYADSFVIRGDEVRQIAPGQTGKIADYNYKLPDDFTGCVIAWNSNNLDSKVGGNYNYLYRLFRKSNLKPFERDISTEIYQAGSTPCNGVEGFNCYFPLQSYGFQPTNGVGYQPYRVVVLSFELLHAPATVCGPKKSTNLVKNKCVNFNFNGLTGTGVLTESNKKFLPFQQFGRDIADTTDAVRDPQTLEILDITPCSFGGVSVITPGTNTSNQVAVLYQGVNCTEVPVAIHADQLTPTWRVYSTGSNVFQTRAGCLIGAEHVNNSYECDIPIGAGICASYQTQTNSPRRARSVASQSIIAYTMSLGAENSVAYSNNSIAIPTNFTISVTTEILPVSMTKTSVDCTMYICGDSTECSNLLLQYGSFCTQLNRALTGIAVEQDKNTQEVFAQVKQIYKTPPIKDFGGFNFSQILPDPSKPSKRSFIEDLLFNKVTLADAGFIKQYGDCLGDIAARDLICAQKFNGLTVLPPLLTDEMIAQYTSALLAGTITSGWTFGAGAALQIPFAMQMAYRFNGIGVTQNVLYENQKLIANQFNSAIGKIQDSLSSTASALGKLQDVVNQNAQALNTLVKCLSSNFGAISSVLNDILSRLDKVEAEVQIDRLITGRLQCLQTYVTQQLIRAAEIRASANLAATKMSECVLGQSKRVDFCGKGYHLMSFPQSAPHGVVFLHVTYVPAQEKNFTTAPAICHDGKAHFPREGVFVSNGTHWFVTQRNFYEPQIITTDNTFVSGNCDVVIGIVNNTVYDPLQPELDSFKEELDKYFKNHTSPDVDLGDISGINASVVNIQKEIDRLNEVAKNLNESLIDLQELGKYEQYIKGGGGSDIDPYKEFGSSYQLLNFLPLDFFPDLNALVDTATALYEEELTGREHCSPHHTAIRQALVCWDELTKLIAWMSSNITSEQVRTIIVNHVNDTWGLKVRQSLWFHLSCLTFGQHTVQEFLVSFGVWIRTPAPYRPPNAPILSTLPEHTVIC

SEQ ID NO: 7371 - protein, 1364 aa, Artificial Sequence
  SARS-CoV-2/India/1-27/2020__EPI_ISL_413522 spike protein (1-1210)(Q964C_S1002C) WhcAg construct
MFVFLVLLPLVSSQCVNLTTRTQLPPAYTNSFTRGVYYPDKVFRSSVLHSTQDLFLPFFSNVTWFHAIHVSGTNGTKRFDNPVLPFNDGVYFASTEKSNIIRGWIFGTTLDSKTQSLLIVNNATNVVIKVCEFQFCNDPFLGVYHKNNKSWMESEFRVYSSANNCTFEYVSQPFLMDLEGKQGNFKNLREFVFKNIDGYFKIYSKHTPINLVRDLPQGFSALEPLVDLPIGINITRFQTLLALHRSYLTPGDSSSGWTAGAAAYYVGYLQPRTFLLKYNENGTITDAVDCALDPLSETKCTLKSFTVEKGIYQTSNFRVQPTESIVRFPNITNLCPFGEVFNATRFASVYAWNRKRISNCVADYSVLYNSASFSTFKCYGVSPTKLNDLCFTNVYADSFVIRGDEVIQIAPGQTGKIADYNYKLPDDFTGCVIAWNSNNLDSKVGGNYNYLYRLFRKSNLKPFERDISTEIYQAGSTPCNGVEGFNCYFPLQSYGFQPTNGVGYQPYRVVVLSFELLHAPATVCGPKKSTNLVKNKCVNFNFNGLTGTGVLTESNKKFLPFQQFGRDIADTTDAVRDPQTLEILDITPCSFGGVSVITPGTNTSNQVAVLYQDVNCTEVPVAIHADQLTPTWRVYSTGSNVFQTRAGCLIGAEHVNNSYECDIPIGAGICASYQTQTNSPRRARSVASQSIIAYTMSLGAENSVAYSNNSIAIPTNFTISVTTEILPVSMTKTSVDCTMYICGDSTECSNLLLQYGSFCTQLNRALTGIAVEQDKNTQEVFAQVKQIYKTPPIKDFGGFNFSQILPDPSKPSKRSFIEDLLFNKVTLADAGFIKQYGDCLGDIAARDLICAQKFNGLTVLPPLLTDEMIAQYTSALLAGTITSGWTFGAGAALQIPFAMQMAYRFNGIGVTQNVLYENQKLIANQFNSAIGKIQDSLSSTASALGKLQDVVNQNAQALNTLVKCLSSNFGAISSVLNDILSRLDKVEAEVQIDRLITGRLQCLQTYVTQQLIRAAEIRASANLAATKMSECVLGQSKRVDFCGKGYHLMSFPQSAPHGVVFLHVTYVPAQEKNFTTAPAICHDGKAHFPREGVFVSNGTHWFVTQRNFYEPQIITTDNTFVSGNCDVVIGIVNNTVYDPLQPELDSFKEELDKYFKNHTSPDVDLGDISGINASVVNIQKEIDRLNEVAKNLNESLIDLQELGKYEQYIKGGGGSDIDPYKEFGSSYQLLNFLPLDFFPDLNALVDTATALYEEELTGREHCSPHHTAIRQALVCWDELTKLIAWMSSNITSEQVRTIIVNHVNDTWGLKVRQSLWFHLSCLTFGQHTVQEFLVSFGVWIRTPAPYRPPNAPILSTLPEHTVIC

SEQ ID NO: 7372 - protein, 1359 aa, Artificial Sequence
  SARS-CoV-2/pangolin/Guangxi/P4L/2017__EPI_ISL_410538 spike protein (1-1205)(Q959C_S997C) WhcAg construct
MFVFLFVLPLVSSQCVNLTTRTGIPPGYTNSSTRGVYYPDKVFRSSILHLTQDLFLPFFSNVTWFNTINYQGGFKKFDNPVLPFNDGVYFASTEKSNIIRGWIFGTTLDARTQSLLIVNNATNVVIKVCEFQFCTDPFLGVYYHNNNKTWVENEFRVYSSANNCTFEYISQPFLMDLEGKQGNFKNLREFVFKNVDGYFKIYSKHTPIDLVRDLPRGFAALEPLVDLPIGINITRFQTLLALHRSYLTPGNLESGWTTGAAAYYVGYLQQRTFLLSYNQNGTITDAVDCSLDPLSETKCTLKSLTVEKGIYQTSNFRVQPTISIVRFPNITNLCPFGEVFNASKFASVYAWNRKRISNCVADYSVLYNSTSFSTFKCYGVSPTKLNDLCFTNVYADSFVVKGDEVRQIAPGQTGVIADYNYKLPDDFTGCVIAWNSVKQDALTGGNYGYLYRLFRKSKLKPFERDISTEIYQAGSTPCNGQVGLNCYYPLERYGFHPTTGVNYQPFRVVVLSFELLNGPATVCGPKLSTTLVKDKCVNFNFNGLTGTGVLTTSKKQFLPFQQFGRDISDTTDAVRDPQTLEILDITPCSFGGVSVITPGTNTSNQVAVLYQDVNCTEVPMAIHAEQLTPAWRVYSAGANVFQTRAGCLVGAEHVNNSYECDIPVGAGICASYHSMSSLRSVNQRSIIAYTMSLGAENSVAYSNNSIAIPTNFTISVTTEILPVSMTKTSVDCTMYICGDSIECSNLLLQYGSFCTQLNRALTGIAVEQDKNTQEVFAQVKQIYKTPPIKDFGGFNFSQILPDPSKPSKRSFIEDLLFNKVTLADAGFIKQYGDCLGDIAARDLICAQKFNGLTVLPPLLTDEMIAQYTSALLAGTITSGWTFGAGAALQIPFAMQMAYRFNGIGVTQNVLYENQKLIANQFNSAIGKIQDSLSSTASALGKLQDVVNQNAQALNTLVKCLSSNFGAISSVLNDILSRLDKVEAEVQIDRLITGRLQCLQTYVTQQLIRAAEIRASANLAATKMSECVLGQSKRVDFCGKGYHLMSFPQSAPHGVVFLHVTYVPAQEKNFTTAPAICHEGKAHFPREGVFVSNGTHWFITQRNFYEPQIITTDNTFVSGSCDVVIGIVNNTVYDPLQPELDSFKEELDKYFKNHTSPDVDLGDISGINASVVNIQKEIDRLNEVAKNLNESPIDLQELGKYEQYIKGGGGSDIDPYKEFGSSYQLLNFLPLDFFPDLNALVDTATALYEEELTGREHCSPHHTAIRQALVCWDELTKLIAWMSSNITSEQVRTIIVNHVNDTWGLKVRQSLWFHLSCLTFGQHTVQEFLVSFGVWIRTPAPYRPPNAPILSTLPEHTVIC

SEQ ID NO: 7373 - protein, 1359 aa, Artificial Sequence
  SARS-CoV-2/pangolin/Guangxi/P5L/2017__EPI_ISL_410540 spike protein (1-1205)(Q959C_S997C) WhcAg construct
MFVFLFVLPLVSSQCVNLTTRTGIPPGYTNSSTRGVYYPDKVFRSSILHLTQDLFLPFFSNVTWFNTINYQGGFKKFDNPVLPFNDGVYFASTEKSNIIRGWIFGTTLDARTQSLLIVNNATNVVIKVCEFQFCTDPFLGVYYHNNNKTWVENEFRVYSSANNCTFEYISQPFLMDLEGKQGNFKNLREFVFKNVDGYFKIYSKHTPIDLVRDLPRGFAALEPLVDLPIGINITRFQTLLALHRSYLTPGKLESGWTTGAAAYYVGYLQQRTFLLSYNQNGTITDAVDCSLDPLSETKCTLKSLTVEKGIYQTSNFRVQPTISIVRFPNITNLCPFGEVFNASKFASVYAWNRKRISNCVADYSVLYNSTSFSTFKCYGVSPTKLNDLCFTNVYADSFVVKGDEVRQIAPGQTGVIADYNYKLPDDFTGCVIAWNSVKQDALTGGNYGYLYRLFRKSKLKPFERDISTEIYQAGSTPCNGQVGLNCYYPLERYGFHPTTGVNYQPFRVVVLSFELLNGPATVCGPKLSTTLVKDKCVNFNFNGLTGTGVLTTSKKQFLPFQQFGRDISDTTDAVRDPQTLEILDITPCSFGGVSVITPGTNTSNQVAVLYQDVNCTEVPMAIHAEQLTPAWRVYSAGANVFQTRAGCLVGAEHVNNSYECDIPVGAGICASYHSMSSFRSVNQRSIIAYTMSLGAENSVAYSNNSIAIPTNFTISVTTEILPVSMTKTSVDCTMYICGDSIECSNLLLQYGSFCTQLNRALTGIAVEQDKNTQEVFAQVKQIYKTPPIKDFGGFNFSQILPDPSKPSKRSFIEDLLFNKVTLADAGFIKQYGDCLGDIAARDLICAQKFNGLTVLPPLLTDEMIAQYTSALLAGTITSGWTFGAGAALQIPFAMQMAYRFNGIGVTQNVLYENQKLIANQFNSAIGKIQDSLSSTASALGKLQDVVNQNAQALNTLVKCLSSNFGAISSVLNDILSRLDKVEAEVQIDRLITGRLQCLQTYVTQQLIRAAEIRASANLAATKMSECVLGQSKRVDFCGKGYHLMSFPQSAPHGVVFLHVTYVPAQEKNFTTAPAICHEGKAHFPREGVFVSNGTHWFITQRNFYEPQIITTDNTFVSGSCDVVIGIVNNTVYDPLQPELDSFKEELDKYFKNHTSPDVDLGDISGINASVVNIQKEIDRLNEVAKNLNESLIDLQELGKYEQYIKGGGGSDIDPYKEFGSSYQLLNFLPLDFFPDLNALVDTATALYEEELTGREHCSPHHTAIRQALVCWDELTKLIAWMSSNITSEQVRTIIVNHVNDTWGLKVRQSLWFHLSCLTFGQHTVQEFLVSFGVWIRTPAPYRPPNAPILSTLPEHTVIC

SEQ ID NO: 7374 - protein, 1359 aa, Artificial Sequence
  SARS-CoV-2/pangolin/Guangxi/P5E/2017__EPI_ISL_410541 spike protein (1-1205)(Q959C_S997C) WhcAg construct
MFVFLFVLPLVSSQCVNLTTRTGIPPGYTNSSTRGVYYPDKVFRSSILHLTQDLFLPFFSNVTWFNTITYQGGSKKFDNPVLPFNDGVYFASTEKSNIIRGWIFGTTLDARTQSLLIVNNATNVVIKVCEFQFCTDPFLGVYYHNNNKTWVENEFRVYSSANNCTFEYISQPFLMDLEGKQGNFKNLREFVFKNVDGYFKIYSKHTPIDLVRDLPRGFAALEPLVDLPIGINITRFQTLLALHRSYLTPGKLESGWTTGAAAYYVGYLQQRTFLLSYNQNGTITDAVDCSLDPLSETKCTLKSLTVEKGIYQTSNFRVQPTISIVRFPNITNLCPFGEVFNASKFASVYAWNRKRISNCVADYSVLYNSTSFSTFKCYGVSPTKLNDLCFTNVYADSFVVKGDEVRQIAPGQTGVIADYNYKLPDDFTGCVIAWNSVKQDALTGDNYGYLYRLFRKSKLKPFERDISTEIYQAGSTPCNGQVGLNCYYPLERYGFHPTTGVNYQPFRVVVLSFELLNGPATVCGPKLSTTLVKDKCVNFNFNGLTGTGVLTTSKKQFLPFQQFGRDISDTTDAVRDPQTLEILDITPCSFGGVSVITPGTNTSNQVAVLYQDVNCTEVPMAIHAEQLTPAWRVYSAGANVFQTRAGCLVGAEHVNNSYECDIPVGAGICASYHSMSSFRSVNQRSIIAYTMSLGAENSVAYSNNSIAIPTNFTISVTTEILPVSMTKTSVDCTMYICGDSIECSNLLLQYGSFCTQLNRALTGIAVEQDKNTQEVFAQVKQIYKTPPIKDFGGFNFSQILPDPSKPSKRSFIEDLLFNKVTLADAGFIKQYGDCLGDIAARDLICAQKFNGLTVLPPLLTDEMIAQYTSALLAGTITSGWTFGAGAALQIPFAMQMAYRFNGIGVTQNVLYENQKLIANQFNSAIGKIQDSLSSTASALGKLQDVVNQNAQALNTLVKCLSSNFGAISSVLNDILSRLDKVEAEVQIDRLITGRLQCLQTYVTQQLIRAAEIRASANLAATKMSECVLGQSKRVDFCGKGYHLMSFPQSAPHGVVFLHVTYVPAQEKNFTTAPAICHEGKAHFPREGVFVSNGTHWFITQRNFYEPQIITTDNTFVSGSCDVVIGIVNNTVYDPLQPELDSFKEELDKYFKNHTSPDVDLGDISGINASVVNIQKEIDRLNEVAKNLNESLIDLQELGKYEQYIKGGGGSDIDPYKEFGSSYQLLNFLPLDFFPDLNALVDTATALYEEELTGREHCSPHHTAIRQALVCWDELTKLIAWMSSNITSEQVRTIIVNHVNDTWGLKVRQSLWFHLSCLTFGQHTVQEFLVSFGVWIRTPAPYRPPNAPILSTLPEHTVIC

SEQ ID NO: 7375 - protein, 1357 aa, Artificial Sequence
  SARS-CoV-2/pangolin/Guangxi/P1E/2017__EPI_ISL_410539 spike protein (1-1203)(Q957C_S995C) WhcAg construct
MFVFLFVLPLVSSQCVNLTTRTGIQPGYTNSSTRGVYYPDKVFRSSILHLTQDLFLPFFSNVTWFNTINYQGGFKKFDNPVLPFNDGVYFASTEKSNIIRGWIFGTTLDARTQSLLIVNNATNVVIKVCEFQFCTDPFLGVYYHNNNKTWVENEFRVYSSANNCTFEYISQPFLMDLEGKQGNFKNLREFVFKNVDGYFKIYSKHTPIDLVRDLPRGFAALEPLVDLPIGINITRFQTLLALHRSYLTPGKLESGWTTGAAAYYVGYLQQRTFLLSYNQNGTITDAVDCSLDPLSETKCTLKSLTVEKGIYQTSNFRVQPTISIVRFPNITNLCPFGEVFNASKFASVYAWNRKRISNCVADYSVLYNSTSFSTFKCYGVSPTKLNDLCFTNVYADSFVVKGDEVRQIAPGQTGVIADYNYKLPDDFTGCVIAWNSVKQDALTGGNYLYRLFRKSKLKPFERDISTEIYQAGSTPCNGQVGLNCYYPLERYGFHPTTGVNYQPFRVVVLSFELLNGPATVCGPKLSTTLVKDKCVNFNFNGLTGTGVLTTSKKQFLPFQQFGRDISDTTDAVRDPQTLEILDITPCSFGGVSVITPGTNTSNQVAVLYQDVNCTEVPMAIHAEQLTPAWRVYSAGANVFQTRAGCLVGAEHVNNSYECDIPVGAGICASYHSMSSLRSVNQRSIIAYTMSLGAENSVAYSNNSIAIPTNFTISVTTEILPVSMTKTSVDCTMYICGDSIECSNLLLQYGSFCTQLNRALTGIAVEQDKNTQEVFAQVKQIYKTPPIKDFGGFNFSQILPDPSKPSKRSFIEDLLFNKVTLADAGFIKQYGDCLGDIAARDLICAQKFNGLTVLPPLLTDEMIAQYTSALLAGTITSGWTFGAGAALQIPFAMQMAYRFNGIGVTQNVLYENQKLIANQFNSAIGKIQDSLSSTASALGKLQDVVNQNAQALNTLVKCLSSNFGAISSVLNDILSRLDKVEAEVQIDRLITGRLQCLQTYVTQQLIRAAEIRASANLAATKMSECVLGQSKRVDFCGKGYHLMSFPQSAPHGVVFLHVTYVPAQEKNFTTAPAICHEGKAHFPREGVFVSNGTHWFITQRNFYEPQIITTDNTFVSGSCDVVIGIVNNTVYDPLQPELDSFKEELDKYFKNHTSPDVDLGDISGINASVVNIQKEIDRLNEVAKNLNESLIDLQELGKYEQYIKGGGGSDIDPYKEFGSSYQLLNFLPLDFFPDLNALVDTATALYEEELTGREHCSPHHTAIRQALVCWDELTKLIAWMSSNITSEQVRTIIVNHVNDTWGLKVRQSLWFHLSCLTFGQHTVQEFLVSFGVWIRTPAPYRPPNAPILSTLPEHTVIC

SEQ ID NO: 7376 - protein, 1365 aa, Artificial Sequence
  SARS-CoV-2/Wuhan/WIV05/2019__EPI_ISL_402128 spike protein (1-1211)(F970C_G999C) WhcAg construct
MFVFLVLLPLVSSQCVNLTTRTQLPPAYTNSFTRGVYYPDKVFRSSVLHSTQDLFLPFFSNVTWFHAIHVSGTNGTKRFDNPVLPFNDGVYFASTEKSNIIRGWIFGTTLDSKTQSLLIVNNATNVVIKVCEFQFCNDPFLGVYYHKNNKSWMESEFRVYSSANNCTFEYVSQPFLMDLEGKQGNFKNLREFVFKNIDGYFKIYSKHTPINLVRDLPQGFSALEPLVDLPIGINITRFQTLLALHRSYLTPGDSSSGWTAGAAAYYVGYLQPRTFLLKYNENGTITDAVDCALDPLSETKCTLKSFTVEKGIYQTSNFRVQPTESIVRFPNITNLCPFGEVFNATRFASVYAWNRKRISNCVADYSVLYNSASFSTFKCYGVSPTKLNDLCFTNVYADSFVIRGDEVRQIAPGQTGKIADYNYKLPDDFTGCVIAWNSNNLDSKVGGNYNYLYRLFRKSNLKPFERDISTEIYQAGSTPCNGVEGFNCYFPLQSYGFQPTNGVGYQPYRVVVLSFELLHAPATVCGPKKSTNLVKNKCVNFNFNGLTGTGVLTESNKKFLPFQQFGRDIADTTDAVRDPQTLEILDITPCSFGGVSVITPGTNTSNQVAVLYQDVNCTEVPVAIHADQLTPTWRVYSTGSNVFQTRAGCLIGAEHVNNSYECDIPIGAGICASYQTQTNSPRRARSVASQSIIAYTMSLGAENSVAYSNNSIAIPTNFTISVTTEILPVSMTKTSVDCTMYICGDSTECSNLLLQYGSFCTQLNRALTGIAVEQDKNTQEVFAQVKQIYKTPPIKDFGGFNFSQILPDPSKPSKRSFIEDLLFNKVTLADAGFIKQYGDCLGDIAARDLICAQKFNGLTVLPPLLTDEMIAQYTSALLAGTITSGWTFGAGAALQIPFAMQMAYRFNGIGVTQNVLYENQKLIANQFNSAIGKIQDSLSSTASALGKLQDVVNQNAQALNTLVKQLSSNCGAISSVLNDILSRLDKVEAEVQIDRLITCRLQSLQTYVTQQLIRAAEIRASANLAATKMSECVLGQSKRVDFCGKGYHLMSFPQSAPHGVVFLHVTYVPAQEKNFTTAPAICHDGKAHFPREGVFVSNGTHWFVTQRNFYEPQIITTDNTFVSGNCDVVIGIVNNTVYDPLQPELDSFKEELDKYFKNHTSPDVDLGDISGINASVVNIQKEIDRLNEVAKNLNESLIDLQELGKYEQYIKGGGGSDIDPYKEFGSSYQLLNFLPLDFFPDLNALVDTATALYEEELTGREHCSPHHTAIRQALVCWDELTKLIAWMSSNITSEQVRTIIVNHVNDTWGLKVRQSLWFHLSCLTFGQHTVQEFLVSFGVWIRTPAPYRPPNAPILSTLPEHTVIC

SEQ ID NO: 7377 - protein, 1361 aa, Artificial Sequence
  SARS-CoV-2/bat/Yunnan/RaTG13/2013__EPI_ISL_402131 spike protein (1-1207)(F966C_G995C) WhcAg construct
MFVFLVLLPLVSSQCVNLTTRTQLPPAYTNSSTRGVYYPDKVFRSSVLHLTQDLFLPFFSNVTWFHAIHVSGTNGIKRFDNPVLPFNDGVYFASTEKSNIIRGWIFGTTLDSKTQSLLIVNNATNVVIKVCEFQFCNDPFLGVYYHKNNKSWMESEFRVYSSANNCTFEYVSQPFLMDLEGKQGNFKNLREFVFKNIDGYFKIYSKHTPINLVRDLPPGFSALEPLVDLPIGINITRFQTLLALHRSYLTPGDSSSGWTAGAAAYYVGYLQPRTFLLKYNENGTITDAVDCALDPLSETKCTLKSFTVEKGIYQTSNFRVQPTDSIVRFPNITNLCPFGEVFNATTFASVYAWNRKRISNCVADYSVLYNSTSFSTFKCYGVSPTKLNDLCFTNVYADSFVITGDEVRQIAPGQTGKIADYNYKLPDDFTGCVIAWNSKHIDAKEGGNFNYLYRLFRKANLKPFERDISTEIYQAGSKPCNGQTGLNCYYPLYRYGFYPTDGVGHQPYRVVVLSFELLNAPATVCGPKKSTNLVKNKCVNFNFNGLTGTGVLTESNKKFLPFQQFGRDIADTTDAVRDPQTLEILDITPCSFGGVSVITPGTNASNQVAVLYQDVNCTEVPVAIHADQLTPTWRVYSTGSNVFQTRAGCLIGAEHVNNSYECDIPIGAGICASYQTQTNSRSVASQSIIAYTMSLGAENSVAYSNNSIAIPTNFTISVTTEILPVSMTKTSVDCTMYICGDSTECSNLLLQYGSFCTQLNRALTGIAVEQDKNTQEVFAQVKQIYKTPPIKDFGGFNFSQILPDPSKPSKRSFIEDLLFNKVTLADAGFIKQYGDCLGDIAARDLICAQKFNGLTVLPPLLTDEMIAQYTSALLAGTITSGWTFGAGAALQIPFAMQMAYRFNGIGVTQNVLYENQKLIANQFNSAIGKIQDSLSSTASALGKLQDVVNQNAQALNTLVKQLSSNCGAISSVLNDILSRLDKVEAEVQIDRLITCRLQSLQTYVTQQLIRAAEIRASANLAATKMSECVLGQSKRVDFCGKGYHLMSFPQSAPHGVVFLHVTYVPAQEKNFTTAPAICHDGKAHFPREGVFVSNGTHWFVTQRNFYEPQIITTDNTFVSGSCDVVIGIVNNTVYDPLQPELDSFKEELDKYFKNHTSPDVDLGDISGINASVVNIQKEIDRLNEVAKNLNESLIDLQELGKYEQYIKGGGGSDIDPYKEFGSSYQLLNFLPLDFFPDLNALVDTATALYEEELTGREHCSPHHTAIRQALVCWDELTKLIAWMSSNITSEQVRTIIVNHVNDTWGLKVRQSLWFHLSCLTFGQHTVQEFLVSFGVWIRTPAPYRPPNAPILSTLPEHTVIC

SEQ ID NO: 7378 - protein, 1365 aa, Artificial Sequence
  SARS-CoV-2/Wuhan/HBCDC-HB-01/2019__EPI_ISL_402132 spike protein (1-1211)(F970C_G999C) WhcAg construct
MFVFLVLLPLVSSQCVNLTTRTQLPPAYTNSITRGVYYPDKVFRSSVLHSTQDLFLPFFSNVTWFHAIHVSGTNGTKRFDNPVLPFNDGVYFASTEKSNIIRGWIFGTTLDSKTQSLLIVNNATNVVIKVCEFQFCNDPFLGVYYHKNNKSWMESEFRVYSSANNCTFEYVSQPFLMDLEGKQGNFKNLREFVFKNIDGYFKIYSKHTPINLVRDLPQGFSALEPLVDLPIGINITRFQTLLALHRSYLTPGDSSSGWTAGAAAYYVGYLQPRTFLLKYNENGTITDAVDCALDPLSETKCTLKSFTVEKGIYQTSNFRVQPTESIVRFPNITNLCPFGEVFNATRFASVYAWNRKRISNCVADYSVLYNSASFSTFKCYGVSPTKLNDLCFTNVYADSFVIRGDEVRQIAPGQTGKIADYNYKLPDDFTGCVIAWNSNNLDSKVGGNYNYLYRLFRKSNLKPFERDISTEIYQAGSTPCNGVEGFNCYFPLQSYGFQPTNGVGYQPYRVVVLSFELLHAPATVCGPKKSTNLVKNKCVNFNFNGLTGTGVLTESNKKFLPFQQFGRDIADTTDAVRDPQTLEILDITPCSFGGVSVITPGTNTSNQVAVLYQDVNCTEVPVAIHADQLTPTWRVYSTGSNVFQTRAGCLIGAEHVNNSYECDIPIGAGICASYQTQTNSPRRARSVASQSIIAYTMSLGAENSVAYSNNSIAIPTNFTISVTTEILPVSMTKTSVDCTMYICGDSTECSNLLLQYGSFCTQLNRALTGIAVEQDKNTQEVFAQVKQIYKTPPIKDFGGFNFSQILPDPSKPSKRSFIEDLLFNKVTLADAGFIKQYGDCLGDIAARDLICAQKFNGLTVLPPLLTDEMIAQYTSALLAGTITSGWTFGAGAALQIPFAMQMAYRFNGIGVTQNVLYENQKLIANQFNSAIGKIQDSLSSTASALGKLQDVVNQNAQALNTLVKQLSSNCGAISSVLNDILSRLDKVEAEVQIDRLITCRLQSLQTYVTQQLIRAAEIRASANLAATKMSECVLGQSKRVDFCGKGYHLMSFPQSAPHGVVFLHVTYVPAQEKNFTTAPAICHDGKAHFPREGVFVSNGTHWFVTQRNFYEPQIITTDNTFVSGNCDVVIGIVNNTVYDPLQPELDSFKEELDKYFKNHTSPDVDLGDISGINASVVNIQKEIDRLNEVAKNLNESLIDLQELGKYEQYIKGGGGSDIDPYKEFGSSYQLLNFLPLDFFPDLNALVDTATALYEEELTGREHCSPHHTAIRQALVCWDELTKLIAWMSSNITSEQVRTIIVNHVNDTWGLKVRQSLWFHLSCLTFGQHTVQEFLVSFGVWIRTPAPYRPPNAPILSTLPEHTVIC

SEQ ID NO: 7379 - protein, 1365 aa, Artificial Sequence
  SARS-CoV-2/Guangdong/20SF028/2020__EPI_ISL_403936 spike protein (1-1211)(F970C_G999C) WhcAg construct
MFVFLVLLPLVSSQCVNLTTRTQLPPAYTNSFTRGVYYPDKVFRSSVLYSTQDLFLPFFSNVTWFHAIHVSGTNGTKRFDNPVLPFNDGVYFASTEKSNIIRGWIFGTTLDSKTQSLLIVNNATNVVIKVCEFQFCNDPFLGVYYHKNNKSWMESEFRVYSSANNCTFEYVSQPFLMDLEGKQGNFKNLREFVFKNIDGYFKIYSKHTPINLVRDLPQGFSALEPLVDLPIGINITRFQTLLALHRSYLTPGDSSSGWTAGAAAYYVGYLQPRTFLLKYNENGTITDAVDCALDPLSETKCTLKSFTVEKGIYQTSNFRVQPTESIVRFPNITNLCPFGEVFNATRFASVYAWNRKRISNCVADYSVLYNSASFSTFKCYGVSPTKLNDLCFTNVYADSFVIRGDEVRQIAPGQTGKIADYNYKLPDDFTGCVIAWNSNNLDSKVGGNYNYLYRLFRKSNLKPFERDISTEIYQAGSTPCNGVEGFNCYFPLQSYGFQPTNGVGYQPYRVVVLSFELLHAPATVCGPKKSTNLVKNKCVNFNFNGLTGTGVLTESNKKFLPFQQFGRDIADTTDAVRDPQTLEILDITPCSFGGVSVITPGTNTSNQVAVLYQDVNCTEVPVAIHADQLTPTWRVYSTGSNVFQTRAGCLIGAEHVNNSYECDIPIGAGICASYQTQTNSPRRARSVASQSIIAYTMSLGAENSVAYSNNSIAIPTNFTISVTTEILPVSMTKTSVDCTMYICGDSTECSNLLLQYGSFCTQLNRALTGIAVEQDKNTQEVFAQVKQIYKTPPIKDFGGFNFSQILPDPSKPSKRSFIEDLLFNKVTLADAGFIKQYGDCLGDIAARDLICAQKFNGLTVLPPLLTDEMIAQYTSALLAGTITSGWTFGAGAALQIPFAMQMAYRFNGIGVTQNVLYENQKLIANQFNSAIGKIQDSLSSTASALGKLQDVVNQNAQALNTLVKQLSSNCGAISSVLNDILSRLDKVEAEVQIDRLITCRLQSLQTYVTQQLIRAAEIRASANLAATKMSECVLGQSKRVDFCGKGYHLMSFPQSAPHGVVFLHVTYVPAQEKNFTTAPAICHDGKAHFPREGVFVSNGTHWFVTQRNFYEPQIITTDNTFVSGNCDVVIGIVNNTVYDPLQPELDSFKEELDKYFKNHTSPDVDLGDISGINASVVNIQKEIDRLNEVAKNLNESLIDLQELGKYEQYIKGGGGSDIDPYKEFGSSYQLLNFLPLDFFPDLNALVDTATALYEEELTGREHCSPHHTAIRQALVCWDELTKLIAWMSSNITSEQVRTIIVNHVNDTWGLKVRQSLWFHLSCLTFGQHTVQEFLVSFGVWIRTPAPYRPPNAPILSTLPEHTVIC

SEQ ID NO: 7380 - protein, 1365 aa, Artificial Sequence
  SARS-CoV-2/Shenzhen/SZTH-001/2020__EPI_ISL_406592 spike protein (1-1211)(F970C_G999C) WhcAg construct
MFVFLVLLPLVSSQCVNLTTRTQLPPAYTNSFTRGVYYPDKVFRSSVLHSTQDLFLPFFSNVTWFHAIHVSGTNGTKRFDNPVLPFNDGVYFASTEKSNIIRGWIFGTTLDSKTQSLLIVNNATNVVIKVCEFQFCNDPFLGVYYHKNNKSWMESEFRVYSSANNCTFEYVSQPFLMDLEGKQGNFKNLREFVFKNIDGYFKIYSKHTPINLVRDLPQGFSALEPLVDLPIGINITRFQTLLALHRSYLTPGDSSSGWTAGAAAYYVGYLQPRTFLLKYNENGTITDAVDCALDPLSETKCTLKSFTVEKGIYQTSNFRVQPTESIVRFPNITNLCPFGEVFNATRFASVYAWNRKRISNCVADYSVLYNSASFSTFKCYGVSPTKLNDLCFTNVYADSFVIRGDEVRQIAPGQTGKIADYNYKLPDDFTGCVIAWNSNNLDSKVGGNYNYLYRLFRKSNLKPFERDISTEIYQAGSTPCNGVEGFNCYFPLQSYGFQPTNGVGYQPYRVVVLSFELLHAPATVCGPKKSTNLVKNKCVNFNFNGLTGTGVLTESNKKFLPFQQFGRDIADTTDAVRDPQTLEILDITPCSFGGVSVITPGTNTSNQVAVLYQDVNCTEVPVAIHADQLTPTWRVYSTGSNVFQTRAGCLIGAEHVNNSYECDIPIGAGICASYQTQTNSPRRARSVASQSIIAYTMSLGAENSVAYSNNSIAIPTNFTISVTTEILPVSMTKTSVDCTMYICGDSTECSNLLLQYGSFCTQLNRALTGIAVEQDKNTQEVFAQVKQIYKTPPIKDFGGFNFSQILPDPSKPSKRSFIEDLLFNKVTLADAGFIKQYGDCLGDIAARDLICAQKFNGLTVLPPLLTDEMIAQYTSALLAGTITSGWTFGAGAALQIPFAMQMAYRFNGIGVTQNVLYENQKLIANQFNSAIGKIQDSLSSTASALGKLQDVVNQNAQALNTLVKQLSSNCGAISSVLNDILSRLDKVEAEVQIDRLITCRLQSLQTYVTQQLIRAAEIRASANLAATKMSECVLGQSKRVDFCGKGYHLMSFPQSAPHGVVFLHVTYVPAQEKNFTTAPAICHDGKAHFPREGVFVSNGTHWFVTQRNFYEPQIITTDNTFVSGNCDVLIGIVNNTVYDPLQPELDSFKEELDKYFKNHTSPDVDLGDISGINASVVNIQKEIDRLNEVAKNLNESLIDLQELGKYEQYIKGGGGSDIDPYKEFGSSYQLLNFLPLDFFPDLNALVDTATALYEEELTGREHCSPHHTAIRQALVCWDELTKLIAWMSSNITSEQVRTIIVNHVNDTWGLKVRQSLWFHLSCLTFGQHTVQEFLVSFGVWIRTPAPYRPPNAPILSTLPEHTVIC

SEQ ID NO: 7381 - protein, 1365 aa, Artificial Sequence
  SARS-CoV-2/Shenzhen/SZTH-004/2020__EPI_ISL_406595 spike protein (1-1211)(F970C_G999C) WhcAg construct
MFVFLVLLPLVSSQCVNLTTRTQLPPAYTNSFTRGVYYPDKVFRSSVLHSTQDLFLPFFSNVTWFHAIHVSGTNGTKRFDNPVLPFNDGVYFASTEKSNIIRGWIFGTTLDSKTQSLLIVNNATNVVIKVCEFQFCNDPFLGVYYHKNNKSWMESEFRVYSSANNCTFEYVSQPFLMDLEGKQGNFKNLREFVFKNIDGYFKIYSKHTPINLVRDLPQGFSALEPLVDLPIGINITRFQTLLALHRSYLTPGDSSSGWTAGAAAYYVGYLQPRTFLLKYNENGTITDAVDCALDPLSETKCTLKSFTVEKGIYQTSNFRVQPTESIVRFPNITNLCPFGEVFNATRFASVYAWDRKRISNCVAYYSVLYNSASFSTFKCYGVSPTKLNDLCFTNVYADSFVIRGDEVRQIAPGQTGKIADYNYKLPDDFTGCVIAWNSNNLDSKVGGNYNYLYRLFRKSNLKPFERDISTEIYQAGSTPCNGVEGFNCYFPLQSYGFQPTNGVGYQPYRVVVLSFELLHAPATVCGPKKSTNLVKNKCVNFNFNGLTGTGVLTESNKKFLPFQQFGRDIADTTDAVRDPQTLEILDITPCSFGGVSVITPGTNTSNQVAVLYQDVNCTEVPVAIHADQLTPTWRVYSTGSNVFQTRAGCLIGAEHVNNSYECDIPIGAGICASYQTQTNSPRRARSVASQSIIAYTMSLGAENSVAYSNNSIAIPTNFTISVTTEILPVSMTKTSVDCTMYICGDSTECSNLLLQYGSFCTQLNRALTGIAVEQDKNTQEVFAQVKQIYKTPPIKDFGGFNFSQILPDPSKPSKRSFIEDLLFNKVTLADAGFIKQYGDCLGDIAARDLICAQKFNGLTVLPPLLTDEMIAQYTSALLAGTITSGWTFGAGAALQIPFAMQMAYRFNGIGVTQNVLYENQKLIANQFNSAIGKIQDSLSSTASALGKLQDVVNQNAQALNTLVKQLSSNCGAISSVLNDILSRLDKVEAEVQIDRLITCRLQSLQTYVTQQLIRAAEIRASANLAATKMSECVLGQSKRVDFCGKGYHLMSFPQSAPHGVVFLHVTYVPAQEKNFTTAPAICHDGKAHFPREGVFVSNGTHWFVTQRNFYEPQIITTDNTFVSGNCDVVIGIVNNTVYDPLQPELDSFKEELDKYFKNHTSPDVDLGDISGINASVVNIQKEIDRLNEVAKNLNESLIDLQELGKYEQYIKGGGGSDIDPYKEFGSSYQLLNFLPLDFFPDLNALVDTATALYEEELTGREHCSPHHTAIRQALVCWDELTKLIAWMSSNITSEQVRTIIVNHVNDTWGLKVRQSLWFHLSCLTFGQHTVQEFLVSFGVWIRTPAPYRPPNAPILSTLPEHTVIC

SEQ ID NO: 7382 - protein, 1365 aa, Artificial Sequence
  SARS-CoV-2/France/IDF0372/2020__EPI_ISL_406596 spike protein (1-1211)(F970C_G999C) WhcAg construct
MFVFLVLLPLVSSQCVNLTTRTQLPPAYTNSFTRGVYYPDKVFRSSVLHSTQDLFLPFFSNVTWFHAIHVSGTNGTKRFDNPVLPFNDGVYFASTEKSNIIRGWIFGTTLDSKTQSLLIVNNATNVVIKVCEFQFCNDPFLGVYYHKNNKSWMESEFRVYSSANNCTFEYVSQPFLMDLEGKQGNFKNLREFVFKNIDGYFKIYSKHTPINLVRDLPQGFSALEPLVDLPIGINITRFQTLLALHRSYLTPGDSSSGWTAGAAAYYVGYLQPRTFLLKYNENGTITDAVDCALDPLSETKCTLKSFTVEKGIYQTSNFRVQPTESIVRFPNITNLCPFGEVFNATRFASVYAWNRKRISNCVADYSFLYNSASFSTFKCYGVSPTKLNDLCFTNVYADSFVIRGDEVRQIAPGQTGKIADYNYKLPDDFTGCVIAWNSNNLDSKVGGNYNYLYRLFRKSNLKPFERDISTEIYQAGSTPCNGVEGFNCYFPLQSYGFQPTNGVGYQPYRVVVLSFELLHAPATVCGPKKSTNLVKNKCVNFNFNGLTGTGVLTESNKKFLPFQQFGRDIADTTDAVRDPQTLEILDITPCSFGGVSVITPGTNTSNQVAVLYQDVNCTEVPVAIHADQLTPTWRVYSTGSNVFQTRAGCLIGAEHVNNSYECDIPIGAGICASYQTQTNSPRRARSVASQSIIAYTMSLGAENSVAYSNNSIAIPTNFTISVTTEILPVSMTKTSVDCTMYICGDSTECSNLLLQYGSFCTQLNRALTGIAVEQDKNTQEVFAQVKQIYKTPPIKDFGGFNFSQILPDPSKPSKRSFIEDLLFNKVTLADAGFIKQYGDCLGDIAARDLICAQKFNGLTVLPPLLTDEMIAQYTSALLAGTITSGWTFGAGAALQIPFAMQMAYRFNGIGVTQNVLYENQKLIANQFNSAIGKIQDSLSSTASALGKLQDVVNQNAQALNTLVKQLSSNCGAISSVLNDILSRLDKVEAEVQIDRLITCRLQSLQTYVTQQLIRAAEIRASANLAATKMSECVLGQSKRVDFCGKGYHLMSFPQSAPHGVVFLHVTYVPAQEKNFTTAPAICHDGKAHFPREGVFVSNGTHWFVTQRNFYEPQIITTDNTFVSGNCDVVIGIVNNTVYDPLQPELDSFKEELDKYFKNHTSPDVDLGDISGINASVVNIQKEIDRLNEVAKNLNESLIDLQELGKYEQYIKGGGGSDIDPYKEFGSSYQLLNFLPLDFFPDLNALVDTATALYEEELTGREHCSPHHTAIRQALVCWDELTKLIAWMSSNITSEQVRTIIVNHVNDTWGLKVRQSLWFHLSCLTFGQHTVQEFLVSFGVWIRTPAPYRPPNAPILSTLPEHTVIC

SEQ ID NO: 7383 - protein, 1365 aa, Artificial Sequence
  SARS-CoV-2/Australia/VIC01/2020__EPI_ISL_406844 spike protein (1-1211)(F970C_G999C) WhcAg construct
MFVFLVLLPLVSSQCVNLTTRTQLPPAYTNSFTRGVYYPDKVFRSSVLHSTQDLFLPFFSNVTWFHAIHVSGTNGTKRFDNPVLPFNDGVYFASTEKSNIIRGWIFGTTLDSKTQSLLIVNNATNVVIKVCEFQFCNDPFLGVYYHKNNKSWMESEFRVYSSANNCTFEYVSQPFLMDLEGKQGNFKNLREFVFKNIDGYFKIYSKHTPINLVRDLPQGFSALEPLVDLPIGINITRFQTLLALHRRYLTPGDSSSGWTAGAAAYYVGYLQPRTFLLKYNENGTITDAVDCALDPLSETKCTLKSFTVEKGIYQTSNFRVQPTESIVRFPNITNLCPFGEVFNATRFASVYAWNRKRISNCVADYSVLYNSASFSTFKCYGVSPTKLNDLCFTNVYADSFVIRGDEVRQIAPGQTGKIADYNYKLPDDFTGCVIAWNSNNLDSKVGGNYNYLYRLFRKSNLKPFERDISTEIYQAGSTPCNGVEGFNCYFPLQSYGFQPTNGVGYQPYRVVVLSFELLHAPATVCGPKKSTNLVKNKCVNFNFNGLTGTGVLTESNKKFLPFQQFGRDIADTTDAVRDPQTLEILDITPCSFGGVSVITPGTNTSNQVAVLYQDVNCTEVPVAIHADQLTPTWRVYSTGSNVFQTRAGCLIGAEHVNNSYECDIPIGAGICASYQTQTNSPRRARSVASQSIIAYTMSLGAENSVAYSNNSIAIPTNFTISVTTEILPVSMTKTSVDCTMYICGDSTECSNLLLQYGSFCTQLNRALTGIAVEQDKNTQEVFAQVKQIYKTPPIKDFGGFNFSQILPDPSKPSKRSFIEDLLFNKVTLADAGFIKQYGDCLGDIAARDLICAQKFNGLTVLPPLLTDEMIAQYTSALLAGTITSGWTFGAGAALQIPFAMQMAYRFNGIGVTQNVLYENQKLIANQFNSAIGKIQDSLSSTASALGKLQDVVNQNAQALNTLVKQLSSNCGAISSVLNDILSRLDKVEAEVQIDRLITCRLQSLQTYVTQQLIRAAEIRASANLAATKMSECVLGQSKRVDFCGKGYHLMSFPQSAPHGVVFLHVTYVPAQEKNFTTAPAICHDGKAHFPREGVFVSNGTHWFVTQRNFYEPQIITTDNTFVSGNCDVVIGIVNNTVYDPLQPELDSFKEELDKYFKNHTSPDVDLGDISGINASVVNIQKEIDRLNEVAKNLNESLIDLQELGKYEQYIKGGGGSDIDPYKEFGSSYQLLNFLPLDFFPDLNALVDTATALYEEELTGREHCSPHHTAIRQALVCWDELTKLIAWMSSNITSEQVRTIIVNHVNDTWGLKVRQSLWFHLSCLTFGQHTVQEFLVSFGVWIRTPAPYRPPNAPILSTLPEHTVIC

SEQ ID NO: 7384 - protein, 1365 aa, Artificial Sequence
  SARS-CoV-2/Germany/BavPat1/2020__EPI_ISL_406862 spike protein (1-1211)(F970C_G999C) WhcAg construct
MFVFLVLLPLVSSQCVNLTTRTQLPPAYTNSFTRGVYYPDKVFRSSVLHSTQDLFLPFFSNVTWFHAIHVSGTNGTKRFDNPVLPFNDGVYFASTEKSNIIRGWIFGTTLDSKTQSLLIVNNATNVVIKVCEFQFCNDPFLGVYYHKNNKSWMESEFRVYSSANNCTFEYVSQPFLMDLEGKQGNFKNLREFVFKNIDGYFKIYSKHTPINLVRDLPQGFSALEPLVDLPIGINITRFQTLLALHRSYLTPGDSSSGWTAGAAAYYVGYLQPRTFLLKYNENGTITDAVDCALDPLSETKCTLKSFTVEKGIYQTSNFRVQPTESIVRFPNITNLCPFGEVFNATRFASVYAWNRKRISNCVADYSVLYNSASFSTFKCYGVSPTKLNDLCFTNVYADSFVIRGDEVRQIAPGQTGKIADYNYKLPDDFTGCVIAWNSNNLDSKVGGNYNYLYRLFRKSNLKPFERDISTEIYQAGSTPCNGVEGFNCYFPLQSYGFQPTNGVGYQPYRVVVLSFELLHAPATVCGPKKSTNLVKNKCVNFNFNGLTGTGVLTESNKKFLPFQQFGRDIADTTDAVRDPQTLEILDITPCSFGGVSVITPGTNTSNQVAVLYQGVNCTEVPVAIHADQLTPTWRVYSTGSNVFQTRAGCLIGAEHVNNSYECDIPIGAGICASYQTQTNSPRRARSVASQSIIAYTMSLGAENSVAYSNNSIAIPTNFTISVTTEILPVSMTKTSVDCTMYICGDSTECSNLLLQYGSFCTQLNRALTGIAVEQDKNTQEVFAQVKQIYKTPPIKDFGGFNFSQILPDPSKPSKRSFIEDLLFNKVTLADAGFIKQYGDCLGDIAARDLICAQKFNGLTVLPPLLTDEMIAQYTSALLAGTITSGWTFGAGAALQIPFAMQMAYRFNGIGVTQNVLYENQKLIANQFNSAIGKIQDSLSSTASALGKLQDVVNQNAQALNTLVKQLSSNCGAISSVLNDILSRLDKVEAEVQIDRLITCRLQSLQTYVTQQLIRAAEIRASANLAATKMSECVLGQSKRVDFCGKGYHLMSFPQSAPHGVVFLHVTYVPAQEKNFTTAPAICHDGKAHFPREGVFVSNGTHWFVTQRNFYEPQIITTDNTFVSGNCDVVIGIVNNTVYDPLQPELDSFKEELDKYFKNHTSPDVDLGDISGINASVVNIQKEIDRLNEVAKNLNESLIDLQELGKYEQYIKGGGGSDIDPYKEFGSSYQLLNFLPLDFFPDLNALVDTATALYEEELTGREHCSPHHTAIRQALVCWDELTKLIAWMSSNITSEQVRTIIVNHVNDTWGLKVRQSLWFHLSCLTFGQHTVQEFLVSFGVWIRTPAPYRPPNAPILSTLPEHTVIC

SEQ ID NO: 7385 - protein, 1365 aa, Artificial Sequence
  SARS-CoV-2/Wuhan/HBCDC-HB-02/2020__EPI_ISL_412978 spike protein (1-1211)(F970C_G999C) WhcAg construct
MFVFLVLLPLVSSQCVNLTTRTQLPPAYTNSFTRGVYYPDKVFRSSVLHSTQDLFLPFFSNVTWFHAIHVSGTNGTKRFDNPVLPFNDGVYFASTEKSNIIRGWIFGTTLDSKTQSLLIVNNATNVVIKVCEFQFCNDPFLGVYYHKNNKSWMESEFRVYSSANNCTFEYVSQPFLMDLEGKQGNFKNLREFVFKNIDGYFKIYSKHTPINLVRDLPQGFSALEPLVDLPIGINITRFQTLLALHRSYLTPGDSSSGWTAGAAAYYVGYLQPRTFLLKYNENGTITDAVDCALDPLSETKCTLKSFTVEKGIYQTSNFRVQPTESIVRFPNITNLCPFGEVFNATRFASVYAWNRKRISNCVADYSVLYNSASFSTFKCYGVSPTKLNDLCFTNVYADSFVIRGDEVRQIAPGQTGKIADYNYKLPDDFTGCVIAWNSNNLDSKVGGNYNYLYRLFRKSNLKPFERDISTEIYQAGSTPCNGVEGFNCYFPLQSYGFQPTNGVGYQPYRVVVLSFELLHAPATVCGPKKSTNLVKNKCVNFNFNGLTGTGVLTESNKKFLPFQQFGRDIADTTDAVRDPQTLEILDITPCSFGGVSVITPGTNTSNQVAVLYQDVNCTEVPVAIHADQLTPTWRVYSTGSNVFQTRAGCLIGAEHVNNSYECDIPIGAGICASYQTQTNSPRRARSVASQSIIAYTMSLGAENSVAYSNNSIAIPTNFTISVTTEILPVSMTKTSVDCTMYICGDSTECSNFLLQYGSFCTQLNRALTGIAVEQDKNTQEVFAQVKQIYKTPPIKDFGGFNFSQILPDPSKPSKRSFIEDLLFNKVTLADAGFIKQYGDCLGDIAARDLICAQKFNGLTVLPPLLTDEMIAQYTSALLAGTITSGWTFGAGAALQIPFAMQMAYRFNGIGVTQNVLYENQKLIANQFNSAIGKIQDSLSSTASALGKLQDVVNQNAQALNTLVKQLSSNCGAISSVLNDILSRLDKVEAEVQIDRLITCRLQSLQTYVTQQLIRAAEIRASANLAATKMSECVLGQSKRVDFCGKGYHLMSFPQSAPHGVVFLHVTYVPAQEKNFTTAPAICHDGKAHFPREGVFVSNGTHWFVTQRNFYEPQIITTDNTFVSGNCDVVIGIVNNTVYDPLQPELDSFKEELDKYFKNHTSPDVDLGDISGINASVVNIQKEIDRLNEVAKNLNESLIDLQELGKYEQYIKGGGGSDIDPYKEFGSSYQLLNFLPLDFFPDLNALVDTATALYEEELTGREHCSPHHTAIRQALVCWDELTKLIAWMSSNITSEQVRTIIVNHVNDTWGLKVRQSLWFHLSCLTFGQHTVQEFLVSFGVWIRTPAPYRPPNAPILSTLPEHTVIC

SEQ ID NO: 7386 - protein, 1365 aa, Artificial Sequence
  SARS-CoV-2/Australia/QLD02/2020__EPI_ISL_407896 spike protein (1-1211)(F970C_G999C) WhcAg construct
MFVFLVLLPLVSSQCVNLTTRTQLPPAYTNSFTRGVYYPDKVFRSSVLHSTQDLFLPFFSNVTWFHAIHVSGTNGTKRFDNPVLPFNDGVYFASTEKSNIIRGWIFGTTLDSKTQSLLIVNNATNVVIKVCEFQFCNDPFLGVYYHKNNKSWMESEFRVYSSANNCTFEYVSQPFLMDLEGKQGNFKNLREFVFKNIDGYFKIYSKHTPINLVRDLPQGFSALEPLVDLPIGINITRFQTLLALHRSYLTPGDSSSGWTAGAAAYYVGYLQPRTFLLKYNENGTITDAVDCALDPLSETKCTLKSFTVEKGIYQTSNFRVQPTESIVRFPNITNLCPFGEVFNATRFASVYAWNRKRISNCVADYSVLYNSASFSTFKCYGVSPTKLNDLCFTNVYADSFVIRGDEVRQIAPGQTGKIADYNYKLPDDFTGCVIAWNSNNLDSKVGGNYNYLYRLFRKSNLKPFERDISTEIYQAGSTPCNGVEGFNCYFPLQSYGFQPTNGVGYQPYRVVVLSFELLHAPATVCGPKKSTNLVKNKCVNFNFNGLTGTGVLTESNKKFLPFQQFGRDIADTTDAVRDPQTLEILDITPCSFGGVSVITPGTNTSNQVAVLYQDVNCTEVPVAIHADQLTPTWRVYSTGSNVFQTRAGCLIGAEHVNNSYECDIPIGAGICASYQTQTNSPRRARSVASQSIIAYTMSLGAENSVAYSNNSIAIPTNFTISVTTEILPVSMTKTSVDCTMYICGDSTECSNLLLQYGSFCTQLNRALTGIAVEQDKNTQEVFAQVKQIYKTPPIKDFGGFNFSQILPDPSKPSKRSFIEDLLFNKVTLADAGFIKQYGDCLGDIAARDLICAQKFNGLTVLPPLLTDEMIAQYTSALLAGTITSGWTFGAGAALQIPFAMQMAYRFNGIGVTQNVLYENQKLIANQFNSAIGKIQDSLSSTASALGKLQDVVNQNAQALNTLVKQLSSNCGAISSVLNDILSRLDKVEAEVQIDRLITCRLQSLQTYVTQQLIRAAEIRASANLAATKMSECVLGQSKRVDFCGKGYHLMSFPQSAPHGVVFLHVTYVPAQEKNFTTAPAICHDGKAHFPREGVFVSNGTHWFVTQRNFYEPQIITTDNTFVSGNCDVVIGIVNNTVYDPLQLELDSFKEELDKYFKNHTSPDVDLGDISGINASVVNIQKEIDRLNEVAKNLNESLIDLQELGKYEQYIKGGGGSDIDPYKEFGSSYQLLNFLPLDFFPDLNALVDTATALYEEELTGREHCSPHHTAIRQALVCWDELTKLIAWMSSNITSEQVRTIIVNHVNDTWGLKVRQSLWFHLSCLTFGQHTVQEFLVSFGVWIRTPAPYRPPNAPILSTLPEHTVIC

SEQ ID NO: 7387 - protein, 1365 aa, Artificial Sequence
  SARS-CoV-2/India/1-31/2020__EPI_ISL_413523 spike protein (1-1211)(F970C_G999C) WhcAg construct
MFVFLVLLPLVSSQCVNLTTRTQLPPAYTNSFTRGVYYPDKVFRSSVLHSTQDLFLPFFSNVTWFHAIHVSGTNGTKRFDNPVLPFNDGVYFASTEKSNIIRGWIFGTTLDSKTQSLLIVNNATNVVIKVCEFQFCNDPFLGVYYHKNNKSWMESEFRVYSSANNCTFEYVSQPFLMDLEGKQGNFKNLREFVFKNIDGYFKIYSKHTPINLVRDLPQGFSALEPLVDLPIGINITRFQTLLALHRSYLTPGDSSSGWTAGAAAYYVGYLQPRTFLLKYNENGTITDAVDCALDPLSETKCTLKSFTVEKGIYQTSNFRVQPTESIVRFPNITNLCPFGEVFNATRFASVYAWNRKRISNCVADYSVLYNSASFSTFKCYGVSPTKLNDLCFTNVYADSFVIRGDEVRQIAPGQTGKIADYNYKLPDDFTGCVIAWNSNNLDSKVGGNYNYLYRLFRKSNLKPFERDISTEIYQAGSTPCNGVEGFNCYFPLQSYGFQPTNGVGYQPYRVVVLSFELLHAPATVCGPKKSTNLVKNKCVNFNFNGLTGTGVLTESNKKFLPFQQFGRDIADTTDAVRDPQTLEILDITPCSFGGVSVITPGTNTSNQVAVLYQDVNCTEVPVAIHADQLTPTWRVYSTGSNVFQTRAGCLIGAEHVNNSYECDIPIGAGICASYQTQTNSPRRARSVASQSIIAYTMSLGAENSVAYSNNSIAIPTNFTISVTTEILPVSMTKTSVDCTMYICGDSTECSNLLLQYGSFCTQLNRALTGIAVEQDKNTQEVFAQVKQIYKTPPIKDFGGFNFSQILPDPSKPSKRSFIEDLLFNKVTLADAGFIKQYGDCLGDIAARDLICAQKFNGLTVLPPLLTDEMIAQYTSALLAGTITSGWTFGAGAALQIPFAMQMAYRFNGIGVTQNVLYENQKLIANQFNSVIGKIQDSLSSTASALGKLQDVVNQNAQALNTLVKQLSSNCGAISSVLNDILSRLDKVEAEVQIDRLITCRLQSLQTYVTQQLIRAAEIRASANLAATKMSECVLGQSKRVDFCGKGYHLMSFPQSAPHGVVFLHVTYVPAQEKNFTTAPAICHDGKAHFPREGVFVSNGTHWFVTQRNFYEPQIITTDNTFVSGNCDVVIGIVNNTVYDPLQPELDSFKEELDKYFKNHTSPDVDLGDISGINASVVNIQKEIDRLNEVAKNLNESLIDLQELGKYEQYIKGGGGSDIDPYKEFGSSYQLLNFLPLDFFPDLNALVDTATALYEEELTGREHCSPHHTAIRQALVCWDELTKLIAWMSSNITSEQVRTIIVNHVNDTWGLKVRQSLWFHLSCLTFGQHTVQEFLVSFGVWIRTPAPYRPPNAPILSTLPEHTVIC

SEQ ID NO: 7388 - protein, 1365 aa, Artificial Sequence
  SARS-CoV-2/Guangdong/GD2020087-P0008/2020__EPI_ISL_413863 spike protein (1-1211)(F970C_G999C) WhcAg construct
MFVFLVLLPLVSSQCVNLTTRTQLPPAYTNSFTRGVYYPDKVFRSSVLHSTQDLFLPFFSNVTWFHAIHVSGTNGTKRFDNPVLPFNDGVYFASTEKSNIIRGWIFGTTLDSKTQSLLIVNNATNVVIKVCEFQFCNDPFLGVYYHKNNKSWMESEFRVYSSANNCTFEYVSQPFLMDLEGKQGNFKNLREFVFKNIDGYFKIYSKHTPINLVRDLPQGFSALEPLVDLPIGINITRFQTLLALHRSYLTPGDSSSGWTAGAAAYYVGYLQPRTFLLKYNENGTITDAVDCALDPLSETKCTLKSFTVEKGIYQTSNFRVQPTESIVRFPNITNLCPFGEVFNATRFASVYAWNRKRISNCVADYSVLYNSASFSTFKCYGVSPTKLNDLCFTNVYADSFVIRGDEVREIAPGQTGKIADYNYKLPDDFTGCVIAWNSNNLDSKVGGNYNYLYRLFRKSNLKPFERDISTEIYQAGSTPCNGVEGFNCYFPLQSYGFQPTNGVGYQPYRVVVLSFELLHAPATVCGPKKSTNLVKNKCVNFNFNGLTGTGVLTESNKKFLPFQQFGRDIADTTDAVRDPQTLEILDITPCSFGGVSVITPGTNTSNQVAVLYQDVNCTEVPVAIHADQLTPTWRVYSTGSNVFQTRAGCLIGAEHVNNSYECDIPIGAGICASYQTQTNSPRRARSVASQSIIAYTMSLGAENSVAYSNNSIAIPTNFTISVTTEILPVSMTKTSVDCTMYICGDSTECSNLLLQYGSFCTQLNRALTGIAVEQDKNTQEVFAQVKQIYKTPPIKDFGGFNFSQILPDPSKPSKRSFIEDLLFNKVTLADAGFIKQYGDCLGDIAARDLICAQKFNGLTVLPPLLTDEMIAQYTSALLAGTITSGWTFGAGAALQIPFAMQMAYRFNGIGVTQNVLYENQKLIANQFNSAIGKIQDSLSSTASALGKLQDVVNQNAQALNTLVKQLSSNCGAISSVLNDILSRLDKVEAEVQIDRLITCRLQSLQTYVTQQLIRAAEIRASANLAATKMSECVLGQSKRVDFCGKGYHLMSFPQSAPHGVVFLHVTYVPAQEKNFTTAPAICHDGKAHFPREGVFVSNGTHWFVTQRNFYEPQIITTDNTFVSGNCDVVIGIVNNTVYDPLQPELDSFKEELDKYFKNHTSPDVDLGDISGINASVVNIQKEIDRLNEVAKNLNESLIDLQELGKYEQYIKGGGGSDIDPYKEFGSSYQLLNFLPLDFFPDLNALVDTATALYEEELTGREHCSPHHTAIRQALVCWDELTKLIAWMSSNITSEQVRTIIVNHVNDTWGLKVRQSLWFHLSCLTFGQHTVQEFLVSFGVWIRTPAPYRPPNAPILSTLPEHTVIC

SEQ ID NO: 7389 - protein, 1365 aa, Artificial Sequence
  SARS-CoV-2/Sweden/01/2020__EPI_ISL_411951 spike protein (1-1211)(F970C_G999C) WhcAg construct
MFVFLVLLPLVSSQCVNLTTRTQLPPAYTNSFTRGVYYPDKVFRSSVLHSTQDLFLPFFSNVTWFHAIHVSGTNGTKRFDNPVLPFNDGVYFASTEKSNIIRGWIFGTTLDSKTQSLLIVNNATNVVIKVCEFQFCNDPFLGVYYHKNNKSWMESEFRVYSSANNCTFEYVSQPFLMDLEGKQGNFKNLREFVFKNIDGYFKIYSKHTPINLVRDLPQGFSALEPLVDLPIGINITRFQTLLALHRSYLTPGDSSSGWTAGAAAYYVGYLQPRTFLLKYNENGTITDAVDCALDPLSETKCTLKSFTVEKGIYQTSNFRVQPTESIVRFPNITNLCPFGEVFNATRFASVYAWNRKRISNCVADYSVLYNSASFSTFKCYGVSPTKLNDLCFTNVYADSFVIRGDEVRQIAPGQTGKIADYNYKLPDDFTGCVIAWNSNNLDSKVGGNYNYLYRLFRKSNLKPFERDISTEIYQAGSTPCNGVEGFNCYFPLQSYGFQPTNGVGYQPYRVVVLSFELLHAPATVCGPKKSTNLVKNKCVNFNFNGLTGTGVLTESNKKFLPFQQFGRDIADTTDAVRDPQTLEILDITPCSFGGVSVITPGTNTSNQVAVLYQDVNCTEVPVAIHADQLTPTWRVYSTGSNVFQTRAGCLIGAEHVNNSYECDIPIGAGICASYQTQTNSPRRARSVASQSIIAYTMSLGAENSVAYSNNSIAIPTNFTISVTTEILPVSMTKTSVDCTMYICGDSTECSNLLLQYGSFCTQLNRALTGIAVEQDKNTQEVFAQVKQIYKTPPIKDCGGFNFSQILPDPSKPSKRSFIEDLLFNKVTLADAGFIKQYGDCLGDIAARDLICAQKFNGLTVLPPLLTDEMIAQYTSALLAGTITSGWTFGAGAALQIPFAMQMAYRFNGIGVTQNVLYENQKLIANQFNSAIGKIQDSLSSTASALGKLQDVVNQNAQALNTLVKQLSSNCGAISSVLNDILSRLDKVEAEVQIDRLITCRLQSLQTYVTQQLIRAAEIRASANLAATKMSECVLGQSKRVDFCGKGYHLMSFPQSAPHGVVFLHVTYVPAQEKNFTTAPAICHDGKAHFPREGVFVSNGTHWFVTQRNFYEPQIITTDNTFVSGNCDVVIGIVNNTVYDPLQPELDSFKEELDKYFKNHTSPDVDLGDISGINASVVNIQKEIDRLNEVAKNLNESLIDLQELGKYEQYIKGGGGSDIDPYKEFGSSYQLLNFLPLDFFPDLNALVDTATALYEEELTGREHCSPHHTAIRQALVCWDELTKLIAWMSSNITSEQVRTIIVNHVNDTWGLKVRQSLWFHLSCLTFGQHTVQEFLVSFGVWIRTPAPYRPPNAPILSTLPEHTVIC

SEQ ID NO: 7390 - protein, 1365 aa, Artificial Sequence
  SARS-CoV-2/Tianmen/HBCDC-HB-07/2020__EPI_ISL_412983 spike protein (1-1211)(F970C_G999C) WhcAg construct
MFVFLVLLPLVSSQCVNLTTRTQLPPAYTNSFTRGVYYPDKVFRSSVLHSTQDLFLPFFSNVTWFHAIHVSGTNGTKRFDNPVLPFNDGVYFASTEKSNIIRGWIFGTTLDSKTQSLLIVNNATNVVIKVCEFQFCNDPFLGVYYHKNNKSWMESEFRVYSSANNCTFEYVSQPFLMDLEGKQGNFKNLREFVFKNIDGYFKIYSKHTPINLVRDLPQGFSALEPLVDLPIGINITRFQTLLALHRSYLTPGDSSSGWTAGAAAYYVGYLQPRTFLLKYNENGTITDAVDCALDPLSETKCTLKSFTVEKGIYQTSNFRVQPTESIVRFPNITNLCPFGEVFNATRFASVYAWNRKRISNCVADYSVLYNSASFSTFKCYGVSPTKLNDLCFTNVYADSFVIRGDEVRQIAPGQTGKIADYNYKLPDDFTGCVIAWNSNNLDSKVGGNYNYLYRLFRKSNLKPFERDISTEIYQAGSTPCNGVEGFNCYFPLQSYGFQPTNGVGYQPYRVVVLSFELLHAPATVCGPKKSTNLVKNKCVNFNFNGLTGTGVLTESNKKFLPFQQFGRDIADTTDAVRDPQTLEILDITPCSFGGVSVITPGTNTSNQVAVLYQDLNCTEVPVAIHADQLTPTWRVYSTGSNVFQTRAGCLIGAEHVNNSYECDIPIGAGICASYQTQTNSPRRARSVASQSIIAYTMSLGAENSVAYSNNSIAIPTNFTISVTTEILPVSMTKTSVDCTMYICGDSTECSNLLLQYGSFCTQLNRALTGIAVEQDKNTQEVFAQVKQIYKTPPIKDFGGFNFSQILPDPSKPSKRSFIEDLLFNKVTLADAGFIKQYGDCLGDIAARDLICAQKFNGLTVLPPLLTDEMIAQYTSALLAGTITSGWTFGAGAALQIPFAMQMAYRFNGIGVTQNVLYENQKLIANQFNSAIGKIQDSLSSTASALGKLQDVVNQNAQALNTLVKQLSSNCGAISSVLNDILSRLDKVEAEVQIDRLITCRLQSLQTYVTQQLIRAAEIRASANLAATKMSECVLGQSKRVDFCGKGYHLMSFPQSAPHGVVFLHVTYVPAQEKNFTTAPAICHDGKAHFPREGVFVSNGTHWFVTQRNFYEPQIITTDNTFVSGNCDVVIGIVNNTVYDPLQPELDSFKEELDKYFKNHTSPDVDLGDISGINASVVNIQKEIDRLNEVAKNLNESLIDLQELGKYEQYIKGGGGSDIDPYKEFGSSYQLLNFLPLDFFPDLNALVDTATALYEEELTGREHCSPHHTAIRQALVCWDELTKLIAWMSSNITSEQVRTIIVNHVNDTWGLKVRQSLWFHLSCLTFGQHTVQEFLVSFGVWIRTPAPYRPPNAPILSTLPEHTVIC

SEQ ID NO: 7391 - protein, 1365 aa, Artificial Sequence
  SARS-CoV-2/Hong Kong/case42_VM20002493/2020__EPI_ISL_414527 spike protein (1-1211)(F970C_G999C) WhcAg construct
MFVFLVLLPLVSSQCVNLTTRTQLPPAYTNSFTRGVYYPDKVFRSSVLHSTQDLFLPFFSNVTWFHAIHVSGTNGTKRFDNPVLPFNDGVYFASTEKSNIIRGWIFGTTLDSKTQSLLIVNNATNVVIKVCEFQFCNDPFLGVYYHKNNKSWMESEFRVYSSANNCTFEYVSQPFLMDLEGKQGNFKNLREFVFKNIDGYFKIYSKHTPINLVRDLPQGFSALEPLVDLPIGINITRFQTLLALHRSYLTPGDSSSGWTAGAAAYYVGYLQPRTFLLKYNENGTITDAVDCALDPLSETKCTLKSFTVEKGIYQTSNFRVQPTESIVRFPNITNLCPFGEVFNATRFASVYAWNRKRISNCVADYSVLYNSASFSTFKCYGVSPTKLNDLCFTNVYADSFVIRGDEVRQIAPGQTGKIADYNYKLPDDFTGCVIAWNSNNLDSKVGGNYNYLYRLFRKSNLKPFERDISTEIYQAGSTPCNGVEGFNCYFPLQSYGFQPTNGVGYQPYRVVVLSFELLHAPATVCGPKKSTNLVKNKCVNFNFNGLTGTGVLTESNKKFLPFQQFGRDIADTTDAVRDPQTLEILDITPCSFGGVSVITPGTNTSNQVAVLYQDVNCTEVPVAIHADQLTPTWRVYSTGSNVFQTRAGCLIGAEHVNNSYECDIPIGAGICASYQTQTNSPRRARSVASQSIIAYTMSLGAENSVAYSNNSIAIPTNFAISVTTEILPVSMTKTSVDCTMYICGDSTECSNLLLQYGSFCTQLNRALTGIAVEQDKNTQEVFAQVKQIYKTPPIKDFGGFNFSQILPDPSKPSKRSFIEDLLFNKVTLADAGFIKQYGDCLGDIAARDLICAQKFNGLTVLPPLLTDEMIAQYTSALLAGTITSGWTFGAGAALQIPFAMQMAYRFNGIGVTQNVLYENQKLIANQFNSAIGKIQDSLSSTASALGKLQDVVNQNAQALNTLVKQLSSNCGAISSVLNDILSRLDKVEAEVQIDRLITCRLQSLQTYVTQQLIRAAEIRASANLAATKMSECVLGQSKRVDFCGKGYHLMSFPQSAPHGVVFLHVTYVPAQEKNFTTAPAICHDGKAHFPREGVFVSNGTHWFVTQRNFYEPQIITTDNTFVSGNCDVVIGIVNNTVYDPLQPELDSFKEELDKYFKNHTSPDVDLGDISGINASVVNIQKEIDRLNEVAKNLNESLIDLQELGKYEQYIKGGGGSDIDPYKEFGSSYQLLNFLPLDFFPDLNALVDTATALYEEELTGREHCSPHHTAIRQALVCWDELTKLIAWMSSNITSEQVRTIIVNHVNDTWGLKVRQSLWFHLSCLTFGQHTVQEFLVSFGVWIRTPAPYRPPNAPILSTLPEHTVIC

SEQ ID NO: 7392 - protein, 1365 aa, Artificial Sequence
  SARS-CoV-2/USA/CruiseA-23/2020__EPI_ISL_414482 spike protein (1-1211)(F970C_G999C) WhcAg construct
MFVFLVLLPLVSSQCVNLTTRTQLPPAYTNSFTRGVYYPDKVFRSSVLHSTQDLFLPFFSNVTWFHAIHVSGTNGTKRFDNPVLPFNDGVYFASTEKSNIIRGWIFGTTLDSKTQSLLIVNNATNVVIKVCEFQFCNDPFLGVYYHKNNKSWMESEFRVYSSANNCTFEYVSQPFLMDLEVKQGNFKNLREFVFKNIDGYFKIYSKHTPINLVRDLPQGFSALEPLVDLPIGINITRFQTLLALHRSYLTPGDSSSGWTAGAAAYYVGYLQPRTFLLKYNENGTITDAVDCALDPLSETKCTLKSFTVEKGIYQTSNFRVQPTESIVRFPNITNLCPFGEVFNATRFASVYAWNRKRISNCVADYSVLYNSASFSTFKCYGVSPTKLNDLCFTNVYADSFVIRGDEVRQIAPGQTGKIADYNYKLPDDFTGCVIAWNSNNLDSKVGGNYNYLYRLFRKSNLKPFERDISTEIYQAGSTPCNGVEGFNCYFPLQSYGFQPTNGVGYQPYRVVVLSFELLHAPATVCGPKKSTNLVKNKCVNFNFNGLTGTGVLTESNKKFLPFQQFGRDIADTTDAVRDPQTLEILDITPCSFGGVSVITPGTNTSNQVAVLYQDVNCTEVPVAIHADQLTPTWRVYSTGSNVFQTRAGCLIGAEHVNNSYECDIPIGAGICASYQTQTNSPRRARSVASQSIIAYTMSLGAENSVAYSNNSIAIPTNFTISVTTEILPVSMTKTSVDCTMYICGDSTECSNLLLQYGSFCTQLNRALTGIAVEQDKNTQEVFAQVKQIYKTPPIKDFGGFNFSQILPDPSKPSKRSFIEDLLFNKVTLADAGFIKQYGDCLGDIAARDLICAQKFNGLTVLPPLLTDEMIAQYTSALLAGTITSGWTFGAGAALQIPFAMQMAYRFNGIGVTQNVLYENQKLIANQFNSAIGKIQDSLSSTASALGKLQDVVNQNAQALNTLVKQLSSNCGAISSVLNDILSRLDKVEAEVQIDRLITCRLQSLQTYVTQQLIRAAEIRASANLAATKMSECVLGQSKRVDFCGKGYHLMSFPQSAPHGVVFLHVTYVPAQEKNFTTAPAICHDGKAHFPREGVFVSNGTHWFVTQRNFYEPQIITTDNTFVSGNCDVVIGIVNNTVYDPLQPELDSFKEELDKYFKNHTSPDVDLGDISGINASVVNIQKEIDRLNEVAKNLNESLIDLQELGKYEQYIKGGGGSDIDPYKEFGSSYQLLNFLPLDFFPDLNALVDTATALYEEELTGREHCSPHHTAIRQALVCWDELTKLIAWMSSNITSEQVRTIIVNHVNDTWGLKVRQSLWFHLSCLTFGQHTVQEFLVSFGVWIRTPAPYRPPNAPILSTLPEHTVIC

SEQ ID NO: 7393 - protein, 1365 aa, Artificial Sequence
  SARS-CoV-2/Hong Kong/case85_VM20002868/2020__EPI_ISL_414519 spike protein (1-1211)(F970C_G999C) WhcAg construct
MFVFLVLVPLVSSQCVNLTTRTQLPPAYTNSFTRGVYYPDKVFRSSVLHSTQDLFLPFFSNVTWFHAIHVSGTNGTKRFDNPVLPFNDGVYFASTEKSNIIRGWIFGTTLDSKTQSLLIVNNATNVVIKVCEFQFCNDPFLGVYYHKNNKSWMESEFRVYSSANNCTFEYVSQPFLMDLEGKQGNFKNLREFVFKNIDGYFKIYSKHTPINLVRDLPQGFSALEPLVDLPIGINITRFQTLLALHRSYLTPGDSSSGWTAGAAAYYVGYLQPRTFLLKYNENGTITDAVDCALDPLSETKCTLKSFTVEKGIYQTSNFRVQPTESIVRFPNITNLCPFGEVFNATRFASVYAWNRKRISNCVADYSVLYNSASFSTFKCYGVSPTKLNDLCFTNVYADSFVIRGDEVRQIAPGQTGKIADYNYKLPDDFTGCVIAWNSNNLDSKVGGNYNYLYRLFRKSNLKPFERDISTEIYQAGSTPCNGVEGFNCYFPLQSYGFQPTNGVGYQPYRVVVLSFELLHAPATVCGPKKSTNLVKNKCVNFNFNGLTGTGVLTESNKKFLPFQQFGRDIADTTDAVRDPQTLEILDITPCSFGGVSVITPGTNTSNQVAVLYQDVNCTEVPVAIHADQLTPTWRVYSTGSNVFQTRAGCLIGAEHVNNSYECDIPIGAGICASYQTQTNSPRRARSVASQSIIAYTMSLGAENSVAYSNNSIAIPTNFTISVTTEILPVSMTKTSVDCTMYICGDSTECSNLLLQYGSFCTQLNRALTGIAVEQDKNTQEVFAQVKQIYKTPPIKDFGGFNFSQILPDPSKPSKRSFIEDLLFNKVTLADAGFIKQYGDCLGDIAARDLICAQKFNGLTVLPPLLTDEMIAQYTSALLAGTITSGWTFGAGAALQIPFAMQMAYRFNGIGVTQNVLYENQKLIANQFNSAIGKIQDSLSSTASALGKLQDVVNQNAQALNTLVKQLSSNCGAISSVLNDILSRLDKVEAEVQIDRLITCRLQSLQTYVTQQLIRAAEIRASANLAATKMSECVLGQSKRVDFCGKGYHLMSFPQSAPHGVVFLHVTYVPAQEKNFTTAPAICHDGKAHFPREGVFVSNGTHWFVTQRNFYEPQIITTDNTFVSGNCDVVIGIVNNTVYDPLQPELDSFKEELDKYFKNHTSPDVDLGDISGINASVVNIQKEIDRLNEVAKNLNESLIDLQELGKYEQYIKGGGGSDIDPYKEFGSSYQLLNFLPLDFFPDLNALVDTATALYEEELTGREHCSPHHTAIRQALVCWDELTKLIAWMSSNITSEQVRTIIVNHVNDTWGLKVRQSLWFHLSCLTFGQHTVQEFLVSFGVWIRTPAPYRPPNAPILSTLPEHTVIC

SEQ ID NO: 7394 - protein, 1365 aa, Artificial Sequence; identical to SEQ ID NO: 7384
  SARS-CoV-2/England/200990660/2020__EPI_ISL_414523 spike protein (1-1211)(F970C_G999C) WhcAg construct

SEQ ID NO: 7395 - protein, 1365 aa, Artificial Sequence
  SARS-CoV-2/Australia/NSW09/2020__EPI_ISL_413595 spike protein (1-1211)(F970C_G999C) WhcAg construct
MFVFLVLLPLVSSQCVNLTTRTQLPPAYTNSFTRGVYYPDKVFRSSVLHSTQDLFLPFFSNVTWFHAIHVSGTNGTKRFDNPVLPFNDGVYFASTEKSNIIRGWIFGTTLDSKTQSLLIVNNATNVVIKVCEFQFCNDPFLGVYYHKNNKSWMESEFRVYSSANNCTFEYVSQPFLMDLEGKQGNFKNLREFVFKNIDGYFKIYSKHTPINLVRDLPQGFSALEPLVDLPIGINITRFQTLLALHRSYLTPGDSSSGWTAGAAAYYVGYLQPRTFLLKYNENGTITDAVDCALDPLSETKCTLKSFTVEKGIYQTSNFRVQPTESIVRFPNITNLCPFGEVFNATRFASVYAWNRKRISNCVADYSVLYNSASFSTFKCYGVSPTKLNDLCFTNVYADSFVIRGDEVRQIAPGQTGKIADYNYKLPDDFTGCVIAWNSNNLDSKVGGNYNYLYRLFRKSNLKPFERDISTEIYQAGSTPCNGVEGFNCYFPLQSYGFQPTNGVGYQPYRVVVLSFELLHAPATVCGPKKSTNLVKNKCVNFNFNGLTGTGVLTESNKKFLPFQQFGRDIADTTDAVRDPQTLEILDITPCSFGGVSVITPGTNTSNQVAVLYQDVNCTEVPVAIHADQLTPTWRVYSTGSNVFQTRAGCLIGAEHVNNSYECDIPIGAGICASYQTQTNSPRRARSVASQSIIAYTMSLGAENSVAYSNNSIAIPTNFTISVTTEILPVSMTKTSVDCTMYICGDSTECSNLLLQYGSFCTQLNRALTGIAVEQDKNTQEVFAQVKQIYKTPPIKDFGGFNFSQILPDPSKPSKRSFIEDLLFNKVTLADAGFIKQYGDCLGDIAARDLICAQKFNGLTVLPPLLTDEMIAQYTSALLAGTITSGWTFGAGAALQIPFAMQMAYRFNGIGVTQNVLYENQKLIANQFNSAIGKIQDSLSFTASALGKLQDVVNQNAQALNTLVKQLSSNCGAISSVLNDILSRLDKVEAEVQIDRLITCRLQSLQTYVTQQLIRAAEIRASANLAATKMSECVLGQSKRVDFCGKGYHLMSFPQSAPHGVVFLHVTYVPAQEKNFTTAPAICHDGKAHFPREGVFVSNGTHWFVTQRNFYEPQIITTDNTFVSGNCDVVIGIVNNTVYDPLQPELDSFKEELDKYFKNHTSPDVDLGDISGINASVVNIQKEIDRLNEVAKNLNESLIDLQELGKYEQYIKGGGGSDIDPYKEFGSSYQLLNFLPLDFFPDLNALVDTATALYEEELTGREHCSPHHTAIRQALVCWDELTKLIAWMSSNITSEQVRTIIVNHVNDTWGLKVRQSLWFHLSCLTFGQHTVQEFLVSFGVWIRTPAPYRPPNAPILSTLPEHTVIC

SEQ ID NO: 7396 - protein, 1365 aa, Artificial Sequence; identical to SEQ ID NO: 7376
  SARS-CoV-2/Australia/NSW10/2020__EPI_ISL_413596 spike protein (1-1211)(F970C_G999C) WhcAg construct

SEQ ID NO: 7397 - protein, 1365 aa, Artificial Sequence
  SARS-CoV-2/Switzerland/1000477797/2020__EPI_ISL_413023 spike protein (1-1211)(F970C_G999C) WhcAg construct
MFVFLVLLPLVSSQCVNLTTRTQLPPAYTNSFTRGVYYPDKVFRSSVLHSTQDLFLPFFSNVTWFHAIHVSGTNGTKRFDNPVLPFNDGVYFASTEKSNIIRGWIFGTTLDSKTQSLLIVNNATNVVIKVCEFQFCNDPFLGVYYHKNNKSWMESEFRVYSSANNCTFEYVSQPFLMDLEGKQGNFKNLREFVFKNIDGYFNIYSKHTPINLVRDLPQGFSALEPLVDLPIGINITRFQTLLALHRSYLTPGDSSSGWTAGAAAYYVGYLQPRTFLLKYNENGTITDAVDCALDPLSETKCTLKSFTVEKGIYQTSNFRVQPTESIVRFPNITNLCPFGEVFNATRFASVYAWNRKRISNCVADYSVLYNSASFSTFKCYGVSPTKLNDLCFTNVYADSFVIRGDEVRQIAPGQTGKIADYNYKLPDDFTGCVIAWNSNNLDSKVGGNYNYLYRLFRKSNLKPFERDISTEIYQAGSTPCNGVEGFNCYFPLQSYGFQPTNGVGYQPYRVVVLSFELLHAPATVCGPKKSTNLVKNKCVNFNFNGLTGTGVLTESNKKFLPFQQFGRDIADTTDAVRDPQTLEILDITPCSFGGVSVITPGTNTSNQVAVLYQGVNCTEVPVAIHADQLTPTWRVYSTGSNVFQTRAGCLIGAEHVNNSYECDIPIGAGICASYQTQTNSPRRARSVASQSIIAYTMSLGAENSVAYSNNSIAIPTNFTISVTTEILPVSMTKTSVDCTMYICGDSTECSNLLLQYGSFCTQLNRALTGIAVEQDKNTQEVFAQVKQIYKTPPIKDFGGFNFSQILPDPSKPSKRSFIEDLLFNKVTLADAGFIKQYGDCLGDIAARDLICAQKFNGLTVLPPLLTDEMIAQYTSALLAGTITSGWTFGAGAALQIPFAMQMAYRFNGIGVTQNVLYENQKLIANQFNSAIGKIQDSLSSTASALGKLQDVVNQNAQALNTLVKQLSSNCGAISSVLNDILSRLDKVEAEVQIDRLITCRLQSLQTYVTQQLIRAAEIRASANLAATKMSECVLGQSKRVDFCGKGYHLMSFPQSAPHGVVFLHVTYVPAQEKNFTTAPAICHDGKAHFPREGVFVSNGTHWFVTQRNFYEPQIITTDNTFVSGNCDVVIGIVNNTVYDPLQPELDSFKEELDKYFKNHTSPDVDLGDISGINASVVNIQKEIDRLNEVAKNLNESLIDLQELGKYEQYIKGGGGSDIDPYKEFGSSYQLLNFLPLDFFPDLNALVDTATALYEEELTGREHCSPHHTAIRQALVCWDELTKLIAWMSSNITSEQVRTIIVNHVNDTWGLKVRQSLWFHLSCLTFGQHTVQEFLVSFGVWIRTPAPYRPPNAPILSTLPEHTVIC

SEQ ID NO: 7398 - protein, 1365 aa, Artificial Sequence
  SARS-CoV-2/Belgium/BA-02291/2020__EPI_ISL_415159 spike protein (1-1211)(F970C_G999C) WhcAg construct
MFVFLVLLPLVSSQCVNLTTRTQLPPAYTNSFTRGVYYPDKVFRSSVLHSTQDLFLPFFSNVTWFHAIHVSGTNGTKRFDNPVLPFNDGVYFASTEKSNIIRGWIFGTTLDSKTQSLLIVNNATNVVIKVCEFQFCNDPFLGVYYHKNNKSWMESEFRVYSSANNCTFEYVSQPFLMDLEGKQGNFKNLREFVFKNIDGYFKIYSKHTPINLVRDLPQGFSALEPLVDLPIGINITRFQTLLALHRSYLTPGDSSSGWTAGAAAYYVGYLQPRTFLLKYNENGTITDAVDCALDPLSETKCTLKSFTVEKGIYQTSNFRVQPTESIVRFPNITNLCPFGEVFNATRFASVYAWNRKRISNCVADYSVLYNSASFSTFKCYGVSPTKLNDLCFTNVYADSFVIRGDEVRQIAPGQTGKIADYNYKLPDDFTGCVIAWNSNNLDSKVGGNYNYLYRLFRRSNLKPFERDISTEIYQAGSTPCNGVEGFNCYFPLQSYGFQPTNGVGYQPYRVVVLSFELLPAPATVCGPKKSTNLVKNKCVNFNFNGLTGTGVLTESNKKFLPFQQFGRDIADTTDAVRDPQTLEILDITPCSFGGVSVITPGTNTSNQVAVLYQGVNCTEVPVAIHADQLTPTWRVYSTGSNVFQTRAGCLIGAEHVNNSYECDIPIGAGICASYQTQTNSPRRARSVASQSIIAYTMSLGAENSVAYSNNSIAIPTNFTISVTTEILPVSMTKTSVDCTMYICGDSTECSNLLLQYGSFCTQLNRALTGIAVEQDKNTQEVFAQVKQIYKTPPIKDFGGFNFSQILPDPSKPSKRSFIEDLLFNKVTLADAGFIKQYGDCLGDIAARDLICAQKFNGLTVLPPLLTDEMIAQYTSALLAGTITSGWTFGAGAALQIPFAMQMAYRFNGIGVTQNVLYENQKLIANQFNSAIGKIQDSLSSAAPALGKLQDVVNQNAQALNTLVKQLSSNCGAISSVLNDILSRLDKVEAEVQIDRLITCRLQSLQTYVTQQLIRAAEIRASANLAATKMSECVLGQSKRVDFCGKGYHLMSFPQSAPHGVVFLHVTYVPAQEKNFTTAPAICHDGKAHFPREGVFVSNGTHWFVTQRNFYEPQIITTDNTFVSGNCDVVIGIVNNTVYDPLQPELDSFKEELDKYFKNHTSPDVDLGDISGINASVVNIQKEIDRLNEVAKNLNESLIDLQELGKYEQYIKGGGGSDIDPYKEFGSSYQLLNFLPLDFFPDLNALVDTATALYEEELTGREHCSPHHTAIRQALVCWDELTKLIAWMSSNITSEQVRTIIVNHVNDTWGLKVRQSLWFHLSCLTFGQHTVQEFLVSFGVWIRTPAPYRPPNAPILSTLPEHTVIC

SEQ ID NO: 7399 - protein, 1365 aa, Artificial Sequence
  SARS-CoV-2/USA/WA8-UW5/2020__EPI_ISL_413486 spike protein (1-1211)(F970C_G999C) WhcAg construct
MFVFLVLLPLVSSQCVNLTTRTQLPPAYTNSFTRGVYYPDKVFRSSVLHSTQDLFLPFFSNVTWFHAIHVSGTNGTKRFDNPVLPFNDGVYFASTEKSNIIRGWIFGTTLDSKTQSLLIVNNATNVVIKVCEFQFCNDPFLGVYYHKNNKSWMESEFRVYSSANNCTFEYVSQPFLMDLEGKQGNFKNLREFVFKNIDGYFKIYSKHTPINLVRDLPQGFSALEPLVDLPIGINITRFQTLLALHRSYLTPGDSSSGWTAGAAAYYVGYLQPRTFLLKYNENGTITDAVDCALDPLSETKCTLKSFTVEKGIYQTSNFRVQPTESIVRFPNITNLCPFGEVFNATRFASVYAWNRKRISNCVADYSVLYNSASFSTFKCYGVSPTKLNDLCFTNVYADSFVIRGDEVRQIAPGQTGKIADYNYKLPDDFTGCVIAWNSNNLDSKVGGNYNYLYRLFRKSNLKPFERDISTEIYQAGSTPCNGVEGFNCYFPLQSYGFQPTNGVGYQPYRVVVLSFELLHAPATVCGPKKSTNLVKNKCVNFNFNGLTGTGVLTESNKKFLPFQQFGRDIADTTDAVRDPQTLEILDITPCSFGGVSVITPGTNTSNQVAVLYQDVNCTEVPVAIHADQLTPTWRVYSTGSNVFQTRAGCLIGAEYVNNSYECDIPIGAGICASYQTQTNSPRRARSVASQSIIAYTMSLGAENSVAYSNNSIAIPTNFTISVTTEILPVSMTKTSVDCTMYICGDSTECSNLLLQYGSFCTQLNRALTGIAVEQDKNTQEVFAQVKQIYKTPPIKDFGGFNFSQILPDPSKPSKRSFIEDLLFNKVTLADAGFIKQYGDCLGDIAARDLICAQKFNGLTVLPPLLTDEMIAQYTSALLAGTITSGWTFGAGAALQIPFAMQMAYRFNGIGVTQNVLYENQKLIANQFNSAIGKIQDSLSSTASALGKLQDVVNQNAQALNTLVKQLSSNCGAISSVLNDILSRLDKVEAEVQIDRLITCRLQSLQTYVTQQLIRAAEIRASANLAATKMSECVLGQSKRVDFCGKGYHLMSFPQSAPHGVVFLHVTYVPAQEKNFTTAPAICHDGKAHFPREGVFVSNGTHWFVTQRNFYEPQIITTDNTFVSGNCDVVIGIVNNTVYDPLQPELDSFKEELDKYFKNHTSPDVDLGDISGINASVVNIQKEIDRLNEVAKNLNESLIDLQELGKYEQYIKGGGGSDIDPYKEFGSSYQLLNFLPLDFFPDLNALVDTATALYEEELTGREHCSPHHTAIRQALVCWDELTKLIAWMSSNITSEQVRTIIVNHVNDTWGLKVRQSLWFHLSCLTFGQHTVQEFLVSFGVWIRTPAPYRPPNAPILSTLPEHTVIC

SEQ ID NO: 7400 - protein, 1365 aa, Artificial Sequence
  SARS-CoV-2/England/20102000506/2020__EPI_ISL_415147 spike protein (1-1211)(F970C_G999C) WhcAg construct
MFVFLVLLPLVSSQCVNLTTRTQLPPAYTNSFTRGVYYPDKVFRSSVLHSTQDLFLPFFSNVTWFHAIHVSGTNGTKRFDNPVLPFNDGVYFASTEKSNIIRGWIFGTTLDSKTQSLLIVNNATNVVIKVCEFQFCNDPFLGVYYHKNNKSWMESEFRVYSSANNCTFEYVSQPFLMDLEGKQGNFKNLREFVFKNIDGYFKIYSKHTPINLVRDLPQGFSALEPLVDLPIGINITRFQTLLALHRSYLTPGDSSSGWTAGAAAYYVGYLQPRTFLLKYNENGTITDAVDCALDPLSETKCTLKSFTVEKGIYQTSNFRVQPTESIVRFPNITNLCPFGEVFNATRFASVYAWNRKRISNCVADYSVLYNSASFSTFKCYGVSPTKLNDLCFTNVYADSFVIRGDEVRQIAPGQTGKIADYNYKLPDDFTGCVIAWNSNNLDSKVGGNYNYLYRLFRKSNLKPFERDISTEIYQAGSTPCNGVEGFNCYFPLQSYGFQPTNGVGYQPYRVVVLSFELLHAPATVCGPKKSTNLVKNKCVNFNFNGLTGTGVLTESNKKFLPFQQFGRDIADTTDAVRDPQTLEILDITPCSFGGVSVITPGTNTSNQVAVLYQGVNCTEVPVAIHADQLTPTWRVYSTGSNVFQTRAGCLIGAEHVNNSYECDIPIGAGICASYQTQTNSPRRARSVASQSIIAYTMSLGAENSVAYSNNSIAIPTNFTISVTTEILPVSMTKTSVDCTMYICGDSTECSNLLLQYGSFCTQLNRALTGIAVEQDKNTQEVFAQVKQIYKTPPIKDFGGFNFSQILPDPSKPSKRSFIEDLLFNKVTLADAGFIKQYGYCLGDIAARDLICAQKFNGLTVLPPLLTDEMIAQYTSALLAGTITSGWTFGAGAALQIPFAMQMAYRFNGIGVTQNVLYENQKLIANQFNSAIGKIQDSLSSTASALGKLQDVVNQNAQALNTLVKQLSSNCGAISSVLNDILSRLDKVEAEVQIDRLITCRLQSLQTYVTQQLIRAAEIRASANLAATKMSECVLGQSKRVDFCGKGYHLMSFPQSAPHGVVFLHVTYVPAQEKNFTTAPAICHDGKAHFPREGVFVSNGTHWFVTQRNFYEPQIITTDNTFVSGNCDVVIGIVNNTVYDPLQPELDSFKEELDKYFKNHTSPDVDLGDISGINASVVNIQKEIDRLNEVAKNLNESLIDLQELGKYEQYIKGGGGSDIDPYKEFGSSYQLLNFLPLDFFPDLNALVDTATALYEEELTGREHCSPHHTAIRQALVCWDELTKLIAWMSSNITSEQVRTIIVNHVNDTWGLKVRQSLWFHLSCLTFGQHTVQEFLVSFGVWIRTPAPYRPPNAPILSTLPEHTVIC

SEQ ID NO: 7401 - protein, 1365 aa, Artificial Sequence
  SARS-CoV-2/Belgium/VAG-03013/2020__EPI_ISL_415155 spike protein (1-1211)(F970C_G999C) WhcAg construct
MFVFLVLLPLVSSQCVNLTTRTQLPPAYTNSFTRGVYYPDKVFRSSVLHSTQDLFLPFFSNVTWFHAIHVSGTNGTKRFDNPVLPFNDGVYFASTEKSNIIRGWIFGTTLDSKTQSLLIVNNATNVVIKVCEFQFCNDPFLGVYYHKNNKSWMESEFRVYSSANNCTFEYVSQPFLMDLEGKQGNFKNLREFVFKNIDGYFKIYSKHTPINLVRDLPQGFSALEPLVDLPIGINITRFQTLLALHRSYLTPGDSSSGWTAGAAAYYVGYLQPRTFLLKYNENGTITDAVDCALDPLSETKCTLKSFTVEKGIYQTSNFRVQPTESIVRFPNITNLCPFGEVFNATRFASVYAWNRKRISNCVADYSVLYNSASFSTFKCYGVSPTKLNDLCFTNVYADSFVIRGDEVRQIAPGQTGKIADYNYKLPDDFTGCVIAWNSNNLDSKVGGNYNYLYRLFRKSNLKPFERDISTEIYQAGSTPCNGVEGFNCYFPLQSYGFQPTNGVGYQPYRVVVLSFELLHAPATVCGPKKSTNLVKNKCVNFNFNGLTGTGVLTESNKKFLPFQQFGRDIADTTDAVRDPQTLEILDITPCSFGGVSVITPGTNTSNQVAVLYQGVNCTEVPVAIHADQLTPTWRVYSTGSNVFQTRAGCLIGAEHVNNSYECDIPIGAGICASYQTQTNSPRRARSVASQSIIAYTMSLGAENSVAYSNNSIAIPTNFTISVTTEILPVSMTKTSVDCTMYICGDSTECSNLLLQYGSFCTQLNRALTGIAVEQDKNTQEVFAQVKQIYKTPPIKDFGGFNFSQILPDPSKPSKRSFIEDLLFNKVTLADAGFIKQYGDCLGDIAARDLICAQKFNGLTVLPPLLTDEMIAQYTSALLAGTITSGWTFGAGAALQIPFAMQMAYRFNGIGVTQNVLYENQKLIANQFNSAIGKIQDSLSSTATALGKLQDVVNQNAQALNTLVKQLSSNCGAISSVLNDILSRLDKVEAEVQIDRLITCRLQSLQTYVTQQLIRAAEIRASANLAATKMSECVLGQSKRVDFCGKGYHLMSFPQSAPHGVVFLHVTYVPAQEKNFTTAPAICHDGKAHFPREGVFVSNGTHWFVTQRNFYEPQIITTDNTFVSGNCDVVIGIVNNTVYDPLQPELDSFKEELDKYFKNHTSPDVDLGDISGINASVVNIQKEIDRLNEVAKNLNESLIDLQELGKYEQYIKGGGGSDIDPYKEFGSSYQLLNFLPLDFFPDLNALVDTATALYEEELTGREHCSPHHTAIRQALVCWDELTKLIAWMSSNITSEQVRTIIVNHVNDTWGLKVRQSLWFHLSCLTFGQHTVQEFLVSFGVWIRTPAPYRPPNAPILSTLPEHTVIC

SEQ ID NO: 7402 - protein, 1365 aa, Artificial Sequence
  SARS-CoV-2/Belgium/BC-03016/2020__EPI_ISL_415157 spike protein (1-1211)(F970C_G999C) WhcAg construct
MFVFLVLLPLVSSQCVNLTTRTQLPPAYTNSFTRGVYYPDKVFRSSVLHSTQDLFLPFFSNVTWFHAIHVSGTNGTKRFDNPVLPFNDGVYFASTEKSNIIRGWIFGTTLDSKTQSLLIVNNATNVVIKVCEFQFCNDPFLGVYYHKNNKSWMESEFRVYSSANNCTFEYVSQPFLMDLEGKQGNFKNLREFVFKNIDGYFKIYSKHTPINLVRDLPQGFSALEPLVDLPIGINITRFQTLLALHRSYLTPGDSSSGWTAGAAAYYVGYLQPRTFLLKYNENGTITDAVDCALDPLSETKCTLKSFTVEKGIYQTSNFRVQPTESIVRFPNITNLCPFGEVFNATRFASVYAWNRKRISNCVADYSVLYNSASFSTFKCYGVSPTKLNDLCFTNVYADSFVIRGDEVRQIAPGQTGKIADYNYKLPDDFTGCVIAWNSNNLDSKVGGNYNYLYRLFRKSNLKPFERDISTEIYQAGSTPCNGVEGFNCYFPLQSYGFQPTNGVGYQPYRVVVLSFELLHAPATVCGPKKSTNLVKNKCVNFNFNGLTGTGVLTESNKKFLPFQQFGRDIADTTDAVRDPQTLEILDITPCSFGGVSVITPGTNTSNQVAVLYQGVNCTEVPVAIHADQLTPTWRVYSTGSNVFQTRAGCLIGAEHVNNSYECDIPIGAGICASYQTQTNSPRRARSVASQSIIAYTMSLGAENSVAYSNNSIAIPTNFTISVTTEILPVSMTKTSVDCTMYICGDSTECSNLLLQYGSFCTQLNRALTGIAVEQDKNTQEVFAQVKQIYKTPPIKDFGGFNFSQILPDPSKPSKRSFIEDLLFNKVTLADAGFIKQYGDCLGDIAARDLICAQKFNGLTVLPPLLTDEMIAQYTSALLAGTITSGWTFGAGAALQIPFAMQMAYRFNGIGVTQNVLYENQKLIANQFNSAIGKIQDSLSSTAPALGKLQDVVNQNAQALNTLVKQLSSNCGAISSVLNDILSRLDKVEAEVQIDRLITCRLQSLQTYVTQQLIRAAEIRASANLAATKMSECVLGQSKRVDFCGKGYHLMSFPQSAPHGVVFLHVTYVPAQEKNFTTAPAICHDGKAHFPREGVFVSNGTHWFVTQRNFYEPQIITTDNTFVSGNCDVVIGIVNNTVYDPLQPELDSFKEELDKYFKNHTSPDVDLGDISGINASVVNIQKEIDRLNEVAKNLNESLIDLQELGKYEQYIKGGGGSDIDPYKEFGSSYQLLNFLPLDFFPDLNALVDTATALYEEELTGREHCSPHHTAIRQALVCWDELTKLIAWMSSNITSEQVRTIIVNHVNDTWGLKVRQSLWFHLSCLTFGQHTVQEFLVSFGVWIRTPAPYRPPNAPILSTLPEHTVIC

SEQ ID NO: 7403 - protein, 1365 aa, Artificial Sequence
  SARS-CoV-2/Germany/BavPat3/2020__EPI_ISL_414521 spike protein (1-1211)(F970C_G999C) WhcAg construct
MFVFLVLLPLVSSQCVNLTTRTQLPPAYTNSFTRGVYYPDKVFRSSVLHSTQDLFLPFFSNVTWFHAIHVSGTNGTKRFDNPVLPFNDGVYFASTEKSNIIRGWIFGTTLDSKTQSLLIVNNATNVVIKVCEFQFCNDPFLGVYYHKNNKSWMESEFRVYSSANNCTFEYVSQPFLMDLEGKQGNFKNLREFVFKNIDGYFKIYSKHTPINLVRDLPQGFSALEPLVDLPIGINITRFQTLLALHRSYLTPGDSSSGWTAGAAAYYVGYLQPRTFLLKYNENGTITDAVDCALDPLSETKCTLKSFTVEKGIYQTSNFRVQPTESIVRFPNITNLCPFGEVFNATRFASVYAWNRKRISNCVADYSVLYNSASFSTFKCYGVSPTKLNDLCFTNVYADSFVIRGDEVRQIAPGQTGKIADYNYKLPDDFTGCVIAWNSNNLDSKVGGNYNYLYRLFRKSNLKPFERDISTEIYQAGSTPCNGVEGFNCYFPLQSYGFQPTNGVGYQPYRVVVLSFELLHAPATVCGPKKSTNLVKNKCVNFNFNGLTGTGVLTESNKKFLPFQQFGRDIADTTDAVRDPQTLEILDITPCSFGGVSVITPGTNTSNQVAVLYQDVNCTEVPVAIHADQLTPTWRVYSTGSNVFQTRAGCLIGAEHVNNSYECDIPIGAGICASYQTQTNSPRRARSVASQSIIAYTMSLGAENSVAYSNNSIAIPTNFTISVTTEILPVSMTKTSVDCTMYICGDSTECSNLLLQYGSFCTQLNRALTGIAVEQDKNTQQVFAQVKQIYKTPPIKDFGGFNFSQILPDPSKPSKRSFIEDLLFNKVTLADAGFIKQYGDCLGDIAARDLICAQKFNGLTVLPPLLTDEMIAQYTSALLAGTITSGWTFGAGAALQIPFAMQMAYRFNGIGVTQNVLYENQKLIANQFNSAIGKIQDSLSSTASALGKLQDVVNQNAQALNTLVKQLSSNCGAISSVLNDILSRLDKVEAEVQIDRLITCRLQSLQTYVTQQLIRAAEIRASANLAATKMSECVLGQSKRVDFCGKGYHLMSFPQSAPHGVVFLHVTYVPAQEKNFTTAPAICHDGKAHFPREGVFVSNGTHWFVTQRNFYEPQIITTDNTFVSGNCDVVIGIVNNTVYDPLQPELDSFKEELDKYFKNHTSPDVDLGDISGINASVVNIQKEIDRLNEVAKNLNESLIDLQELGKYEQYIKGGGGSDIDPYKEFGSSYQLLNFLPLDFFPDLNALVDTATALYEEELTGREHCSPHHTAIRQALVCWDELTKLIAWMSSNITSEQVRTIIVNHVNDTWGLKVRQSLWFHLSCLTFGQHTVQEFLVSFGVWIRTPAPYRPPNAPILSTLPEHTVIC

SEQ ID NO: 7404 - protein, 1365 aa, Artificial Sequence
  SARS-CoV-2/France/HF1805/2020__EPI_ISL_414628 spike protein (1-1211)(F970C_G999C) WhcAg construct
MFVFLVLLPLVSSQCVNLTTRTQLPPAYTNSFTRGVYYPDKVFRSSVLHSTQDLFLPFFSNVTWFHAIHVSGTNGTKRFDNPVLPFNDGVYFASTEKSNIIRGWIFGTTLDSKTQSLLIVNNATNVVIKVCEFQFCNDPFLGVYYHKNNKSWMESEFRVYSSANNCTFEYVSQPFLMDLEGKQGNFKNLREFVFKNIDGYFKIYSKHTPINLVRDLPQGFSALEPLVDLPIGINITRFQTLLALHRSYLTPGDSSSGWTAGAAAYYVGYLQPRTFLLKYNENGTITDAVDCALDPLSETKCTLKSFTVEKGIYQTSNFRVQPTESIVRFPNITNLCPFGEVFNATRFASVYAWNRKRISNCVADYSVLYNSASFSTFKCYGVSPTKLNDLCFTNVYADSFVIRGDEVRQIAPGQTGKIADYNYKLPDDFTGCVIAWNSNNLDSKVGGNYNYLYRLFRKSNLKPFERDISTEIYQAGSTPCNGVEGFNCYFPLQSYGFQPTNGVGYQPYRVVVLSFELLHAPATVCGPKKSTNLVKNKCVNFNFNGLTGTGVLTESNKKFLPFQQFGRDIADTTDAVRDPQTLEILDITPCSFGGVSVITPGTNTSNQVAVLYQGVNCTEVPVAIHADQLTPTWRVYSTGSNVFQTRAGCLIGAEHVNNSYECDIPIGAGICASYQTQTNSPRRARSVASQSIIAYTMSLGAENSVAYSNNSIAIPTNFTISVTTEILPVSMTKTSVDCTMYICGDSTECSNLLLQYGSFCTQLNRALTGIAVEQDKNTQEVFAQVKQIYKTPPIKDFGGFNFSQILPDPSKPSKRSFIEDLLFNKVTLADAGFIKQYGDCLGDIAARDLICAQKFNGLTVLPPLLTDEMIAQYTSALLAGTITSGWTFGAGAALQIPFAMQMAYRFNGIGVTQNVLYENQKLIANQFNSAIGKIQDSLSSTASALGKLQDVVNQNAQALNTLVKQLSSNCGAISSVLNDILSRLDKVEAEVQIDRLITCRLQSLQTYVTQQLIRAAEIRASANLAATKMSECVLGQSKRVDFCGKGYHLMSFPQSAPHGVVFLHVTYVPAQEKNFTTAPAICHDGKAHFPREGVFVSNGTHWFVTQRNFYEPQIITTDNTFVSGNCDVVIGVVNNTVYDPLQPELDSFKEELDKYFKNHTSPDVDLGDISGINASVVNIQKEIDRLNEVAKNLNESLIDLQELGKYEQYIKGGGGSDIDPYKEFGSSYQLLNFLPLDFFPDLNALVDTATALYEEELTGREHCSPHHTAIRQALVCWDELTKLIAWMSSNITSEQVRTIIVNHVNDTWGLKVRQSLWFHLSCLTFGQHTVQEFLVSFGVWIRTPAPYRPPNAPILSTLPEHTVIC

SEQ ID NO: 7405 - protein, 1365 aa, Artificial Sequence
  SARS-CoV-2/Netherlands/ZuidHolland_9/2020__EPI_ISL_414445 spike protein (1-1211)(F970C_G999C) WhcAg construct
MFVFLVLLPLVSSQCVNLTTRTQLPPAYTNSFTRGVYYPDKVFRSSVLHSTQDLFLPFFSNVTWFHAIHVSGTNGTKRFDNPVLPFNDGVYFASTEKSNIIRGWIFGTTLDSKTQSLLIVNNATNVVIKVCEFQFCNDPFLGVYYHKNNKSWMESEFRVYSSANNCTFEYVSQPFLMDLEGKQGNFKNLREFVFKNIDGYFKIYSKHTPINLVRDLPQGFSALEPLVDLPIGINITRFQTLLALHRSYLTPGDSSSGWTAGAAAYYVGYLQPRTFLLKYNENGTITDAVDCALDPLSETKCTLKSFTVEKGIYQTSNFRVQPTESIVRFPNITNLCPFGEVFNATRFASVYAWNRKRISNCVADYSVLYNSASFSTFKCYGVSPTKLNDLCFTNVYADSFVIRGDEVRQIAPGQTGKIADYNYKLPDDFTGCVIAWNSNNLDSKVGGNYNYLYRLFRKSNLKPFERDISTEIYQAGSTPCNGVEGFNCYFPLQSYGFQPTNGVGYQPYRVVVLSFELLHAPATVCGPKKSTNLVKNKCVNFNFNGLTGTGVLTESNKKFLPFQQFGRDIADTTDAVRDPQTLEILDITPCSFGGVSVITPGTNTSNQVAVLYQGVNCTEVPVAIHADQLTPTWRVYSTGSNVFQTRAGCLIGAEHVNNSYECDIPIGAGICASYQTQTNSPRRARSVASQSIIAYTMSLGAENSVAYSNNSIAIPTNFTISVTTEILPVSMTKTSVDCTMYICGDSTECSNLLLQYGSFCTQLNRALTGIAVEQDKNTQEVFAQVKQIYKTPPIKDFGGFNFSQILPDPSKPSKRSFIEDLLFNKVTLADAGFIKQYGDCLGDIAARDLICVQKFNGLTVLPPLLTDEMIAQYTSALLAGTITSGWTFGAGAALQIPFAMQMAYRFNGIGVTQNVLYENQKLIANQFNSAIGKIQDSLSSTASALGKLQDVVNQNAQALNTLVKQLSSNCGAISSVLNDILSRLDKVEAEVQIDRLITCRLQSLQTYVTQQLIRAAEIRASANLAATKMSECVLGQSKRVDFCGKGYHLMSFPQSAPHGVVFLHVTYVPAQEKNFTTAPAICHDGKAHFPREGVFVSNGTHWFVTQRNFYEPQIITTDNTFVSGNCDVVIGIVNNTVYDPLQPELDSFKEELDKYFKNHTSPDVDLGDISGINASVVNIQKEIDRLNEVAKNLNESLIDLQELGKYEQYIKGGGGSDIDPYKEFGSSYQLLNFLPLDFFPDLNALVDTATALYEEELTGREHCSPHHTAIRQALVCWDELTKLIAWMSSNITSEQVRTIIVNHVNDTWGLKVRQSLWFHLSCLTFGQHTVQEFLVSFGVWIRTPAPYRPPNAPILSTLPEHTVIC

SEQ ID NO: 7406 - protein, 1365 aa, Artificial Sequence
  SARS-CoV-2/Finland/FIN03032020A/2020__EPI_ISL_413602 spike protein (1-1211)(F970C_G999C) WhcAg construct
MFVFLVLLPLVSSQCVNLTTRTQLPPAYTNSFTRGVYYPDKVFRSSVLHSTQDLFLPFFSNVTWFHAIHVSGTNGTKRFDNPVLPFNDGVYFASTEKSNIIRGWIFGTTLDSKTQSLLIVNNATNVVIKVCEFQFCNDPFLGVYYHKNNKSWMESEFRVYSSANNCTFEYVSQPFLMDLEGKQGNFKNLREFVFKNIDGYFKIYSKHTPINLVRDLPQGFSALEPLVDLPIGINITRFQTLLALHRSYLTPGDSSSGWTAGAAAYYVGYLQPRTFLLKYNENGTITDAVDCALDPLSETKCTLKSFTVEKGIYQTSNFRVQPTESIVRFPNITNLCPFGEVFNATRFASVYAWNRKRISNCVADYSVLYNSASFSTFKCYGVSPTKLNDLCFTNVYADSFVIRGDEVRQIAPGQTGKIADYNYKLPDDFTGCVISWNSNNLDSKVGGNYNYLYRLFRKSNLKPFERDISTEIYQAGSTPCNGVEGFNCYFPLQSYGFQPTNGVGYQPYRVVVLSFELLHAPATVCGPKKSTNLVKNKCVNFNFNGLTGTGVLTESNKKFLPFQQFGRDIADTTDAVRDPQTLEILDITPCSFGGVSVITPGTNTSNQVAVLYQGVNCTEVPVAIHADQLTPTWRVYSTGSNVFQTRAGCLIGAEHVNNSYECDIPIGAGICASYQTQTNSPRRARSVASQSIIAYTMSLGAENSVAYSNNSIAIPTNFTISVTTEILPVSMTKTSVDCTMYICGDSTECSNLLLQYGSFCTQLNRALTGIAVEQDKNTQEVFAQVKQIYKTPPIKDFGGFNFSQILPDPSKPSKRSFIEDLLFNKVTLADAGFIKQYGDCLGDIAARDLICAQKFNGLTVLPPLLTDEMIAQYTSALLAGTITSGWTFGAGAALQIPFAMQMAYRFNGIGVTQNVLYENQKLIANQFNSAIGKIQDSLSSTASALGKLQDVVNQNAQALNTLVKQLSSNCGAISSVLNDILSRLDKVEAEVQIDRLITCRLQSLQTYVTQQLIRAAEIRASANLAATKMSECVLGQSKRVDFCGKGYHLMSFPQSAPHGVVFLHVTYVPAQEKNFTTAPAICHDGKAHFPREGVFVSNGTHWFVTQRNFYEPQIITTDNTFVSGNCDVVIGIVNNTVYDPLQPELDSFKEELDKYFKNHTSPDVDLGDISGINASVVNIQKEIDRLNEVAKNLNESLIDLQELGKYEQYIKGGGGSDIDPYKEFGSSYQLLNFLPLDFFPDLNALVDTATALYEEELTGREHCSPHHTAIRQALVCWDELTKLIAWMSSNITSEQVRTIIVNHVNDTWGLKVRQSLWFHLSCLTFGQHTVQEFLVSFGVWIRTPAPYRPPNAPILSTLPEHTVIC

SEQ ID NO: 7407 - protein, 1365 aa, Artificial Sequence
  SARS-CoV-2/France/GE1977/2020__EPI_ISL_414632 spike protein (1-1211)(F970C_G999C) WhcAg construct
MFVFLVLLPLVSSQCVNLTTRTQLPPAYTNSFTRGVYYPDKVFRSSVLHSTQDLFLPFFSNVTWFHAIHVSGTNGTKRFDNPVLPFNDGVYFASTEKSNIIRGWIFGTTLDSKTQSLLIVNNATNVVIKVCEFQFCNDPFLGVYYHKNNKSWMESEFRVYSSANNCTFEYVSQPFLMDLEGKQGNFKNLREFVFKNIDGYFKIYSKHTPINLVRDLPQGFSALEPLVDLPIGINITRFQTLLALHRSYLTPGDSSSGWTAGAAAYYVGYLQPRTFLLKYNENGTITDAVDCALDPLSETKCTLKSFTVEKGIYQTSNFRVQPTESIVRFPNITNLCPFGEVFNATRFASVYAWNRKRISNCVADYSVLYNSASFSTFKCYGVSPTKLNDLCFTNVYADSFVIRGDEVRQIAPGQTGKIADYNYKLPDDFTGCVIAWNSNNLDSKVGGNYNYLYRLFRKSNLKPFERDISTEIYQAGSTPCNGVEGFNCYFPLQSYGFQPTNGVGYQPYRVVVLSFELLHAPATVCGPKKSTNLVKNKCVNFNFNGLTGTGVLTESNKKFLPFQQFGRDIADTTDAVRDPQTLEILDITPCSFGGVSVITPGTNTSNQVAVLYQGVNCTEVPVAIHADQLTPTWRVYSTGSNVFQTRAGCLIGAEHVNNSYECDIPIGAGICASYQTQTNSPRRARSVASQSIIAYTMSLGAENSVAYSNNSIAIPTNFTISVTTEILPVSMTKTSVDCTMYICGDSTECSNLLLQYGSFCTQLNRALTGIAVEQDKNTQEVFAQVKQIYKTPPIKDFGGFNFSQILPDPSKPSKRSFIEDLLFNKVTLADAGFIKQYGDCLGDIAARDLICAQKFNGLTVLPPLLTDEMIAQYTSALLAGTITSGWTFGAGAALQIPFAMQMAYRFNGIGVTQNVLYENQKLIANQFNSAIGKIQDSLFSTASALGKLQDVVNQNAQALNTLVKQLSSNCGAISSVLNDILSRLDKVEAEVQIDRLITCRLQSLQTYVTQQLIRAAEIRASANLAATKMSECVLGQSKRVDFCGKGYHLMSFPQSAPHGVVFLHVTYVPAQEKNFTTAPAICHDGKAHFPREGVFVSNGTHWFVTQRNFYEPQIITTDNTFVSGNCDVVIGIVNNTVYDPLQPELDSFKEELDKYFKNHTSPDVDLGDISGINASVVNIQKEIDRLNEVAKNLNESLIDLQELGKYEQYIKGGGGSDIDPYKEFGSSYQLLNFLPLDFFPDLNALVDTATALYEEELTGREHCSPHHTAIRQALVCWDELTKLIAWMSSNITSEQVRTIIVNHVNDTWGLKVRQSLWFHLSCLTFGQHTVQEFLVSFGVWIRTPAPYRPPNAPILSTLPEHTVIC

SEQ ID NO: 7408 - protein, 1365 aa, Artificial Sequence
  SARS-CoV-2/Finland/FIN-313/2020__EPI_ISL_414641 spike protein (1-1211)(F970C_G999C) WhcAg construct
MFVFLVLLPLVSSQCVNLTTRTQLPPAYTNSFTRGVYYPDKVFRSSVLHSTQDLFLPFFSNVTWFHAIHVSGTNGTKRFDNPVLPFNDGVYFASTEKSNIIRGWIFGTTLDSKTQSLLIVNNATNVVIKVCEFQFCNDPFLGVYYHKNNKSWMESEFRVYSSANNCTFEYVSQPFLMDLEGKQGNFKNLREFVFKNIDGYFKIYSKHTPINLVRDLPQGFSALEPLVDLPIGINITRFKTLLALHRSYLTPGDSSSGWTAGAAAYYVGYLQPRTFLLKYNENGTITDAVDCALDPLSETKCTLKSFTVEKGIYQTSNFRVQPTESIVRFPNITNLCPFGEVFNATRFASVYAWNRKRISNCVADYSVLYNSASFSTFKCYGVSPTKLNDLCFTNVYADSFVIRGDEVRQIAPGQTGKIADYNYKLPDDFTGCVIAWNSNNLDSKVGGNYNYLYRLFRKSNLKPFERDISTEIYQAGSTPCNGVEGFNCYFPLQSYGFQPTNGVGYQPYRVVVLSFELLHAPATVCGPKKSTNLVKNKCVNFNFNGLTGTGVLTESNKKFLPFQQFGRDIADTTDAVRDPQTLEILDITPCSFGGVSVITPGTNTSNQVAVLYQGVNCTEVPVAIHADQLTPTWRVYSTGSNVFQTRAGCLIGAEHVNNSYECDIPIGAGICASYQTQTNSPRRARSVASQSIIAYTMSLGAENSVAYSNNSIAIPTNFTISVTTEILPVSMTKTSVDCTMYICGDSTECSNLLLQYGSFCTQLNRALTGIAVEQDKNTQEVFAQVKQIYKTPPIKDFGGFNFSQILPDPSKPSKRSFIEDLLFNKVTLADAGFIKQYGDCLGDIAARDLICAQKFNGLTVLPPLLTDEMIAQYTSALLAGTITSGWTFGAGAALQIPFAMQMAYRFNGIGVTQNVLYENQKLIANQFNSAIGKIQDSLSSTASALGKLQDVVNQNAQALNTLVKQLSSNCGAISSVLNDILSRLDKVEAEVQIDRLITCRLQSLQTYVTQQLIRAAEIRASANLAATKMSECVLGQSKRVDFCGKGYHLMSFPQSAPHGVVFLHVTYVPAQEKNFTTAPAICHDGKAHFPREGVFVSNGTHWFVTQRNFYEPQIITTDNTFVSGNCDVVIGIVNNTVYDPLQPELDSFKEELDKYFKNHTSPDVDLGDISGINASVVNIQKEIDRLNEVAKNLNESLIDLQELGKYEQYIKGGGGSDIDPYKEFGSSYQLLNFLPLDFFPDLNALVDTATALYEEELTGREHCSPHHTAIRQALVCWDELTKLIAWMSSNITSEQVRTIIVNHVNDTWGLKVRQSLWFHLSCLTFGQHTVQEFLVSFGVWIRTPAPYRPPNAPILSTLPEHTVIC

SEQ ID NO: 7409 - protein, 1365 aa, Artificial Sequence
  SARS-CoV-2/Netherlands/ZuidHolland_2/2020__EPI_ISL_414556 spike protein (1-1211)(F970C_G999C) WhcAg construct
MFVFLVLLPLVSSQCVNLTTRTQLPPAYTNSFTRGVYYPDKVFRSSVLHSTQDLFLPFFSNVTWFHAIHVSGTNGTKRFDNPVLPFNDGVYFASTEKSNIIRGWIFGTTLDSKTQSLLIVNNATNVVIKVCEFQFCNDPFLGVYYHKNNKSWMESEFRVYSSANNCTFEYVSQPFLMDLEGKQGNFKNLREFVFKNIDGYFKIYSKHTPINLVRDLPQGFSALEPLVDLPIGINITRFQTLLALHRSYLTPGDSSSGWTAGAAAYYVGYLQPRTFLLKYNENGTITDAVDCALDPLSETKCTLKSFTVEKGIYQTSNFRVQPTESIVRFPNITNLCPFGEVFNATRFASVYAWNRKRISNCVADYSVLYNSASFSTFKCYGVSPTKLNDLCFTNVYADSFVIRGDEVRQIAPGQTGKIADYNYKLPDDFTGCVIAWNSNNLDSKVGGNYNYLYRLFRKSNLKPFERDISTEIYQAGSTPCNGVEGFNCYFPLQSYGFQPTNGVGYQPYRVVVLSFELLHAPATVCGPKKSTNLVKNKCVNFNFNGLTGTGVLTESNKKFLPFQQFGRDIADTTDAVRDPQTLEILDITPCSFGGVSVITPGTNTSNQVAVLYQGVNCTEVPVAIHADQLTPTWRVYSTGSNVFQTRAGCLIGAEHVNNSYECDIPIGAGICASYQTQTNSPRRARSVASQSIIAYTMSLGAENSVAYSNNSIAIPTNFTISVTTEILPVSMTKTSVDCTMYICGDSTECSNLLLQYGSFCTQLNRALTGIALEQDKNTQEVFAQVKQIYKTPPIKDFGGFNFSQILPDPSKPSKRSFIEDLLFNKVTLADAGFIKQYGDCLGDIAARDLICAQKFNGLTVLPPLLTDEMIAQYTSALLAGTITSGWTFGAGAALQIPFAMQMAYRFNGIGVTQNVLYENQKLIANQFNSAIGKIQDSLSSTASALGKLQDVVNQNAQALNTLVKQLSSNCGAISSVLNDILSRLDKVEAEVQIDRLITCRLQSLQTYVTQQLIRAAEIRASANLAATKMSECVLGQSKRVDFCGKGYHLMSFPQSAPHGVVFLHVTYVPAQEKNFTTAPAICHDGKAHFPREGVFVSNGTHWFVTQRNFYEPQIITTDNTFVSGNCDVVIGIVNNTVYDPLQPELDSFKEELDKYFKNHTSPDVDLGDISGINASVVNIQKEIDRLNEVAKNLNESLIDLQELGKYEQYIKGGGGSDIDPYKEFGSSYQLLNFLPLDFFPDLNALVDTATALYEEELTGREHCSPHHTAIRQALVCWDELTKLIAWMSSNITSEQVRTIIVNHVNDTWGLKVRQSLWFHLSCLTFGQHTVQEFLVSFGVWIRTPAPYRPPNAPILSTLPEHTVIC

SEQ ID NO: 7410 - protein, 1365 aa, Artificial Sequence
  SARS-CoV-2/USA/WA-UW31/2020__EPI_ISL_414618 spike protein (1-1211)(F970C_G999C) WhcAg construct
MFVFLVLLPLVSSQCVNLTTRTQLPPAYTNSFTRGVYYPDKVFRSSVLHSTQDLFLPFFSNVTWFHAIHVSGTNGTKRFDNPVLPFNDGVYFASTEKSNIIRGWIFGTTLDSKTQSLLIVNNATNVVIKVCEFQFCNDPFLGVYYHKNNKSWMESEFRVYSSANNCTFEYVSQPFLMDLEGKQGNFKNLREFVFKNIDGYFKIYSKHTPINLVRDLPQGFSALEPLVDLPIGINITRFQTLLALHRSYLTPGDSSSGWTAGAAAYYVGYLQPRTFLLKYNENGTITDAVDCALDPLSETKCTLKSFTVEKGIYQTSNFRVQPTESIVRFPNITNLCPFGEVFNATRFASVYAWNRKRISNCVADYSVLYNSASFSTFKCYGVSPTKLNDLCFTNVYADSFVIRGDEVRQIAPGQTGKIADYNYKLPDDFTGCVIAWNSNNLDSKVGGNYNYLYRLFRKSNLKPFERDISTEIYQAGSTPCNGAEGFNCYFPLQSYGFQPTNGVGYQPYRVVVLSFELLHAPATVCGPKKSTNLVKNKCVNFNFNGLTGTGVLTESNKKFLPFQQFGRDIADTTDAVRDPQTLEILDITPCSFGGVSVITPGTNTSNQVAVLYQDVNCTEVPVAIHADQLTPTWRVYSTGSNVFQTRAGCLIGAEHVNNSYECDIPIGAGICASYQTQTNSPRRARSVASQSIIAYTMSLGAENSVAYSNNSIAIPTNFTISVTTEILPVSMTKTSVDCTMYICGDSTECSNLLLQYGSFCTQLNRALTGIAVEQDKNTQEVFAQVKQIYKTPPIKDFGGFNFSQILPDPSKPSKRSFIEDLLFNKVTLADAGFIKQYGDCLGDIAARDLICAQKFNGLTVLPPLLTDEMIAQYTSALLAGTITSGWTFGAGAALQIPFAMQMAYRFNGIGVTQNVLYENQKLIANQFNSAIGKIQDSLSSTASALGKLQDVVNQNAQALNTLVKQLSSNCGAISSVLNDILSRLDKVEAEVQIDRLITCRLQSLQTYVTQQLIRAAEIRASANLAATKMSECVLGQSKRVDFCGKGYHLMSFPQSAPHGVVFLHVTYVPAQEKNFTTAPAICHDGKAHFPREGVFVSNGTHWFVTQRNFYEPQIITTDNTFVSGNCDVVIGIVNNTVYDPLQPELDSFKEELDKYFKNHTSPDVDLGDISGINASVVNIQKEIDRLNEVAKNLNESLIDLQELGKYEQYIKGGGGSDIDPYKEFGSSYQLLNFLPLDFFPDLNALVDTATALYEEELTGREHCSPHHTAIRQALVCWDELTKLIAWMSSNITSEQVRTIIVNHVNDTWGLKVRQSLWFHLSCLTFGQHTVQEFLVSFGVWIRTPAPYRPPNAPILSTLPEHTVIC

SEQ ID NO: 7411 - protein, 1365 aa, Artificial Sequence
  SARS-CoV-2/South Korea/SNU01/2020__EPI_ISL_411929 spike protein (1-1211)(F970C_G999C) WhcAg construct
MFVFLVLLPLVSSQCVNLTTRTQLPPAYTNSFTRGVYYPDKVFRSSVLHSTQDLFLPFFSNVTWFHAIHVSGTNGTKRFDNPVLPFNDGVYFASTEKSNIIRGWIFGTTLDSKTQSLLIVNNATNVVIKVCEFQFCNDPFLGVYYHKNNKSWMESEFRVYSSANNCTFEYVSQPFLMDLEGKQGNFKNLREFVFKNIDGYFKIYSKHTPINLVRDLPQGFWALEPLVDLPIGINITRFQTLLALHRSYLTPGDSSSGWTAGAAAYYVGYLQPRTFLLKYNENGTITDAVDCALDPLSETKCTLKSFTVEKGIYQTSNFRVQPTESIVRFPNITNLCPFGEVFNATRFASVYAWNRKRISNCVADYSVLYNSASFSTFKCYGVSPTKLNDLCFTNVYADSFVIRGDEVRQIAPGQTGKIADYNYKLPDDFTGCVIAWNSNNLDSKVGGNYNYLYRLFRKSNLKPFERDISTEIYQAGSTPCNGVEGFNCYFPLQSYGFQPTNGVGYQPYRVVVLSFELLHAPATVCGPKKSTNLVKNKCVNFNFNGLTGTGVLTESNKKFLPFQQFGRDIADTTDAVRDPQTLEILDITPCSFGGVSVITPGTNTSNQVAVLYQDVNCTEVPVAIHADQLTPTWRVYSTGSNVFQTRAGCLIGAEHVNNSYECDIPIGAGICASYQTQTNSPRRARSVASQSIIAYTMSLGAENSVAYSNNSIAIPTNFTISVTTEILPVSMTKTSVDCTMYICGDSTECSNLLLQYGSFCTQLNRALTGIAVEQDKNTQEVFAQVKQIYKTPPIKDFGGFNFSQILPDPSKPSKRSFIEDLLFNKVTLADAGFIKQYGDCLGDIAARDLICAQKFNGLTVLPPLLTDEMIAQYTSALLAGTITSGWTFGAGAALQIPFAMQMAYRFNGIGVTQNVLYENQKLIANQFNSAIGKIQDSLSSTASALGKLQDVVNQNAQALNTLVKQLSSNCGAISSVLNDILSRLDKVEAEVQIDRLITCRLQSLQTYVTQQLIRAAEIRASANLAATKMSECVLGQSKRVDFCGKGYHLMSFPQSAPHGVVFLHVTYVPAQEKNFTTAPAICHDGKAHFPREGVFVSNGTHWFVTQRNFYEPQIITTDNTFVSGNCDVVIGIVNNTVYDPLQPELDSFKEELDKYFKNHTSPDVDLGDISGINASVVNIQKEIDRLNEVAKNLNESLIDLQELGKYEQYIKGGGGSDIDPYKEFGSSYQLLNFLPLDFFPDLNALVDTATALYEEELTGREHCSPHHTAIRQALVCWDELTKLIAWMSSNITSEQVRTIIVNHVNDTWGLKVRQSLWFHLSCLTFGQHTVQEFLVSFGVWIRTPAPYRPPNAPILSTLPEHTVIC

SEQ ID NO: 7412 - protein, 1365 aa, Artificial Sequence
  SARS-CoV-2/China/WF0004/2020__EPI_ISL_413694 spike protein (1-1211)(F970C_G999C) WhcAg construct
MFVFLVLLPLVSSQCVNLTTRTQLPPAYTNSFTRGVYYPDKVFRSSVLHSTQDLFLPFFSNVTWFHAIHVSGTNGTKRFDNPVLPFNDGVYFASTEKSNIIRGWIFGTTLDSKTQSLLIVNNATNVVIKVCEFQFCNDPFLGVYYHKNNKSWTESEFRVYSSANNCTFEYVSQPFLMDLEGKQGNFKNLREFVFKNIDGYFKIYSKHTPINLVRDLPQGFSALEPLVDLPIGINITRFQTLLALHRSYLTPGDSSSGWTAGAAAYYVGYLQPRTFLLKYNENGTITDAVDCALDPLSETKCTLKSFTVEKGIYQTSNFRVQPTESIVRFPNITNLCPFGEVFNATRFASVYAWNRKRISNCVADYSVLYNSASFSTFKCYGVSPTKLNDLCFTNVYADSFVIRGDEVRQIAPGQTGKIADYNYKLPDDFTGCVIAWNSNNLDSKVGGNYNYLYRLFRKSNLKPFERDISTEIYQAGSTPCNGVEGFNCYFPLQSYGFQPTNGVGYQPYRVVVLSFELLHAPATVCGPKKSTNLVKNKCVNFNFNGLTGTGVLTESNKKFLPFQQFGRDIADTTDAVRDPQTLEILDITPCSFGGVSVITPGTNTSNQVAVLYQDVNCTEVPVAIHADQLTPTWRVYSTGSNVFQTRAGCLIGAEHVNNSYECDIPIGAGICASYQTQTNSPRRARSVASQSIIAYTMSLGAENSVAYSNNSIAIPTNFTISVTTEILPVSMTKTSVDCTMYICGDSTECSNLLLQYGSFCTQLNRALTGIAVEQDKNTQEVFAQVKQIYKTPPIKDFGGFNFSQILPDPSKPSKRSFIEDLLFNKVTLADAGFIKQYGDCLGDIAARDLICAQKFNGLTVLPPLLTDEMIAQYTSALLAGTITSGWTFGAGAALQIPFAMQMAYRFNGIGVTQNVLYENQKLIANQFNSAIGKIQDSLSSTASALGKLQDVVNQNAQALNTLVKQLSSNCGAISSVLNDILSRLDKVEAEVQIDRLITCRLQSLQTYVTQQLIRAAEIRASANLAATKMSECVLGQSKRFDFCGKGYHLMSFPQSAPHGVVFLHVTYVPAQEKNFTTAPAICHDGKAHFPREGVFVSNGTHWFVTQRNFYEPQIITTDNTFVSGNCDVVIGIVNNTVYDPLQPELDSFKEELDKYFKNHTSPDVDLGDISGINASVVNIQKEIDRLNEVAKNLNESLIDLQELGKYEQYIKGGGGSDIDPYKEFGSSYQLLNFLPLDFFPDLNALVDTATALYEEELTGREHCSPHHTAIRQALVCWDELTKLIAWMSSNITSEQVRTIIVNHVNDTWGLKVRQSLWFHLSCLTFGQHTVQEFLVSFGVWIRTPAPYRPPNAPILSTLPEHTVIC

SEQ ID NO: 7413 - protein, 1365 aa, Artificial Sequence
  SARS-CoV-2/China/WF0028/2020__EPI_ISL_413791 spike protein (1-1211)(F970C_G999C) WhcAg construct
MFVFLVLLPLVSSQCVNLTTRTQLPPAYTNSFTRGVYYPDKVFRSSVLHSTQDLFLPFFSNVTWFHAIHVSGTNGTKRFDNPVLPFNDGVYFASTEKSNIIRGWIFGTTLDSKTQSLLIVNNATNVVIKVCEFQFCNDPFLGVYYHKNNKSWMESEFRVYSSANNCTFEYVSQPFLMDLEGKQGNFKNLREFVFKNIDGYFKIYSKHTPINLVRDLPQGFSALEPLVDLPIGINITRFQTLLALHRSYLTPGDSSSGWTAGAAAYYVGYLQPRTFLLKYNENGTITDAVDCALDPLSETKCTLKSFTVEKGIYQTSNFRVQPTESIVRFPNITNLCPFGEVFNATRFASVYAWNRKRISNCVADYSVLYNSASFSTFKCYGVSPTKLNDLCFTNVYADSFVIRGDEVRQIAPGQTGKIADYNYKLPDDFTGCVIAWNSNNLDSKVGGNYNYLYRLFRKSNLKPFERDISTEIYQAGSTPCNGVEGFNCYFPLQSYGFQPTNGVGYQPYRVVVLSFELLHAPATVCGPKKSTNLVKNKCVNFNFNGLTGTGVLTESNKKFLPFQQFGRDIADTTDAVRDPQTLEILDITPCSFGGVSVITPGTNTSNQVAVLYQDVNCTEVPVAIHADQLTPTWRVYSTGSNVFQTRAGCLIGAEHVNNSYECDIPIGAGICASYQTQTNSPRRARSVASQSIIAYTMSLGAENSVAYSNNSIAIPTNFTISVTTEILPVSMTKTSVDCTMYICGDSTECSNLLLQYGSFCTQLNRALTGIAVEQDKNTQEVFAQVKQIYKTPPIKDFGGFNFSQILPDPSKPSKRSFIEDLLFNKVTLADAGFIKQYGDCLGDIAARDLICAQKFNGLTVLPPLLTDEMIAQYTSALLAGTITSGWTFGAGAALQIPFAMQMAYRFNGIGVTQNVLYENQKLIANQFNSAIGKIQDSLSSTASALGKLQDVVNQNAQALNTLVKQLSSNCGAISSVLNDILSRLDKVEAEVQIDRLITCRLQSLQTYVTQQLIRAAEIRASANLAATKMSECVLGQSKRVDFCGKGYHLMSFPQSAPHGVVFLHVTYVPAQEKNFTTAPAICHDGKAHFPREGVFVSNGTHWFVTQRNFYEPQIITTDNTFVSGNCDVVIGIVNNTVYDPLQPELESFKEELDKYFKNHTSPDVDLGDISGINASVVNIQKEIDRLNEVAKNLNESLIDLQELGKYEQYIKGGGGSDIDPYKEFGSSYQLLNFLPLDFFPDLNALVDTATALYEEELTGREHCSPHHTAIRQALVCWDELTKLIAWMSSNITSEQVRTIIVNHVNDTWGLKVRQSLWFHLSCLTFGQHTVQEFLVSFGVWIRTPAPYRPPNAPILSTLPEHTVIC

SEQ ID NO: 7414 - protein, 1365 aa, Artificial Sequence
  SARS-CoV-2/2019-nCoV/USA-CruiseA-18/2020__MT159716.1 spike protein (1-1211)(F970C_G999C) WhcAg construct
MFVFLVLLPLVSSQCVNLTTRTQLPPAYTNSFTRGVYYPDKVFRSSVLHSTQDLFLPFFSNVTWFHAIHVSGTNGTKRFDNPVLPFNDGVYFASTEKSNIIRGWIFGTTLDSKTQSLLIVNNATNVVIKVCEFQFCNDPFLGVYYHKNNKSWMESELRVYSSANNCTFEYVSQPFLMDLEGKQGNFKNLREFVFKNIDGYFKIYSKHTPINLVRDLPQGFSALEPLVDLPIGINITRFQTLLALHRSYLTPGDSSSGWTAGAAAYYVGYLQPRTFLLKYNENGTITDAVDCALDPLSETKCTLKSFTVEKGIYQTSNFRVQPTESIVRFPNITNLCPFGEVFNATRFASVYAWNRKRISNCVADYSVLYNSASFSTFKCYGVSPTKLNDLCFTNVYADSFVIRGDEVRQIAPGQTGKIADYNYKLPDDFTGCVIAWNSNNLDSKVGGNYNYLYRLFRKSNLKPFERDISTEIYQAGSTPCNGVEGFNCYFPLQSYGFQPTNGVGYQPYRVVVLSFELLHAPATVCGPKKSTNLVKNKCVNFNFNGLTGTGVLTESNKKFLPFQQFGRDIADTTDAVRDPQTLEILDITPCSFGGVSVITPGTNTSNQVAVLYQDVNCTEVPVAIHADQLTPTWRVYSTGSNVFQTRAGCLIGAEHVNNSYECDIPIGAGICASYQTQTNSPRRARSVASQSIIAYTMSLGAENSVAYSNNSIAIPTNFTISVTTEILPVSMTKTSVDCTMYICGDSTECSNLLLQYGSFCTQLNRALTGIAVEQDKNTQEVFAQVKQIYKTPPIKDFGGFNFSQILPDPSKPSKRSFIEDLLFNKVTLADAGFIKQYGDCLGDIAARDLICAQKFNGLTVLPPLLTDEMIAQYTSALLAGTITSGWTFGAGAALQIPFAMQMAYRFNGIGVTQNVLYENQKLIANQFNSAIGKIQDSLSSTASALGKLQDVVNQNAQALNTLVKQLSSNCGAISSVLNDILSRLDKVEAEVQIDRLITCRLQSLQTYVTQQLIRAAEIRASANLAATKMSECVLGQSKRVDFCGKGYHLMSFPQSAPHGVVFLHVTYVPAQEKNFTTAPAICHDGKAHFPREGVFVSNGTHWFVTQRNFYEPQIITTDNTFVSGNCDVVIGIVNNTVYDPLQPELDSFKEELDKYFKNHTSPDVDLGDISGINASVVNIQKEIDRLNEVAKNLNESLIDLQELGKYEQYIKGGGGSDIDPYKEFGSSYQLLNFLPLDFFPDLNALVDTATALYEEELTGREHCSPHHTAIRQALVCWDELTKLIAWMSSNITSEQVRTIIVNHVNDTWGLKVRQSLWFHLSCLTFGQHTVQEFLVSFGVWIRTPAPYRPPNAPILSTLPEHTVIC

SEQ ID NO: 7415 - protein, 1365 aa, Artificial Sequence
  SARS-CoV-2/SARS-CoV-2/Yunnan-01/human/2020/CHN__MT049951.1 spike protein (1-1211)(F970C_G999C) WhcAg construct
MFVFLVLLPLVSSQCVNLTTRTQLPPANTNSFTRGVYYPDKVFRSSVLHSTQDLFLPFFSNVTWFHAIHVSGTNGTKRFDNPVLPFNDGVYFASTEKSNIIRGWIFGTTLDSKTQSLLIVNNATNVVIKVCEFQFCNDPFLGVYYHKNNKSWMESEFRVYSSANNCTFEYVSQPFLMDLEGKQGNFKNLREFVFKNIDGYFKIYSKHTPINLVRDLPQGFSALEPLVDLPIGINITRFQTLLALHRSYLTPGDSSSGWTAGAAAYYVGYLQPRTFLLKYNENGTITDAVDCALDPLSETKCTLKSFTVEKGIYQTSNFRVQPTESIVRFPNITNLCPFGEVFNATRFASVYAWNRKRISNCVADYSVLYNSASFSTFKCYGVSPTKLNDLCFTNVYADSFVIRGDEVRQIAPGQTGKIADYNYKLPDDFTGCVIAWNSNNLDSKVGGNYNYLYRLFRKSNLKPFERDISTEIYQAGSTPCNGVEGFNCYFPLQSYGFQPTNGVGYQPYRVVVLSFELLHAPATVCGPKKSTNLVKNKCVNFNFNGLTGTGVLTESNKKFLPFQQFGRDIADTTDAVRDPQTLEILDITPCSFGGVSVITPGTNTSNQVAVLYQDVNCTEVPVAIHADQLTPTWRVYSTGSNVFQTRAGCLIGAEHVNNSYECDIPIGAGICASYQTQTNSPRRARSVASQSIIAYTMSLGAENSVAYSNNSIAIPTNFTISVTTEILPVSMTKTSVDCTMYICGDSTECSNLLLQYGSFCTQLNRALTGIAVEQDKNTQEVFAQVKQIYKTPPIKDFGGFNFSQILPDPSKPSKRSFIEDLLFNKVTLADAGFIKQYGDCLGDIAARDLICAQKFNGLTVLPPLLTDEMIAQYTSALLAGTITSGWTFGAGAALQIPFAMQMAYRFNGIGVTQNVLYENQKLIANQFNSAIGKIQDSLSSTASALGKLQDVVNQNAQALNTLVKQLSSNCGAISSVLNDILSRLDKVEAEVQIDRLITCRLQSLQTYVTQQLIRAAEIRASANLAATKMSECVLGQSKRVDFCGKGYHLMSFPQSAPHGVVFLHVTYVPAQEKNFTTAPAICHDGKAHFPREGVFVSNGTHWFVTQRNFYEPQIITTDNTFVSGNCDVVIGIVNNTVYDPLQPELDSFKEELDKYFKNHTSPDVDLGDISGINASVVNIQKEIDRLNEVAKNLNESLIDLQELGKYEQYIKGGGGSDIDPYKEFGSSYQLLNFLPLDFFPDLNALVDTATALYEEELTGREHCSPHHTAIRQALVCWDELTKLIAWMSSNITSEQVRTIIVNHVNDTWGLKVRQSLWFHLSCLTFGQHTVQEFLVSFGVWIRTPAPYRPPNAPILSTLPEHTVIC

SEQ ID NO: 7416 - protein, 1365 aa, Artificial Sequence
  SARS-CoV-2/USA/WA-UW292/2020__EPI_ISL_418077 spike protein (1-1211)(F970C_G999C) WhcAg construct
MFVFLVLLPLVSSQCVNLTTRTQLPPAYTNSFTRGVYYPDKVFRSSVLHSTQDLFLPFFSNVTWFHAIHVSGTNGTKRFDNPVLPFNDGVYFASTEKSNIIRGWIFGTTLDSKTQSLLIVNNATNVVIKVCEFQFCNDPFLGVYYHKNNKSWMESEFRVYSSANNCTFEYVSQPFLMDLEGKQGNFKNLREFVFKNIDGYFKIYSKHTPINLVRDLPQGFSALEPLVDLPIGINITRFQTLLALHRSYLTPGDSSSGWTAGAAAYYVGYLQPRTFLLKYNENGTITDAVDCALDPLSETKCTLKSFTVEKGIYQTSNFRVQPTESIVRFPNITNLCPFGEVFNATRFASVYAWNRKRISNCVADYSVLYNSASFSTFKCYGVSPTKLNDLCFTNVYADSFVIRGDEVRQIAPGQTGKIADYNYKLPDDFTGCVIAWNSNNLDSKVGGNYNYLYRLFRKSNLKPFERDISTEIYQASSTPCNGVEGFNCYFPLQSYGFQPTNGVGYQPYRVVVLSFELLHAPATVCGPKKSTNLVKNKCVNFNFNGLTGTGVLTESNKKFLPFQQFGRDIADTTDAVRDPQTLEILDITPCSFGGVSVITPGTNTSNQVAVLYQDVNCTEVPVAIHADQLTPTWRVYSTGSNVFQTRAGCLIGAEHVNNSYECDIPIGAGICASYQTQTNSPRRARSVASQSIIAYTMSLGAENSVAYSNNSIAIPTNFTISVTTEILPVSMTKTSVDCTMYICGDSTECSNLLLQYGSFCTQLNRALTGIAVEQDKNTQEVFAQVKQIYKTPPIKDFGGFNFSQILPDPSKPSKRSFIEDLLFNKVTLADAGFIKQYGDCLGDIAARDLICAQKFNGLTVLPPLLTDEMIAQYTSALLAGTITSGWTFGAGAALQIPFAMQMAYRFNGIGVTQNVLYENQKLIANQFNSAIGKIQDSLSSTASALGKLQDVVNQNAQALNTLVKQLSSNCGAISSVLNDILSRLDKVEAEVQIDRLITCRLQSLQTYVTQQLIRAAEIRASANLAATKMSECVLGQSKRVDFCGKGYHLMSFPQSAPHGVVFLHVTYVPAQEKNFTTAPAICHDGKAHFPREGVFVSNGTHWFVTQRNFYEPQIITTDNTFVSGNCDVVIGIVNNTVYDPLQPELDSFKEELDKYFKNHTSPDVDLGDISGINASVVNIQKEIDRLNEVAKNLNESLIDLQELGKYEQYIKGGGGSDIDPYKEFGSSYQLLNFLPLDFFPDLNALVDTATALYEEELTGREHCSPHHTAIRQALVCWDELTKLIAWMSSNITSEQVRTIIVNHVNDTWGLKVRQSLWFHLSCLTFGQHTVQEFLVSFGVWIRTPAPYRPPNAPILSTLPEHTVIC

SEQ ID NO: 7417 - protein, 1365 aa, Artificial Sequence
  SARS-CoV-2/Iceland/192/2020__EPI_ISL_417819 spike protein (1-1211)(F970C_G999C) WhcAg construct
MFVFFVLLPLVSSQCVNLTTRTQLPPAYTNSFTRGVYYPDKVFRSSVLHSTQDLFLPFFSNVTWFHAIHVSGTNGTKRFDNPVLPFNDGVYFASTEKSNIIRGWIFGTTLDSKTQSLLIVNNATNVVIKVCEFQFCNDPFLGVYYHKNNKSWMESEFRVYSSANNCTFEYVSQPFLMDLEGKQGNFKNLREFVFKNIDGYFKIYSKHTPINLVRDLPQGFSALEPLVDLPIGINITRFQTLLALHRSYLTPGDSSSGWTAGAAAYYVGYLQPRTFLLKYNENGTITDAVDCALDPLSETKCTLKSFTVEKGIYQTSNFRVQPTESIVRFPNITNLCPFGEVFNATRFASVYAWNRKRISNCVADYSVLYNSASFSTFKCYGVSPTKLNDLCFTNVYADSFVIRGDEVRQIAPGQTGKIADYNYKLPDDFTGCVIAWNSNNLDSKVGGNYNYLYRLFRKSNLKPFERDISTEIYQAGSTPCNGVEGFNCYFPLQSYGFQPTNGVGYQPYRVVVLSFELLHAPATVCGPKKSTNLVKNKCVNFNFNGLTGTGVLTESNKKFLPFQQFGRDIADTTDAVRDPQTLEILDITPCSFGGVSVITPGTNTSNQVAVLYQGVNCTEVPVAIHADQLTPTWRVYSTGSNVFQTRAGCLIGAEHVNNSYECDIPIGAGICASYQTQTNSPRRARSVASQSIIAYTMSLGAENSVAYSNNSIAIPTNFTISVTTEILPVSMTKTSVDCTMYICGDSTECSNLLLQYGSFCTQLNRALTGIAVEQDKNTQEVFAQVKQIYKTPPIKDFGGFNFSQILPDPSKPSKRSFIEDLLFNKVTLADAGFIKQYGDCLGDIAARDLICAQKFNGLTVLPPLLTDEMIAQYTSALLAGTITSGWTFGAGAALQIPFAMQMAYRFNGIGVTQNVLYENQKLIANQFNSAIGKIQDSLSSTASALGKLQDVVNQNAQALNTLVKQLSSNCGAISSVLNDILSRLDKVEAEVQIDRLITCRLQSLQTYVTQQLIRAAEIRASANLAATKMSECVLGQSKRVDFCGKGYHLMSFPQSAPHGVVFLHVTYVPAQEKNFTTAPAICHDGKAHFPREGVFVSNGTHWFVTQRNFYEPQIITTDNTFVSGNCDVVIGIVNNTVYDPLQPELDSFKEELDKYFKNHTSPDVDLGDISGINASVVNIQKEIDRLNEVAKNLNESLIDLQELGKYEQYIKGGGGSDIDPYKEFGSSYQLLNFLPLDFFPDLNALVDTATALYEEELTGREHCSPHHTAIRQALVCWDELTKLIAWMSSNITSEQVRTIIVNHVNDTWGLKVRQSLWFHLSCLTFGQHTVQEFLVSFGVWIRTPAPYRPPNAPILSTLPEHTVIC

SEQ ID NO: 7418 - protein, 1365 aa, Artificial Sequence
  SARS-CoV-2/Belgium/ULG-6939/2020__EPI_ISL_417020 spike protein (1-1211)(F970C_G999C) WhcAg construct
MFVFLVLLPLVSSQCVNLTTRTQLPPAYTNSFTRGVYYPDKVFRSSVLHSTQDLFLPFFSNVTWFHAIHVSGTNGTKRFDNPVLPFNDGVYFASTEKSNIIRGWIFGTTLDSKTQSLLIVNNATNVVIKVCEFQFCNDPFLGVYYHKNNKSWMESEFRVYSSANNCTFEYVSQPFLMDLEGKQGNFKNLREFVFKNIDGYFKIYSKHTPINLVRDLPQGFSALEPLVDLPIGINITRFQTLLALHRSYLTPGDSSSGWTAGAAAYYVGYLQPRTFLLKYNENGTITDAVDCALDPLSETKCTLKSFTVEKGIYQTSNFRVQPTESIVRFPNITNLCPFGEVFNATRFASVYAWNRKRISNCVADYSVLYNSASFSTFKCYGVSPTKLNDLCFTNVYADSFVIRGDEVRQIAPGQTGKIADYNYKLPDDFTGCVIAWNSNNLDSKVGGNYNYLYRLFRKSNLKPFERDISTEIYQAGSTPCNGVEGFNCYFPLQSYGFQPTNGVGYQPYRVVVLSFELLHAPATVCGPKKSTNLVKNKCVNFNFNGLTGTGVLTESNKKFLPFQQFGRDIADTTDAVRDPQTLEILDITPCSFGGVSVITPGTNTSNQVAVLYQGVNCTEVPVAIHADQLTPTWRVYSTGSNVFQTRAGCLIGAEHVNNSYECDIPIGAGICASYQTQTNSPRRARSVASQSIIAYTMSLGAENSVVYSNNSIAIPTNFTISVTTEILPVSMTKTSVDCTMYICGDSTECSNLLLQYGSFCTQLNRALTGIAVEQDKNTQEVFAQVKQIYKTPPIKDFGGFNFSQILPDPSKPSKRSFIEDLLFNKVTLADAGFIKQYGDCLGDIAARDLICAQKFNGLTVLPPLLTDEMIAQYTSALLAGTITSGWTFGAGAALQIPFAMQMAYRFNGIGVTQNVLYENQKLIANQFNSAIGKIQDSLSSTASALGKLQDVVNQNAQALNTLVKQLSSNCGAISSVLNDILSRLDKVEAEVQIDRLITCRLQSLQTYVTQQLIRAAEIRASANLAATKMSECVLGQSKRVDFCGKGYHLMSFPQSAPHGVVFLHVTYVPAQEKNFTTAPAICHDGKAHFPREGVFVSNGTHWFVTQRNFYEPQIITTDNTFVSGNCDVVIGIVNNTVYDPLQPELDSFKEELDKYFKNHTSPDVDLGDISGINASVVNIQKEIDRLNEVAKNLNESLIDLQELGKYEQYIKGGGGSDIDPYKEFGSSYQLLNFLPLDFFPDLNALVDTATALYEEELTGREHCSPHHTAIRQALVCWDELTKLIAWMSSNITSEQVRTIIVNHVNDTWGLKVRQSLWFHLSCLTFGQHTVQEFLVSFGVWIRTPAPYRPPNAPILSTLPEHTVIC

SEQ ID NO: 7419 - protein, 1365 aa, Artificial Sequence
  SARS-CoV-2/France/HF2496/2020__EPI_ISL_418231 spike protein (1-1211)(F970C_G999C) WhcAg construct
MFVFLVLLPLVSSQCVNLTTRTQLPPAYTNSFTRGVYYPDKVFRSSVLHSTQDLFLPFFSNVTWFHAIHVSGTNGTKRFDNPVLPFNDGVYFASTEKSNIIRGWIFGTTLDSKTQSLLIVNNATNVVIKVCEFQFCNDPFLGVYYHKNNKSWMESEFRVYSSANNCTFEYVSQPFLMDLEGKQGNFKNLREFVFKNIDGYFKIYSKHTPINLVRDLPQGFSALEPLVDLPIGINITRFQTLLALHRSYLTPGDSSSGWTAGAAAYYVGYLQPRTFLLKYNENGTITDAVDCALDPLSETKCTLKSFTVEKGIYQTSNFRVQPTESIVRFPNITNLCPFGEVFNATRFASVYAWNRKRISNCVADYSVLYNSASFSTFKCYGVSPTKLNDLCFTNVYADSFVIRGDEVRQIAPGQTGKIADYNYKLPDDFTGCVIAWNSNNLDSKVGGNYNYLYRLFRKSNLKPFERDISTEIYQAGSTPCNGVEGFNCYFPLQSYGFQPTNGVGYQPYRVVVLSFELLHAPATVCGPKKSTNLVKNKCVNFNFNGLTGTGVLTESNKKFLPFQQFGRDIADTTDAVRDPQTLEILDITPCSFGGVSVITPGTNTSNQVAVLYQGVNCTEVPVAIHADQLTPTWRVYSTGSNVFQTRAGCLIGAEHVNNSYECDIPIGAGICASYQTQTNSPRRARSVASQSIIAYTMSLGAENSVAYSNNSIAIPTNFTISVTTEILPVSMTKTSVDCTMYICGDSTECSNLLLQYGSFCTQLNRALTGIAVEQDKNTQEVFAQVKQIYKTPPIKDFGGFNFSQILPDPSKPSKRSFIEDLLFNKVTLADAGFIKQYGDCLGDIVARDLICAQKFNGLTVLPPLLTDEMIAQYTSALLAGTITSGWTFGAGAALQIPFAMQMAYRFNGIGVTQNVLYENQKLIANQFNSAIGKIQDSLSSTASALGKLQDVVNQNAQALNTLVKQLSSNCGAISSVLNDILSRLDKVEAEVQIDRLITCRLQSLQTYVTQQLIRAAEIRASANLAATKMSECVLGQSKRVDFCGKGYHLMSFPQSAPHGVVFLHVTYVPAQEKNFTTAPAICHDGKAHFPREGVFVSNGTHWFVTQRNFYEPQIITTDNTFVSGNCDVVIGIVNNTVYDPLQPELDSFKEELDKYFKNHTSPDVDLGDISGINASVVNIQKEIDRLNEVAKNLNESLIDLQELGKYEQYIKGGGGSDIDPYKEFGSSYQLLNFLPLDFFPDLNALVDTATALYEEELTGREHCSPHHTAIRQALVCWDELTKLIAWMSSNITSEQVRTIIVNHVNDTWGLKVRQSLWFHLSCLTFGQHTVQEFLVSFGVWIRTPAPYRPPNAPILSTLPEHTVIC

SEQ ID NO: 7420 - protein, 1365 aa, Artificial Sequence
  SARS-CoV-2/USA/WA-UW291/2020__EPI_ISL_418076 spike protein (1-1211)(F970C_G999C) WhcAg construct
MFVFLVLLPLVSSQCVNLTTRTQLPPAYTNSFTRGVYYPDKVFRSSVLHSTQDLFLPFFSNVTWFHAIHVSGTNGTKRFDNPVLPFNDGVYFASTEKSNIIRGWIFGTTLDSKTQSLLIVNNATNVVIKVCEFQFCNDPFLGVYYHKNNKSWMESEFRVYSSANNCTFEYVSQPFLMDLEGKQGNFKNLREFVFKNIDGYFKIYSKHTPINLVRDLPQGFSALEPLVDLPIGINITRFQTLLALHRSYLTPGDSSSGWTAGAAAYYVGYLQPRTFLLKYNENGTITDAVDCALDPLSETKCTLKSFTVEKGIYQTSNFRVQPTESIVRFPNITNLCPFGEVFNATRFASVYAWNRKRISNCVADYSVLYNSASFSTFKCYGVSPTKLNDLCFTNVYADSFVIRGDEVRQIAPGQTGKIADYNYKLPDDFTGCVIAWNSNNLDSKVGGNYNYLYRLFRKSNLKPFERDISTEIYQAGSTPCNGVEGFNCYFPLQSYGFQPTNGVGYQPYRVVVLSFELLHAPATVCGPKKSTNLVKNKCVNFNFNGLTGTGVLTESNKKFLPFQQFGRDIADTTDAVRDPQTLEILDITPCSFGGVSVITPGTNTSNQVAVLYQGVNCTEVPVAIHADQLTPTWRVYSTGSNVFQTRAGCLIGAEHVNNSYECDIPIGAGICASYQTQTNSPRRARSVASQSIIAYTMSLGAENSVAYSNNSIAIPTNFTISVTTEILPVSMTKTSVDCTMYICGDSTECSNLLLQYGSFCTQLNRALTGIAVEQDKNTQEVFAQVKQIYKTPPIKDFGGFNFSQILPDPSKPSKRSFIEDLLFNKVTLADAGFIKQYGDCLGDIAARDLICAQKFNGLTVLPPLLTDEMIAQYTSALLAGTITSGWTFGAGAALQIPFAMQMAYRFNGIGVTQNVLYENQKLIANQFNSAIGKIQYSLSSTASALGKLQDVVNQNAQALNTLVKQLSSNCGAISSVLNDILSRLDKVEAEVQIDRLITCRLQSLQTYVTQQLIRAAEIRASANLAATKMSECVLGQSKRVDFCGKGYHLMSFPQSAPHGVVFLHVTYVPAQEKNFTTAPAICHDGKAHFPREGVFVSNGTHWFVTQRNFYEPQIITTDNTFVSGNCDVVIGIVNNTVYDPLQPELDSFKEELDKYFKNHTSPDVDLGDISGINASVVNIQKEIDRLNEVAKNLNESLIDLQELGKYEQYIKGGGGSDIDPYKEFGSSYQLLNFLPLDFFPDLNALVDTATALYEEELTGREHCSPHHTAIRQALVCWDELTKLIAWMSSNITSEQVRTIIVNHVNDTWGLKVRQSLWFHLSCLTFGQHTVQEFLVSFGVWIRTPAPYRPPNAPILSTLPEHTVIC

SEQ ID NO: 7421 - protein, 1365 aa, Artificial Sequence; identical to SEQ ID NO: 7384
  SARS-CoV-2/Portugal/PT0034/2020__EPI_ISL_418019 spike protein (1-1211)(F970C_G999C) WhcAg construct

SEQ ID NO: 7422 - protein, 1365 aa, Artificial Sequence
  SARS-CoV-2/Iceland/202/2020__EPI_ISL_417750 spike protein (1-1211)(F970C_G999C) WhcAg construct
MFVFLVLLPLVSSQCVNLTTRTQLPPAYTNSFTRGVYYPDKVFRSSVLHSTQDLFLPFFSNVTWFHAIHVSGTNGTKRFDNPVLPFNDGVYFASTEKSNIIRGWIFGTTLDSKTQSLLIVNNATNVVIKVCEFQFCNDPFLGVYYHKNNKSWMESEFRVYSSANNCTFEYVSQPFLMDLEGKQGNFKNLREFVFKNIDGYFKIYSKHTPINLVRDLPQGFSALEPLVDLPIGINITRFQTLLALHRSYLTPGDSSSGWTAGAAAYYVGYLQPRTFLLKYNENGTITDAVDCALDPLSETKCTLKSFTVEKGIYQTSNFRVQPTESIVRFPNITNLCPFGEVFNATRFASVYAWNRKRISNCVADYSVLYNSASFSTFKCYGVSPTKLNDLCFTNVYADSFVIRGDEVRQIAPGQTGKIADYNYKLPDDFTGCVIAWNSNNLDSKVGGNYNYLYRLFRKSNLKPFERDISTEIYQAGSTPCNGVEGFNCYFPLQSYGFQPTNGVGYQPYRVVVLSFELLHAPATVCGPKKSTNLVKNKCVNFNFNGLTGTGVLTESNKKFLPFQQFGRDIADTTDAVRDPQTLEILDITPCSFGGVSVITPGTNTSNQVAVLYQDVNCTEVPVAIHADQLTPTWRVYSTGSNVFQTRAGCLIGAEHVNNSYECDIPIGAGICASYQTQTNSPRRARSVASQSIIAYTMSLGAENSVAYSNNSIAIPTNFTISVTTEILPVSMTKTSVDCTMYICGDSTECSNLLLQYGSFCTQLNRALTGIAVEQDKNTQEVFAQVKQIYKTPPIKDFGGFNFSQILPDPSKPSKRSFIEDLLFNKVTLADAGFIKQYGDCLGDIAARDLICAQKFNGLTVLPPLLTDEMIAQYTSALLAGTITSGWTFGAGAALQIPFAMQMAYRFNGIGVTQNVLYENQKLIANQFNSAIGKIQDSLSSTASALGKLQDVVNQNAQALNTLVKQLSSNCGAISSVLNDILSRLDKVEAEVQIDRLITCRLQSLQTYVTQQLIRAAEIRASANLAATKMSECVLGQSKRVDFCGKGYHLMSFPQSAPHGVVFLHVTYVPAQEKNFTTAPAICHDGKAHFPREGVFVSNGTHWFVTQRNFYEPQIITTDNTFVSGNCDVVIGIVNNTVYDPLQPELDSFKEELDKYFKNHTSPDVDLGDIPGINASVVNIQKEIDRLNEVAKNLNESLIDLQELGKYEQYIKGGGGSDIDPYKEFGSSYQLLNFLPLDFFPDLNALVDTATALYEEELTGREHCSPHHTAIRQALVCWDELTKLIAWMSSNITSEQVRTIIVNHVNDTWGLKVRQSLWFHLSCLTFGQHTVQEFLVSFGVWIRTPAPYRPPNAPILSTLPEHTVIC

SEQ ID NO: 7423 - protein, 1365 aa, Artificial Sequence
  SARS-CoV-2/USA/WA-UW261/2020__EPI_ISL_418046 spike protein (1-1211)(F970C_G999C) WhcAg construct
MFVFLVLLPLVSSQCVNLTTRTQLPPAYTNSFTRGVYYPDKVFRSSVLHSTQDLFLPFFSNVTWFHAIHVSGTNGTKRFDNPVLPFNDGVYFASTEKSNIIRGWIFGTTLDSKTQSLLIVNNATNVVIKVCEFQFCNDPFLGVYYHKNNKSWMESEFRVYSSANNCTFEYVSQPFLMDLEGKQGNFKNLREFVFKNIDGYFKIYSKHTPINLVRDLPQGFSALEPLVDLPIGINITRFQTLLALHRSYLTPGDSSSGWTAGAAAYYVGYLQPRTFLLKYNENGTITDAVDCALDPLSETKCTLKSFTVEKGIYQTSNFRVQPTESIVRFPNITNLCPFGEVFNATRFTSVYAWNRKRISNCVADYSVLYNSASFSTFKCYGVSPTKLNDLCFTNVYADSFVIRGDEVRQIAPGQTGKIADYNYKLPDDFTGCVIAWNSNNLDSKVGGNYNYLYRLFRKSNLKPFERDISTEIYQAGSTPCNGVEGFNCYFPLQSYGFQPTNGVGYQPYRVVVLSFELLHAPATVCGPKKSTNLVKNKCVNFNFNGLTGTGVLTESNKKFLPFQQFGRDIADTTDAVRDPQTLEILDITPCSFGGVSVITPGTNTSNQVAVLYQDVNCTEVPVAIHADQLTPTWRVYSTGSNVFQTRAGCLIGAEHVNNSYECDIPIGAGICASYQTQTNSPRRARSVASQSIIAYTMSLGAENSVAYSNNSIAIPTNFTISVTTEILPVSMTKTSVDCTMYICGDSTECSNLLLQYGSFCTQLNRALTGIAVEQDKNTQEVFAQVKQIYKTPPIKDFGGFNFSQILPDPSKPSKRSFIEDLLFNKVTLADAGFIKQYGDCLGDIAARDLICAQKFNGLTVLPPLLTDEMIAQYTSALLAGTITSGWTFGAGAALQIPFAMQMAYRFNGIGVTQNVLYENQKLIANQFNSAIGKIQDSLSSTASALGKLQDVVNQNAQALNTLVKQLSSNCGAISSVLNDILSRLDKVEAEVQIDRLITCRLQSLQTYVTQQLIRAAEIRASANLAATKMSECVLGQSKRVDFCGKGYHLMSFPQSAPHGVVFLHVTYVPAQEKNFTTAPAICHDGKAHFPREGVFVSNGTHWFVTQRNFYEPQIITTDNTFVSGNCDVVIGIVNNTVYDPLQPELDSFKEELDKYFKNHTSPDVDLGDISGINASVVNIQKEIDRLNEVAKNLNESLIDLQELGKYEQYIKGGGGSDIDPYKEFGSSYQLLNFLPLDFFPDLNALVDTATALYEEELTGREHCSPHHTAIRQALVCWDELTKLIAWMSSNITSEQVRTIIVNHVNDTWGLKVRQSLWFHLSCLTFGQHTVQEFLVSFGVWIRTPAPYRPPNAPILSTLPEHTVIC

SEQ ID NO: 7424 - protein, 1365 aa, Artificial Sequence
  SARS-CoV-2/Portugal/PT0035/2020__EPI_ISL_418020 spike protein (1-1211)(F970C_G999C) WhcAg construct
MFVFLVLLPLVSSQCVNLTTRTQLPPAYTNSFTRGVYYPDKVFRSSVLHSTQDLFLPFFSNVTWFHAIHVSGTNGTKRFDNPVLPFNDGVYFASTEKSNIIRGWIFGTTLDSKTQSLLIVNNATNVVIKVCEFQFCNDPFLGVYYHKNNKSWMESEFRVYSSANNCTFEYVSQPFLMDLEGKQGNFKNLREFVFKNIDGYFKIYSKHTPINLVRDLPQGFSALEPLVDLPIGINITRFQTLLALHRSYLTPGDSSSGWTAGAAAYYVGYLQPRTFLLKYNENGTITDAVDCALDPLSETKCTLKSFTVEKGIYQTSNFRVQPTESIVRFPNITNLCPFGEVFNATRFASVYAWNRKRISNCVADYSVLYNSASFSTFKCYGVSPTKLNDLCFTNVYADSFVIRGDEVRQIAPGQTGKIADYNYKLPDDFTGCVIAWNSNNLDSKVGGNYNYLYRLFRKSNLKPFERDISTEIYQAGSTPCNGVEGFNCYFPLQSYGFQPTNGVGYQPYRVVVLSFELLHAPATVCGPKKSTNLVKNKCVNFNFNGLTGTGVLTESNKKFLPFQQFGRDIADTTDAVRDPQTLEILDITPCSFGGVSVITPGTNTSNQVAVLYQDVNCTEVPVAIHADQLTPTWRVYSTGSNVFQTRAGCLIGAEHVNNSYECDIPIGAGICASYQTQTNSPRRARSVASQSIIAYTMSLGAENSVAYSNNSIAIPTNFTISVTTEILPVSMTKTSVDCTMYICGDSTECSNLLLQYGSFCTQLNRALTGIAVEQDKNTQEVFAQVKQIYKTPPIKDFGGFNFSQILPDPSKPSKRSFIEDLLFNKVTLADAGFIKQYGDCLGDISARDLICAQKFNGLTVLPPLLTDEMIAQYTSALLAGTITSGWTFGAGAALQIPFAMQMAYRFNGIGVTQNVLYENQKLIANQFNSAIGKIQDSLSSTASALGKLQDVVNQNAQALNTLVKQLSSNCGAISSVLNDILSRLDKVEAEVQIDRLITCRLQSLQTYVTQQLIRAAEIRASANLAATKMSECVLGQSKRVDFCGKGYHLMSFPQSAPHGVVFLHVTYVPAQEKNFTTAPAICHDGKAHFPREGVFVSNGTHWFVTQRNFYEPQIITTDNTFVSGNCDVVIGIVNNTVYDPLQPELDSFKEELDKYFKNHTSPDVDLGDISGINASVVNIQKEIDRLNEVAKNLNESLIDLQELGKYEQYIKGGGGSDIDPYKEFGSSYQLLNFLPLDFFPDLNALVDTATALYEEELTGREHCSPHHTAIRQALVCWDELTKLIAWMSSNITSEQVRTIIVNHVNDTWGLKVRQSLWFHLSCLTFGQHTVQEFLVSFGVWIRTPAPYRPPNAPILSTLPEHTVIC

SEQ ID NO: 7425 - protein, 1365 aa, Artificial Sequence
  SARS-CoV-2/USA/NY-NYUMC7/2020__EPI_ISL_418192 spike protein (1-1211)(F970C_G999C) WhcAg construct
MFVFLVLLPLVSSQCVNLTTRTQLPPAYTNSFTRGVYYPDKVFRSSVLHSTQDLFLPFFSNVTWFHAIHVSGTNGTKRFDNPVLPFNDGVYFASTEKSNIIRGWIFGTTLDSKTQSLLIVNNATNVVIKVCEFQFCNDPFLGVYHHKNNKSWMESEFRVYSSANNCTFEYVSQPFLMDLEGKQGNFKNLREFVFKNIDGYFKIYSKHTPINLVRDLPQGFSALEPLVDLPIGINITRFQTLLALHRSYLTPGDSSSGWTAGAAAYYVGYLQPRTFLLKYNENGTITDAVDCALDPLSETKCTLKSFTVEKGIYQTSNFRVQPTESIVRFPNITNLCPFGEVFNATRFASVYAWNRKRISNCVADYSVLYNSASFSTFKCYGVSPTKLNDLCFTNVYADSFVIRGDEVRQIAPGQTGKIADYNYKLPDDFTGCVIAWNSNNLDSKVGGNYNYLYRLFRKSNLKPFERDISTEIYQAGSTPCNGVEGFNCYFPLQSYGFQPTNGVGYQPYRVVVLSFELLHAPATVCGPKKSTNLVKNKCVNFNFNGLTGTGVLTESNKKFLPFQQFGRDIADTTDAVRDPQTLEILDITPCSFGGVSVITPGTNTSNQVAVLYQGVNCTEVPVAIHADQLTPTWRVYSTGSNVFQTRAGCLIGAEHVNNSYECDIPIGAGICASYQTQTNSPRRARSVASQSIIAYTMSLGAENSVAYSNNSIAIPTNFTISVTTEILPVSMTKTSVDCTMYICGDSTECSNLLLQYGSFCTQLNRALTGIAVEQDKNTQEVFAQVKQIYKTPPIKDFGGFNFSQILPDPSKPSKRSFIEDLLFNKVTLADAGFIKQYGDCLGDIAARDLICAQKFNGLTVLPPLLTDEMIAQYTSALLAGTITSGWTFGAGAALQIPFAMQMAYRFNGIGVTQNVLYENQKLIANQFNSAIGKIQDSLSSTASALGKLQDVVNQNAQALNTLVKQLSSNCGAISSVLNDILSRLDKVEAEVQIDRLITCRLQSLQTYVTQQLIRAAEIRASANLAATKMSECVLGQSKRVDFCGKGYHLMSFPQSAPHGVVFLHVTYVPAQEKNFTTAPAICHDGKAHFPREGVFVSNGTHWFVTQRNFYEPQIITTDNTFVSGNCDVVIGIVNNTVYDPLQPELDSFKEELDKYFKNHTSPDVDLGDISGINASVVNIQKEIDRLNEVAKNLNESLIDLQELGKYEQYIKGGGGSDIDPYKEFGSSYQLLNFLPLDFFPDLNALVDTATALYEEELTGREHCSPHHTAIRQALVCWDELTKLIAWMSSNITSEQVRTIIVNHVNDTWGLKVRQSLWFHLSCLTFGQHTVQEFLVSFGVWIRTPAPYRPPNAPILSTLPEHTVIC

SEQ ID NO: 7426 - protein, 1365 aa, Artificial Sequence
  SARS-CoV-2/Iceland/189/2020__EPI_ISL_417709 spike protein (1-1211)(F970C_G999C) WhcAg construct
MFVFLVLLPLVSSQCVNLTTRTQLPPAYTNSFTRGVYYPDKVFRSSVLHSTQDLFLPFFSNVTWFHAIHVSGTNGTKRFDNPVLPFNDGVYFASTEKSNIIRGWIFGTTLDSKTQSLLIVNNATNVVIKVCEFQFCNDPFLGVYYHKNNKSWMESEFRVYSSANNCTFEYVSQPFLMDLEGKQGNFKNLREFVFKNIDGYFKIYSKHTPINLVRDLPQGFSALEPLVDLPIGINITRFQTLLALHRSYLTPGDSSSGWTAGAAAYYVGYLQPRTFLLKYNENGTITDAVDCALDPLSETKCTLKSFTVEKGIYQTSNFRVQPTESIVRFPNITNLCPFGEVFNATRFASVYAWNRKRISNCVADYSVLYNSASFSTFKCYGVSPTKLNDLCFTNVYADSFVIRGDEVRQIAPGQTGKIADYNYKLPDDFTGCVIAWNSNNLDSKVGGNYNYLYRLFRKSNLKPFERDISTEIYQAGSTPCNGVEGFNCYFPLQSYGFQPTNGVGYQPYRVVVLSFELLHAPATVCGPKKSTNLVKNKCVNFNFNGLTGTGVLTESNKKFLPFQQFGRDIADTTDAVRDPQTLEILDITPCSFGGVSVITPGTNTSNQVAVLYQGVNCTEVPVAIHADQLTPTWRVYSTGSNVFQTRAGCLIGAEHVNNSYECDIPIGAGICASYQTQTNSPRRARSVASQSIIAYTMSLGAENSVAYSNNSIAIPTNFTISVTTEILPVSMTKTSVDCTMYICGDSTECSNLLLQYGSFCTQLNRALTGIAVEQDKNTQEVFAQVKQIYKTPPIKDFGGFNFSQILPDPSKPSKRSFIEDLLFNKVTLADAGFTKQYGDCLGDIAARDLICAQKFNGLTVLPPLLTDEMIAQYTSALLAGTITSGWTFGAGAALQIPFAMQMAYRFNGIGVTQNVLYENQKLIANQFNSAIGKIQDSLSSTASALGKLQDVVNQNAQALNTLVKQLSSNCGAISSVLNDILSRLDKVEAEVQIDRLITCRLQSLQTYVTQQLIRAAEIRASANLAATKMSECVLGQSKRVDFCGKGYHLMSFPQSAPHGVVFLHVTYVPAQEKNFTTAPAICHDGKAHFPREGVFVSNGTHWFVTQRNFYEPQIITTDNTFVSGNCDVVIGIVNNTVYDPLQPELDSFKEELDKYFKNHTSPDVDLGDISGINASVVNIQKEIDRLNEVAKNLNESLIDLQELGKYEQYIKGGGGSDIDPYKEFGSSYQLLNFLPLDFFPDLNALVDTATALYEEELTGREHCSPHHTAIRQALVCWDELTKLIAWMSSNITSEQVRTIIVNHVNDTWGLKVRQSLWFHLSCLTFGQHTVQEFLVSFGVWIRTPAPYRPPNAPILSTLPEHTVIC

SEQ ID NO: 7427 - protein, 1365 aa, Artificial Sequence
  SARS-CoV-2/Australia/NSW56/2020__EPI_ISL_417408 spike protein (1-1211)(F970C_G999C) WhcAg construct
MFVFLVLLPLVSSQCVNLTTRTQLPPAYTNSFTRGVYYPDKVFRSSVLHSTQDLFLPFFSNVTWFHAIHVSGTNGTKRFDNPVLPFNDGVYFASTEKSNIIRGWIFGTTLDSKTQSLLIVNNATNVVIKVCEFQFCNDPFLGVYYHKNNKSWMESEFRVYSSANNCTFEYVSQPFLMDLEGKQGNFKNLREFVFKNIDGYFKIYSKHTPINLVRDLPQGFSALEPLVDLPIGINITRFQTLLALHRSYLTPGDSSSGWTAGAAAYYVGYLQPRTFLLKYNENGTITDAVDCALDPLSETKCTLKSFTVEKGIYQTSNFRVQPTESIVRFPNITNLCPFGEVFNATRFASVYAWNRKRISNCVADYSVLYNSASFSTFKCYGVSPTKLNDLCFTNVYADSFVIRGDEVRQIAPGQTGKIADYNYKLPDDFTGCVIAWNSNNLDSKVGGNYNYLYRLFRKSNLKPFERDISTEIYQAGSTPCNGVEGFNCYFPLQSYGFQPTNGVGYQPYRVVVLSFELLHAPATVCGPKKSTNLVKNKCVNFNFNGLTGTGVLTESNKKFLPFQQFGRDIADTTDAVRDPQTLEILDITPCSFGGVSVITPGTNTSNQVAVLYQDVNCTEVPVAIHADQLTPTWRVYSTGSNVFQTRAGCLIGAEHVNNSYECDIPIGAGICASYQTQTNSPRRARSVASQSIIAYTMSLGAENSVAYSNNSIAIPTNFTISVTTEILPVSMTKTSVDCTMYICGDSTECSNLLLQYGSFCTQLNRALTGIAVEQDKNTQEVFAQVKQIYKTPPIKDFGGFNFSQILPDSSKPSKRSFIEDLLFNKVTLADAGFIKQYGDCLGDIAARDLICAQKFNGLTVLPPLLTDEMIAQYTSALLAGTITSGWTFGAGAALQIPFAMQMAYRFNGIGVTQNVLYENQKLIANQFNSAIGKIQDSLSSTASALGKLQDVVNQNAQALNTLVKQLSSNCGAISSVLNDILSRLDKVEAEVQIDRLITCRLQSLQTYVTQQLIRAAEIRASANLAATKMSECVLGQSKRVDFCGKGYHLMSFPQSAPHGVVFLHVTYVPAQEKNFTTAPAICHDGKAHFPREGVFVSNGTHWFVTQRNFYEPQIITTDNTFVSGNCDVVIGIVNNTVYDPLQPELDSFKEELDKYFKNHTSPDVDLGDISGINASVVNIQKEIDRLNEVAKNLNESLIDLQELGKYEQYIKGGGGSDIDPYKEFGSSYQLLNFLPLDFFPDLNALVDTATALYEEELTGREHCSPHHTAIRQALVCWDELTKLIAWMSSNITSEQVRTIIVNHVNDTWGLKVRQSLWFHLSCLTFGQHTVQEFLVSFGVWIRTPAPYRPPNAPILSTLPEHTVIC

SEQ ID NO: 7428 - protein, 1365 aa, Artificial Sequence
  SARS-CoV-2/Iceland/280/2020__EPI_ISL_417608 spike protein (1-1211)(F970C_G999C) WhcAg construct
MFVFLVLLPLVSSQCVNLTTRTQLPPAYTNSFTRGVYYPDKVFRSSVLHSTQDLFLPFFSNVTWFHAIHVSGTNGTKRFDNPVLPFNDGVYFASTEKSNIIRGWIFGTTLDSKTQSLLIVNNATNVVIKVCEFQFCNDPFLGVYYHKNNKSWMESEFRVYSSANNCTFEYVSQPFLMDLEGKQGNFKNLREFVFKNIDGYFKIYSKHTPINLVRDLPQGFSALEPLVDLPIGINITRFQTLLALHRSYLTPGDSSSGWTAGAAAYYVGYLQPRTFLLKYNENGTITDAVDCALDPLSETKCTLKSFTVEKGIYQTSNFRVQPTESIVRFPNITNLCPFGEVFNATRFASVYAWNRKRISNCVADYSVLYNSASFSTFKCYGVSPTKLNDLCFTNVYADSFVIRGDEVRQIAPGQTGKIADYNYKLPDDFTGCVIAWNSNNLDSKVGGNYNYLYRLFRKSNLKPFERDISTEIYQAGSTPCNGVEGFNCYFPLQSYGFQPTNGVGYQPYRVVVLSFELLHAPATVCGPKKSTNLVKNKCVNFNFNGLTGTGVLTESNKKFLPFQQFGRDIADTTDAVRDPQTLEILDITPCSFGGVSVITPGTNTSNQVAVLYQGVNCTEVPVAIHADQLTPTWRVYSTGSNVFQTRAGCLIGAEHVNNSYECDIPIGAGICASYHTQTNSPRRARSVASQSIIAYTMSLGAENSVAYSNNSIAIPTNFTISVTTEILPVSMTKTSVDCTMYICGDSTECSNLLLQYGSFCTQLNRALTGIAVEQDKNTQEVFAQVKQIYKTPPIKDFGGFNFSQILPDPSKPSKRSFIEDLLFNKVTLADAGFIKQYGDCLGDIAARDLICAQKFNGLTVLPPLLTDEMIAQYTSALLAGTITSGWTFGAGAALQIPFAMQMAYRFNGIGVTQNVLYENQKLIANQFNSAIGKIQDSLSSTASALGKLQDVVNQNAQALNTLVKQLSSNCGAISSVLNDILSRLDKVEAEVQIDRLITCRLQSLQTYVTQQLIRAAEIRASANLAATKMSECVLGQSKRVDFCGKGYHLMSFPQSAPHGVVFLHVTYVPAQEKNFTTAPAICHDGKAHFPREGVFVSNGTHWFVTQRNFYEPQIITTDNTFVSGNCDVVIGIVNNTVYDPLQPELDSFKEELDKYFKNHTSPDVDLGDISGINASVVNIQKEIDRLNEVAKNLNESLIDLQELGKYEQYIKGGGGSDIDPYKEFGSSYQLLNFLPLDFFPDLNALVDTATALYEEELTGREHCSPHHTAIRQALVCWDELTKLIAWMSSNITSEQVRTIIVNHVNDTWGLKVRQSLWFHLSCLTFGQHTVQEFLVSFGVWIRTPAPYRPPNAPILSTLPEHTVIC

SEQ ID NO: 7429 - protein, 1365 aa, Artificial Sequence; identical to SEQ ID NO: 7384
  SARS-CoV-2/Iceland/247/2020__EPI_ISL_417575 spike protein (1-1211)(F970C_G999C) WhcAg construct

SEQ ID NO: 7430 - protein, 1365 aa, Artificial Sequence
  SARS-CoV-2/Iceland/238/2020__EPI_ISL_417566 spike protein (1-1211)(F970C_G999C) WhcAg construct
MFVFLVLLPLVSSQCVNLTTRTQLPPAYTNSFTRGVYYPDKVFRSSVLHSTQDLFLPFFSNVTWFHAIHVSGTNGTKRFDNPVLPFNDGVYFASTEKSNIIRGWIFGTTLDSKTQSLLIVNNATNVVIKVCEFQFCNDPFLGVYYHKNNKSWMESEFRVYSSANNCTFEYVSQPFLMDLEGKQGNFKNLREFVFKNIDGYFKIYSKHTPINLVRDLPQGFSALEPLVDLPIGINITRFQTLLALHRSYLTPGDSSSGWTAGAAAYYVGYLQPRTFLLKYNENGTITDAVDCALDPLSETKCTLKSFTVEKGIYQTSNFRVQPTESIVRFPNITNLCPFGEVFNATRFASVYAWNRKRISNCVADYSVLYNSASFSTFKCYGVSPTKLNDLCFTNVYADSFVIRGDEVRQIAPGQTGKIADYNYKLPDDFTGCVIAWNSNNLDSKVGGNYNYLYRLFRKSNLKPFERDISTEIYQAGSTPCNGVEGFNCYFPLQSYGFQPTNGVGYQPYRVVVLSFELLHAPATVCGPKKSTNLVKNKCVNFNFNGLTGTGVLTESNKKFLPFQQFGRDIADTTDAVRDPQTLEILDITPCSFGGVSVITPGTNTSNQVAVLYQGVNCTEVPVAIHADQLTPTWRVYSTGSNVFQTRAGCLIGAEHVNNSYECDIPIGAGICASYQTQTNSPRRARSVASQSIIAYTMSLGAENSVAYSNNSIAIPTNFTISVTTEILPVSMTKTSVDCTMYICGDSTECSNLLLQYGSFCTQLNRALTGIAVEQDKNTQEVFAQVKQIYKTPPIKDFGGFNFSQILPDPSKPSKRSFIEDLLFNKVTLADVGFIKQYGDCLGDIAARDLICAQKFNGLTVLPPLLTDEMIAQYTSALLAGTITSGWTFGAGAALQIPFAMQMAYRFNGIGVTQNVLYENQKLIANQFNSAIGKIQDSLSSTASALGKLQDVVNQNAQALNTLVKQLSSNCGAISSVLNDILSRLDKVEAEVQIDRLITCRLQSLQTYVTQQLIRAAEIRASANLAATKMSECVLGQSKRVDFCGKGYHLMSFPQSAPHGVVFLHVTYVPAQEKNFTTAPAICHDGKAHFPREGVFVSNGTHWFVTQRNFYEPQIITTDNTFVSGNCDVVIGIVNNTVYDPLQPELDSFKEELDKYFKNHTSPDVDLGDISGINASVVNIQKEIDRLNEVAKNLNESLIDLQELGKYEQYIKGGGGSDIDPYKEFGSSYQLLNFLPLDFFPDLNALVDTATALYEEELTGREHCSPHHTAIRQALVCWDELTKLIAWMSSNITSEQVRTIIVNHVNDTWGLKVRQSLWFHLSCLTFGQHTVQEFLVSFGVWIRTPAPYRPPNAPILSTLPEHTVIC

SEQ ID NO: 7431 - protein, 1365 aa, Artificial Sequence
  SARS-CoV-2/Greece/16/2020__EPI_ISL_418265 spike protein (1-1211)(F970C_G999C) WhcAg construct
MFVFLVLLPLVSSQCVNLTTRTQLPPAYTNSFTRGVYYPDKVFRSSVLHSTQDLFLPFFSNVTWFHAIHVSGTNGTKRFDNPVLPFNDGVYFASTEKSNIIRGWIFGTTLDSKTQSLLIVNNATNVVIKVCEFQFCNDPFLGVYYHKNNKSWMESEFRVYSSANNCTFEYVSQPFLMDLEGKQGNFKNLREFVFKNVDGYFKIYSKHTPINLVRDLPQGFSALEPLVDLPIGINITRFQTLLALHRSYLTPGDSSSGWTAGAAAYYVGYLQPRTFLLKYNENGTITDAVDCALDPLSETKCTLKSFTVEKGIYQTSNFRVQPTESIVRFPNITNLCPFGEVFNATRFASVYAWNRKRISNCVADYSVLYNSASFSTFKCYGVSPTKLNDLCFTNVYADSFVIRGDEVRQIAPGQTGKIADYNYKLPDDFTGCVIAWNSNNLDSKVGGNYNYLYRLFRKSNLKPFERDISTEIYQAGSTPCNGVEGFNCYFPLQSYGFQPTNGVGYQPYRVVVLSFELLHAPATVCGPKKSTNLVKNKCVNFNFNGLTGTGVLTESNKKFLPFQQFGRDIADTTDAVRDPQTLEILDITPCSFGGVSVITPGTNTSNQVAVLYQDVNCTEVPVAIHADQLTPTWRVYSTGSNVFQTRAGCLIGAEHVNNSYECDIPIGAGICASYQTQTNSPRRARSVASQSIIAYTMSLGAENSVAYSNNSIAIPTNFTISVTTEILPVSMTKTSVDCTMYICGDSTECSNLLLQYGSFCTQLNRALTGIAVEQDKNTQEVFAQVKQIYKTPPIKDFGGFNFSQILPDPSKPSKRSFIEDLLFNKVTLADAGFIKQYGDCLGDIAARDLICAQKFNGLTVLPPLLTDEMIAQYTSALLAGTITSGWTFGAGAALQIPFAMQMAYRFNGIGVTQNVLYENQKLIANQFNSAIGKIQDSLSSTASALGKLQDVVNQNAQALNTLVKQLSSNCGAISSVLNDILSRLDKVEAEVQIDRLITCRLQSLQTYVTQQLIRAAEIRASANLAATKMSECVLGQSKRVDFCGKGYHLMSFPQSAPHGVVFLHVTYVPAQEKNFTTAPAICHDGKAHFPREGVFVSNGTHWFVTQRNFYEPQIITTDNTFVSGNCDVVIGIVNNTVYDPLQPELDSFKEELDKYFKNHTSPDVDLGDISGINASVVNIQKEIDRLNEVAKNLNESLIDLQELGKYEQYIKGGGGSDIDPYKEFGSSYQLLNFLPLDFFPDLNALVDTATALYEEELTGREHCSPHHTAIRQALVCWDELTKLIAWMSSNITSEQVRTIIVNHVNDTWGLKVRQSLWFHLSCLTFGQHTVQEFLVSFGVWIRTPAPYRPPNAPILSTLPEHTVIC

SEQ ID NO: 7432 - protein, 1365 aa, Artificial Sequence
  SARS-CoV-2/Iceland/319/2020__EPI_ISL_417648 spike protein (1-1211)(F970C_G999C) WhcAg construct
MFVFLVLLPLVSSQCVNLTTRTQLPPAYTNSFTRGVYYPDKVFRSSVLHSTQDLFLPFFSNVTWFHAIHVSGTNGTKRFDNPVLPFNDGVYFASTEKSNIIRGWIFGTTLDSKTQSLLIVNNATNVVIKVCEFQFCNDPFLGVYYHKNNKSWMESEFRVYSSANNCTFEYVSQPFLIDLEGKQGNFKNLREFVFKNIDGYFKIYSKHTPINLVRDLPQGFSALEPLVDLPIGINITRFQTLLALHRSYLTPGDSSSGWTAGAAAYYVGYLQPRTFLLKYNENGTITDAVDCALDPLSETKCTLKSFTVEKGIYQTSNFRVQPTESIVRFPNITNLCPFGEVFNATRFASVYAWNRKRISNCVADYSVLYNSASFSTFKCYGVSPTKLNDLCFTNVYADSFVIRGDEVRQIAPGQTGKIADYNYKLPDDFTGCVIAWNSNNLDSKVGGNYNYLYRLFRKSNLKPFERDISTEIYQAGSTPCNGVEGFNCYFPLQSYGFQPTNGVGYQPYRVVVLSFELLHAPATVCGPKKSTNLVKNKCVNFNFNGLTGTGVLTESNKKFLPFQQFGRDIADTTDAVRDPQTLEILDITPCSFGGVSVITPGTNTSNQVAVLYQGVNCTEVPVAIHADQLTPTWRVYSTGSNVFQTRAGCLIGAEHVNNSYECDIPIGAGICASYQTQTNSPRRARSVASQSIIAYTMSLGAENSVAYSNNSIAIPTNFTISVTTEILPVSMTKTSVDCTMYICGDSTECSNLLLQYGSFCTQLNRALTGIAVEQDKNTQEVFAQVKQIYKTPPIKDFGGFNFSQILPDPSKPSKRSFIEDLLFNKVTLADAGFIKQYGDCLGDIAARDLICAQKFNGLTVLPPLLTDEMIAQYTSALLAGTITSGWTFGAGAALQIPFAMQMAYRFNGIGVTQNVLYENQKLIANQFNSAIGKIQDSLSSTASALGKLQDVVNQNAQALNTLVKQLSSNCGAISSVLNDILSRLDKVEAEVQIDRLITCRLQSLQTYVTQQLIRAAEIRASANLAATKMSECVLGQSKRVDFCGKGYHLMSFPQSAPHGVVFLHVTYVPAQEKNFTTAPAICHDGKAHFPREGVFVSNGTHWFVTQRNFYEPQIITTDNTFVSGNCDVVIGIVNNTVYDPLQPELDSFKEELDKYFKNHTSPDVDLGDISGINASVVNIQKEIDRLNEVAKNLNESLIDLQELGKYEQYIKGGGGSDIDPYKEFGSSYQLLNFLPLDFFPDLNALVDTATALYEEELTGREHCSPHHTAIRQALVCWDELTKLIAWMSSNITSEQVRTIIVNHVNDTWGLKVRQSLWFHLSCLTFGQHTVQEFLVSFGVWIRTPAPYRPPNAPILSTLPEHTVIC

SEQ ID NO: 7433 - protein, 1365 aa, Artificial Sequence
  SARS-CoV-2/Congo/94/2020__EPI_ISL_417947 spike protein (1-1211)(F970C_G999C) WhcAg construct
MFVFLVLLPLVSSQCVNLTTRTQLPPAYTNSFTRGVYYPDKVFRSSVLHSTQDLFLPFFSNVTWFHAIHVSGTNGTKRFDNPVLPFNDGVYFASTEKSNIIRGWIFGTTLDSKTQSLLIVNNATNVVIKVCEFQFCNDPFLGVYYHKNNKSWMESEFRVYSSANNCTFEYVSQPFLMDLEGKQGNFKNLREFVFKNIDGYFKIYSKHTPINLVRDLPQGFSALEPLVDLPIGINITRFQTLLALHRSYLTPGDSSSGWTAGAAAYYVGYLQPRTFLLKYNENGTITDAVDCALDPLSETKCTLKSFTVEKGIYQTSNFRVQPTESIVRFPNITNLCPFGEVFNATRFASVYAWNRKRISNCVADYSVLYNSASFSTFKCYGVSPTKLNDLCFTNVYADSFVIRGDEVRQIAPGQTGKIADYNYKLPDDFTGCVIAWNSNNLDSKVGGNYNYLYRLFRKSNLKPFERDISTEIYQAGSTPCNGVEGFNCYFPLQSYGFQPTNGVGYQPYRVVVLSFELLHAPATVCGPKKSTNLVKNKCVNFNFNGLTGTGVLTESNKKFLPFQQFGRDIADTTDAVRDPQTLEILDITPCSFGGVSVITPGTNTSNQVAVLYQGVNCTEVPVAIHADQLTPTWRVYSTGSNVFQTRAGCLIGAEHVNNSYECDIPIGAGICASYQTQTNSPRRARSVASQSIIAYTMSLGAENSVAYSNNSIAIPTNFTISVTTEILPVSMTKTSVDCTMYICGDSTECSNLLLQYGSFCTQLNRALTGIAVEQDKNTQEVFAQVKQIYKTPPIKDFGGFNFSQILPDPSKPSKRSFIEDILFNKVTLADAGFIKQYGDCLGDIAARDLICAQKFNGLTVLPPLLTDEMIAQYTSALLAGTITSGWTFGAGAALQIPFAMQMAYRFNGIGVTQNVLYENQKLIANQFNSAIGKIQDSLSSTASALGKLQDVVNQNAQALNTLVKQLSSNCGAISSVLNDILSRLDKVEAEVQIDRLITCRLQSLQTYVTQQLIRAAEIRASANLAATKMSECVLGQSKRVDFCGKGYHLMSFPQSAPHGVVFLHVTYVPAQEKNFTTAPAICHDGKAHFPREGVFVSNGTHWFVTQRNFYEPQIITTDNTFVSGNCDVVIGIVNNTVYDPLQPELDSFKEELDKYFKNHTSPDVDLGDISGINASVVNIQKEIDRLNEVAKNLNESLIDLQELGKYEQYIKGGGGSDIDPYKEFGSSYQLLNFLPLDFFPDLNALVDTATALYEEELTGREHCSPHHTAIRQALVCWDELTKLIAWMSSNITSEQVRTIIVNHVNDTWGLKVRQSLWFHLSCLTFGQHTVQEFLVSFGVWIRTPAPYRPPNAPILSTLPEHTVIC

SEQ ID NO: 7434 - protein, 1365 aa, Artificial Sequence
  SARS-CoV-2/Congo/158/2020__EPI_ISL_417950 spike protein (1-1211)(F970C_G999C) WhcAg construct
MFVFLVLLPLVSSQCVNLTTRTQLPPAYTNSFTRGVYYPDKVFRSSVLHSTQDLFLPFFSNVTWFHAIHVSGTNGTKRFDNPVLPFNDGVYFASTEKSNIIRGWIFGTTLDSKTQSLLIVNNATNVVIKVCEFQFCNDPFLGVYYHKNNKSWMESEFRVYSSANNCTFEYVSQPFLMDLEGKQGNFKNLREFVFKNIDGYFKIYSKHTPINLVRDLPQGFSALEPLVDLPIGINITRFQTLLALHRSYLTPGDSSSGWTAGAAAYYVGYLQPRTFLLKYNENGTITDAVDCALDPLSETKCTLKSFTVEKGIYQTSNFRVQPTESIVRFPNITNLCPFGEVFNATRFASVYAWNRKRISNCVADYSVLYNSASFSTFKCYGVSPTKLNDLCFTNVYADSFVIRGDEVRQIAPGQTGKIADYNYKLPDDFTGCVIAWNSNNLDSKVGGNYNYLYRLFRKSNLKPFERDISTEIYQAGSTPCNGVEGFNCYFPLQSYGFQPTNGVGYQPYRVVVLSFELLHAPATVCGPKKSTNLVKNKCVNFNFNGLTGTGVLTESNKKFLPFQQFGRDIADTTDAVRDPQTLEILDITPCSFGGVSVITPGTNTSNQVAVLYQDVNCTEVPVAIHADQLTPTWRVYSTGSNVFQTRAGCLIGAEHVNNSYECDIPIGAGICASYQTQTNSPRRARSVASQSIIAYTMSLGAENSVAYSNNSIAIPTNFTISVTTEILPVSMTKTSVDCTMYICGDSTECSNLLLQYGSFCTQLNRALTGIAVEQDKNTQEVFAQVKQIYKTPPIKDFGGFNFSQILPDPSKPSKRSFIEDLLFNKVTLADAGFIKQYGDCLGDIAARDLICAQKFNGLTVLPPLLTDEMIAQYTSALLAGTITSGWTFGAGAALQIPFAMQMAYRFNGIGVTQNVLYENQKLIANQFNSAIGKIQDSLSSTASALGKLQDVVNQNAQALNTLVKQLSSNCGAISSVLNDILSRLDKVEAEVQIDRLITCRLQSLQTYVTQQLIRAAEIRASANLAATKMSECVLGQSKRVDFCGKGYHLMSFPQSAPHGVVFLHVTYVPAQEKNFTTAPAICHDGKAHFPREGVFVSNGTHWFVTQRNFYEPQIITTDNTFLSGNCDVVIGIVNNTVYDPLQPELDSFKEELDKYFKNHTSPDVDLGDISGINASVVNIQKEIDRLNEVAKNLNESLIDLQELGKYEQYIKGGGGSDIDPYKEFGSSYQLLNFLPLDFFPDLNALVDTATALYEEELTGREHCSPHHTAIRQALVCWDELTKLIAWMSSNITSEQVRTIIVNHVNDTWGLKVRQSLWFHLSCLTFGQHTVQEFLVSFGVWIRTPAPYRPPNAPILSTLPEHTVIC

SEQ ID NO: 7435 - protein, 1365 aa, Artificial Sequence
  SARS-CoV-2/USA/UT-00034/2020__EPI_ISL_417977 spike protein (1-1211)(F970C_G999C) WhcAg construct
MFVFLVLLPLVSSQCVNLTTRTQLPPAYTNSFTRGVYYPDKVFRSSVLHSTQDLFLPFFSNVTWFHAIHVSGTNGTKRFDNPVLPFNDGVYFASTEKSNIIRGWIFGTTLDSKTQSLLIVNNATNVVIKVCEFQFCNDPFLGVYYYKNNKSWMESEFRVYSSANNCTFEYVSQPFLMDLEGKQGNFKNLREFVFKNIDGYFKIYSKHTPINLVRDLPQGFSALEPLVDLPIGINITRFQTLLALHRSYLTPGDSSSGWTAGAAAYYVGYLQPRTFLLKYNENGTITDAVDCALDPLSETKCTLKSFTVEKGIYQTSNFRVQPTESIVRFPNITNLCPFGEVFNATRFASVYAWNRKRISNCVADYSVLYNSASFSTFKCYGVSPTKLNDLCFTNVYADSFVIRGDEVRQIAPGQTGKIADYNYKLPDDFTGCVIAWNSNNLDSKVGGNYNYLYRLFRKSNLKPFERDISTEIYQAGSTPCNGVEGFNCYFPLQSYGFQPTNGVGYQPYRVVVLSFELLHAPATVCGPKKSTNLVKNKCVNFNFNGLTGTGVLTESNKKFLPFQQFGRDIADTTDAVRDPQTLEILDITPCSFGGVSVITPGTNTSNQVAVLYQGVNCTEVPVAIHADQLTPTWRVYSTGSNVFQTRAGCLIGAEHVNNSYECDIPIGAGICASYQTQTNSPRRARSVASQSIIAYTMSLGAENSVAYSNNSIAIPTNFTISVTTEILPVSMTKTSVDCTMYICGDSTECSNLLLQYGSFCTQLNRALTGIAVEQDKNTQEVFAQVKQIYKTPPIKDFGGFNFSQILPDPSKPSKRSFIEDLLFNKVTLADAGFIKQYGDCLGDIAARDLICAQKFNGLTVLPPLLTDEMIAQYTSALLAGTITSGWTFGAGAALQIPFAMQMAYRFNGIGVTQNVLYENQKLIANQFNSAIGKIQDSLSSTASALGKLQDVVNQNAQALNTLVKQLSSNCGAISSVLNDILSRLDKVEAEVQIDRLITCRLQSLQTYVTQQLIRAAEIRASANLAATKMSECVLGQSKRVDFCGKGYHLMSFPQSAPHGVVFLHVTYVPAQEKNFTTAPAICHDGKAHFPREGVFVSNGTHWFVTQRNFYEPQIITTDNTFVSGNCDVVIGIVNNTVYDPLQPELDSFKEELDKYFKNHTSPDVDLGDISGINASVVNIQKEIDRLNEVAKNLNESLIDLQELGKYEQYIKGGGGSDIDPYKEFGSSYQLLNFLPLDFFPDLNALVDTATALYEEELTGREHCSPHHTAIRQALVCWDELTKLIAWMSSNITSEQVRTIIVNHVNDTWGLKVRQSLWFHLSCLTFGQHTVQEFLVSFGVWIRTPAPYRPPNAPILSTLPEHTVIC

SEQ ID NO: 7436 - protein, 1365 aa, Artificial Sequence
  SARS-CoV-2/USA/UT-00033/2020__EPI_ISL_417976 spike protein (1-1211)(F970C_G999C) WhcAg construct
MFVFLVLLPLVSSQCVNLTTRTQLPPAYTNSFTRGVYYPDKVFRSSVLHSTQDLFLPFFSNVTWFHAIHVSGTNGTKRFDNPVLPFNDGVYFASTEKSNIIRGWIFGTTLDSKTQSLLIVNNATNVVIKVCEFQFCNDPFLGVYYHKNNKSWMESEFRVYSSANNCTFEYVSQPFLMDLEGKQGNFKNLREFVFKNIDGYFKIYSKHTPINLVRDLPQGFSALEPLVDLPIGINITRFQTLLALHRSYLTPGDSSSGLTAGAAAYYVGYLQPRTFLLKYNENGTITDAVDCALDPLSETKCTLKSFTVEKGIYQTSNFRVQPTESIVRFPNITNLCPFGEVFNATRFASVYAWNRKRISNCVADYSVLYNSASFSTFKCYGVSPTKLNDLCFTNVYADSFVIRGDEVRQIAPGQTGKIADYNYKLPDDFTGCVIAWNSNNLDSKVGGNYNYLYRLFRKSNLKPFERDISTEIYQAGSTPCNGVEGFNCYFPLQSYGFQPTNGVGYQPYRVVVLSFELLHAPATVCGPKKSTNLVKNKCVNFNFNGLTGTGVLTESNKKFLPFQQFGRDIADTTDAVRDPQTLEILDITPCSFGGVSVITPGTNTSNQVAVLYQGVNCTEVPVAIHADQLTPTWRVYSTGSNVFQTRAGCLIGAEHVNNSYECDIPIGAGICASYQTQTNSPRRARSVASQSIIAYTMSLGAENSVAYSNNSIAIPTNFTISVTTEILPVSMTKTSVDCTMYICGDSTECSNLLLQYGSFCTQLNRALTGIAVEQDKNTQEVFAQVKQIYKTPPIKDFGGFNFSQILPDPSKPSKRSFIEDLLFNKVTLADAGFIKQYGDCLGDIAARDLICAQKFNGLTVLPPLLTDEMIAQYTSALLAGTITSGWTFGAGAALQIPFAMQMAYRFNGIGVTQNVLYENQKLIANQFNSAIGKIQDSLSSTASALGKLQDVVNQNAQALNTLVKQLSSNCGAISSVLNDILSRLDKVEAEVQIDRLITCRLQSLQTYVTQQLIRAAEIRASANLAATKMSECVLGQSKRVDFCGKGYHLMSFPQSAPHGVVFLHVTYVPAQEKNFTTAPAICHDGKAHFPREGVFVSNGTHWFVTQRNFYEPQIITTDNTFVSGNCDVVIGIVNNTVYDPLQPELDSFKEELDKYFKNHTSPDVDLGDISGINASVVNIQKEIDRLNEVAKNLNESLIDLQELGKYEQYIKGGGGSDIDPYKEFGSSYQLLNFLPLDFFPDLNALVDTATALYEEELTGREHCSPHHTAIRQALVCWDELTKLIAWMSSNITSEQVRTIIVNHVNDTWGLKVRQSLWFHLSCLTFGQHTVQEFLVSFGVWIRTPAPYRPPNAPILSTLPEHTVIC

SEQ ID NO: 7437 - protein, 1365 aa, Artificial Sequence
  SARS-CoV-2/USA/WI-13/2020__EPI_ISL_417516 spike protein (1-1211)(F970C_G999C) WhcAg construct
MFVFLVLLPLVSSQCVNLTTRTQLPPAYTNSFTRGVYYPDKVFRSSVLHSTQDLFLPFFSNVTWFHAIHVSGTNGTKRFDNPVLPFNDGVYFASTEKSNIIRGWIFGTTLDSKTQSLLIVNNATNVVIKVCEFQFCNDPFLGVYYHKNNKSWMESEFRVYSSANNCTFEYVSQPFLMDLEGKQGNFKNLREFVFKNIDGYFKIYSKHTPINLVRDLPQGFSALEPLVDLPIGINITRFQTLLALHRSYLTPGDSSSGWTAGAAAYYVGYLQPRTFLLKYNENGTITDAVDCALDPLSETKCTLKSFTVEKGIYQTSNFRVLPTESIVRFPNITNLCPFGEVFNATRFASVYAWNRKRISNCVADYSVLYNSASFSTFKCYGVSPTKLNDLCFTNVYADSFVIRGDEVRQIAPGQTGKIADYNYKLPDDFTGCVIAWNSNNLDSKVGGNYNYLYRLFRKSNLKPFERDISTEIYQAGSTPCNGVEGFNCYFPLQSYGFQPTNGVGYQPYRVVVLSFELLHAPATVCGPKKSTNLVKNKCVNFNFNGLTGTGVLTESNKKFLPFQQFGRDIADTTDAVRDPQTLEILDITPCSFGGVSVITPGTNTSNQVAVLYQGVNCTEVPVAIHADQLTPTWRVYSTGSNVFQTRAGCLIGAEHVNNSYECDIPIGAGICASYQTQTNSPRRARSVASQSIIAYTMSLGAENSVAYSNNSIAIPTNFTISVTTEILPVSMTKTSVDCTMYICGDSTECSNLLLQYGSFCTQLNRALTGIAVEQDKNTQEVFAQVKQIYKTPPIKDFGGFNFSQILPDPSKPSKRSFIEDLLFNKVTLADAGFIKQYGDCLGDIAARDLICAQKFNGLTVLPPLLTDEMIAQYTSALLAGTITSGWTFGAGAALQIPFAMQMAYRFNGIGVTQNVLYENQKLIANQFNSAIGKIQDSLSSTASALGKLQDVVNQNAQALNTLVKQLSSNCGAISSVLNDILSRLDKVEAEVQIDRLITCRLQSLQTYVTQQLIRAAEIRASANLAATKMSECVLGQSKRVDFCGKGYHLMSFPQSAPHGVVFLHVTYVPAQEKNFTTAPAICHDGKAHFPREGVFVSNGTHWFVTQRNFYEPQIITTDNTFVSGNCDVVIGIVNNTVYDPLQPELDSFKEELDKYFKNHTSPDVDLGDISGINASVVNIQKEIDRLNEVAKNLNESLIDLQELGKYEQYIKGGGGSDIDPYKEFGSSYQLLNFLPLDFFPDLNALVDTATALYEEELTGREHCSPHHTAIRQALVCWDELTKLIAWMSSNITSEQVRTIIVNHVNDTWGLKVRQSLWFHLSCLTFGQHTVQEFLVSFGVWIRTPAPYRPPNAPILSTLPEHTVIC

SEQ ID NO: 7438 - protein, 1364 aa, Artificial Sequence
  SARS-CoV-2/India/1-27/2020__EPI_ISL_413522 spike protein (1-1210)(F969C_G998C) WhcAg construct
MFVFLVLLPLVSSQCVNLTTRTQLPPAYTNSFTRGVYYPDKVFRSSVLHSTQDLFLPFFSNVTWFHAIHVSGTNGTKRFDNPVLPFNDGVYFASTEKSNIIRGWIFGTTLDSKTQSLLIVNNATNVVIKVCEFQFCNDPFLGVYHKNNKSWMESEFRVYSSANNCTFEYVSQPFLMDLEGKQGNFKNLREFVFKNIDGYFKIYSKHTPINLVRDLPQGFSALEPLVDLPIGINITRFQTLLALHRSYLTPGDSSSGWTAGAAAYYVGYLQPRTFLLKYNENGTITDAVDCALDPLSETKCTLKSFTVEKGIYQTSNFRVQPTESIVRFPNITNLCPFGEVFNATRFASVYAWNRKRISNCVADYSVLYNSASFSTFKCYGVSPTKLNDLCFTNVYADSFVIRGDEVIQIAPGQTGKIADYNYKLPDDFTGCVIAWNSNNLDSKVGGNYNYLYRLFRKSNLKPFERDISTEIYQAGSTPCNGVEGFNCYFPLQSYGFQPTNGVGYQPYRVVVLSFELLHAPATVCGPKKSTNLVKNKCVNFNFNGLTGTGVLTESNKKFLPFQQFGRDIADTTDAVRDPQTLEILDITPCSFGGVSVITPGTNTSNQVAVLYQDVNCTEVPVAIHADQLTPTWRVYSTGSNVFQTRAGCLIGAEHVNNSYECDIPIGAGICASYQTQTNSPRRARSVASQSIIAYTMSLGAENSVAYSNNSIAIPTNFTISVTTEILPVSMTKTSVDCTMYICGDSTECSNLLLQYGSFCTQLNRALTGIAVEQDKNTQEVFAQVKQIYKTPPIKDFGGFNFSQILPDPSKPSKRSFIEDLLFNKVTLADAGFIKQYGDCLGDIAARDLICAQKFNGLTVLPPLLTDEMIAQYTSALLAGTITSGWTFGAGAALQIPFAMQMAYRFNGIGVTQNVLYENQKLIANQFNSAIGKIQDSLSSTASALGKLQDVVNQNAQALNTLVKQLSSNCGAISSVLNDILSRLDKVEAEVQIDRLITCRLQSLQTYVTQQLIRAAEIRASANLAATKMSECVLGQSKRVDFCGKGYHLMSFPQSAPHGVVFLHVTYVPAQEKNFTTAPAICHDGKAHFPREGVFVSNGTHWFVTQRNFYEPQIITTDNTFVSGNCDVVIGIVNNTVYDPLQPELDSFKEELDKYFKNHTSPDVDLGDISGINASVVNIQKEIDRLNEVAKNLNESLIDLQELGKYEQYIKGGGGSDIDPYKEFGSSYQLLNFLPLDFFPDLNALVDTATALYEEELTGREHCSPHHTAIRQALVCWDELTKLIAWMSSNITSEQVRTIIVNHVNDTWGLKVRQSLWFHLSCLTFGQHTVQEFLVSFGVWIRTPAPYRPPNAPILSTLPEHTVIC

SEQ ID NO: 7439 - protein, 1359 aa, Artificial Sequence
  SARS-CoV-2/pangolin/Guangxi/P4L/2017__EPI_ISL_410538 spike protein (1-1205)(F964C_G993C) WhcAg construct
MFVFLFVLPLVSSQCVNLTTRTGIPPGYTNSSTRGVYYPDKVFRSSILHLTQDLFLPFFSNVTWFNTINYQGGFKKFDNPVLPFNDGVYFASTEKSNIIRGWIFGTTLDARTQSLLIVNNATNVVIKVCEFQFCTDPFLGVYYHNNNKTWVENEFRVYSSANNCTFEYISQPFLMDLEGKQGNFKNLREFVFKNVDGYFKIYSKHTPIDLVRDLPRGFAALEPLVDLPIGINITRFQTLLALHRSYLTPGNLESGWTTGAAAYYVGYLQQRTFLLSYNQNGTITDAVDCSLDPLSETKCTLKSLTVEKGIYQTSNFRVQPTISIVRFPNITNLCPFGEVFNASKFASVYAWNRKRISNCVADYSVLYNSTSFSTFKCYGVSPTKLNDLCFTNVYADSFVVKGDEVRQIAPGQTGVIADYNYKLPDDFTGCVIAWNSVKQDALTGGNYGYLYRLFRKSKLKPFERDISTEIYQAGSTPCNGQVGLNCYYPLERYGFHPTTGVNYQPFRVVVLSFELLNGPATVCGPKLSTTLVKDKCVNFNFNGLTGTGVLTTSKKQFLPFQQFGRDISDTTDAVRDPQTLEILDITPCSFGGVSVITPGTNTSNQVAVLYQDVNCTEVPMAIHAEQLTPAWRVYSAGANVFQTRAGCLVGAEHVNNSYECDIPVGAGICASYHSMSSLRSVNQRSIIAYTMSLGAENSVAYSNNSIAIPTNFTISVTTEILPVSMTKTSVDCTMYICGDSIECSNLLLQYGSFCTQLNRALTGIAVEQDKNTQEVFAQVKQIYKTPPIKDFGGFNFSQILPDPSKPSKRSFIEDLLFNKVTLADAGFIKQYGDCLGDIAARDLICAQKFNGLTVLPPLLTDEMIAQYTSALLAGTITSGWTFGAGAALQIPFAMQMAYRFNGIGVTQNVLYENQKLIANQFNSAIGKIQDSLSSTASALGKLQDVVNQNAQALNTLVKQLSSNCGAISSVLNDILSRLDKVEAEVQIDRLITCRLQSLQTYVTQQLIRAAEIRASANLAATKMSECVLGQSKRVDFCGKGYHLMSFPQSAPHGVVFLHVTYVPAQEKNFTTAPAICHEGKAHFPREGVFVSNGTHWFITQRNFYEPQIITTDNTFVSGSCDVVIGIVNNTVYDPLQPELDSFKEELDKYFKNHTSPDVDLGDISGINASVVNIQKEIDRLNEVAKNLNESPIDLQELGKYEQYIKGGGGSDIDPYKEFGSSYQLLNFLPLDFFPDLNALVDTATALYEEELTGREHCSPHHTAIRQALVCWDELTKLIAWMSSNITSEQVRTIIVNHVNDTWGLKVRQSLWFHLSCLTFGQHTVQEFLVSFGVWIRTPAPYRPPNAPILSTLPEHTVIC

SEQ ID NO: 7440 - protein, 1359 aa, Artificial Sequence
  SARS-CoV-2/pangolin/Guangxi/P5L/2017__EPI_ISL_410540 spike protein (1-1205)(F964C_G993C) WhcAg construct
MFVFLFVLPLVSSQCVNLTTRTGIPPGYTNSSTRGVYYPDKVFRSSILHLTQDLFLPFFSNVTWFNTINYQGGFKKFDNPVLPFNDGVYFASTEKSNIIRGWIFGTTLDARTQSLLIVNNATNVVIKVCEFQFCTDPFLGVYYHNNNKTWVENEFRVYSSANNCTFEYISQPFLMDLEGKQGNFKNLREFVFKNVDGYFKIYSKHTPIDLVRDLPRGFAALEPLVDLPIGINITRFQTLLALHRSYLTPGKLESGWTTGAAAYYVGYLQQRTFLLSYNQNGTITDAVDCSLDPLSETKCTLKSLTVEKGIYQTSNFRVQPTISIVRFPNITNLCPFGEVFNASKFASVYAWNRKRISNCVADYSVLYNSTSFSTFKCYGVSPTKLNDLCFTNVYADSFVVKGDEVRQIAPGQTGVIADYNYKLPDDFTGCVIAWNSVKQDALTGGNYGYLYRLFRKSKLKPFERDISTEIYQAGSTPCNGQVGLNCYYPLERYGFHPTTGVNYQPFRVVVLSFELLNGPATVCGPKLSTTLVKDKCVNFNFNGLTGTGVLTTSKKQFLPFQQFGRDISDTTDAVRDPQTLEILDITPCSFGGVSVITPGTNTSNQVAVLYQDVNCTEVPMAIHAEQLTPAWRVYSAGANVFQTRAGCLVGAEHVNNSYECDIPVGAGICASYHSMSSFRSVNQRSIIAYTMSLGAENSVAYSNNSIAIPTNFTISVTTEILPVSMTKTSVDCTMYICGDSIECSNLLLQYGSFCTQLNRALTGIAVEQDKNTQEVFAQVKQIYKTPPIKDFGGFNFSQILPDPSKPSKRSFIEDLLFNKVTLADAGFIKQYGDCLGDIAARDLICAQKFNGLTVLPPLLTDEMIAQYTSALLAGTITSGWTFGAGAALQIPFAMQMAYRFNGIGVTQNVLYENQKLIANQFNSAIGKIQDSLSSTASALGKLQDVVNQNAQALNTLVKQLSSNCGAISSVLNDILSRLDKVEAEVQIDRLITCRLQSLQTYVTQQLIRAAEIRASANLAATKMSECVLGQSKRVDFCGKGYHLMSFPQSAPHGVVFLHVTYVPAQEKNFTTAPAICHEGKAHFPREGVFVSNGTHWFITQRNFYEPQIITTDNTFVSGSCDVVIGIVNNTVYDPLQPELDSFKEELDKYFKNHTSPDVDLGDISGINASVVNIQKEIDRLNEVAKNLNESLIDLQELGKYEQYIKGGGGSDIDPYKEFGSSYQLLNFLPLDFFPDLNALVDTATALYEEELTGREHCSPHHTAIRQALVCWDELTKLIAWMSSNITSEQVRTIIVNHVNDTWGLKVRQSLWFHLSCLTFGQHTVQEFLVSFGVWIRTPAPYRPPNAPILSTLPEHTVIC

SEQ ID NO: 7441 - protein, 1359 aa, Artificial Sequence
  SARS-CoV-2/pangolin/Guangxi/P5E/2017__EPI_ISL_410541 spike protein (1-1205)(F964C_G993C) WhcAg construct
MFVFLFVLPLVSSQCVNLTTRTGIPPGYTNSSTRGVYYPDKVFRSSILHLTQDLFLPFFSNVTWFNTITYQGGSKKFDNPVLPFNDGVYFASTEKSNIIRGWIFGTTLDARTQSLLIVNNATNVVIKVCEFQFCTDPFLGVYYHNNNKTWVENEFRVYSSANNCTFEYISQPFLMDLEGKQGNFKNLREFVFKNVDGYFKIYSKHTPIDLVRDLPRGFAALEPLVDLPIGINITRFQTLLALHRSYLTPGKLESGWTTGAAAYYVGYLQQRTFLLSYNQNGTITDAVDCSLDPLSETKCTLKSLTVEKGIYQTSNFRVQPTISIVRFPNITNLCPFGEVFNASKFASVYAWNRKRISNCVADYSVLYNSTSFSTFKCYGVSPTKLNDLCFTNVYADSFVVKGDEVRQIAPGQTGVIADYNYKLPDDFTGCVIAWNSVKQDALTGDNYGYLYRLFRKSKLKPFERDISTEIYQAGSTPCNGQVGLNCYYPLERYGFHPTTGVNYQPFRVVVLSFELLNGPATVCGPKLSTTLVKDKCVNFNFNGLTGTGVLTTSKKQFLPFQQFGRDISDTTDAVRDPQTLEILDITPCSFGGVSVITPGTNTSNQVAVLYQDVNCTEVPMAIHAEQLTPAWRVYSAGANVFQTRAGCLVGAEHVNNSYECDIPVGAGICASYHSMSSFRSVNQRSIIAYTMSLGAENSVAYSNNSIAIPTNFTISVTTEILPVSMTKTSVDCTMYICGDSIECSNLLLQYGSFCTQLNRALTGIAVEQDKNTQEVFAQVKQIYKTPPIKDFGGFNFSQILPDPSKPSKRSFIEDLLFNKVTLADAGFIKQYGDCLGDIAARDLICAQKFNGLTVLPPLLTDEMIAQYTSALLAGTITSGWTFGAGAALQIPFAMQMAYRFNGIGVTQNVLYENQKLIANQFNSAIGKIQDSLSSTASALGKLQDVVNQNAQALNTLVKQLSSNCGAISSVLNDILSRLDKVEAEVQIDRLITCRLQSLQTYVTQQLIRAAEIRASANLAATKMSECVLGQSKRVDFCGKGYHLMSFPQSAPHGVVFLHVTYVPAQEKNFTTAPAICHEGKAHFPREGVFVSNGTHWFITQRNFYEPQIITTDNTFVSGSCDVVIGIVNNTVYDPLQPELDSFKEELDKYFKNHTSPDVDLGDISGINASVVNIQKEIDRLNEVAKNLNESLIDLQELGKYEQYIKGGGGSDIDPYKEFGSSYQLLNFLPLDFFPDLNALVDTATALYEEELTGREHCSPHHTAIRQALVCWDELTKLIAWMSSNITSEQVRTIIVNHVNDTWGLKVRQSLWFHLSCLTFGQHTVQEFLVSFGVWIRTPAPYRPPNAPILSTLPEHTVIC

SEQ ID NO: 7442 - protein, 1357 aa, Artificial Sequence
  SARS-CoV-2/pangolin/Guangxi/P1E/2017__EPI_ISL_410539 spike protein (1-1203)(F962C_G991C) WhcAg construct
MFVFLFVLPLVSSQCVNLTTRTGIQPGYTNSSTRGVYYPDKVFRSSILHLTQDLFLPFFSNVTWFNTINYQGGFKKFDNPVLPFNDGVYFASTEKSNIIRGWIFGTTLDARTQSLLIVNNATNVVIKVCEFQFCTDPFLGVYYHNNNKTWVENEFRVYSSANNCTFEYISQPFLMDLEGKQGNFKNLREFVFKNVDGYFKIYSKHTPIDLVRDLPRGFAALEPLVDLPIGINITRFQTLLALHRSYLTPGKLESGWTTGAAAYYVGYLQQRTFLLSYNQNGTITDAVDCSLDPLSETKCTLKSLTVEKGIYQTSNFRVQPTISIVRFPNITNLCPFGEVFNASKFASVYAWNRKRISNCVADYSVLYNSTSFSTFKCYGVSPTKLNDLCFTNVYADSFVVKGDEVRQIAPGQTGVIADYNYKLPDDFTGCVIAWNSVKQDALTGGNYLYRLFRKSKLKPFERDISTEIYQAGSTPCNGQVGLNCYYPLERYGFHPTTGVNYQPFRVVVLSFELLNGPATVCGPKLSTTLVKDKCVNFNFNGLTGTGVLTTSKKQFLPFQQFGRDISDTTDAVRDPQTLEILDITPCSFGGVSVITPGTNTSNQVAVLYQDVNCTEVPMAIHAEQLTPAWRVYSAGANVFQTRAGCLVGAEHVNNSYECDIPVGAGICASYHSMSSLRSVNQRSIIAYTMSLGAENSVAYSNNSIAIPTNFTISVTTEILPVSMTKTSVDCTMYICGDSIECSNLLLQYGSFCTQLNRALTGIAVEQDKNTQEVFAQVKQIYKTPPIKDFGGFNFSQILPDPSKPSKRSFIEDLLFNKVTLADAGFIKQYGDCLGDIAARDLICAQKFNGLTVLPPLLTDEMIAQYTSALLAGTITSGWTFGAGAALQIPFAMQMAYRFNGIGVTQNVLYENQKLIANQFNSAIGKIQDSLSSTASALGKLQDVVNQNAQALNTLVKQLSSNCGAISSVLNDILSRLDKVEAEVQIDRLITCRLQSLQTYVTQQLIRAAEIRASANLAATKMSECVLGQSKRVDFCGKGYHLMSFPQSAPHGVVFLHVTYVPAQEKNFTTAPAICHEGKAHFPREGVFVSNGTHWFITQRNFYEPQIITTDNTFVSGSCDVVIGIVNNTVYDPLQPELDSFKEELDKYFKNHTSPDVDLGDISGINASVVNIQKEIDRLNEVAKNLNESLIDLQELGKYEQYIKGGGGSDIDPYKEFGSSYQLLNFLPLDFFPDLNALVDTATALYEEELTGREHCSPHHTAIRQALVCWDELTKLIAWMSSNITSEQVRTIIVNHVNDTWGLKVRQSLWFHLSCLTFGQHTVQEFLVSFGVWIRTPAPYRPPNAPILSTLPEHTVIC

SEQ ID NO: 7443 - protein, 1365 aa, Artificial Sequence
  SARS-CoV-2/Wuhan/WIV05/2019__EPI_ISL_402128 spike protein (1-1211)(A972C_R995C) WhcAg construct
MFVFLVLLPLVSSQCVNLTTRTQLPPAYTNSFTRGVYYPDKVFRSSVLHSTQDLFLPFFSNVTWFHAIHVSGTNGTKRFDNPVLPFNDGVYFASTEKSNIIRGWIFGTTLDSKTQSLLIVNNATNVVIKVCEFQFCNDPFLGVYYHKNNKSWMESEFRVYSSANNCTFEYVSQPFLMDLEGKQGNFKNLREFVFKNIDGYFKIYSKHTPINLVRDLPQGFSALEPLVDLPIGINITRFQTLLALHRSYLTPGDSSSGWTAGAAAYYVGYLQPRTFLLKYNENGTITDAVDCALDPLSETKCTLKSFTVEKGIYQTSNFRVQPTESIVRFPNITNLCPFGEVFNATRFASVYAWNRKRISNCVADYSVLYNSASFSTFKCYGVSPTKLNDLCFTNVYADSFVIRGDEVRQIAPGQTGKIADYNYKLPDDFTGCVIAWNSNNLDSKVGGNYNYLYRLFRKSNLKPFERDISTEIYQAGSTPCNGVEGFNCYFPLQSYGFQPTNGVGYQPYRVVVLSFELLHAPATVCGPKKSTNLVKNKCVNFNFNGLTGTGVLTESNKKFLPFQQFGRDIADTTDAVRDPQTLEILDITPCSFGGVSVITPGTNTSNQVAVLYQDVNCTEVPVAIHADQLTPTWRVYSTGSNVFQTRAGCLIGAEHVNNSYECDIPIGAGICASYQTQTNSPRRARSVASQSIIAYTMSLGAENSVAYSNNSIAIPTNFTISVTTEILPVSMTKTSVDCTMYICGDSTECSNLLLQYGSFCTQLNRALTGIAVEQDKNTQEVFAQVKQIYKTPPIKDFGGFNFSQILPDPSKPSKRSFIEDLLFNKVTLADAGFIKQYGDCLGDIAARDLICAQKFNGLTVLPPLLTDEMIAQYTSALLAGTITSGWTFGAGAALQIPFAMQMAYRFNGIGVTQNVLYENQKLIANQFNSAIGKIQDSLSSTASALGKLQDVVNQNAQALNTLVKQLSSNFGCISSVLNDILSRLDKVEAEVQIDCLITGRLQSLQTYVTQQLIRAAEIRASANLAATKMSECVLGQSKRVDFCGKGYHLMSFPQSAPHGVVFLHVTYVPAQEKNFTTAPAICHDGKAHFPREGVFVSNGTHWFVTQRNFYEPQIITTDNTFVSGNCDVVIGIVNNTVYDPLQPELDSFKEELDKYFKNHTSPDVDLGDISGINASVVNIQKEIDRLNEVAKNLNESLIDLQELGKYEQYIKGGGGSDIDPYKEFGSSYQLLNFLPLDFFPDLNALVDTATALYEEELTGREHCSPHHTAIRQALVCWDELTKLIAWMSSNITSEQVRTIIVNHVNDTWGLKVRQSLWFHLSCLTFGQHTVQEFLVSFGVWIRTPAPYRPPNAPILSTLPEHTVIC

SEQ ID NO: 7444 - protein, 1361 aa, Artificial Sequence
  SARS-CoV-2/bat/Yunnan/RaTG13/2013__EPI_ISL_402131 spike protein (1-1207)(A968C_R991C) WhcAg construct
MFVFLVLLPLVSSQCVNLTTRTQLPPAYTNSSTRGVYYPDKVFRSSVLHLTQDLFLPFFSNVTWFHAIHVSGTNGIKRFDNPVLPFNDGVYFASTEKSNIIRGWIFGTTLDSKTQSLLIVNNATNVVIKVCEFQFCNDPFLGVYYHKNNKSWMESEFRVYSSANNCTFEYVSQPFLMDLEGKQGNFKNLREFVFKNIDGYFKIYSKHTPINLVRDLPPGFSALEPLVDLPIGINITRFQTLLALHRSYLTPGDSSSGWTAGAAAYYVGYLQPRTFLLKYNENGTITDAVDCALDPLSETKCTLKSFTVEKGIYQTSNFRVQPTDSIVRFPNITNLCPFGEVFNATTFASVYAWNRKRISNCVADYSVLYNSTSFSTFKCYGVSPTKLNDLCFTNVYADSFVITGDEVRQIAPGQTGKIADYNYKLPDDFTGCVIAWNSKHIDAKEGGNFNYLYRLFRKANLKPFERDISTEIYQAGSKPCNGQTGLNCYYPLYRYGFYPTDGVGHQPYRVVVLSFELLNAPATVCGPKKSTNLVKNKCVNFNFNGLTGTGVLTESNKKFLPFQQFGRDIADTTDAVRDPQTLEILDITPCSFGGVSVITPGTNASNQVAVLYQDVNCTEVPVAIHADQLTPTWRVYSTGSNVFQTRAGCLIGAEHVNNSYECDIPIGAGICASYQTQTNSRSVASQSIIAYTMSLGAENSVAYSNNSIAIPTNFTISVTTEILPVSMTKTSVDCTMYICGDSTECSNLLLQYGSFCTQLNRALTGIAVEQDKNTQEVFAQVKQIYKTPPIKDFGGFNFSQILPDPSKPSKRSFIEDLLFNKVTLADAGFIKQYGDCLGDIAARDLICAQKFNGLTVLPPLLTDEMIAQYTSALLAGTITSGWTFGAGAALQIPFAMQMAYRFNGIGVTQNVLYENQKLIANQFNSAIGKIQDSLSSTASALGKLQDVVNQNAQALNTLVKQLSSNFGCISSVLNDILSRLDKVEAEVQIDCLITGRLQSLQTYVTQQLIRAAEIRASANLAATKMSECVLGQSKRVDFCGKGYHLMSFPQSAPHGVVFLHVTYVPAQEKNFTTAPAICHDGKAHFPREGVFVSNGTHWFVTQRNFYEPQIITTDNTFVSGSCDVVIGIVNNTVYDPLQPELDSFKEELDKYFKNHTSPDVDLGDISGINASVVNIQKEIDRLNEVAKNLNESLIDLQELGKYEQYIKGGGGSDIDPYKEFGSSYQLLNFLPLDFFPDLNALVDTATALYEEELTGREHCSPHHTAIRQALVCWDELTKLIAWMSSNITSEQVRTIIVNHVNDTWGLKVRQSLWFHLSCLTFGQHTVQEFLVSFGVWIRTPAPYRPPNAPILSTLPEHTVIC

SEQ ID NO: 7445 - protein, 1365 aa, Artificial Sequence
  SARS-CoV-2/Wuhan/HBCDC-HB-01/2019__EPI_ISL_402132 spike protein (1-1211)(A972C_R995C) WhcAg construct
MFVFLVLLPLVSSQCVNLTTRTQLPPAYTNSITRGVYYPDKVFRSSVLHSTQDLFLPFFSNVTWFHAIHVSGTNGTKRFDNPVLPFNDGVYFASTEKSNIIRGWIFGTTLDSKTQSLLIVNNATNVVIKVCEFQFCNDPFLGVYYHKNNKSWMESEFRVYSSANNCTFEYVSQPFLMDLEGKQGNFKNLREFVFKNIDGYFKIYSKHTPINLVRDLPQGFSALEPLVDLPIGINITRFQTLLALHRSYLTPGDSSSGWTAGAAAYYVGYLQPRTFLLKYNENGTITDAVDCALDPLSETKCTLKSFTVEKGIYQTSNFRVQPTESIVRFPNITNLCPFGEVFNATRFASVYAWNRKRISNCVADYSVLYNSASFSTFKCYGVSPTKLNDLCFTNVYADSFVIRGDEVRQIAPGQTGKIADYNYKLPDDFTGCVIAWNSNNLDSKVGGNYNYLYRLFRKSNLKPFERDISTEIYQAGSTPCNGVEGFNCYFPLQSYGFQPTNGVGYQPYRVVVLSFELLHAPATVCGPKKSTNLVKNKCVNFNFNGLTGTGVLTESNKKFLPFQQFGRDIADTTDAVRDPQTLEILDITPCSFGGVSVITPGTNTSNQVAVLYQDVNCTEVPVAIHADQLTPTWRVYSTGSNVFQTRAGCLIGAEHVNNSYECDIPIGAGICASYQTQTNSPRRARSVASQSIIAYTMSLGAENSVAYSNNSIAIPTNFTISVTTEILPVSMTKTSVDCTMYICGDSTECSNLLLQYGSFCTQLNRALTGIAVEQDKNTQEVFAQVKQIYKTPPIKDFGGFNFSQILPDPSKPSKRSFIEDLLFNKVTLADAGFIKQYGDCLGDIAARDLICAQKFNGLTVLPPLLTDEMIAQYTSALLAGTITSGWTFGAGAALQIPFAMQMAYRFNGIGVTQNVLYENQKLIANQFNSAIGKIQDSLSSTASALGKLQDVVNQNAQALNTLVKQLSSNFGCISSVLNDILSRLDKVEAEVQIDCLITGRLQSLQTYVTQQLIRAAEIRASANLAATKMSECVLGQSKRVDFCGKGYHLMSFPQSAPHGVVFLHVTYVPAQEKNFTTAPAICHDGKAHFPREGVFVSNGTHWFVTQRNFYEPQIITTDNTFVSGNCDVVIGIVNNTVYDPLQPELDSFKEELDKYFKNHTSPDVDLGDISGINASVVNIQKEIDRLNEVAKNLNESLIDLQELGKYEQYIKGGGGSDIDPYKEFGSSYQLLNFLPLDFFPDLNALVDTATALYEEELTGREHCSPHHTAIRQALVCWDELTKLIAWMSSNITSEQVRTIIVNHVNDTWGLKVRQSLWFHLSCLTFGQHTVQEFLVSFGVWIRTPAPYRPPNAPILSTLPEHTVIC

SEQ ID NO: 7446 - protein, 1365 aa, Artificial Sequence
  SARS-CoV-2/Guangdong/20SF028/2020__EPI_ISL_403936 spike protein (1-1211)(A972C_R995C) WhcAg construct
MFVFLVLLPLVSSQCVNLTTRTQLPPAYTNSFTRGVYYPDKVFRSSVLYSTQDLFLPFFSNVTWFHAIHVSGTNGTKRFDNPVLPFNDGVYFASTEKSNIIRGWIFGTTLDSKTQSLLIVNNATNVVIKVCEFQFCNDPFLGVYYHKNNKSWMESEFRVYSSANNCTFEYVSQPFLMDLEGKQGNFKNLREFVFKNIDGYFKIYSKHTPINLVRDLPQGFSALEPLVDLPIGINITRFQTLLALHRSYLTPGDSSSGWTAGAAAYYVGYLQPRTFLLKYNENGTITDAVDCALDPLSETKCTLKSFTVEKGIYQTSNFRVQPTESIVRFPNITNLCPFGEVFNATRFASVYAWNRKRISNCVADYSVLYNSASFSTFKCYGVSPTKLNDLCFTNVYADSFVIRGDEVRQIAPGQTGKIADYNYKLPDDFTGCVIAWNSNNLDSKVGGNYNYLYRLFRKSNLKPFERDISTEIYQAGSTPCNGVEGFNCYFPLQSYGFQPTNGVGYQPYRVVVLSFELLHAPATVCGPKKSTNLVKNKCVNFNFNGLTGTGVLTESNKKFLPFQQFGRDIADTTDAVRDPQTLEILDITPCSFGGVSVITPGTNTSNQVAVLYQDVNCTEVPVAIHADQLTPTWRVYSTGSNVFQTRAGCLIGAEHVNNSYECDIPIGAGICASYQTQTNSPRRARSVASQSIIAYTMSLGAENSVAYSNNSIAIPTNFTISVTTEILPVSMTKTSVDCTMYICGDSTECSNLLLQYGSFCTQLNRALTGIAVEQDKNTQEVFAQVKQIYKTPPIKDFGGFNFSQILPDPSKPSKRSFIEDLLFNKVTLADAGFIKQYGDCLGDIAARDLICAQKFNGLTVLPPLLTDEMIAQYTSALLAGTITSGWTFGAGAALQIPFAMQMAYRFNGIGVTQNVLYENQKLIANQFNSAIGKIQDSLSSTASALGKLQDVVNQNAQALNTLVKQLSSNFGCISSVLNDILSRLDKVEAEVQIDCLITGRLQSLQTYVTQQLIRAAEIRASANLAATKMSECVLGQSKRVDFCGKGYHLMSFPQSAPHGVVFLHVTYVPAQEKNFTTAPAICHDGKAHFPREGVFVSNGTHWFVTQRNFYEPQIITTDNTFVSGNCDVVIGIVNNTVYDPLQPELDSFKEELDKYFKNHTSPDVDLGDISGINASVVNIQKEIDRLNEVAKNLNESLIDLQELGKYEQYIKGGGGSDIDPYKEFGSSYQLLNFLPLDFFPDLNALVDTATALYEEELTGREHCSPHHTAIRQALVCWDELTKLIAWMSSNITSEQVRTIIVNHVNDTWGLKVRQSLWFHLSCLTFGQHTVQEFLVSFGVWIRTPAPYRPPNAPILSTLPEHTVIC

SEQ ID NO: 7447 - protein, 1365 aa, Artificial Sequence
  SARS-CoV-2/Shenzhen/SZTH-001/2020__EPI_ISL_406592 spike protein (1-1211)(A972C_R995C) WhcAg construct
MFVFLVLLPLVSSQCVNLTTRTQLPPAYTNSFTRGVYYPDKVFRSSVLHSTQDLFLPFFSNVTWFHAIHVSGTNGTKRFDNPVLPFNDGVYFASTEKSNIIRGWIFGTTLDSKTQSLLIVNNATNVVIKVCEFQFCNDPFLGVYYHKNNKSWMESEFRVYSSANNCTFEYVSQPFLMDLEGKQGNFKNLREFVFKNIDGYFKIYSKHTPINLVRDLPQGFSALEPLVDLPIGINITRFQTLLALHRSYLTPGDSSSGWTAGAAAYYVGYLQPRTFLLKYNENGTITDAVDCALDPLSETKCTLKSFTVEKGIYQTSNFRVQPTESIVRFPNITNLCPFGEVFNATRFASVYAWNRKRISNCVADYSVLYNSASFSTFKCYGVSPTKLNDLCFTNVYADSFVIRGDEVRQIAPGQTGKIADYNYKLPDDFTGCVIAWNSNNLDSKVGGNYNYLYRLFRKSNLKPFERDISTEIYQAGSTPCNGVEGFNCYFPLQSYGFQPTNGVGYQPYRVVVLSFELLHAPATVCGPKKSTNLVKNKCVNFNFNGLTGTGVLTESNKKFLPFQQFGRDIADTTDAVRDPQTLEILDITPCSFGGVSVITPGTNTSNQVAVLYQDVNCTEVPVAIHADQLTPTWRVYSTGSNVFQTRAGCLIGAEHVNNSYECDIPIGAGICASYQTQTNSPRRARSVASQSIIAYTMSLGAENSVAYSNNSIAIPTNFTISVTTEILPVSMTKTSVDCTMYICGDSTECSNLLLQYGSFCTQLNRALTGIAVEQDKNTQEVFAQVKQIYKTPPIKDFGGFNFSQILPDPSKPSKRSFIEDLLFNKVTLADAGFIKQYGDCLGDIAARDLICAQKFNGLTVLPPLLTDEMIAQYTSALLAGTITSGWTFGAGAALQIPFAMQMAYRFNGIGVTQNVLYENQKLIANQFNSAIGKIQDSLSSTASALGKLQDVVNQNAQALNTLVKQLSSNFGCISSVLNDILSRLDKVEAEVQIDCLITGRLQSLQTYVTQQLIRAAEIRASANLAATKMSECVLGQSKRVDFCGKGYHLMSFPQSAPHGVVFLHVTYVPAQEKNFTTAPAICHDGKAHFPREGVFVSNGTHWFVTQRNFYEPQIITTDNTFVSGNCDVLIGIVNNTVYDPLQPELDSFKEELDKYFKNHTSPDVDLGDISGINASVVNIQKEIDRLNEVAKNLNESLIDLQELGKYEQYIKGGGGSDIDPYKEFGSSYQLLNFLPLDFFPDLNALVDTATALYEEELTGREHCSPHHTAIRQALVCWDELTKLIAWMSSNITSEQVRTIIVNHVNDTWGLKVRQSLWFHLSCLTFGQHTVQEFLVSFGVWIRTPAPYRPPNAPILSTLPEHTVIC

SEQ ID NO: 7448 - protein, 1365 aa, Artificial Sequence
  SARS-CoV-2/Shenzhen/SZTH-004/2020__EPI_ISL_406595 spike protein (1-1211)(A972C_R995C) WhcAg construct
MFVFLVLLPLVSSQCVNLTTRTQLPPAYTNSFTRGVYYPDKVFRSSVLHSTQDLFLPFFSNVTWFHAIHVSGTNGTKRFDNPVLPFNDGVYFASTEKSNIIRGWIFGTTLDSKTQSLLIVNNATNVVIKVCEFQFCNDPFLGVYYHKNNKSWMESEFRVYSSANNCTFEYVSQPFLMDLEGKQGNFKNLREFVFKNIDGYFKIYSKHTPINLVRDLPQGFSALEPLVDLPIGINITRFQTLLALHRSYLTPGDSSSGWTAGAAAYYVGYLQPRTFLLKYNENGTITDAVDCALDPLSETKCTLKSFTVEKGIYQTSNFRVQPTESIVRFPNITNLCPFGEVFNATRFASVYAWDRKRISNCVAYYSVLYNSASFSTFKCYGVSPTKLNDLCFTNVYADSFVIRGDEVRQIAPGQTGKIADYNYKLPDDFTGCVIAWNSNNLDSKVGGNYNYLYRLFRKSNLKPFERDISTEIYQAGSTPCNGVEGFNCYFPLQSYGFQPTNGVGYQPYRVVVLSFELLHAPATVCGPKKSTNLVKNKCVNFNFNGLTGTGVLTESNKKFLPFQQFGRDIADTTDAVRDPQTLEILDITPCSFGGVSVITPGTNTSNQVAVLYQDVNCTEVPVAIHADQLTPTWRVYSTGSNVFQTRAGCLIGAEHVNNSYECDIPIGAGICASYQTQTNSPRRARSVASQSIIAYTMSLGAENSVAYSNNSIAIPTNFTISVTTEILPVSMTKTSVDCTMYICGDSTECSNLLLQYGSFCTQLNRALTGIAVEQDKNTQEVFAQVKQIYKTPPIKDFGGFNFSQILPDPSKPSKRSFIEDLLFNKVTLADAGFIKQYGDCLGDIAARDLICAQKFNGLTVLPPLLTDEMIAQYTSALLAGTITSGWTFGAGAALQIPFAMQMAYRFNGIGVTQNVLYENQKLIANQFNSAIGKIQDSLSSTASALGKLQDVVNQNAQALNTLVKQLSSNFGCISSVLNDILSRLDKVEAEVQIDCLITGRLQSLQTYVTQQLIRAAEIRASANLAATKMSECVLGQSKRVDFCGKGYHLMSFPQSAPHGVVFLHVTYVPAQEKNFTTAPAICHDGKAHFPREGVFVSNGTHWFVTQRNFYEPQIITTDNTFVSGNCDVVIGIVNNTVYDPLQPELDSFKEELDKYFKNHTSPDVDLGDISGINASVVNIQKEIDRLNEVAKNLNESLIDLQELGKYEQYIKGGGGSDIDPYKEFGSSYQLLNFLPLDFFPDLNALVDTATALYEEELTGREHCSPHHTAIRQALVCWDELTKLIAWMSSNITSEQVRTIIVNHVNDTWGLKVRQSLWFHLSCLTFGQHTVQEFLVSFGVWIRTPAPYRPPNAPILSTLPEHTVIC

SEQ ID NO: 7449 - protein, 1365 aa, Artificial Sequence
  SARS-CoV-2/France/IDF0372/2020__EPI_ISL_406596 spike protein (1-1211)(A972C_R995C) WhcAg construct
MFVFLVLLPLVSSQCVNLTTRTQLPPAYTNSFTRGVYYPDKVFRSSVLHSTQDLFLPFFSNVTWFHAIHVSGTNGTKRFDNPVLPFNDGVYFASTEKSNIIRGWIFGTTLDSKTQSLLIVNNATNVVIKVCEFQFCNDPFLGVYYHKNNKSWMESEFRVYSSANNCTFEYVSQPFLMDLEGKQGNFKNLREFVFKNIDGYFKIYSKHTPINLVRDLPQGFSALEPLVDLPIGINITRFQTLLALHRSYLTPGDSSSGWTAGAAAYYVGYLQPRTFLLKYNENGTITDAVDCALDPLSETKCTLKSFTVEKGIYQTSNFRVQPTESIVRFPNITNLCPFGEVFNATRFASVYAWNRKRISNCVADYSFLYNSASFSTFKCYGVSPTKLNDLCFTNVYADSFVIRGDEVRQIAPGQTGKIADYNYKLPDDFTGCVIAWNSNNLDSKVGGNYNYLYRLFRKSNLKPFERDISTEIYQAGSTPCNGVEGFNCYFPLQSYGFQPTNGVGYQPYRVVVLSFELLHAPATVCGPKKSTNLVKNKCVNFNFNGLTGTGVLTESNKKFLPFQQFGRDIADTTDAVRDPQTLEILDITPCSFGGVSVITPGTNTSNQVAVLYQDVNCTEVPVAIHADQLTPTWRVYSTGSNVFQTRAGCLIGAEHVNNSYECDIPIGAGICASYQTQTNSPRRARSVASQSIIAYTMSLGAENSVAYSNNSIAIPTNFTISVTTEILPVSMTKTSVDCTMYICGDSTECSNLLLQYGSFCTQLNRALTGIAVEQDKNTQEVFAQVKQIYKTPPIKDFGGFNFSQILPDPSKPSKRSFIEDLLFNKVTLADAGFIKQYGDCLGDIAARDLICAQKFNGLTVLPPLLTDEMIAQYTSALLAGTITSGWTFGAGAALQIPFAMQMAYRFNGIGVTQNVLYENQKLIANQFNSAIGKIQDSLSSTASALGKLQDVVNQNAQALNTLVKQLSSNFGCISSVLNDILSRLDKVEAEVQIDCLITGRLQSLQTYVTQQLIRAAEIRASANLAATKMSECVLGQSKRVDFCGKGYHLMSFPQSAPHGVVFLHVTYVPAQEKNFTTAPAICHDGKAHFPREGVFVSNGTHWFVTQRNFYEPQIITTDNTFVSGNCDVVIGIVNNTVYDPLQPELDSFKEELDKYFKNHTSPDVDLGDISGINASVVNIQKEIDRLNEVAKNLNESLIDLQELGKYEQYIKGGGGSDIDPYKEFGSSYQLLNFLPLDFFPDLNALVDTATALYEEELTGREHCSPHHTAIRQALVCWDELTKLIAWMSSNITSEQVRTIIVNHVNDTWGLKVRQSLWFHLSCLTFGQHTVQEFLVSFGVWIRTPAPYRPPNAPILSTLPEHTVIC

SEQ ID NO: 7450 - protein, 1365 aa, Artificial Sequence
  SARS-CoV-2/Australia/VIC01/2020__EPI_ISL_406844 spike protein (1-1211)(A972C_R995C) WhcAg construct
MFVFLVLLPLVSSQCVNLTTRTQLPPAYTNSFTRGVYYPDKVFRSSVLHSTQDLFLPFFSNVTWFHAIHVSGTNGTKRFDNPVLPFNDGVYFASTEKSNIIRGWIFGTTLDSKTQSLLIVNNATNVVIKVCEFQFCNDPFLGVYYHKNNKSWMESEFRVYSSANNCTFEYVSQPFLMDLEGKQGNFKNLREFVFKNIDGYFKIYSKHTPINLVRDLPQGFSALEPLVDLPIGINITRFQTLLALHRRYLTPGDSSSGWTAGAAAYYVGYLQPRTFLLKYNENGTITDAVDCALDPLSETKCTLKSFTVEKGIYQTSNFRVQPTESIVRFPNITNLCPFGEVFNATRFASVYAWNRKRISNCVADYSVLYNSASFSTFKCYGVSPTKLNDLCFTNVYADSFVIRGDEVRQIAPGQTGKIADYNYKLPDDFTGCVIAWNSNNLDSKVGGNYNYLYRLFRKSNLKPFERDISTEIYQAGSTPCNGVEGFNCYFPLQSYGFQPTNGVGYQPYRVVVLSFELLHAPATVCGPKKSTNLVKNKCVNFNFNGLTGTGVLTESNKKFLPFQQFGRDIADTTDAVRDPQTLEILDITPCSFGGVSVITPGTNTSNQVAVLYQDVNCTEVPVAIHADQLTPTWRVYSTGSNVFQTRAGCLIGAEHVNNSYECDIPIGAGICASYQTQTNSPRRARSVASQSIIAYTMSLGAENSVAYSNNSIAIPTNFTISVTTEILPVSMTKTSVDCTMYICGDSTECSNLLLQYGSFCTQLNRALTGIAVEQDKNTQEVFAQVKQIYKTPPIKDFGGFNFSQILPDPSKPSKRSFIEDLLFNKVTLADAGFIKQYGDCLGDIAARDLICAQKFNGLTVLPPLLTDEMIAQYTSALLAGTITSGWTFGAGAALQIPFAMQMAYRFNGIGVTQNVLYENQKLIANQFNSAIGKIQDSLSSTASALGKLQDVVNQNAQALNTLVKQLSSNFGCISSVLNDILSRLDKVEAEVQIDCLITGRLQSLQTYVTQQLIRAAEIRASANLAATKMSECVLGQSKRVDFCGKGYHLMSFPQSAPHGVVFLHVTYVPAQEKNFTTAPAICHDGKAHFPREGVFVSNGTHWFVTQRNFYEPQIITTDNTFVSGNCDVVIGIVNNTVYDPLQPELDSFKEELDKYFKNHTSPDVDLGDISGINASVVNIQKEIDRLNEVAKNLNESLIDLQELGKYEQYIKGGGGSDIDPYKEFGSSYQLLNFLPLDFFPDLNALVDTATALYEEELTGREHCSPHHTAIRQALVCWDELTKLIAWMSSNITSEQVRTIIVNHVNDTWGLKVRQSLWFHLSCLTFGQHTVQEFLVSFGVWIRTPAPYRPPNAPILSTLPEHTVIC

SEQ ID NO: 7451 - protein, 1365 aa, Artificial Sequence
  SARS-CoV-2/Germany/BavPat1/2020__EPI_ISL_406862 spike protein (1-1211)(A972C_R995C) WhcAg construct
MFVFLVLLPLVSSQCVNLTTRTQLPPAYTNSFTRGVYYPDKVFRSSVLHSTQDLFLPFFSNVTWFHAIHVSGTNGTKRFDNPVLPFNDGVYFASTEKSNIIRGWIFGTTLDSKTQSLLIVNNATNVVIKVCEFQFCNDPFLGVYYHKNNKSWMESEFRVYSSANNCTFEYVSQPFLMDLEGKQGNFKNLREFVFKNIDGYFKIYSKHTPINLVRDLPQGFSALEPLVDLPIGINITRFQTLLALHRSYLTPGDSSSGWTAGAAAYYVGYLQPRTFLLKYNENGTITDAVDCALDPLSETKCTLKSFTVEKGIYQTSNFRVQPTESIVRFPNITNLCPFGEVFNATRFASVYAWNRKRISNCVADYSVLYNSASFSTFKCYGVSPTKLNDLCFTNVYADSFVIRGDEVRQIAPGQTGKIADYNYKLPDDFTGCVIAWNSNNLDSKVGGNYNYLYRLFRKSNLKPFERDISTEIYQAGSTPCNGVEGFNCYFPLQSYGFQPTNGVGYQPYRVVVLSFELLHAPATVCGPKKSTNLVKNKCVNFNFNGLTGTGVLTESNKKFLPFQQFGRDIADTTDAVRDPQTLEILDITPCSFGGVSVITPGTNTSNQVAVLYQGVNCTEVPVAIHADQLTPTWRVYSTGSNVFQTRAGCLIGAEHVNNSYECDIPIGAGICASYQTQTNSPRRARSVASQSIIAYTMSLGAENSVAYSNNSIAIPTNFTISVTTEILPVSMTKTSVDCTMYICGDSTECSNLLLQYGSFCTQLNRALTGIAVEQDKNTQEVFAQVKQIYKTPPIKDFGGFNFSQILPDPSKPSKRSFIEDLLFNKVTLADAGFIKQYGDCLGDIAARDLICAQKFNGLTVLPPLLTDEMIAQYTSALLAGTITSGWTFGAGAALQIPFAMQMAYRFNGIGVTQNVLYENQKLIANQFNSAIGKIQDSLSSTASALGKLQDVVNQNAQALNTLVKQLSSNFGCISSVLNDILSRLDKVEAEVQIDCLITGRLQSLQTYVTQQLIRAAEIRASANLAATKMSECVLGQSKRVDFCGKGYHLMSFPQSAPHGVVFLHVTYVPAQEKNFTTAPAICHDGKAHFPREGVFVSNGTHWFVTQRNFYEPQIITTDNTFVSGNCDVVIGIVNNTVYDPLQPELDSFKEELDKYFKNHTSPDVDLGDISGINASVVNIQKEIDRLNEVAKNLNESLIDLQELGKYEQYIKGGGGSDIDPYKEFGSSYQLLNFLPLDFFPDLNALVDTATALYEEELTGREHCSPHHTAIRQALVCWDELTKLIAWMSSNITSEQVRTIIVNHVNDTWGLKVRQSLWFHLSCLTFGQHTVQEFLVSFGVWIRTPAPYRPPNAPILSTLPEHTVIC

SEQ ID NO: 7452 - protein, 1365 aa, Artificial Sequence
  SARS-CoV-2/Wuhan/HBCDC-HB-02/2020__EPI_ISL_412978 spike protein (1-1211)(A972C_R995C) WhcAg construct
MFVFLVLLPLVSSQCVNLTTRTQLPPAYTNSFTRGVYYPDKVFRSSVLHSTQDLFLPFFSNVTWFHAIHVSGTNGTKRFDNPVLPFNDGVYFASTEKSNIIRGWIFGTTLDSKTQSLLIVNNATNVVIKVCEFQFCNDPFLGVYYHKNNKSWMESEFRVYSSANNCTFEYVSQPFLMDLEGKQGNFKNLREFVFKNIDGYFKIYSKHTPINLVRDLPQGFSALEPLVDLPIGINITRFQTLLALHRSYLTPGDSSSGWTAGAAAYYVGYLQPRTFLLKYNENGTITDAVDCALDPLSETKCTLKSFTVEKGIYQTSNFRVQPTESIVRFPNITNLCPFGEVFNATRFASVYAWNRKRISNCVADYSVLYNSASFSTFKCYGVSPTKLNDLCFTNVYADSFVIRGDEVRQIAPGQTGKIADYNYKLPDDFTGCVIAWNSNNLDSKVGGNYNYLYRLFRKSNLKPFERDISTEIYQAGSTPCNGVEGFNCYFPLQSYGFQPTNGVGYQPYRVVVLSFELLHAPATVCGPKKSTNLVKNKCVNFNFNGLTGTGVLTESNKKFLPFQQFGRDIADTTDAVRDPQTLEILDITPCSFGGVSVITPGTNTSNQVAVLYQDVNCTEVPVAIHADQLTPTWRVYSTGSNVFQTRAGCLIGAEHVNNSYECDIPIGAGICASYQTQTNSPRRARSVASQSIIAYTMSLGAENSVAYSNNSIAIPTNFTISVTTEILPVSMTKTSVDCTMYICGDSTECSNFLLQYGSFCTQLNRALTGIAVEQDKNTQEVFAQVKQIYKTPPIKDFGGFNFSQILPDPSKPSKRSFIEDLLFNKVTLADAGFIKQYGDCLGDIAARDLICAQKFNGLTVLPPLLTDEMIAQYTSALLAGTITSGWTFGAGAALQIPFAMQMAYRFNGIGVTQNVLYENQKLIANQFNSAIGKIQDSLSSTASALGKLQDVVNQNAQALNTLVKQLSSNFGCISSVLNDILSRLDKVEAEVQIDCLITGRLQSLQTYVTQQLIRAAEIRASANLAATKMSECVLGQSKRVDFCGKGYHLMSFPQSAPHGVVFLHVTYVPAQEKNFTTAPAICHDGKAHFPREGVFVSNGTHWFVTQRNFYEPQIITTDNTFVSGNCDVVIGIVNNTVYDPLQPELDSFKEELDKYFKNHTSPDVDLGDISGINASVVNIQKEIDRLNEVAKNLNESLIDLQELGKYEQYIKGGGGSDIDPYKEFGSSYQLLNFLPLDFFPDLNALVDTATALYEEELTGREHCSPHHTAIRQALVCWDELTKLIAWMSSNITSEQVRTIIVNHVNDTWGLKVRQSLWFHLSCLTFGQHTVQEFLVSFGVWIRTPAPYRPPNAPILSTLPEHTVIC

SEQ ID NO: 7453 - protein, 1365 aa, Artificial Sequence
  SARS-CoV-2/Australia/QLD02/2020__EPI_ISL_407896 spike protein (1-1211)(A972C_R995C) WhcAg construct
MFVFLVLLPLVSSQCVNLTTRTQLPPAYTNSFTRGVYYPDKVFRSSVLHSTQDLFLPFFSNVTWFHAIHVSGTNGTKRFDNPVLPFNDGVYFASTEKSNIIRGWIFGTTLDSKTQSLLIVNNATNVVIKVCEFQFCNDPFLGVYYHKNNKSWMESEFRVYSSANNCTFEYVSQPFLMDLEGKQGNFKNLREFVFKNIDGYFKIYSKHTPINLVRDLPQGFSALEPLVDLPIGINITRFQTLLALHRSYLTPGDSSSGWTAGAAAYYVGYLQPRTFLLKYNENGTITDAVDCALDPLSETKCTLKSFTVEKGIYQTSNFRVQPTESIVRFPNITNLCPFGEVFNATRFASVYAWNRKRISNCVADYSVLYNSASFSTFKCYGVSPTKLNDLCFTNVYADSFVIRGDEVRQIAPGQTGKIADYNYKLPDDFTGCVIAWNSNNLDSKVGGNYNYLYRLFRKSNLKPFERDISTEIYQAGSTPCNGVEGFNCYFPLQSYGFQPTNGVGYQPYRVVVLSFELLHAPATVCGPKKSTNLVKNKCVNFNFNGLTGTGVLTESNKKFLPFQQFGRDIADTTDAVRDPQTLEILDITPCSFGGVSVITPGTNTSNQVAVLYQDVNCTEVPVAIHADQLTPTWRVYSTGSNVFQTRAGCLIGAEHVNNSYECDIPIGAGICASYQTQTNSPRRARSVASQSIIAYTMSLGAENSVAYSNNSIAIPTNFTISVTTEILPVSMTKTSVDCTMYICGDSTECSNLLLQYGSFCTQLNRALTGIAVEQDKNTQEVFAQVKQIYKTPPIKDFGGFNFSQILPDPSKPSKRSFIEDLLFNKVTLADAGFIKQYGDCLGDIAARDLICAQKFNGLTVLPPLLTDEMIAQYTSALLAGTITSGWTFGAGAALQIPFAMQMAYRFNGIGVTQNVLYENQKLIANQFNSAIGKIQDSLSSTASALGKLQDVVNQNAQALNTLVKQLSSNFGCISSVLNDILSRLDKVEAEVQIDCLITGRLQSLQTYVTQQLIRAAEIRASANLAATKMSECVLGQSKRVDFCGKGYHLMSFPQSAPHGVVFLHVTYVPAQEKNFTTAPAICHDGKAHFPREGVFVSNGTHWFVTQRNFYEPQIITTDNTFVSGNCDVVIGIVNNTVYDPLQLELDSFKEELDKYFKNHTSPDVDLGDISGINASVVNIQKEIDRLNEVAKNLNESLIDLQELGKYEQYIKGGGGSDIDPYKEFGSSYQLLNFLPLDFFPDLNALVDTATALYEEELTGREHCSPHHTAIRQALVCWDELTKLIAWMSSNITSEQVRTIIVNHVNDTWGLKVRQSLWFHLSCLTFGQHTVQEFLVSFGVWIRTPAPYRPPNAPILSTLPEHTVIC

SEQ ID NO: 7454 - protein, 1365 aa, Artificial Sequence
  SARS-CoV-2/India/1-31/2020__EPI_ISL_413523 spike protein (1-1211)(A972C_R995C) WhcAg construct
MFVFLVLLPLVSSQCVNLTTRTQLPPAYTNSFTRGVYYPDKVFRSSVLHSTQDLFLPFFSNVTWFHAIHVSGTNGTKRFDNPVLPFNDGVYFASTEKSNIIRGWIFGTTLDSKTQSLLIVNNATNVVIKVCEFQFCNDPFLGVYYHKNNKSWMESEFRVYSSANNCTFEYVSQPFLMDLEGKQGNFKNLREFVFKNIDGYFKIYSKHTPINLVRDLPQGFSALEPLVDLPIGINITRFQTLLALHRSYLTPGDSSSGWTAGAAAYYVGYLQPRTFLLKYNENGTITDAVDCALDPLSETKCTLKSFTVEKGIYQTSNFRVQPTESIVRFPNITNLCPFGEVFNATRFASVYAWNRKRISNCVADYSVLYNSASFSTFKCYGVSPTKLNDLCFTNVYADSFVIRGDEVRQIAPGQTGKIADYNYKLPDDFTGCVIAWNSNNLDSKVGGNYNYLYRLFRKSNLKPFERDISTEIYQAGSTPCNGVEGFNCYFPLQSYGFQPTNGVGYQPYRVVVLSFELLHAPATVCGPKKSTNLVKNKCVNFNFNGLTGTGVLTESNKKFLPFQQFGRDIADTTDAVRDPQTLEILDITPCSFGGVSVITPGTNTSNQVAVLYQDVNCTEVPVAIHADQLTPTWRVYSTGSNVFQTRAGCLIGAEHVNNSYECDIPIGAGICASYQTQTNSPRRARSVASQSIIAYTMSLGAENSVAYSNNSIAIPTNFTISVTTEILPVSMTKTSVDCTMYICGDSTECSNLLLQYGSFCTQLNRALTGIAVEQDKNTQEVFAQVKQIYKTPPIKDFGGFNFSQILPDPSKPSKRSFIEDLLFNKVTLADAGFIKQYGDCLGDIAARDLICAQKFNGLTVLPPLLTDEMIAQYTSALLAGTITSGWTFGAGAALQIPFAMQMAYRFNGIGVTQNVLYENQKLIANQFNSVIGKIQDSLSSTASALGKLQDVVNQNAQALNTLVKQLSSNFGCISSVLNDILSRLDKVEAEVQIDCLITGRLQSLQTYVTQQLIRAAEIRASANLAATKMSECVLGQSKRVDFCGKGYHLMSFPQSAPHGVVFLHVTYVPAQEKNFTTAPAICHDGKAHFPREGVFVSNGTHWFVTQRNFYEPQIITTDNTFVSGNCDVVIGIVNNTVYDPLQPELDSFKEELDKYFKNHTSPDVDLGDISGINASVVNIQKEIDRLNEVAKNLNESLIDLQELGKYEQYIKGGGGSDIDPYKEFGSSYQLLNFLPLDFFPDLNALVDTATALYEEELTGREHCSPHHTAIRQALVCWDELTKLIAWMSSNITSEQVRTIIVNHVNDTWGLKVRQSLWFHLSCLTFGQHTVQEFLVSFGVWIRTPAPYRPPNAPILSTLPEHTVIC

SEQ ID NO: 7455 - protein, 1365 aa, Artificial Sequence
  SARS-CoV-2/Guangdong/GD2020087-P0008/2020__EPI_ISL_413863 spike protein (1-1211)(A972C_R995C) WhcAg construct
MFVFLVLLPLVSSQCVNLTTRTQLPPAYTNSFTRGVYYPDKVFRSSVLHSTQDLFLPFFSNVTWFHAIHVSGTNGTKRFDNPVLPFNDGVYFASTEKSNIIRGWIFGTTLDSKTQSLLIVNNATNVVIKVCEFQFCNDPFLGVYYHKNNKSWMESEFRVYSSANNCTFEYVSQPFLMDLEGKQGNFKNLREFVFKNIDGYFKIYSKHTPINLVRDLPQGFSALEPLVDLPIGINITRFQTLLALHRSYLTPGDSSSGWTAGAAAYYVGYLQPRTFLLKYNENGTITDAVDCALDPLSETKCTLKSFTVEKGIYQTSNFRVQPTESIVRFPNITNLCPFGEVFNATRFASVYAWNRKRISNCVADYSVLYNSASFSTFKCYGVSPTKLNDLCFTNVYADSFVIRGDEVREIAPGQTGKIADYNYKLPDDFTGCVIAWNSNNLDSKVGGNYNYLYRLFRKSNLKPFERDISTEIYQAGSTPCNGVEGFNCYFPLQSYGFQPTNGVGYQPYRVVVLSFELLHAPATVCGPKKSTNLVKNKCVNFNFNGLTGTGVLTESNKKFLPFQQFGRDIADTTDAVRDPQTLEILDITPCSFGGVSVITPGTNTSNQVAVLYQDVNCTEVPVAIHADQLTPTWRVYSTGSNVFQTRAGCLIGAEHVNNSYECDIPIGAGICASYQTQTNSPRRARSVASQSIIAYTMSLGAENSVAYSNNSIAIPTNFTISVTTEILPVSMTKTSVDCTMYICGDSTECSNLLLQYGSFCTQLNRALTGIAVEQDKNTQEVFAQVKQIYKTPPIKDFGGFNFSQILPDPSKPSKRSFIEDLLFNKVTLADAGFIKQYGDCLGDIAARDLICAQKFNGLTVLPPLLTDEMIAQYTSALLAGTITSGWTFGAGAALQIPFAMQMAYRFNGIGVTQNVLYENQKLIANQFNSAIGKIQDSLSSTASALGKLQDVVNQNAQALNTLVKQLSSNFGCISSVLNDILSRLDKVEAEVQIDCLITGRLQSLQTYVTQQLIRAAEIRASANLAATKMSECVLGQSKRVDFCGKGYHLMSFPQSAPHGVVFLHVTYVPAQEKNFTTAPAICHDGKAHFPREGVFVSNGTHWFVTQRNFYEPQIITTDNTFVSGNCDVVIGIVNNTVYDPLQPELDSFKEELDKYFKNHTSPDVDLGDISGINASVVNIQKEIDRLNEVAKNLNESLIDLQELGKYEQYIKGGGGSDIDPYKEFGSSYQLLNFLPLDFFPDLNALVDTATALYEEELTGREHCSPHHTAIRQALVCWDELTKLIAWMSSNITSEQVRTIIVNHVNDTWGLKVRQSLWFHLSCLTFGQHTVQEFLVSFGVWIRTPAPYRPPNAPILSTLPEHTVIC

SEQ ID NO: 7456 - protein, 1365 aa, Artificial Sequence
  SARS-CoV-2/Sweden/01/2020__EPI_ISL_411951 spike protein (1-1211)(A972C_R995C) WhcAg construct
MFVFLVLLPLVSSQCVNLTTRTQLPPAYTNSFTRGVYYPDKVFRSSVLHSTQDLFLPFFSNVTWFHAIHVSGTNGTKRFDNPVLPFNDGVYFASTEKSNIIRGWIFGTTLDSKTQSLLIVNNATNVVIKVCEFQFCNDPFLGVYYHKNNKSWMESEFRVYSSANNCTFEYVSQPFLMDLEGKQGNFKNLREFVFKNIDGYFKIYSKHTPINLVRDLPQGFSALEPLVDLPIGINITRFQTLLALHRSYLTPGDSSSGWTAGAAAYYVGYLQPRTFLLKYNENGTITDAVDCALDPLSETKCTLKSFTVEKGIYQTSNFRVQPTESIVRFPNITNLCPFGEVFNATRFASVYAWNRKRISNCVADYSVLYNSASFSTFKCYGVSPTKLNDLCFTNVYADSFVIRGDEVRQIAPGQTGKIADYNYKLPDDFTGCVIAWNSNNLDSKVGGNYNYLYRLFRKSNLKPFERDISTEIYQAGSTPCNGVEGFNCYFPLQSYGFQPTNGVGYQPYRVVVLSFELLHAPATVCGPKKSTNLVKNKCVNFNFNGLTGTGVLTESNKKFLPFQQFGRDIADTTDAVRDPQTLEILDITPCSFGGVSVITPGTNTSNQVAVLYQDVNCTEVPVAIHADQLTPTWRVYSTGSNVFQTRAGCLIGAEHVNNSYECDIPIGAGICASYQTQTNSPRRARSVASQSIIAYTMSLGAENSVAYSNNSIAIPTNFTISVTTEILPVSMTKTSVDCTMYICGDSTECSNLLLQYGSFCTQLNRALTGIAVEQDKNTQEVFAQVKQIYKTPPIKDCGGFNFSQILPDPSKPSKRSFIEDLLFNKVTLADAGFIKQYGDCLGDIAARDLICAQKFNGLTVLPPLLTDEMIAQYTSALLAGTITSGWTFGAGAALQIPFAMQMAYRFNGIGVTQNVLYENQKLIANQFNSAIGKIQDSLSSTASALGKLQDVVNQNAQALNTLVKQLSSNFGCISSVLNDILSRLDKVEAEVQIDCLITGRLQSLQTYVTQQLIRAAEIRASANLAATKMSECVLGQSKRVDFCGKGYHLMSFPQSAPHGVVFLHVTYVPAQEKNFTTAPAICHDGKAHFPREGVFVSNGTHWFVTQRNFYEPQIITTDNTFVSGNCDVVIGIVNNTVYDPLQPELDSFKEELDKYFKNHTSPDVDLGDISGINASVVNIQKEIDRLNEVAKNLNESLIDLQELGKYEQYIKGGGGSDIDPYKEFGSSYQLLNFLPLDFFPDLNALVDTATALYEEELTGREHCSPHHTAIRQALVCWDELTKLIAWMSSNITSEQVRTIIVNHVNDTWGLKVRQSLWFHLSCLTFGQHTVQEFLVSFGVWIRTPAPYRPPNAPILSTLPEHTVIC

SEQ ID NO: 7457 - protein, 1365 aa, Artificial Sequence
  SARS-CoV-2/Tianmen/HBCDC-HB-07/2020__EPI_ISL_412983 spike protein (1-1211)(A972C_R995C) WhcAg construct
MFVFLVLLPLVSSQCVNLTTRTQLPPAYTNSFTRGVYYPDKVFRSSVLHSTQDLFLPFFSNVTWFHAIHVSGTNGTKRFDNPVLPFNDGVYFASTEKSNIIRGWIFGTTLDSKTQSLLIVNNATNVVIKVCEFQFCNDPFLGVYYHKNNKSWMESEFRVYSSANNCTFEYVSQPFLMDLEGKQGNFKNLREFVFKNIDGYFKIYSKHTPINLVRDLPQGFSALEPLVDLPIGINITRFQTLLALHRSYLTPGDSSSGWTAGAAAYYVGYLQPRTFLLKYNENGTITDAVDCALDPLSETKCTLKSFTVEKGIYQTSNFRVQPTESIVRFPNITNLCPFGEVFNATRFASVYAWNRKRISNCVADYSVLYNSASFSTFKCYGVSPTKLNDLCFTNVYADSFVIRGDEVRQIAPGQTGKIADYNYKLPDDFTGCVIAWNSNNLDSKVGGNYNYLYRLFRKSNLKPFERDISTEIYQAGSTPCNGVEGFNCYFPLQSYGFQPTNGVGYQPYRVVVLSFELLHAPATVCGPKKSTNLVKNKCVNFNFNGLTGTGVLTESNKKFLPFQQFGRDIADTTDAVRDPQTLEILDITPCSFGGVSVITPGTNTSNQVAVLYQDLNCTEVPVAIHADQLTPTWRVYSTGSNVFQTRAGCLIGAEHVNNSYECDIPIGAGICASYQTQTNSPRRARSVASQSIIAYTMSLGAENSVAYSNNSIAIPTNFTISVTTEILPVSMTKTSVDCTMYICGDSTECSNLLLQYGSFCTQLNRALTGIAVEQDKNTQEVFAQVKQIYKTPPIKDFGGFNFSQILPDPSKPSKRSFIEDLLFNKVTLADAGFIKQYGDCLGDIAARDLICAQKFNGLTVLPPLLTDEMIAQYTSALLAGTITSGWTFGAGAALQIPFAMQMAYRFNGIGVTQNVLYENQKLIANQFNSAIGKIQDSLSSTASALGKLQDVVNQNAQALNTLVKQLSSNFGCISSVLNDILSRLDKVEAEVQIDCLITGRLQSLQTYVTQQLIRAAEIRASANLAATKMSECVLGQSKRVDFCGKGYHLMSFPQSAPHGVVFLHVTYVPAQEKNFTTAPAICHDGKAHFPREGVFVSNGTHWFVTQRNFYEPQIITTDNTFVSGNCDVVIGIVNNTVYDPLQPELDSFKEELDKYFKNHTSPDVDLGDISGINASVVNIQKEIDRLNEVAKNLNESLIDLQELGKYEQYIKGGGGSDIDPYKEFGSSYQLLNFLPLDFFPDLNALVDTATALYEEELTGREHCSPHHTAIRQALVCWDELTKLIAWMSSNITSEQVRTIIVNHVNDTWGLKVRQSLWFHLSCLTFGQHTVQEFLVSFGVWIRTPAPYRPPNAPILSTLPEHTVIC

SEQ ID NO: 7458 - protein, 1365 aa, Artificial Sequence
  SARS-CoV-2/Hong Kong/case42_VM20002493/2020__EPI_ISL_414527 spike protein (1-1211)(A972C_R995C) WhcAg construct
MFVFLVLLPLVSSQCVNLTTRTQLPPAYTNSFTRGVYYPDKVFRSSVLHSTQDLFLPFFSNVTWFHAIHVSGTNGTKRFDNPVLPFNDGVYFASTEKSNIIRGWIFGTTLDSKTQSLLIVNNATNVVIKVCEFQFCNDPFLGVYYHKNNKSWMESEFRVYSSANNCTFEYVSQPFLMDLEGKQGNFKNLREFVFKNIDGYFKIYSKHTPINLVRDLPQGFSALEPLVDLPIGINITRFQTLLALHRSYLTPGDSSSGWTAGAAAYYVGYLQPRTFLLKYNENGTITDAVDCALDPLSETKCTLKSFTVEKGIYQTSNFRVQPTESIVRFPNITNLCPFGEVFNATRFASVYAWNRKRISNCVADYSVLYNSASFSTFKCYGVSPTKLNDLCFTNVYADSFVIRGDEVRQIAPGQTGKIADYNYKLPDDFTGCVIAWNSNNLDSKVGGNYNYLYRLFRKSNLKPFERDISTEIYQAGSTPCNGVEGFNCYFPLQSYGFQPTNGVGYQPYRVVVLSFELLHAPATVCGPKKSTNLVKNKCVNFNFNGLTGTGVLTESNKKFLPFQQFGRDIADTTDAVRDPQTLEILDITPCSFGGVSVITPGTNTSNQVAVLYQDVNCTEVPVAIHADQLTPTWRVYSTGSNVFQTRAGCLIGAEHVNNSYECDIPIGAGICASYQTQTNSPRRARSVASQSIIAYTMSLGAENSVAYSNNSIAIPTNFAISVTTEILPVSMTKTSVDCTMYICGDSTECSNLLLQYGSFCTQLNRALTGIAVEQDKNTQEVFAQVKQIYKTPPIKDFGGFNFSQILPDPSKPSKRSFIEDLLFNKVTLADAGFIKQYGDCLGDIAARDLICAQKFNGLTVLPPLLTDEMIAQYTSALLAGTITSGWTFGAGAALQIPFAMQMAYRFNGIGVTQNVLYENQKLIANQFNSAIGKIQDSLSSTASALGKLQDVVNQNAQALNTLVKQLSSNFGCISSVLNDILSRLDKVEAEVQIDCLITGRLQSLQTYVTQQLIRAAEIRASANLAATKMSECVLGQSKRVDFCGKGYHLMSFPQSAPHGVVFLHVTYVPAQEKNFTTAPAICHDGKAHFPREGVFVSNGTHWFVTQRNFYEPQIITTDNTFVSGNCDVVIGIVNNTVYDPLQPELDSFKEELDKYFKNHTSPDVDLGDISGINASVVNIQKEIDRLNEVAKNLNESLIDLQELGKYEQYIKGGGGSDIDPYKEFGSSYQLLNFLPLDFFPDLNALVDTATALYEEELTGREHCSPHHTAIRQALVCWDELTKLIAWMSSNITSEQVRTIIVNHVNDTWGLKVRQSLWFHLSCLTFGQHTVQEFLVSFGVWIRTPAPYRPPNAPILSTLPEHTVIC

SEQ ID NO: 7459 - protein, 1365 aa, Artificial Sequence
  SARS-CoV-2/USA/CruiseA-23/2020__EPI_ISL_414482 spike protein (1-1211)(A972C_R995C) WhcAg construct
MFVFLVLLPLVSSQCVNLTTRTQLPPAYTNSFTRGVYYPDKVFRSSVLHSTQDLFLPFFSNVTWFHAIHVSGTNGTKRFDNPVLPFNDGVYFASTEKSNIIRGWIFGTTLDSKTQSLLIVNNATNVVIKVCEFQFCNDPFLGVYYHKNNKSWMESEFRVYSSANNCTFEYVSQPFLMDLEVKQGNFKNLREFVFKNIDGYFKIYSKHTPINLVRDLPQGFSALEPLVDLPIGINITRFQTLLALHRSYLTPGDSSSGWTAGAAAYYVGYLQPRTFLLKYNENGTITDAVDCALDPLSETKCTLKSFTVEKGIYQTSNFRVQPTESIVRFPNITNLCPFGEVFNATRFASVYAWNRKRISNCVADYSVLYNSASFSTFKCYGVSPTKLNDLCFTNVYADSFVIRGDEVRQIAPGQTGKIADYNYKLPDDFTGCVIAWNSNNLDSKVGGNYNYLYRLFRKSNLKPFERDISTEIYQAGSTPCNGVEGFNCYFPLQSYGFQPTNGVGYQPYRVVVLSFELLHAPATVCGPKKSTNLVKNKCVNFNFNGLTGTGVLTESNKKFLPFQQFGRDIADTTDAVRDPQTLEILDITPCSFGGVSVITPGTNTSNQVAVLYQDVNCTEVPVAIHADQLTPTWRVYSTGSNVFQTRAGCLIGAEHVNNSYECDIPIGAGICASYQTQTNSPRRARSVASQSIIAYTMSLGAENSVAYSNNSIAIPTNFTISVTTEILPVSMTKTSVDCTMYICGDSTECSNLLLQYGSFCTQLNRALTGIAVEQDKNTQEVFAQVKQIYKTPPIKDFGGFNFSQILPDPSKPSKRSFIEDLLFNKVTLADAGFIKQYGDCLGDIAARDLICAQKFNGLTVLPPLLTDEMIAQYTSALLAGTITSGWTFGAGAALQIPFAMQMAYRFNGIGVTQNVLYENQKLIANQFNSAIGKIQDSLSSTASALGKLQDVVNQNAQALNTLVKQLSSNFGCISSVLNDILSRLDKVEAEVQIDCLITGRLQSLQTYVTQQLIRAAEIRASANLAATKMSECVLGQSKRVDFCGKGYHLMSFPQSAPHGVVFLHVTYVPAQEKNFTTAPAICHDGKAHFPREGVFVSNGTHWFVTQRNFYEPQIITTDNTFVSGNCDVVIGIVNNTVYDPLQPELDSFKEELDKYFKNHTSPDVDLGDISGINASVVNIQKEIDRLNEVAKNLNESLIDLQELGKYEQYIKGGGGSDIDPYKEFGSSYQLLNFLPLDFFPDLNALVDTATALYEEELTGREHCSPHHTAIRQALVCWDELTKLIAWMSSNITSEQVRTIIVNHVNDTWGLKVRQSLWFHLSCLTFGQHTVQEFLVSFGVWIRTPAPYRPPNAPILSTLPEHTVIC

SEQ ID NO: 7460 - protein, 1365 aa, Artificial Sequence
  SARS-CoV-2/Hong Kong/case85_VM20002868/2020__EPI_ISL_414519 spike protein (1-1211)(A972C_R995C) WhcAg construct
MFVFLVLVPLVSSQCVNLTTRTQLPPAYTNSFTRGVYYPDKVFRSSVLHSTQDLFLPFFSNVTWFHAIHVSGTNGTKRFDNPVLPFNDGVYFASTEKSNIIRGWIFGTTLDSKTQSLLIVNNATNVVIKVCEFQFCNDPFLGVYYHKNNKSWMESEFRVYSSANNCTFEYVSQPFLMDLEGKQGNFKNLREFVFKNIDGYFKIYSKHTPINLVRDLPQGFSALEPLVDLPIGINITRFQTLLALHRSYLTPGDSSSGWTAGAAAYYVGYLQPRTFLLKYNENGTITDAVDCALDPLSETKCTLKSFTVEKGIYQTSNFRVQPTESIVRFPNITNLCPFGEVFNATRFASVYAWNRKRISNCVADYSVLYNSASFSTFKCYGVSPTKLNDLCFTNVYADSFVIRGDEVRQIAPGQTGKIADYNYKLPDDFTGCVIAWNSNNLDSKVGGNYNYLYRLFRKSNLKPFERDISTEIYQAGSTPCNGVEGFNCYFPLQSYGFQPTNGVGYQPYRVVVLSFELLHAPATVCGPKKSTNLVKNKCVNFNFNGLTGTGVLTESNKKFLPFQQFGRDIADTTDAVRDPQTLEILDITPCSFGGVSVITPGTNTSNQVAVLYQDVNCTEVPVAIHADQLTPTWRVYSTGSNVFQTRAGCLIGAEHVNNSYECDIPIGAGICASYQTQTNSPRRARSVASQSIIAYTMSLGAENSVAYSNNSIAIPTNFTISVTTEILPVSMTKTSVDCTMYICGDSTECSNLLLQYGSFCTQLNRALTGIAVEQDKNTQEVFAQVKQIYKTPPIKDFGGFNFSQILPDPSKPSKRSFIEDLLFNKVTLADAGFIKQYGDCLGDIAARDLICAQKFNGLTVLPPLLTDEMIAQYTSALLAGTITSGWTFGAGAALQIPFAMQMAYRFNGIGVTQNVLYENQKLIANQFNSAIGKIQDSLSSTASALGKLQDVVNQNAQALNTLVKQLSSNFGCISSVLNDILSRLDKVEAEVQIDCLITGRLQSLQTYVTQQLIRAAEIRASANLAATKMSECVLGQSKRVDFCGKGYHLMSFPQSAPHGVVFLHVTYVPAQEKNFTTAPAICHDGKAHFPREGVFVSNGTHWFVTQRNFYEPQIITTDNTFVSGNCDVVIGIVNNTVYDPLQPELDSFKEELDKYFKNHTSPDVDLGDISGINASVVNIQKEIDRLNEVAKNLNESLIDLQELGKYEQYIKGGGGSDIDPYKEFGSSYQLLNFLPLDFFPDLNALVDTATALYEEELTGREHCSPHHTAIRQALVCWDELTKLIAWMSSNITSEQVRTIIVNHVNDTWGLKVRQSLWFHLSCLTFGQHTVQEFLVSFGVWIRTPAPYRPPNAPILSTLPEHTVIC

SEQ ID NO: 7461 - protein, 1365 aa, Artificial Sequence; identical to SEQ ID NO: 7451
  SARS-CoV-2/England/200990660/2020__EPI_ISL_414523 spike protein (1-1211)(A972C_R995C) WhcAg construct

SEQ ID NO: 7462 - protein, 1365 aa, Artificial Sequence
  SARS-CoV-2/Australia/NSW09/2020__EPI_ISL_413595 spike protein (1-1211)(A972C_R995C) WhcAg construct
MFVFLVLLPLVSSQCVNLTTRTQLPPAYTNSFTRGVYYPDKVFRSSVLHSTQDLFLPFFSNVTWFHAIHVSGTNGTKRFDNPVLPFNDGVYFASTEKSNIIRGWIFGTTLDSKTQSLLIVNNATNVVIKVCEFQFCNDPFLGVYYHKNNKSWMESEFRVYSSANNCTFEYVSQPFLMDLEGKQGNFKNLREFVFKNIDGYFKIYSKHTPINLVRDLPQGFSALEPLVDLPIGINITRFQTLLALHRSYLTPGDSSSGWTAGAAAYYVGYLQPRTFLLKYNENGTITDAVDCALDPLSETKCTLKSFTVEKGIYQTSNFRVQPTESIVRFPNITNLCPFGEVFNATRFASVYAWNRKRISNCVADYSVLYNSASFSTFKCYGVSPTKLNDLCFTNVYADSFVIRGDEVRQIAPGQTGKIADYNYKLPDDFTGCVIAWNSNNLDSKVGGNYNYLYRLFRKSNLKPFERDISTEIYQAGSTPCNGVEGFNCYFPLQSYGFQPTNGVGYQPYRVVVLSFELLHAPATVCGPKKSTNLVKNKCVNFNFNGLTGTGVLTESNKKFLPFQQFGRDIADTTDAVRDPQTLEILDITPCSFGGVSVITPGTNTSNQVAVLYQDVNCTEVPVAIHADQLTPTWRVYSTGSNVFQTRAGCLIGAEHVNNSYECDIPIGAGICASYQTQTNSPRRARSVASQSIIAYTMSLGAENSVAYSNNSIAIPTNFTISVTTEILPVSMTKTSVDCTMYICGDSTECSNLLLQYGSFCTQLNRALTGIAVEQDKNTQEVFAQVKQIYKTPPIKDFGGFNFSQILPDPSKPSKRSFIEDLLFNKVTLADAGFIKQYGDCLGDIAARDLICAQKFNGLTVLPPLLTDEMIAQYTSALLAGTITSGWTFGAGAALQIPFAMQMAYRFNGIGVTQNVLYENQKLIANQFNSAIGKIQDSLSFTASALGKLQDVVNQNAQALNTLVKQLSSNFGCISSVLNDILSRLDKVEAEVQIDCLITGRLQSLQTYVTQQLIRAAEIRASANLAATKMSECVLGQSKRVDFCGKGYHLMSFPQSAPHGVVFLHVTYVPAQEKNFTTAPAICHDGKAHFPREGVFVSNGTHWFVTQRNFYEPQIITTDNTFVSGNCDVVIGIVNNTVYDPLQPELDSFKEELDKYFKNHTSPDVDLGDISGINASVVNIQKEIDRLNEVAKNLNESLIDLQELGKYEQYIKGGGGSDIDPYKEFGSSYQLLNFLPLDFFPDLNALVDTATALYEEELTGREHCSPHHTAIRQALVCWDELTKLIAWMSSNITSEQVRTIIVNHVNDTWGLKVRQSLWFHLSCLTFGQHTVQEFLVSFGVWIRTPAPYRPPNAPILSTLPEHTVIC

SEQ ID NO: 7463 - protein, 1365 aa, Artificial Sequence; identical to SEQ ID NO: 7443
  SARS-CoV-2/Australia/NSW10/2020__EPI_ISL_413596 spike protein (1-1211)(A972C_R995C) WhcAg construct

SEQ ID NO: 7464 - protein, 1365 aa, Artificial Sequence
  SARS-CoV-2/Switzerland/1000477797/2020__EPI_ISL_413023 spike protein (1-1211)(A972C_R995C) WhcAg construct
MFVFLVLLPLVSSQCVNLTTRTQLPPAYTNSFTRGVYYPDKVFRSSVLHSTQDLFLPFFSNVTWFHAIHVSGTNGTKRFDNPVLPFNDGVYFASTEKSNIIRGWIFGTTLDSKTQSLLIVNNATNVVIKVCEFQFCNDPFLGVYYHKNNKSWMESEFRVYSSANNCTFEYVSQPFLMDLEGKQGNFKNLREFVFKNIDGYFNIYSKHTPINLVRDLPQGFSALEPLVDLPIGINITRFQTLLALHRSYLTPGDSSSGWTAGAAAYYVGYLQPRTFLLKYNENGTITDAVDCALDPLSETKCTLKSFTVEKGIYQTSNFRVQPTESIVRFPNITNLCPFGEVFNATRFASVYAWNRKRISNCVADYSVLYNSASFSTFKCYGVSPTKLNDLCFTNVYADSFVIRGDEVRQIAPGQTGKIADYNYKLPDDFTGCVIAWNSNNLDSKVGGNYNYLYRLFRKSNLKPFERDISTEIYQAGSTPCNGVEGFNCYFPLQSYGFQPTNGVGYQPYRVVVLSFELLHAPATVCGPKKSTNLVKNKCVNFNFNGLTGTGVLTESNKKFLPFQQFGRDIADTTDAVRDPQTLEILDITPCSFGGVSVITPGTNTSNQVAVLYQGVNCTEVPVAIHADQLTPTWRVYSTGSNVFQTRAGCLIGAEHVNNSYECDIPIGAGICASYQTQTNSPRRARSVASQSIIAYTMSLGAENSVAYSNNSIAIPTNFTISVTTEILPVSMTKTSVDCTMYICGDSTECSNLLLQYGSFCTQLNRALTGIAVEQDKNTQEVFAQVKQIYKTPPIKDFGGFNFSQILPDPSKPSKRSFIEDLLFNKVTLADAGFIKQYGDCLGDIAARDLICAQKFNGLTVLPPLLTDEMIAQYTSALLAGTITSGWTFGAGAALQIPFAMQMAYRFNGIGVTQNVLYENQKLIANQFNSAIGKIQDSLSSTASALGKLQDVVNQNAQALNTLVKQLSSNFGCISSVLNDILSRLDKVEAEVQIDCLITGRLQSLQTYVTQQLIRAAEIRASANLAATKMSECVLGQSKRVDFCGKGYHLMSFPQSAPHGVVFLHVTYVPAQEKNFTTAPAICHDGKAHFPREGVFVSNGTHWFVTQRNFYEPQIITTDNTFVSGNCDVVIGIVNNTVYDPLQPELDSFKEELDKYFKNHTSPDVDLGDISGINASVVNIQKEIDRLNEVAKNLNESLIDLQELGKYEQYIKGGGGSDIDPYKEFGSSYQLLNFLPLDFFPDLNALVDTATALYEEELTGREHCSPHHTAIRQALVCWDELTKLIAWMSSNITSEQVRTIIVNHVNDTWGLKVRQSLWFHLSCLTFGQHTVQEFLVSFGVWIRTPAPYRPPNAPILSTLPEHTVIC

SEQ ID NO: 7465 - protein, 1365 aa, Artificial Sequence
  SARS-CoV-2/Belgium/BA-02291/2020__EPI_ISL_415159 spike protein (1-1211)(A972C_R995C) WhcAg construct
MFVFLVLLPLVSSQCVNLTTRTQLPPAYTNSFTRGVYYPDKVFRSSVLHSTQDLFLPFFSNVTWFHAIHVSGTNGTKRFDNPVLPFNDGVYFASTEKSNIIRGWIFGTTLDSKTQSLLIVNNATNVVIKVCEFQFCNDPFLGVYYHKNNKSWMESEFRVYSSANNCTFEYVSQPFLMDLEGKQGNFKNLREFVFKNIDGYFKIYSKHTPINLVRDLPQGFSALEPLVDLPIGINITRFQTLLALHRSYLTPGDSSSGWTAGAAAYYVGYLQPRTFLLKYNENGTITDAVDCALDPLSETKCTLKSFTVEKGIYQTSNFRVQPTESIVRFPNITNLCPFGEVFNATRFASVYAWNRKRISNCVADYSVLYNSASFSTFKCYGVSPTKLNDLCFTNVYADSFVIRGDEVRQIAPGQTGKIADYNYKLPDDFTGCVIAWNSNNLDSKVGGNYNYLYRLFRRSNLKPFERDISTEIYQAGSTPCNGVEGFNCYFPLQSYGFQPTNGVGYQPYRVVVLSFELLPAPATVCGPKKSTNLVKNKCVNFNFNGLTGTGVLTESNKKFLPFQQFGRDIADTTDAVRDPQTLEILDITPCSFGGVSVITPGTNTSNQVAVLYQGVNCTEVPVAIHADQLTPTWRVYSTGSNVFQTRAGCLIGAEHVNNSYECDIPIGAGICASYQTQTNSPRRARSVASQSIIAYTMSLGAENSVAYSNNSIAIPTNFTISVTTEILPVSMTKTSVDCTMYICGDSTECSNLLLQYGSFCTQLNRALTGIAVEQDKNTQEVFAQVKQIYKTPPIKDFGGFNFSQILPDPSKPSKRSFIEDLLFNKVTLADAGFIKQYGDCLGDIAARDLICAQKFNGLTVLPPLLTDEMIAQYTSALLAGTITSGWTFGAGAALQIPFAMQMAYRFNGIGVTQNVLYENQKLIANQFNSAIGKIQDSLSSAAPALGKLQDVVNQNAQALNTLVKQLSSNFGCISSVLNDILSRLDKVEAEVQIDCLITGRLQSLQTYVTQQLIRAAEIRASANLAATKMSECVLGQSKRVDFCGKGYHLMSFPQSAPHGVVFLHVTYVPAQEKNFTTAPAICHDGKAHFPREGVFVSNGTHWFVTQRNFYEPQIITTDNTFVSGNCDVVIGIVNNTVYDPLQPELDSFKEELDKYFKNHTSPDVDLGDISGINASVVNIQKEIDRLNEVAKNLNESLIDLQELGKYEQYIKGGGGSDIDPYKEFGSSYQLLNFLPLDFFPDLNALVDTATALYEEELTGREHCSPHHTAIRQALVCWDELTKLIAWMSSNITSEQVRTIIVNHVNDTWGLKVRQSLWFHLSCLTFGQHTVQEFLVSFGVWIRTPAPYRPPNAPILSTLPEHTVIC

SEQ ID NO: 7466 - protein, 1365 aa, Artificial Sequence
  SARS-CoV-2/USA/WA8-UW5/2020__EPI_ISL_413486 spike protein (1-1211)(A972C_R995C) WhcAg construct
MFVFLVLLPLVSSQCVNLTTRTQLPPAYTNSFTRGVYYPDKVFRSSVLHSTQDLFLPFFSNVTWFHAIHVSGTNGTKRFDNPVLPFNDGVYFASTEKSNIIRGWIFGTTLDSKTQSLLIVNNATNVVIKVCEFQFCNDPFLGVYYHKNNKSWMESEFRVYSSANNCTFEYVSQPFLMDLEGKQGNFKNLREFVFKNIDGYFKIYSKHTPINLVRDLPQGFSALEPLVDLPIGINITRFQTLLALHRSYLTPGDSSSGWTAGAAAYYVGYLQPRTFLLKYNENGTITDAVDCALDPLSETKCTLKSFTVEKGIYQTSNFRVQPTESIVRFPNITNLCPFGEVFNATRFASVYAWNRKRISNCVADYSVLYNSASFSTFKCYGVSPTKLNDLCFTNVYADSFVIRGDEVRQIAPGQTGKIADYNYKLPDDFTGCVIAWNSNNLDSKVGGNYNYLYRLFRKSNLKPFERDISTEIYQAGSTPCNGVEGFNCYFPLQSYGFQPTNGVGYQPYRVVVLSFELLHAPATVCGPKKSTNLVKNKCVNFNFNGLTGTGVLTESNKKFLPFQQFGRDIADTTDAVRDPQTLEILDITPCSFGGVSVITPGTNTSNQVAVLYQDVNCTEVPVAIHADQLTPTWRVYSTGSNVFQTRAGCLIGAEYVNNSYECDIPIGAGICASYQTQTNSPRRARSVASQSIIAYTMSLGAENSVAYSNNSIAIPTNFTISVTTEILPVSMTKTSVDCTMYICGDSTECSNLLLQYGSFCTQLNRALTGIAVEQDKNTQEVFAQVKQIYKTPPIKDFGGFNFSQILPDPSKPSKRSFIEDLLFNKVTLADAGFIKQYGDCLGDIAARDLICAQKFNGLTVLPPLLTDEMIAQYTSALLAGTITSGWTFGAGAALQIPFAMQMAYRFNGIGVTQNVLYENQKLIANQFNSAIGKIQDSLSSTASALGKLQDVVNQNAQALNTLVKQLSSNFGCISSVLNDILSRLDKVEAEVQIDCLITGRLQSLQTYVTQQLIRAAEIRASANLAATKMSECVLGQSKRVDFCGKGYHLMSFPQSAPHGVVFLHVTYVPAQEKNFTTAPAICHDGKAHFPREGVFVSNGTHWFVTQRNFYEPQIITTDNTFVSGNCDVVIGIVNNTVYDPLQPELDSFKEELDKYFKNHTSPDVDLGDISGINASVVNIQKEIDRLNEVAKNLNESLIDLQELGKYEQYIKGGGGSDIDPYKEFGSSYQLLNFLPLDFFPDLNALVDTATALYEEELTGREHCSPHHTAIRQALVCWDELTKLIAWMSSNITSEQVRTIIVNHVNDTWGLKVRQSLWFHLSCLTFGQHTVQEFLVSFGVWIRTPAPYRPPNAPILSTLPEHTVIC

SEQ ID NO: 7467 - protein, 1365 aa, Artificial Sequence
  SARS-CoV-2/England/20102000506/2020__EPI_ISL_415147 spike protein (1-1211)(A972C_R995C) WhcAg construct
MFVFLVLLPLVSSQCVNLTTRTQLPPAYTNSFTRGVYYPDKVFRSSVLHSTQDLFLPFFSNVTWFHAIHVSGTNGTKRFDNPVLPFNDGVYFASTEKSNIIRGWIFGTTLDSKTQSLLIVNNATNVVIKVCEFQFCNDPFLGVYYHKNNKSWMESEFRVYSSANNCTFEYVSQPFLMDLEGKQGNFKNLREFVFKNIDGYFKIYSKHTPINLVRDLPQGFSALEPLVDLPIGINITRFQTLLALHRSYLTPGDSSSGWTAGAAAYYVGYLQPRTFLLKYNENGTITDAVDCALDPLSETKCTLKSFTVEKGIYQTSNFRVQPTESIVRFPNITNLCPFGEVFNATRFASVYAWNRKRISNCVADYSVLYNSASFSTFKCYGVSPTKLNDLCFTNVYADSFVIRGDEVRQIAPGQTGKIADYNYKLPDDFTGCVIAWNSNNLDSKVGGNYNYLYRLFRKSNLKPFERDISTEIYQAGSTPCNGVEGFNCYFPLQSYGFQPTNGVGYQPYRVVVLSFELLHAPATVCGPKKSTNLVKNKCVNFNFNGLTGTGVLTESNKKFLPFQQFGRDIADTTDAVRDPQTLEILDITPCSFGGVSVITPGTNTSNQVAVLYQGVNCTEVPVAIHADQLTPTWRVYSTGSNVFQTRAGCLIGAEHVNNSYECDIPIGAGICASYQTQTNSPRRARSVASQSIIAYTMSLGAENSVAYSNNSIAIPTNFTISVTTEILPVSMTKTSVDCTMYICGDSTECSNLLLQYGSFCTQLNRALTGIAVEQDKNTQEVFAQVKQIYKTPPIKDFGGFNFSQILPDPSKPSKRSFIEDLLFNKVTLADAGFIKQYGYCLGDIAARDLICAQKFNGLTVLPPLLTDEMIAQYTSALLAGTITSGWTFGAGAALQIPFAMQMAYRFNGIGVTQNVLYENQKLIANQFNSAIGKIQDSLSSTASALGKLQDVVNQNAQALNTLVKQLSSNFGCISSVLNDILSRLDKVEAEVQIDCLITGRLQSLQTYVTQQLIRAAEIRASANLAATKMSECVLGQSKRVDFCGKGYHLMSFPQSAPHGVVFLHVTYVPAQEKNFTTAPAICHDGKAHFPREGVFVSNGTHWFVTQRNFYEPQIITTDNTFVSGNCDVVIGIVNNTVYDPLQPELDSFKEELDKYFKNHTSPDVDLGDISGINASVVNIQKEIDRLNEVAKNLNESLIDLQELGKYEQYIKGGGGSDIDPYKEFGSSYQLLNFLPLDFFPDLNALVDTATALYEEELTGREHCSPHHTAIRQALVCWDELTKLIAWMSSNITSEQVRTIIVNHVNDTWGLKVRQSLWFHLSCLTFGQHTVQEFLVSFGVWIRTPAPYRPPNAPILSTLPEHTVIC

SEQ ID NO: 7468 - protein, 1365 aa, Artificial Sequence
  SARS-CoV-2/Belgium/VAG-03013/2020__EPI_ISL_415155 spike protein (1-1211)(A972C_R995C) WhcAg construct
MFVFLVLLPLVSSQCVNLTTRTQLPPAYTNSFTRGVYYPDKVFRSSVLHSTQDLFLPFFSNVTWFHAIHVSGTNGTKRFDNPVLPFNDGVYFASTEKSNIIRGWIFGTTLDSKTQSLLIVNNATNVVIKVCEFQFCNDPFLGVYYHKNNKSWMESEFRVYSSANNCTFEYVSQPFLMDLEGKQGNFKNLREFVFKNIDGYFKIYSKHTPINLVRDLPQGFSALEPLVDLPIGINITRFQTLLALHRSYLTPGDSSSGWTAGAAAYYVGYLQPRTFLLKYNENGTITDAVDCALDPLSETKCTLKSFTVEKGIYQTSNFRVQPTESIVRFPNITNLCPFGEVFNATRFASVYAWNRKRISNCVADYSVLYNSASFSTFKCYGVSPTKLNDLCFTNVYADSFVIRGDEVRQIAPGQTGKIADYNYKLPDDFTGCVIAWNSNNLDSKVGGNYNYLYRLFRKSNLKPFERDISTEIYQAGSTPCNGVEGFNCYFPLQSYGFQPTNGVGYQPYRVVVLSFELLHAPATVCGPKKSTNLVKNKCVNFNFNGLTGTGVLTESNKKFLPFQQFGRDIADTTDAVRDPQTLEILDITPCSFGGVSVITPGTNTSNQVAVLYQGVNCTEVPVAIHADQLTPTWRVYSTGSNVFQTRAGCLIGAEHVNNSYECDIPIGAGICASYQTQTNSPRRARSVASQSIIAYTMSLGAENSVAYSNNSIAIPTNFTISVTTEILPVSMTKTSVDCTMYICGDSTECSNLLLQYGSFCTQLNRALTGIAVEQDKNTQEVFAQVKQIYKTPPIKDFGGFNFSQILPDPSKPSKRSFIEDLLFNKVTLADAGFIKQYGDCLGDIAARDLICAQKFNGLTVLPPLLTDEMIAQYTSALLAGTITSGWTFGAGAALQIPFAMQMAYRFNGIGVTQNVLYENQKLIANQFNSAIGKIQDSLSSTATALGKLQDVVNQNAQALNTLVKQLSSNFGCISSVLNDILSRLDKVEAEVQIDCLITGRLQSLQTYVTQQLIRAAEIRASANLAATKMSECVLGQSKRVDFCGKGYHLMSFPQSAPHGVVFLHVTYVPAQEKNFTTAPAICHDGKAHFPREGVFVSNGTHWFVTQRNFYEPQIITTDNTFVSGNCDVVIGIVNNTVYDPLQPELDSFKEELDKYFKNHTSPDVDLGDISGINASVVNIQKEIDRLNEVAKNLNESLIDLQELGKYEQYIKGGGGSDIDPYKEFGSSYQLLNFLPLDFFPDLNALVDTATALYEEELTGREHCSPHHTAIRQALVCWDELTKLIAWMSSNITSEQVRTIIVNHVNDTWGLKVRQSLWFHLSCLTFGQHTVQEFLVSFGVWIRTPAPYRPPNAPILSTLPEHTVIC

SEQ ID NO: 7469 - protein, 1365 aa, Artificial Sequence
  SARS-CoV-2/Belgium/BC-03016/2020__EPI_ISL_415157 spike protein (1-1211)(A972C_R995C) WhcAg construct
MFVFLVLLPLVSSQCVNLTTRTQLPPAYTNSFTRGVYYPDKVFRSSVLHSTQDLFLPFFSNVTWFHAIHVSGTNGTKRFDNPVLPFNDGVYFASTEKSNIIRGWIFGTTLDSKTQSLLIVNNATNVVIKVCEFQFCNDPFLGVYYHKNNKSWMESEFRVYSSANNCTFEYVSQPFLMDLEGKQGNFKNLREFVFKNIDGYFKIYSKHTPINLVRDLPQGFSALEPLVDLPIGINITRFQTLLALHRSYLTPGDSSSGWTAGAAAYYVGYLQPRTFLLKYNENGTITDAVDCALDPLSETKCTLKSFTVEKGIYQTSNFRVQPTESIVRFPNITNLCPFGEVFNATRFASVYAWNRKRISNCVADYSVLYNSASFSTFKCYGVSPTKLNDLCFTNVYADSFVIRGDEVRQIAPGQTGKIADYNYKLPDDFTGCVIAWNSNNLDSKVGGNYNYLYRLFRKSNLKPFERDISTEIYQAGSTPCNGVEGFNCYFPLQSYGFQPTNGVGYQPYRVVVLSFELLHAPATVCGPKKSTNLVKNKCVNFNFNGLTGTGVLTESNKKFLPFQQFGRDIADTTDAVRDPQTLEILDITPCSFGGVSVITPGTNTSNQVAVLYQGVNCTEVPVAIHADQLTPTWRVYSTGSNVFQTRAGCLIGAEHVNNSYECDIPIGAGICASYQTQTNSPRRARSVASQSIIAYTMSLGAENSVAYSNNSIAIPTNFTISVTTEILPVSMTKTSVDCTMYICGDSTECSNLLLQYGSFCTQLNRALTGIAVEQDKNTQEVFAQVKQIYKTPPIKDFGGFNFSQILPDPSKPSKRSFIEDLLFNKVTLADAGFIKQYGDCLGDIAARDLICAQKFNGLTVLPPLLTDEMIAQYTSALLAGTITSGWTFGAGAALQIPFAMQMAYRFNGIGVTQNVLYENQKLIANQFNSAIGKIQDSLSSTAPALGKLQDVVNQNAQALNTLVKQLSSNFGCISSVLNDILSRLDKVEAEVQIDCLITGRLQSLQTYVTQQLIRAAEIRASANLAATKMSECVLGQSKRVDFCGKGYHLMSFPQSAPHGVVFLHVTYVPAQEKNFTTAPAICHDGKAHFPREGVFVSNGTHWFVTQRNFYEPQIITTDNTFVSGNCDVVIGIVNNTVYDPLQPELDSFKEELDKYFKNHTSPDVDLGDISGINASVVNIQKEIDRLNEVAKNLNESLIDLQELGKYEQYIKGGGGSDIDPYKEFGSSYQLLNFLPLDFFPDLNALVDTATALYEEELTGREHCSPHHTAIRQALVCWDELTKLIAWMSSNITSEQVRTIIVNHVNDTWGLKVRQSLWFHLSCLTFGQHTVQEFLVSFGVWIRTPAPYRPPNAPILSTLPEHTVIC

SEQ ID NO: 7470 - protein, 1365 aa, Artificial Sequence
  SARS-CoV-2/Germany/BavPat3/2020__EPI_ISL_414521 spike protein (1-1211)(A972C_R995C) WhcAg construct
MFVFLVLLPLVSSQCVNLTTRTQLPPAYTNSFTRGVYYPDKVFRSSVLHSTQDLFLPFFSNVTWFHAIHVSGTNGTKRFDNPVLPFNDGVYFASTEKSNIIRGWIFGTTLDSKTQSLLIVNNATNVVIKVCEFQFCNDPFLGVYYHKNNKSWMESEFRVYSSANNCTFEYVSQPFLMDLEGKQGNFKNLREFVFKNIDGYFKIYSKHTPINLVRDLPQGFSALEPLVDLPIGINITRFQTLLALHRSYLTPGDSSSGWTAGAAAYYVGYLQPRTFLLKYNENGTITDAVDCALDPLSETKCTLKSFTVEKGIYQTSNFRVQPTESIVRFPNITNLCPFGEVFNATRFASVYAWNRKRISNCVADYSVLYNSASFSTFKCYGVSPTKLNDLCFTNVYADSFVIRGDEVRQIAPGQTGKIADYNYKLPDDFTGCVIAWNSNNLDSKVGGNYNYLYRLFRKSNLKPFERDISTEIYQAGSTPCNGVEGFNCYFPLQSYGFQPTNGVGYQPYRVVVLSFELLHAPATVCGPKKSTNLVKNKCVNFNFNGLTGTGVLTESNKKFLPFQQFGRDIADTTDAVRDPQTLEILDITPCSFGGVSVITPGTNTSNQVAVLYQDVNCTEVPVAIHADQLTPTWRVYSTGSNVFQTRAGCLIGAEHVNNSYECDIPIGAGICASYQTQTNSPRRARSVASQSIIAYTMSLGAENSVAYSNNSIAIPTNFTISVTTEILPVSMTKTSVDCTMYICGDSTECSNLLLQYGSFCTQLNRALTGIAVEQDKNTQQVFAQVKQIYKTPPIKDFGGFNFSQILPDPSKPSKRSFIEDLLFNKVTLADAGFIKQYGDCLGDIAARDLICAQKFNGLTVLPPLLTDEMIAQYTSALLAGTITSGWTFGAGAALQIPFAMQMAYRFNGIGVTQNVLYENQKLIANQFNSAIGKIQDSLSSTASALGKLQDVVNQNAQALNTLVKQLSSNFGCISSVLNDILSRLDKVEAEVQIDCLITGRLQSLQTYVTQQLIRAAEIRASANLAATKMSECVLGQSKRVDFCGKGYHLMSFPQSAPHGVVFLHVTYVPAQEKNFTTAPAICHDGKAHFPREGVFVSNGTHWFVTQRNFYEPQIITTDNTFVSGNCDVVIGIVNNTVYDPLQPELDSFKEELDKYFKNHTSPDVDLGDISGINASVVNIQKEIDRLNEVAKNLNESLIDLQELGKYEQYIKGGGGSDIDPYKEFGSSYQLLNFLPLDFFPDLNALVDTATALYEEELTGREHCSPHHTAIRQALVCWDELTKLIAWMSSNITSEQVRTIIVNHVNDTWGLKVRQSLWFHLSCLTFGQHTVQEFLVSFGVWIRTPAPYRPPNAPILSTLPEHTVIC

SEQ ID NO: 7471 - protein, 1365 aa, Artificial Sequence
  SARS-CoV-2/France/HF1805/2020__EPI_ISL_414628 spike protein (1-1211)(A972C_R995C) WhcAg construct
MFVFLVLLPLVSSQCVNLTTRTQLPPAYTNSFTRGVYYPDKVFRSSVLHSTQDLFLPFFSNVTWFHAIHVSGTNGTKRFDNPVLPFNDGVYFASTEKSNIIRGWIFGTTLDSKTQSLLIVNNATNVVIKVCEFQFCNDPFLGVYYHKNNKSWMESEFRVYSSANNCTFEYVSQPFLMDLEGKQGNFKNLREFVFKNIDGYFKIYSKHTPINLVRDLPQGFSALEPLVDLPIGINITRFQTLLALHRSYLTPGDSSSGWTAGAAAYYVGYLQPRTFLLKYNENGTITDAVDCALDPLSETKCTLKSFTVEKGIYQTSNFRVQPTESIVRFPNITNLCPFGEVFNATRFASVYAWNRKRISNCVADYSVLYNSASFSTFKCYGVSPTKLNDLCFTNVYADSFVIRGDEVRQIAPGQTGKIADYNYKLPDDFTGCVIAWNSNNLDSKVGGNYNYLYRLFRKSNLKPFERDISTEIYQAGSTPCNGVEGFNCYFPLQSYGFQPTNGVGYQPYRVVVLSFELLHAPATVCGPKKSTNLVKNKCVNFNFNGLTGTGVLTESNKKFLPFQQFGRDIADTTDAVRDPQTLEILDITPCSFGGVSVITPGTNTSNQVAVLYQGVNCTEVPVAIHADQLTPTWRVYSTGSNVFQTRAGCLIGAEHVNNSYECDIPIGAGICASYQTQTNSPRRARSVASQSIIAYTMSLGAENSVAYSNNSIAIPTNFTISVTTEILPVSMTKTSVDCTMYICGDSTECSNLLLQYGSFCTQLNRALTGIAVEQDKNTQEVFAQVKQIYKTPPIKDFGGFNFSQILPDPSKPSKRSFIEDLLFNKVTLADAGFIKQYGDCLGDIAARDLICAQKFNGLTVLPPLLTDEMIAQYTSALLAGTITSGWTFGAGAALQIPFAMQMAYRFNGIGVTQNVLYENQKLIANQFNSAIGKIQDSLSSTASALGKLQDVVNQNAQALNTLVKQLSSNFGCISSVLNDILSRLDKVEAEVQIDCLITGRLQSLQTYVTQQLIRAAEIRASANLAATKMSECVLGQSKRVDFCGKGYHLMSFPQSAPHGVVFLHVTYVPAQEKNFTTAPAICHDGKAHFPREGVFVSNGTHWFVTQRNFYEPQIITTDNTFVSGNCDVVIGVVNNTVYDPLQPELDSFKEELDKYFKNHTSPDVDLGDISGINASVVNIQKEIDRLNEVAKNLNESLIDLQELGKYEQYIKGGGGSDIDPYKEFGSSYQLLNFLPLDFFPDLNALVDTATALYEEELTGREHCSPHHTAIRQALVCWDELTKLIAWMSSNITSEQVRTIIVNHVNDTWGLKVRQSLWFHLSCLTFGQHTVQEFLVSFGVWIRTPAPYRPPNAPILSTLPEHTVIC

SEQ ID NO: 7472 - protein, 1365 aa, Artificial Sequence
  SARS-CoV-2/Netherlands/ZuidHolland_9/2020__EPI_ISL_414445 spike protein (1-1211)(A972C_R995C) WhcAg construct
MFVFLVLLPLVSSQCVNLTTRTQLPPAYTNSFTRGVYYPDKVFRSSVLHSTQDLFLPFFSNVTWFHAIHVSGTNGTKRFDNPVLPFNDGVYFASTEKSNIIRGWIFGTTLDSKTQSLLIVNNATNVVIKVCEFQFCNDPFLGVYYHKNNKSWMESEFRVYSSANNCTFEYVSQPFLMDLEGKQGNFKNLREFVFKNIDGYFKIYSKHTPINLVRDLPQGFSALEPLVDLPIGINITRFQTLLALHRSYLTPGDSSSGWTAGAAAYYVGYLQPRTFLLKYNENGTITDAVDCALDPLSETKCTLKSFTVEKGIYQTSNFRVQPTESIVRFPNITNLCPFGEVFNATRFASVYAWNRKRISNCVADYSVLYNSASFSTFKCYGVSPTKLNDLCFTNVYADSFVIRGDEVRQIAPGQTGKIADYNYKLPDDFTGCVIAWNSNNLDSKVGGNYNYLYRLFRKSNLKPFERDISTEIYQAGSTPCNGVEGFNCYFPLQSYGFQPTNGVGYQPYRVVVLSFELLHAPATVCGPKKSTNLVKNKCVNFNFNGLTGTGVLTESNKKFLPFQQFGRDIADTTDAVRDPQTLEILDITPCSFGGVSVITPGTNTSNQVAVLYQGVNCTEVPVAIHADQLTPTWRVYSTGSNVFQTRAGCLIGAEHVNNSYECDIPIGAGICASYQTQTNSPRRARSVASQSIIAYTMSLGAENSVAYSNNSIAIPTNFTISVTTEILPVSMTKTSVDCTMYICGDSTECSNLLLQYGSFCTQLNRALTGIAVEQDKNTQEVFAQVKQIYKTPPIKDFGGFNFSQILPDPSKPSKRSFIEDLLFNKVTLADAGFIKQYGDCLGDIAARDLICVQKFNGLTVLPPLLTDEMIAQYTSALLAGTITSGWTFGAGAALQIPFAMQMAYRFNGIGVTQNVLYENQKLIANQFNSAIGKIQDSLSSTASALGKLQDVVNQNAQALNTLVKQLSSNFGCISSVLNDILSRLDKVEAEVQIDCLITGRLQSLQTYVTQQLIRAAEIRASANLAATKMSECVLGQSKRVDFCGKGYHLMSFPQSAPHGVVFLHVTYVPAQEKNFTTAPAICHDGKAHFPREGVFVSNGTHWFVTQRNFYEPQIITTDNTFVSGNCDVVIGIVNNTVYDPLQPELDSFKEELDKYFKNHTSPDVDLGDISGINASVVNIQKEIDRLNEVAKNLNESLIDLQELGKYEQYIKGGGGSDIDPYKEFGSSYQLLNFLPLDFFPDLNALVDTATALYEEELTGREHCSPHHTAIRQALVCWDELTKLIAWMSSNITSEQVRTIIVNHVNDTWGLKVRQSLWFHLSCLTFGQHTVQEFLVSFGVWIRTPAPYRPPNAPILSTLPEHTVIC

SEQ ID NO: 7473 - protein, 1365 aa, Artificial Sequence
  SARS-CoV-2/Finland/FIN03032020A/2020__EPI_ISL_413602 spike protein (1-1211)(A972C_R995C) WhcAg construct
MFVFLVLLPLVSSQCVNLTTRTQLPPAYTNSFTRGVYYPDKVFRSSVLHSTQDLFLPFFSNVTWFHAIHVSGTNGTKRFDNPVLPFNDGVYFASTEKSNIIRGWIFGTTLDSKTQSLLIVNNATNVVIKVCEFQFCNDPFLGVYYHKNNKSWMESEFRVYSSANNCTFEYVSQPFLMDLEGKQGNFKNLREFVFKNIDGYFKIYSKHTPINLVRDLPQGFSALEPLVDLPIGINITRFQTLLALHRSYLTPGDSSSGWTAGAAAYYVGYLQPRTFLLKYNENGTITDAVDCALDPLSETKCTLKSFTVEKGIYQTSNFRVQPTESIVRFPNITNLCPFGEVFNATRFASVYAWNRKRISNCVADYSVLYNSASFSTFKCYGVSPTKLNDLCFTNVYADSFVIRGDEVRQIAPGQTGKIADYNYKLPDDFTGCVISWNSNNLDSKVGGNYNYLYRLFRKSNLKPFERDISTEIYQAGSTPCNGVEGFNCYFPLQSYGFQPTNGVGYQPYRVVVLSFELLHAPATVCGPKKSTNLVKNKCVNFNFNGLTGTGVLTESNKKFLPFQQFGRDIADTTDAVRDPQTLEILDITPCSFGGVSVITPGTNTSNQVAVLYQGVNCTEVPVAIHADQLTPTWRVYSTGSNVFQTRAGCLIGAEHVNNSYECDIPIGAGICASYQTQTNSPRRARSVASQSIIAYTMSLGAENSVAYSNNSIAIPTNFTISVTTEILPVSMTKTSVDCTMYICGDSTECSNLLLQYGSFCTQLNRALTGIAVEQDKNTQEVFAQVKQIYKTPPIKDFGGFNFSQILPDPSKPSKRSFIEDLLFNKVTLADAGFIKQYGDCLGDIAARDLICAQKFNGLTVLPPLLTDEMIAQYTSALLAGTITSGWTFGAGAALQIPFAMQMAYRFNGIGVTQNVLYENQKLIANQFNSAIGKIQDSLSSTASALGKLQDVVNQNAQALNTLVKQLSSNFGCISSVLNDILSRLDKVEAEVQIDCLITGRLQSLQTYVTQQLIRAAEIRASANLAATKMSECVLGQSKRVDFCGKGYHLMSFPQSAPHGVVFLHVTYVPAQEKNFTTAPAICHDGKAHFPREGVFVSNGTHWFVTQRNFYEPQIITTDNTFVSGNCDVVIGIVNNTVYDPLQPELDSFKEELDKYFKNHTSPDVDLGDISGINASVVNIQKEIDRLNEVAKNLNESLIDLQELGKYEQYIKGGGGSDIDPYKEFGSSYQLLNFLPLDFFPDLNALVDTATALYEEELTGREHCSPHHTAIRQALVCWDELTKLIAWMSSNITSEQVRTIIVNHVNDTWGLKVRQSLWFHLSCLTFGQHTVQEFLVSFGVWIRTPAPYRPPNAPILSTLPEHTVIC

SEQ ID NO: 7474 - protein, 1365 aa, Artificial Sequence
  SARS-CoV-2/France/GE1977/2020__EPI_ISL_414632 spike protein (1-1211)(A972C_R995C) WhcAg construct
MFVFLVLLPLVSSQCVNLTTRTQLPPAYTNSFTRGVYYPDKVFRSSVLHSTQDLFLPFFSNVTWFHAIHVSGTNGTKRFDNPVLPFNDGVYFASTEKSNIIRGWIFGTTLDSKTQSLLIVNNATNVVIKVCEFQFCNDPFLGVYYHKNNKSWMESEFRVYSSANNCTFEYVSQPFLMDLEGKQGNFKNLREFVFKNIDGYFKIYSKHTPINLVRDLPQGFSALEPLVDLPIGINITRFQTLLALHRSYLTPGDSSSGWTAGAAAYYVGYLQPRTFLLKYNENGTITDAVDCALDPLSETKCTLKSFTVEKGIYQTSNFRVQPTESIVRFPNITNLCPFGEVFNATRFASVYAWNRKRISNCVADYSVLYNSASFSTFKCYGVSPTKLNDLCFTNVYADSFVIRGDEVRQIAPGQTGKIADYNYKLPDDFTGCVIAWNSNNLDSKVGGNYNYLYRLFRKSNLKPFERDISTEIYQAGSTPCNGVEGFNCYFPLQSYGFQPTNGVGYQPYRVVVLSFELLHAPATVCGPKKSTNLVKNKCVNFNFNGLTGTGVLTESNKKFLPFQQFGRDIADTTDAVRDPQTLEILDITPCSFGGVSVITPGTNTSNQVAVLYQGVNCTEVPVAIHADQLTPTWRVYSTGSNVFQTRAGCLIGAEHVNNSYECDIPIGAGICASYQTQTNSPRRARSVASQSIIAYTMSLGAENSVAYSNNSIAIPTNFTISVTTEILPVSMTKTSVDCTMYICGDSTECSNLLLQYGSFCTQLNRALTGIAVEQDKNTQEVFAQVKQIYKTPPIKDFGGFNFSQILPDPSKPSKRSFIEDLLFNKVTLADAGFIKQYGDCLGDIAARDLICAQKFNGLTVLPPLLTDEMIAQYTSALLAGTITSGWTFGAGAALQIPFAMQMAYRFNGIGVTQNVLYENQKLIANQFNSAIGKIQDSLFSTASALGKLQDVVNQNAQALNTLVKQLSSNFGCISSVLNDILSRLDKVEAEVQIDCLITGRLQSLQTYVTQQLIRAAEIRASANLAATKMSECVLGQSKRVDFCGKGYHLMSFPQSAPHGVVFLHVTYVPAQEKNFTTAPAICHDGKAHFPREGVFVSNGTHWFVTQRNFYEPQIITTDNTFVSGNCDVVIGIVNNTVYDPLQPELDSFKEELDKYFKNHTSPDVDLGDISGINASVVNIQKEIDRLNEVAKNLNESLIDLQELGKYEQYIKGGGGSDIDPYKEFGSSYQLLNFLPLDFFPDLNALVDTATALYEEELTGREHCSPHHTAIRQALVCWDELTKLIAWMSSNITSEQVRTIIVNHVNDTWGLKVRQSLWFHLSCLTFGQHTVQEFLVSFGVWIRTPAPYRPPNAPILSTLPEHTVIC

SEQ ID NO: 7475 - protein, 1365 aa, Artificial Sequence
  SARS-CoV-2/Finland/FIN-313/2020__EPI_ISL_414641 spike protein (1-1211)(A972C_R995C) WhcAg construct
MFVFLVLLPLVSSQCVNLTTRTQLPPAYTNSFTRGVYYPDKVFRSSVLHSTQDLFLPFFSNVTWFHAIHVSGTNGTKRFDNPVLPFNDGVYFASTEKSNIIRGWIFGTTLDSKTQSLLIVNNATNVVIKVCEFQFCNDPFLGVYYHKNNKSWMESEFRVYSSANNCTFEYVSQPFLMDLEGKQGNFKNLREFVFKNIDGYFKIYSKHTPINLVRDLPQGFSALEPLVDLPIGINITRFKTLLALHRSYLTPGDSSSGWTAGAAAYYVGYLQPRTFLLKYNENGTITDAVDCALDPLSETKCTLKSFTVEKGIYQTSNFRVQPTESIVRFPNITNLCPFGEVFNATRFASVYAWNRKRISNCVADYSVLYNSASFSTFKCYGVSPTKLNDLCFTNVYADSFVIRGDEVRQIAPGQTGKIADYNYKLPDDFTGCVIAWNSNNLDSKVGGNYNYLYRLFRKSNLKPFERDISTEIYQAGSTPCNGVEGFNCYFPLQSYGFQPTNGVGYQPYRVVVLSFELLHAPATVCGPKKSTNLVKNKCVNFNFNGLTGTGVLTESNKKFLPFQQFGRDIADTTDAVRDPQTLEILDITPCSFGGVSVITPGTNTSNQVAVLYQGVNCTEVPVAIHADQLTPTWRVYSTGSNVFQTRAGCLIGAEHVNNSYECDIPIGAGICASYQTQTNSPRRARSVASQSIIAYTMSLGAENSVAYSNNSIAIPTNFTISVTTEILPVSMTKTSVDCTMYICGDSTECSNLLLQYGSFCTQLNRALTGIAVEQDKNTQEVFAQVKQIYKTPPIKDFGGFNFSQILPDPSKPSKRSFIEDLLFNKVTLADAGFIKQYGDCLGDIAARDLICAQKFNGLTVLPPLLTDEMIAQYTSALLAGTITSGWTFGAGAALQIPFAMQMAYRFNGIGVTQNVLYENQKLIANQFNSAIGKIQDSLSSTASALGKLQDVVNQNAQALNTLVKQLSSNFGCISSVLNDILSRLDKVEAEVQIDCLITGRLQSLQTYVTQQLIRAAEIRASANLAATKMSECVLGQSKRVDFCGKGYHLMSFPQSAPHGVVFLHVTYVPAQEKNFTTAPAICHDGKAHFPREGVFVSNGTHWFVTQRNFYEPQIITTDNTFVSGNCDVVIGIVNNTVYDPLQPELDSFKEELDKYFKNHTSPDVDLGDISGINASVVNIQKEIDRLNEVAKNLNESLIDLQELGKYEQYIKGGGGSDIDPYKEFGSSYQLLNFLPLDFFPDLNALVDTATALYEEELTGREHCSPHHTAIRQALVCWDELTKLIAWMSSNITSEQVRTIIVNHVNDTWGLKVRQSLWFHLSCLTFGQHTVQEFLVSFGVWIRTPAPYRPPNAPILSTLPEHTVIC

SEQ ID NO: 7476 - protein, 1365 aa, Artificial Sequence
  SARS-CoV-2/Netherlands/ZuidHolland_2/2020__EPI_ISL_414556 spike protein (1-1211)(A972C_R995C) WhcAg construct
MFVFLVLLPLVSSQCVNLTTRTQLPPAYTNSFTRGVYYPDKVFRSSVLHSTQDLFLPFFSNVTWFHAIHVSGTNGTKRFDNPVLPFNDGVYFASTEKSNIIRGWIFGTTLDSKTQSLLIVNNATNVVIKVCEFQFCNDPFLGVYYHKNNKSWMESEFRVYSSANNCTFEYVSQPFLMDLEGKQGNFKNLREFVFKNIDGYFKIYSKHTPINLVRDLPQGFSALEPLVDLPIGINITRFQTLLALHRSYLTPGDSSSGWTAGAAAYYVGYLQPRTFLLKYNENGTITDAVDCALDPLSETKCTLKSFTVEKGIYQTSNFRVQPTESIVRFPNITNLCPFGEVFNATRFASVYAWNRKRISNCVADYSVLYNSASFSTFKCYGVSPTKLNDLCFTNVYADSFVIRGDEVRQIAPGQTGKIADYNYKLPDDFTGCVIAWNSNNLDSKVGGNYNYLYRLFRKSNLKPFERDISTEIYQAGSTPCNGVEGFNCYFPLQSYGFQPTNGVGYQPYRVVVLSFELLHAPATVCGPKKSTNLVKNKCVNFNFNGLTGTGVLTESNKKFLPFQQFGRDIADTTDAVRDPQTLEILDITPCSFGGVSVITPGTNTSNQVAVLYQGVNCTEVPVAIHADQLTPTWRVYSTGSNVFQTRAGCLIGAEHVNNSYECDIPIGAGICASYQTQTNSPRRARSVASQSIIAYTMSLGAENSVAYSNNSIAIPTNFTISVTTEILPVSMTKTSVDCTMYICGDSTECSNLLLQYGSFCTQLNRALTGIALEQDKNTQEVFAQVKQIYKTPPIKDFGGFNFSQILPDPSKPSKRSFIEDLLFNKVTLADAGFIKQYGDCLGDIAARDLICAQKFNGLTVLPPLLTDEMIAQYTSALLAGTITSGWTFGAGAALQIPFAMQMAYRFNGIGVTQNVLYENQKLIANQFNSAIGKIQDSLSSTASALGKLQDVVNQNAQALNTLVKQLSSNFGCISSVLNDILSRLDKVEAEVQIDCLITGRLQSLQTYVTQQLIRAAEIRASANLAATKMSECVLGQSKRVDFCGKGYHLMSFPQSAPHGVVFLHVTYVPAQEKNFTTAPAICHDGKAHFPREGVFVSNGTHWFVTQRNFYEPQIITTDNTFVSGNCDVVIGIVNNTVYDPLQPELDSFKEELDKYFKNHTSPDVDLGDISGINASVVNIQKEIDRLNEVAKNLNESLIDLQELGKYEQYIKGGGGSDIDPYKEFGSSYQLLNFLPLDFFPDLNALVDTATALYEEELTGREHCSPHHTAIRQALVCWDELTKLIAWMSSNITSEQVRTIIVNHVNDTWGLKVRQSLWFHLSCLTFGQHTVQEFLVSFGVWIRTPAPYRPPNAPILSTLPEHTVIC

SEQ ID NO: 7477 - protein, 1365 aa, Artificial Sequence
  SARS-CoV-2/USA/WA-UW31/2020__EPI_ISL_414618 spike protein (1-1211)(A972C_R995C) WhcAg construct
MFVFLVLLPLVSSQCVNLTTRTQLPPAYTNSFTRGVYYPDKVFRSSVLHSTQDLFLPFFSNVTWFHAIHVSGTNGTKRFDNPVLPFNDGVYFASTEKSNIIRGWIFGTTLDSKTQSLLIVNNATNVVIKVCEFQFCNDPFLGVYYHKNNKSWMESEFRVYSSANNCTFEYVSQPFLMDLEGKQGNFKNLREFVFKNIDGYFKIYSKHTPINLVRDLPQGFSALEPLVDLPIGINITRFQTLLALHRSYLTPGDSSSGWTAGAAAYYVGYLQPRTFLLKYNENGTITDAVDCALDPLSETKCTLKSFTVEKGIYQTSNFRVQPTESIVRFPNITNLCPFGEVFNATRFASVYAWNRKRISNCVADYSVLYNSASFSTFKCYGVSPTKLNDLCFTNVYADSFVIRGDEVRQIAPGQTGKIADYNYKLPDDFTGCVIAWNSNNLDSKVGGNYNYLYRLFRKSNLKPFERDISTEIYQAGSTPCNGAEGFNCYFPLQSYGFQPTNGVGYQPYRVVVLSFELLHAPATVCGPKKSTNLVKNKCVNFNFNGLTGTGVLTESNKKFLPFQQFGRDIADTTDAVRDPQTLEILDITPCSFGGVSVITPGTNTSNQVAVLYQDVNCTEVPVAIHADQLTPTWRVYSTGSNVFQTRAGCLIGAEHVNNSYECDIPIGAGICASYQTQTNSPRRARSVASQSIIAYTMSLGAENSVAYSNNSIAIPTNFTISVTTEILPVSMTKTSVDCTMYICGDSTECSNLLLQYGSFCTQLNRALTGIAVEQDKNTQEVFAQVKQIYKTPPIKDFGGFNFSQILPDPSKPSKRSFIEDLLFNKVTLADAGFIKQYGDCLGDIAARDLICAQKFNGLTVLPPLLTDEMIAQYTSALLAGTITSGWTFGAGAALQIPFAMQMAYRFNGIGVTQNVLYENQKLIANQFNSAIGKIQDSLSSTASALGKLQDVVNQNAQALNTLVKQLSSNFGCISSVLNDILSRLDKVEAEVQIDCLITGRLQSLQTYVTQQLIRAAEIRASANLAATKMSECVLGQSKRVDFCGKGYHLMSFPQSAPHGVVFLHVTYVPAQEKNFTTAPAICHDGKAHFPREGVFVSNGTHWFVTQRNFYEPQIITTDNTFVSGNCDVVIGIVNNTVYDPLQPELDSFKEELDKYFKNHTSPDVDLGDISGINASVVNIQKEIDRLNEVAKNLNESLIDLQELGKYEQYIKGGGGSDIDPYKEFGSSYQLLNFLPLDFFPDLNALVDTATALYEEELTGREHCSPHHTAIRQALVCWDELTKLIAWMSSNITSEQVRTIIVNHVNDTWGLKVRQSLWFHLSCLTFGQHTVQEFLVSFGVWIRTPAPYRPPNAPILSTLPEHTVIC

SEQ ID NO: 7478 - protein, 1365 aa, Artificial Sequence
  SARS-CoV-2/South Korea/SNU01/2020__EPI_ISL_411929 spike protein (1-1211)(A972C_R995C) WhcAg construct
MFVFLVLLPLVSSQCVNLTTRTQLPPAYTNSFTRGVYYPDKVFRSSVLHSTQDLFLPFFSNVTWFHAIHVSGTNGTKRFDNPVLPFNDGVYFASTEKSNIIRGWIFGTTLDSKTQSLLIVNNATNVVIKVCEFQFCNDPFLGVYYHKNNKSWMESEFRVYSSANNCTFEYVSQPFLMDLEGKQGNFKNLREFVFKNIDGYFKIYSKHTPINLVRDLPQGFWALEPLVDLPIGINITRFQTLLALHRSYLTPGDSSSGWTAGAAAYYVGYLQPRTFLLKYNENGTITDAVDCALDPLSETKCTLKSFTVEKGIYQTSNFRVQPTESIVRFPNITNLCPFGEVFNATRFASVYAWNRKRISNCVADYSVLYNSASFSTFKCYGVSPTKLNDLCFTNVYADSFVIRGDEVRQIAPGQTGKIADYNYKLPDDFTGCVIAWNSNNLDSKVGGNYNYLYRLFRKSNLKPFERDISTEIYQAGSTPCNGVEGFNCYFPLQSYGFQPTNGVGYQPYRVVVLSFELLHAPATVCGPKKSTNLVKNKCVNFNFNGLTGTGVLTESNKKFLPFQQFGRDIADTTDAVRDPQTLEILDITPCSFGGVSVITPGTNTSNQVAVLYQDVNCTEVPVAIHADQLTPTWRVYSTGSNVFQTRAGCLIGAEHVNNSYECDIPIGAGICASYQTQTNSPRRARSVASQSIIAYTMSLGAENSVAYSNNSIAIPTNFTISVTTEILPVSMTKTSVDCTMYICGDSTECSNLLLQYGSFCTQLNRALTGIAVEQDKNTQEVFAQVKQIYKTPPIKDFGGFNFSQILPDPSKPSKRSFIEDLLFNKVTLADAGFIKQYGDCLGDIAARDLICAQKFNGLTVLPPLLTDEMIAQYTSALLAGTITSGWTFGAGAALQIPFAMQMAYRFNGIGVTQNVLYENQKLIANQFNSAIGKIQDSLSSTASALGKLQDVVNQNAQALNTLVKQLSSNFGCISSVLNDILSRLDKVEAEVQIDCLITGRLQSLQTYVTQQLIRAAEIRASANLAATKMSECVLGQSKRVDFCGKGYHLMSFPQSAPHGVVFLHVTYVPAQEKNFTTAPAICHDGKAHFPREGVFVSNGTHWFVTQRNFYEPQIITTDNTFVSGNCDVVIGIVNNTVYDPLQPELDSFKEELDKYFKNHTSPDVDLGDISGINASVVNIQKEIDRLNEVAKNLNESLIDLQELGKYEQYIKGGGGSDIDPYKEFGSSYQLLNFLPLDFFPDLNALVDTATALYEEELTGREHCSPHHTAIRQALVCWDELTKLIAWMSSNITSEQVRTIIVNHVNDTWGLKVRQSLWFHLSCLTFGQHTVQEFLVSFGVWIRTPAPYRPPNAPILSTLPEHTVIC

SEQ ID NO: 7479 - protein, 1365 aa, Artificial Sequence
  SARS-CoV-2/China/WF0004/2020__EPI_ISL_413694 spike protein (1-1211)(A972C_R995C) WhcAg construct
MFVFLVLLPLVSSQCVNLTTRTQLPPAYTNSFTRGVYYPDKVFRSSVLHSTQDLFLPFFSNVTWFHAIHVSGTNGTKRFDNPVLPFNDGVYFASTEKSNIIRGWIFGTTLDSKTQSLLIVNNATNVVIKVCEFQFCNDPFLGVYYHKNNKSWTESEFRVYSSANNCTFEYVSQPFLMDLEGKQGNFKNLREFVFKNIDGYFKIYSKHTPINLVRDLPQGFSALEPLVDLPIGINITRFQTLLALHRSYLTPGDSSSGWTAGAAAYYVGYLQPRTFLLKYNENGTITDAVDCALDPLSETKCTLKSFTVEKGIYQTSNFRVQPTESIVRFPNITNLCPFGEVFNATRFASVYAWNRKRISNCVADYSVLYNSASFSTFKCYGVSPTKLNDLCFTNVYADSFVIRGDEVRQIAPGQTGKIADYNYKLPDDFTGCVIAWNSNNLDSKVGGNYNYLYRLFRKSNLKPFERDISTEIYQAGSTPCNGVEGFNCYFPLQSYGFQPTNGVGYQPYRVVVLSFELLHAPATVCGPKKSTNLVKNKCVNFNFNGLTGTGVLTESNKKFLPFQQFGRDIADTTDAVRDPQTLEILDITPCSFGGVSVITPGTNTSNQVAVLYQDVNCTEVPVAIHADQLTPTWRVYSTGSNVFQTRAGCLIGAEHVNNSYECDIPIGAGICASYQTQTNSPRRARSVASQSIIAYTMSLGAENSVAYSNNSIAIPTNFTISVTTEILPVSMTKTSVDCTMYICGDSTECSNLLLQYGSFCTQLNRALTGIAVEQDKNTQEVFAQVKQIYKTPPIKDFGGFNFSQILPDPSKPSKRSFIEDLLFNKVTLADAGFIKQYGDCLGDIAARDLICAQKFNGLTVLPPLLTDEMIAQYTSALLAGTITSGWTFGAGAALQIPFAMQMAYRFNGIGVTQNVLYENQKLIANQFNSAIGKIQDSLSSTASALGKLQDVVNQNAQALNTLVKQLSSNFGCISSVLNDILSRLDKVEAEVQIDCLITGRLQSLQTYVTQQLIRAAEIRASANLAATKMSECVLGQSKRFDFCGKGYHLMSFPQSAPHGVVFLHVTYVPAQEKNFTTAPAICHDGKAHFPREGVFVSNGTHWFVTQRNFYEPQIITTDNTFVSGNCDVVIGIVNNTVYDPLQPELDSFKEELDKYFKNHTSPDVDLGDISGINASVVNIQKEIDRLNEVAKNLNESLIDLQELGKYEQYIKGGGGSDIDPYKEFGSSYQLLNFLPLDFFPDLNALVDTATALYEEELTGREHCSPHHTAIRQALVCWDELTKLIAWMSSNITSEQVRTIIVNHVNDTWGLKVRQSLWFHLSCLTFGQHTVQEFLVSFGVWIRTPAPYRPPNAPILSTLPEHTVIC

SEQ ID NO: 7480 - protein, 1365 aa, Artificial Sequence
  SARS-CoV-2/China/WF0028/2020__EPI_ISL_413791 spike protein (1-1211)(A972C_R995C) WhcAg construct
MFVFLVLLPLVSSQCVNLTTRTQLPPAYTNSFTRGVYYPDKVFRSSVLHSTQDLFLPFFSNVTWFHAIHVSGTNGTKRFDNPVLPFNDGVYFASTEKSNIIRGWIFGTTLDSKTQSLLIVNNATNVVIKVCEFQFCNDPFLGVYYHKNNKSWMESEFRVYSSANNCTFEYVSQPFLMDLEGKQGNFKNLREFVFKNIDGYFKIYSKHTPINLVRDLPQGFSALEPLVDLPIGINITRFQTLLALHRSYLTPGDSSSGWTAGAAAYYVGYLQPRTFLLKYNENGTITDAVDCALDPLSETKCTLKSFTVEKGIYQTSNFRVQPTESIVRFPNITNLCPFGEVFNATRFASVYAWNRKRISNCVADYSVLYNSASFSTFKCYGVSPTKLNDLCFTNVYADSFVIRGDEVRQIAPGQTGKIADYNYKLPDDFTGCVIAWNSNNLDSKVGGNYNYLYRLFRKSNLKPFERDISTEIYQAGSTPCNGVEGFNCYFPLQSYGFQPTNGVGYQPYRVVVLSFELLHAPATVCGPKKSTNLVKNKCVNFNFNGLTGTGVLTESNKKFLPFQQFGRDIADTTDAVRDPQTLEILDITPCSFGGVSVITPGTNTSNQVAVLYQDVNCTEVPVAIHADQLTPTWRVYSTGSNVFQTRAGCLIGAEHVNNSYECDIPIGAGICASYQTQTNSPRRARSVASQSIIAYTMSLGAENSVAYSNNSIAIPTNFTISVTTEILPVSMTKTSVDCTMYICGDSTECSNLLLQYGSFCTQLNRALTGIAVEQDKNTQEVFAQVKQIYKTPPIKDFGGFNFSQILPDPSKPSKRSFIEDLLFNKVTLADAGFIKQYGDCLGDIAARDLICAQKFNGLTVLPPLLTDEMIAQYTSALLAGTITSGWTFGAGAALQIPFAMQMAYRFNGIGVTQNVLYENQKLIANQFNSAIGKIQDSLSSTASALGKLQDVVNQNAQALNTLVKQLSSNFGCISSVLNDILSRLDKVEAEVQIDCLITGRLQSLQTYVTQQLIRAAEIRASANLAATKMSECVLGQSKRVDFCGKGYHLMSFPQSAPHGVVFLHVTYVPAQEKNFTTAPAICHDGKAHFPREGVFVSNGTHWFVTQRNFYEPQIITTDNTFVSGNCDVVIGIVNNTVYDPLQPELESFKEELDKYFKNHTSPDVDLGDISGINASVVNIQKEIDRLNEVAKNLNESLIDLQELGKYEQYIKGGGGSDIDPYKEFGSSYQLLNFLPLDFFPDLNALVDTATALYEEELTGREHCSPHHTAIRQALVCWDELTKLIAWMSSNITSEQVRTIIVNHVNDTWGLKVRQSLWFHLSCLTFGQHTVQEFLVSFGVWIRTPAPYRPPNAPILSTLPEHTVIC

SEQ ID NO: 7481 - protein, 1365 aa, Artificial Sequence
  SARS-CoV-2/2019-nCoV/USA-CruiseA-18/2020__MT159716.1 spike protein (1-1211)(A972C_R995C) WhcAg construct
MFVFLVLLPLVSSQCVNLTTRTQLPPAYTNSFTRGVYYPDKVFRSSVLHSTQDLFLPFFSNVTWFHAIHVSGTNGTKRFDNPVLPFNDGVYFASTEKSNIIRGWIFGTTLDSKTQSLLIVNNATNVVIKVCEFQFCNDPFLGVYYHKNNKSWMESELRVYSSANNCTFEYVSQPFLMDLEGKQGNFKNLREFVFKNIDGYFKIYSKHTPINLVRDLPQGFSALEPLVDLPIGINITRFQTLLALHRSYLTPGDSSSGWTAGAAAYYVGYLQPRTFLLKYNENGTITDAVDCALDPLSETKCTLKSFTVEKGIYQTSNFRVQPTESIVRFPNITNLCPFGEVFNATRFASVYAWNRKRISNCVADYSVLYNSASFSTFKCYGVSPTKLNDLCFTNVYADSFVIRGDEVRQIAPGQTGKIADYNYKLPDDFTGCVIAWNSNNLDSKVGGNYNYLYRLFRKSNLKPFERDISTEIYQAGSTPCNGVEGFNCYFPLQSYGFQPTNGVGYQPYRVVVLSFELLHAPATVCGPKKSTNLVKNKCVNFNFNGLTGTGVLTESNKKFLPFQQFGRDIADTTDAVRDPQTLEILDITPCSFGGVSVITPGTNTSNQVAVLYQDVNCTEVPVAIHADQLTPTWRVYSTGSNVFQTRAGCLIGAEHVNNSYECDIPIGAGICASYQTQTNSPRRARSVASQSIIAYTMSLGAENSVAYSNNSIAIPTNFTISVTTEILPVSMTKTSVDCTMYICGDSTECSNLLLQYGSFCTQLNRALTGIAVEQDKNTQEVFAQVKQIYKTPPIKDFGGFNFSQILPDPSKPSKRSFIEDLLFNKVTLADAGFIKQYGDCLGDIAARDLICAQKFNGLTVLPPLLTDEMIAQYTSALLAGTITSGWTFGAGAALQIPFAMQMAYRFNGIGVTQNVLYENQKLIANQFNSAIGKIQDSLSSTASALGKLQDVVNQNAQALNTLVKQLSSNFGCISSVLNDILSRLDKVEAEVQIDCLITGRLQSLQTYVTQQLIRAAEIRASANLAATKMSECVLGQSKRVDFCGKGYHLMSFPQSAPHGVVFLHVTYVPAQEKNFTTAPAICHDGKAHFPREGVFVSNGTHWFVTQRNFYEPQIITTDNTFVSGNCDVVIGIVNNTVYDPLQPELDSFKEELDKYFKNHTSPDVDLGDISGINASVVNIQKEIDRLNEVAKNLNESLIDLQELGKYEQYIKGGGGSDIDPYKEFGSSYQLLNFLPLDFFPDLNALVDTATALYEEELTGREHCSPHHTAIRQALVCWDELTKLIAWMSSNITSEQVRTIIVNHVNDTWGLKVRQSLWFHLSCLTFGQHTVQEFLVSFGVWIRTPAPYRPPNAPILSTLPEHTVIC

SEQ ID NO: 7482 - protein, 1365 aa, Artificial Sequence
  SARS-CoV-2/SARS-CoV-2/Yunnan-01/human/2020/CHN__MT049951.1 spike protein (1-1211)(A972C_R995C) WhcAg construct
MFVFLVLLPLVSSQCVNLTTRTQLPPANTNSFTRGVYYPDKVFRSSVLHSTQDLFLPFFSNVTWFHAIHVSGTNGTKRFDNPVLPFNDGVYFASTEKSNIIRGWIFGTTLDSKTQSLLIVNNATNVVIKVCEFQFCNDPFLGVYYHKNNKSWMESEFRVYSSANNCTFEYVSQPFLMDLEGKQGNFKNLREFVFKNIDGYFKIYSKHTPINLVRDLPQGFSALEPLVDLPIGINITRFQTLLALHRSYLTPGDSSSGWTAGAAAYYVGYLQPRTFLLKYNENGTITDAVDCALDPLSETKCTLKSFTVEKGIYQTSNFRVQPTESIVRFPNITNLCPFGEVFNATRFASVYAWNRKRISNCVADYSVLYNSASFSTFKCYGVSPTKLNDLCFTNVYADSFVIRGDEVRQIAPGQTGKIADYNYKLPDDFTGCVIAWNSNNLDSKVGGNYNYLYRLFRKSNLKPFERDISTEIYQAGSTPCNGVEGFNCYFPLQSYGFQPTNGVGYQPYRVVVLSFELLHAPATVCGPKKSTNLVKNKCVNFNFNGLTGTGVLTESNKKFLPFQQFGRDIADTTDAVRDPQTLEILDITPCSFGGVSVITPGTNTSNQVAVLYQDVNCTEVPVAIHADQLTPTWRVYSTGSNVFQTRAGCLIGAEHVNNSYECDIPIGAGICASYQTQTNSPRRARSVASQSIIAYTMSLGAENSVAYSNNSIAIPTNFTISVTTEILPVSMTKTSVDCTMYICGDSTECSNLLLQYGSFCTQLNRALTGIAVEQDKNTQEVFAQVKQIYKTPPIKDFGGFNFSQILPDPSKPSKRSFIEDLLFNKVTLADAGFIKQYGDCLGDIAARDLICAQKFNGLTVLPPLLTDEMIAQYTSALLAGTITSGWTFGAGAALQIPFAMQMAYRFNGIGVTQNVLYENQKLIANQFNSAIGKIQDSLSSTASALGKLQDVVNQNAQALNTLVKQLSSNFGCISSVLNDILSRLDKVEAEVQIDCLITGRLQSLQTYVTQQLIRAAEIRASANLAATKMSECVLGQSKRVDFCGKGYHLMSFPQSAPHGVVFLHVTYVPAQEKNFTTAPAICHDGKAHFPREGVFVSNGTHWFVTQRNFYEPQIITTDNTFVSGNCDVVIGIVNNTVYDPLQPELDSFKEELDKYFKNHTSPDVDLGDISGINASVVNIQKEIDRLNEVAKNLNESLIDLQELGKYEQYIKGGGGSDIDPYKEFGSSYQLLNFLPLDFFPDLNALVDTATALYEEELTGREHCSPHHTAIRQALVCWDELTKLIAWMSSNITSEQVRTIIVNHVNDTWGLKVRQSLWFHLSCLTFGQHTVQEFLVSFGVWIRTPAPYRPPNAPILSTLPEHTVIC

SEQ ID NO: 7483 - protein, 1365 aa, Artificial Sequence
  SARS-CoV-2/USA/WA-UW292/2020__EPI_ISL_418077 spike protein (1-1211)(A972C_R995C) WhcAg construct
MFVFLVLLPLVSSQCVNLTTRTQLPPAYTNSFTRGVYYPDKVFRSSVLHSTQDLFLPFFSNVTWFHAIHVSGTNGTKRFDNPVLPFNDGVYFASTEKSNIIRGWIFGTTLDSKTQSLLIVNNATNVVIKVCEFQFCNDPFLGVYYHKNNKSWMESEFRVYSSANNCTFEYVSQPFLMDLEGKQGNFKNLREFVFKNIDGYFKIYSKHTPINLVRDLPQGFSALEPLVDLPIGINITRFQTLLALHRSYLTPGDSSSGWTAGAAAYYVGYLQPRTFLLKYNENGTITDAVDCALDPLSETKCTLKSFTVEKGIYQTSNFRVQPTESIVRFPNITNLCPFGEVFNATRFASVYAWNRKRISNCVADYSVLYNSASFSTFKCYGVSPTKLNDLCFTNVYADSFVIRGDEVRQIAPGQTGKIADYNYKLPDDFTGCVIAWNSNNLDSKVGGNYNYLYRLFRKSNLKPFERDISTEIYQASSTPCNGVEGFNCYFPLQSYGFQPTNGVGYQPYRVVVLSFELLHAPATVCGPKKSTNLVKNKCVNFNFNGLTGTGVLTESNKKFLPFQQFGRDIADTTDAVRDPQTLEILDITPCSFGGVSVITPGTNTSNQVAVLYQDVNCTEVPVAIHADQLTPTWRVYSTGSNVFQTRAGCLIGAEHVNNSYECDIPIGAGICASYQTQTNSPRRARSVASQSIIAYTMSLGAENSVAYSNNSIAIPTNFTISVTTEILPVSMTKTSVDCTMYICGDSTECSNLLLQYGSFCTQLNRALTGIAVEQDKNTQEVFAQVKQIYKTPPIKDFGGFNFSQILPDPSKPSKRSFIEDLLFNKVTLADAGFIKQYGDCLGDIAARDLICAQKFNGLTVLPPLLTDEMIAQYTSALLAGTITSGWTFGAGAALQIPFAMQMAYRFNGIGVTQNVLYENQKLIANQFNSAIGKIQDSLSSTASALGKLQDVVNQNAQALNTLVKQLSSNFGCISSVLNDILSRLDKVEAEVQIDCLITGRLQSLQTYVTQQLIRAAEIRASANLAATKMSECVLGQSKRVDFCGKGYHLMSFPQSAPHGVVFLHVTYVPAQEKNFTTAPAICHDGKAHFPREGVFVSNGTHWFVTQRNFYEPQIITTDNTFVSGNCDVVIGIVNNTVYDPLQPELDSFKEELDKYFKNHTSPDVDLGDISGINASVVNIQKEIDRLNEVAKNLNESLIDLQELGKYEQYIKGGGGSDIDPYKEFGSSYQLLNFLPLDFFPDLNALVDTATALYEEELTGREHCSPHHTAIRQALVCWDELTKLIAWMSSNITSEQVRTIIVNHVNDTWGLKVRQSLWFHLSCLTFGQHTVQEFLVSFGVWIRTPAPYRPPNAPILSTLPEHTVIC

SEQ ID NO: 7484 - protein, 1365 aa, Artificial Sequence
  SARS-CoV-2/Iceland/192/2020__EPI_ISL_417819 spike protein (1-1211)(A972C_R995C) WhcAg construct
MFVFFVLLPLVSSQCVNLTTRTQLPPAYTNSFTRGVYYPDKVFRSSVLHSTQDLFLPFFSNVTWFHAIHVSGTNGTKRFDNPVLPFNDGVYFASTEKSNIIRGWIFGTTLDSKTQSLLIVNNATNVVIKVCEFQFCNDPFLGVYYHKNNKSWMESEFRVYSSANNCTFEYVSQPFLMDLEGKQGNFKNLREFVFKNIDGYFKIYSKHTPINLVRDLPQGFSALEPLVDLPIGINITRFQTLLALHRSYLTPGDSSSGWTAGAAAYYVGYLQPRTFLLKYNENGTITDAVDCALDPLSETKCTLKSFTVEKGIYQTSNFRVQPTESIVRFPNITNLCPFGEVFNATRFASVYAWNRKRISNCVADYSVLYNSASFSTFKCYGVSPTKLNDLCFTNVYADSFVIRGDEVRQIAPGQTGKIADYNYKLPDDFTGCVIAWNSNNLDSKVGGNYNYLYRLFRKSNLKPFERDISTEIYQAGSTPCNGVEGFNCYFPLQSYGFQPTNGVGYQPYRVVVLSFELLHAPATVCGPKKSTNLVKNKCVNFNFNGLTGTGVLTESNKKFLPFQQFGRDIADTTDAVRDPQTLEILDITPCSFGGVSVITPGTNTSNQVAVLYQGVNCTEVPVAIHADQLTPTWRVYSTGSNVFQTRAGCLIGAEHVNNSYECDIPIGAGICASYQTQTNSPRRARSVASQSIIAYTMSLGAENSVAYSNNSIAIPTNFTISVTTEILPVSMTKTSVDCTMYICGDSTECSNLLLQYGSFCTQLNRALTGIAVEQDKNTQEVFAQVKQIYKTPPIKDFGGFNFSQILPDPSKPSKRSFIEDLLFNKVTLADAGFIKQYGDCLGDIAARDLICAQKFNGLTVLPPLLTDEMIAQYTSALLAGTITSGWTFGAGAALQIPFAMQMAYRFNGIGVTQNVLYENQKLIANQFNSAIGKIQDSLSSTASALGKLQDVVNQNAQALNTLVKQLSSNFGCISSVLNDILSRLDKVEAEVQIDCLITGRLQSLQTYVTQQLIRAAEIRASANLAATKMSECVLGQSKRVDFCGKGYHLMSFPQSAPHGVVFLHVTYVPAQEKNFTTAPAICHDGKAHFPREGVFVSNGTHWFVTQRNFYEPQIITTDNTFVSGNCDVVIGIVNNTVYDPLQPELDSFKEELDKYFKNHTSPDVDLGDISGINASVVNIQKEIDRLNEVAKNLNESLIDLQELGKYEQYIKGGGGSDIDPYKEFGSSYQLLNFLPLDFFPDLNALVDTATALYEEELTGREHCSPHHTAIRQALVCWDELTKLIAWMSSNITSEQVRTIIVNHVNDTWGLKVRQSLWFHLSCLTFGQHTVQEFLVSFGVWIRTPAPYRPPNAPILSTLPEHTVIC

SEQ ID NO: 7485 - protein, 1365 aa, Artificial Sequence
  SARS-CoV-2/Belgium/ULG-6939/2020__EPI_ISL_417020 spike protein (1-1211)(A972C_R995C) WhcAg construct
MFVFLVLLPLVSSQCVNLTTRTQLPPAYTNSFTRGVYYPDKVFRSSVLHSTQDLFLPFFSNVTWFHAIHVSGTNGTKRFDNPVLPFNDGVYFASTEKSNIIRGWIFGTTLDSKTQSLLIVNNATNVVIKVCEFQFCNDPFLGVYYHKNNKSWMESEFRVYSSANNCTFEYVSQPFLMDLEGKQGNFKNLREFVFKNIDGYFKIYSKHTPINLVRDLPQGFSALEPLVDLPIGINITRFQTLLALHRSYLTPGDSSSGWTAGAAAYYVGYLQPRTFLLKYNENGTITDAVDCALDPLSETKCTLKSFTVEKGIYQTSNFRVQPTESIVRFPNITNLCPFGEVFNATRFASVYAWNRKRISNCVADYSVLYNSASFSTFKCYGVSPTKLNDLCFTNVYADSFVIRGDEVRQIAPGQTGKIADYNYKLPDDFTGCVIAWNSNNLDSKVGGNYNYLYRLFRKSNLKPFERDISTEIYQAGSTPCNGVEGFNCYFPLQSYGFQPTNGVGYQPYRVVVLSFELLHAPATVCGPKKSTNLVKNKCVNFNFNGLTGTGVLTESNKKFLPFQQFGRDIADTTDAVRDPQTLEILDITPCSFGGVSVITPGTNTSNQVAVLYQGVNCTEVPVAIHADQLTPTWRVYSTGSNVFQTRAGCLIGAEHVNNSYECDIPIGAGICASYQTQTNSPRRARSVASQSIIAYTMSLGAENSVVYSNNSIAIPTNFTISVTTEILPVSMTKTSVDCTMYICGDSTECSNLLLQYGSFCTQLNRALTGIAVEQDKNTQEVFAQVKQIYKTPPIKDFGGFNFSQILPDPSKPSKRSFIEDLLFNKVTLADAGFIKQYGDCLGDIAARDLICAQKFNGLTVLPPLLTDEMIAQYTSALLAGTITSGWTFGAGAALQIPFAMQMAYRFNGIGVTQNVLYENQKLIANQFNSAIGKIQDSLSSTASALGKLQDVVNQNAQALNTLVKQLSSNFGCISSVLNDILSRLDKVEAEVQIDCLITGRLQSLQTYVTQQLIRAAEIRASANLAATKMSECVLGQSKRVDFCGKGYHLMSFPQSAPHGVVFLHVTYVPAQEKNFTTAPAICHDGKAHFPREGVFVSNGTHWFVTQRNFYEPQIITTDNTFVSGNCDVVIGIVNNTVYDPLQPELDSFKEELDKYFKNHTSPDVDLGDISGINASVVNIQKEIDRLNEVAKNLNESLIDLQELGKYEQYIKGGGGSDIDPYKEFGSSYQLLNFLPLDFFPDLNALVDTATALYEEELTGREHCSPHHTAIRQALVCWDELTKLIAWMSSNITSEQVRTIIVNHVNDTWGLKVRQSLWFHLSCLTFGQHTVQEFLVSFGVWIRTPAPYRPPNAPILSTLPEHTVIC

SEQ ID NO: 7486 - protein, 1365 aa, Artificial Sequence
  SARS-CoV-2/France/HF2496/2020__EPI_ISL_418231 spike protein (1-1211)(A972C_R995C) WhcAg construct
MFVFLVLLPLVSSQCVNLTTRTQLPPAYTNSFTRGVYYPDKVFRSSVLHSTQDLFLPFFSNVTWFHAIHVSGTNGTKRFDNPVLPFNDGVYFASTEKSNIIRGWIFGTTLDSKTQSLLIVNNATNVVIKVCEFQFCNDPFLGVYYHKNNKSWMESEFRVYSSANNCTFEYVSQPFLMDLEGKQGNFKNLREFVFKNIDGYFKIYSKHTPINLVRDLPQGFSALEPLVDLPIGINITRFQTLLALHRSYLTPGDSSSGWTAGAAAYYVGYLQPRTFLLKYNENGTITDAVDCALDPLSETKCTLKSFTVEKGIYQTSNFRVQPTESIVRFPNITNLCPFGEVFNATRFASVYAWNRKRISNCVADYSVLYNSASFSTFKCYGVSPTKLNDLCFTNVYADSFVIRGDEVRQIAPGQTGKIADYNYKLPDDFTGCVIAWNSNNLDSKVGGNYNYLYRLFRKSNLKPFERDISTEIYQAGSTPCNGVEGFNCYFPLQSYGFQPTNGVGYQPYRVVVLSFELLHAPATVCGPKKSTNLVKNKCVNFNFNGLTGTGVLTESNKKFLPFQQFGRDIADTTDAVRDPQTLEILDITPCSFGGVSVITPGTNTSNQVAVLYQGVNCTEVPVAIHADQLTPTWRVYSTGSNVFQTRAGCLIGAEHVNNSYECDIPIGAGICASYQTQTNSPRRARSVASQSIIAYTMSLGAENSVAYSNNSIAIPTNFTISVTTEILPVSMTKTSVDCTMYICGDSTECSNLLLQYGSFCTQLNRALTGIAVEQDKNTQEVFAQVKQIYKTPPIKDFGGFNFSQILPDPSKPSKRSFIEDLLFNKVTLADAGFIKQYGDCLGDIVARDLICAQKFNGLTVLPPLLTDEMIAQYTSALLAGTITSGWTFGAGAALQIPFAMQMAYRFNGIGVTQNVLYENQKLIANQFNSAIGKIQDSLSSTASALGKLQDVVNQNAQALNTLVKQLSSNFGCISSVLNDILSRLDKVEAEVQIDCLITGRLQSLQTYVTQQLIRAAEIRASANLAATKMSECVLGQSKRVDFCGKGYHLMSFPQSAPHGVVFLHVTYVPAQEKNFTTAPAICHDGKAHFPREGVFVSNGTHWFVTQRNFYEPQIITTDNTFVSGNCDVVIGIVNNTVYDPLQPELDSFKEELDKYFKNHTSPDVDLGDISGINASVVNIQKEIDRLNEVAKNLNESLIDLQELGKYEQYIKGGGGSDIDPYKEFGSSYQLLNFLPLDFFPDLNALVDTATALYEEELTGREHCSPHHTAIRQALVCWDELTKLIAWMSSNITSEQVRTIIVNHVNDTWGLKVRQSLWFHLSCLTFGQHTVQEFLVSFGVWIRTPAPYRPPNAPILSTLPEHTVIC

SEQ ID NO: 7487 - protein, 1365 aa, Artificial Sequence
  SARS-CoV-2/USA/WA-UW291/2020__EPI_ISL_418076 spike protein (1-1211)(A972C_R995C) WhcAg construct
MFVFLVLLPLVSSQCVNLTTRTQLPPAYTNSFTRGVYYPDKVFRSSVLHSTQDLFLPFFSNVTWFHAIHVSGTNGTKRFDNPVLPFNDGVYFASTEKSNIIRGWIFGTTLDSKTQSLLIVNNATNVVIKVCEFQFCNDPFLGVYYHKNNKSWMESEFRVYSSANNCTFEYVSQPFLMDLEGKQGNFKNLREFVFKNIDGYFKIYSKHTPINLVRDLPQGFSALEPLVDLPIGINITRFQTLLALHRSYLTPGDSSSGWTAGAAAYYVGYLQPRTFLLKYNENGTITDAVDCALDPLSETKCTLKSFTVEKGIYQTSNFRVQPTESIVRFPNITNLCPFGEVFNATRFASVYAWNRKRISNCVADYSVLYNSASFSTFKCYGVSPTKLNDLCFTNVYADSFVIRGDEVRQIAPGQTGKIADYNYKLPDDFTGCVIAWNSNNLDSKVGGNYNYLYRLFRKSNLKPFERDISTEIYQAGSTPCNGVEGFNCYFPLQSYGFQPTNGVGYQPYRVVVLSFELLHAPATVCGPKKSTNLVKNKCVNFNFNGLTGTGVLTESNKKFLPFQQFGRDIADTTDAVRDPQTLEILDITPCSFGGVSVITPGTNTSNQVAVLYQGVNCTEVPVAIHADQLTPTWRVYSTGSNVFQTRAGCLIGAEHVNNSYECDIPIGAGICASYQTQTNSPRRARSVASQSIIAYTMSLGAENSVAYSNNSIAIPTNFTISVTTEILPVSMTKTSVDCTMYICGDSTECSNLLLQYGSFCTQLNRALTGIAVEQDKNTQEVFAQVKQIYKTPPIKDFGGFNFSQILPDPSKPSKRSFIEDLLFNKVTLADAGFIKQYGDCLGDIAARDLICAQKFNGLTVLPPLLTDEMIAQYTSALLAGTITSGWTFGAGAALQIPFAMQMAYRFNGIGVTQNVLYENQKLIANQFNSAIGKIQYSLSSTASALGKLQDVVNQNAQALNTLVKQLSSNFGCISSVLNDILSRLDKVEAEVQIDCLITGRLQSLQTYVTQQLIRAAEIRASANLAATKMSECVLGQSKRVDFCGKGYHLMSFPQSAPHGVVFLHVTYVPAQEKNFTTAPAICHDGKAHFPREGVFVSNGTHWFVTQRNFYEPQIITTDNTFVSGNCDVVIGIVNNTVYDPLQPELDSFKEELDKYFKNHTSPDVDLGDISGINASVVNIQKEIDRLNEVAKNLNESLIDLQELGKYEQYIKGGGGSDIDPYKEFGSSYQLLNFLPLDFFPDLNALVDTATALYEEELTGREHCSPHHTAIRQALVCWDELTKLIAWMSSNITSEQVRTIIVNHVNDTWGLKVRQSLWFHLSCLTFGQHTVQEFLVSFGVWIRTPAPYRPPNAPILSTLPEHTVIC

SEQ ID NO: 7488 - protein, 1365 aa, Artificial Sequence; identical to SEQ ID NO: 7451
  SARS-CoV-2/Portugal/PT0034/2020__EPI_ISL_418019 spike protein (1-1211)(A972C_R995C) WhcAg construct

SEQ ID NO: 7489 - protein, 1365 aa, Artificial Sequence
  SARS-CoV-2/Iceland/202/2020__EPI_ISL_417750 spike protein (1-1211)(A972C_R995C) WhcAg construct
MFVFLVLLPLVSSQCVNLTTRTQLPPAYTNSFTRGVYYPDKVFRSSVLHSTQDLFLPFFSNVTWFHAIHVSGTNGTKRFDNPVLPFNDGVYFASTEKSNIIRGWIFGTTLDSKTQSLLIVNNATNVVIKVCEFQFCNDPFLGVYYHKNNKSWMESEFRVYSSANNCTFEYVSQPFLMDLEGKQGNFKNLREFVFKNIDGYFKIYSKHTPINLVRDLPQGFSALEPLVDLPIGINITRFQTLLALHRSYLTPGDSSSGWTAGAAAYYVGYLQPRTFLLKYNENGTITDAVDCALDPLSETKCTLKSFTVEKGIYQTSNFRVQPTESIVRFPNITNLCPFGEVFNATRFASVYAWNRKRISNCVADYSVLYNSASFSTFKCYGVSPTKLNDLCFTNVYADSFVIRGDEVRQIAPGQTGKIADYNYKLPDDFTGCVIAWNSNNLDSKVGGNYNYLYRLFRKSNLKPFERDISTEIYQAGSTPCNGVEGFNCYFPLQSYGFQPTNGVGYQPYRVVVLSFELLHAPATVCGPKKSTNLVKNKCVNFNFNGLTGTGVLTESNKKFLPFQQFGRDIADTTDAVRDPQTLEILDITPCSFGGVSVITPGTNTSNQVAVLYQDVNCTEVPVAIHADQLTPTWRVYSTGSNVFQTRAGCLIGAEHVNNSYECDIPIGAGICASYQTQTNSPRRARSVASQSIIAYTMSLGAENSVAYSNNSIAIPTNFTISVTTEILPVSMTKTSVDCTMYICGDSTECSNLLLQYGSFCTQLNRALTGIAVEQDKNTQEVFAQVKQIYKTPPIKDFGGFNFSQILPDPSKPSKRSFIEDLLFNKVTLADAGFIKQYGDCLGDIAARDLICAQKFNGLTVLPPLLTDEMIAQYTSALLAGTITSGWTFGAGAALQIPFAMQMAYRFNGIGVTQNVLYENQKLIANQFNSAIGKIQDSLSSTASALGKLQDVVNQNAQALNTLVKQLSSNFGCISSVLNDILSRLDKVEAEVQIDCLITGRLQSLQTYVTQQLIRAAEIRASANLAATKMSECVLGQSKRVDFCGKGYHLMSFPQSAPHGVVFLHVTYVPAQEKNFTTAPAICHDGKAHFPREGVFVSNGTHWFVTQRNFYEPQIITTDNTFVSGNCDVVIGIVNNTVYDPLQPELDSFKEELDKYFKNHTSPDVDLGDIPGINASVVNIQKEIDRLNEVAKNLNESLIDLQELGKYEQYIKGGGGSDIDPYKEFGSSYQLLNFLPLDFFPDLNALVDTATALYEEELTGREHCSPHHTAIRQALVCWDELTKLIAWMSSNITSEQVRTIIVNHVNDTWGLKVRQSLWFHLSCLTFGQHTVQEFLVSFGVWIRTPAPYRPPNAPILSTLPEHTVIC

SEQ ID NO: 7490 - protein, 1365 aa, Artificial Sequence
  SARS-CoV-2/USA/WA-UW261/2020__EPI_ISL_418046 spike protein (1-1211)(A972C_R995C) WhcAg construct
MFVFLVLLPLVSSQCVNLTTRTQLPPAYTNSFTRGVYYPDKVFRSSVLHSTQDLFLPFFSNVTWFHAIHVSGTNGTKRFDNPVLPFNDGVYFASTEKSNIIRGWIFGTTLDSKTQSLLIVNNATNVVIKVCEFQFCNDPFLGVYYHKNNKSWMESEFRVYSSANNCTFEYVSQPFLMDLEGKQGNFKNLREFVFKNIDGYFKIYSKHTPINLVRDLPQGFSALEPLVDLPIGINITRFQTLLALHRSYLTPGDSSSGWTAGAAAYYVGYLQPRTFLLKYNENGTITDAVDCALDPLSETKCTLKSFTVEKGIYQTSNFRVQPTESIVRFPNITNLCPFGEVFNATRFTSVYAWNRKRISNCVADYSVLYNSASFSTFKCYGVSPTKLNDLCFTNVYADSFVIRGDEVRQIAPGQTGKIADYNYKLPDDFTGCVIAWNSNNLDSKVGGNYNYLYRLFRKSNLKPFERDISTEIYQAGSTPCNGVEGFNCYFPLQSYGFQPTNGVGYQPYRVVVLSFELLHAPATVCGPKKSTNLVKNKCVNFNFNGLTGTGVLTESNKKFLPFQQFGRDIADTTDAVRDPQTLEILDITPCSFGGVSVITPGTNTSNQVAVLYQDVNCTEVPVAIHADQLTPTWRVYSTGSNVFQTRAGCLIGAEHVNNSYECDIPIGAGICASYQTQTNSPRRARSVASQSIIAYTMSLGAENSVAYSNNSIAIPTNFTISVTTEILPVSMTKTSVDCTMYICGDSTECSNLLLQYGSFCTQLNRALTGIAVEQDKNTQEVFAQVKQIYKTPPIKDFGGFNFSQILPDPSKPSKRSFIEDLLFNKVTLADAGFIKQYGDCLGDIAARDLICAQKFNGLTVLPPLLTDEMIAQYTSALLAGTITSGWTFGAGAALQIPFAMQMAYRFNGIGVTQNVLYENQKLIANQFNSAIGKIQDSLSSTASALGKLQDVVNQNAQALNTLVKQLSSNFGCISSVLNDILSRLDKVEAEVQIDCLITGRLQSLQTYVTQQLIRAAEIRASANLAATKMSECVLGQSKRVDFCGKGYHLMSFPQSAPHGVVFLHVTYVPAQEKNFTTAPAICHDGKAHFPREGVFVSNGTHWFVTQRNFYEPQIITTDNTFVSGNCDVVIGIVNNTVYDPLQPELDSFKEELDKYFKNHTSPDVDLGDISGINASVVNIQKEIDRLNEVAKNLNESLIDLQELGKYEQYIKGGGGSDIDPYKEFGSSYQLLNFLPLDFFPDLNALVDTATALYEEELTGREHCSPHHTAIRQALVCWDELTKLIAWMSSNITSEQVRTIIVNHVNDTWGLKVRQSLWFHLSCLTFGQHTVQEFLVSFGVWIRTPAPYRPPNAPILSTLPEHTVIC

SEQ ID NO: 7491 - protein, 1365 aa, Artificial Sequence
  SARS-CoV-2/Portugal/PT0035/2020__EPI_ISL_418020 spike protein (1-1211)(A972C_R995C) WhcAg construct
MFVFLVLLPLVSSQCVNLTTRTQLPPAYTNSFTRGVYYPDKVFRSSVLHSTQDLFLPFFSNVTWFHAIHVSGTNGTKRFDNPVLPFNDGVYFASTEKSNIIRGWIFGTTLDSKTQSLLIVNNATNVVIKVCEFQFCNDPFLGVYYHKNNKSWMESEFRVYSSANNCTFEYVSQPFLMDLEGKQGNFKNLREFVFKNIDGYFKIYSKHTPINLVRDLPQGFSALEPLVDLPIGINITRFQTLLALHRSYLTPGDSSSGWTAGAAAYYVGYLQPRTFLLKYNENGTITDAVDCALDPLSETKCTLKSFTVEKGIYQTSNFRVQPTESIVRFPNITNLCPFGEVFNATRFASVYAWNRKRISNCVADYSVLYNSASFSTFKCYGVSPTKLNDLCFTNVYADSFVIRGDEVRQIAPGQTGKIADYNYKLPDDFTGCVIAWNSNNLDSKVGGNYNYLYRLFRKSNLKPFERDISTEIYQAGSTPCNGVEGFNCYFPLQSYGFQPTNGVGYQPYRVVVLSFELLHAPATVCGPKKSTNLVKNKCVNFNFNGLTGTGVLTESNKKFLPFQQFGRDIADTTDAVRDPQTLEILDITPCSFGGVSVITPGTNTSNQVAVLYQDVNCTEVPVAIHADQLTPTWRVYSTGSNVFQTRAGCLIGAEHVNNSYECDIPIGAGICASYQTQTNSPRRARSVASQSIIAYTMSLGAENSVAYSNNSIAIPTNFTISVTTEILPVSMTKTSVDCTMYICGDSTECSNLLLQYGSFCTQLNRALTGIAVEQDKNTQEVFAQVKQIYKTPPIKDFGGFNFSQILPDPSKPSKRSFIEDLLFNKVTLADAGFIKQYGDCLGDISARDLICAQKFNGLTVLPPLLTDEMIAQYTSALLAGTITSGWTFGAGAALQIPFAMQMAYRFNGIGVTQNVLYENQKLIANQFNSAIGKIQDSLSSTASALGKLQDVVNQNAQALNTLVKQLSSNFGCISSVLNDILSRLDKVEAEVQIDCLITGRLQSLQTYVTQQLIRAAEIRASANLAATKMSECVLGQSKRVDFCGKGYHLMSFPQSAPHGVVFLHVTYVPAQEKNFTTAPAICHDGKAHFPREGVFVSNGTHWFVTQRNFYEPQIITTDNTFVSGNCDVVIGIVNNTVYDPLQPELDSFKEELDKYFKNHTSPDVDLGDISGINASVVNIQKEIDRLNEVAKNLNESLIDLQELGKYEQYIKGGGGSDIDPYKEFGSSYQLLNFLPLDFFPDLNALVDTATALYEEELTGREHCSPHHTAIRQALVCWDELTKLIAWMSSNITSEQVRTIIVNHVNDTWGLKVRQSLWFHLSCLTFGQHTVQEFLVSFGVWIRTPAPYRPPNAPILSTLPEHTVIC

SEQ ID NO: 7492 - protein, 1365 aa, Artificial Sequence
  SARS-CoV-2/USA/NY-NYUMC7/2020__EPI_ISL_418192 spike protein (1-1211)(A972C_R995C) WhcAg construct
MFVFLVLLPLVSSQCVNLTTRTQLPPAYTNSFTRGVYYPDKVFRSSVLHSTQDLFLPFFSNVTWFHAIHVSGTNGTKRFDNPVLPFNDGVYFASTEKSNIIRGWIFGTTLDSKTQSLLIVNNATNVVIKVCEFQFCNDPFLGVYHHKNNKSWMESEFRVYSSANNCTFEYVSQPFLMDLEGKQGNFKNLREFVFKNIDGYFKIYSKHTPINLVRDLPQGFSALEPLVDLPIGINITRFQTLLALHRSYLTPGDSSSGWTAGAAAYYVGYLQPRTFLLKYNENGTITDAVDCALDPLSETKCTLKSFTVEKGIYQTSNFRVQPTESIVRFPNITNLCPFGEVFNATRFASVYAWNRKRISNCVADYSVLYNSASFSTFKCYGVSPTKLNDLCFTNVYADSFVIRGDEVRQIAPGQTGKIADYNYKLPDDFTGCVIAWNSNNLDSKVGGNYNYLYRLFRKSNLKPFERDISTEIYQAGSTPCNGVEGFNCYFPLQSYGFQPTNGVGYQPYRVVVLSFELLHAPATVCGPKKSTNLVKNKCVNFNFNGLTGTGVLTESNKKFLPFQQFGRDIADTTDAVRDPQTLEILDITPCSFGGVSVITPGTNTSNQVAVLYQGVNCTEVPVAIHADQLTPTWRVYSTGSNVFQTRAGCLIGAEHVNNSYECDIPIGAGICASYQTQTNSPRRARSVASQSIIAYTMSLGAENSVAYSNNSIAIPTNFTISVTTEILPVSMTKTSVDCTMYICGDSTECSNLLLQYGSFCTQLNRALTGIAVEQDKNTQEVFAQVKQIYKTPPIKDFGGFNFSQILPDPSKPSKRSFIEDLLFNKVTLADAGFIKQYGDCLGDIAARDLICAQKFNGLTVLPPLLTDEMIAQYTSALLAGTITSGWTFGAGAALQIPFAMQMAYRFNGIGVTQNVLYENQKLIANQFNSAIGKIQDSLSSTASALGKLQDVVNQNAQALNTLVKQLSSNFGCISSVLNDILSRLDKVEAEVQIDCLITGRLQSLQTYVTQQLIRAAEIRASANLAATKMSECVLGQSKRVDFCGKGYHLMSFPQSAPHGVVFLHVTYVPAQEKNFTTAPAICHDGKAHFPREGVFVSNGTHWFVTQRNFYEPQIITTDNTFVSGNCDVVIGIVNNTVYDPLQPELDSFKEELDKYFKNHTSPDVDLGDISGINASVVNIQKEIDRLNEVAKNLNESLIDLQELGKYEQYIKGGGGSDIDPYKEFGSSYQLLNFLPLDFFPDLNALVDTATALYEEELTGREHCSPHHTAIRQALVCWDELTKLIAWMSSNITSEQVRTIIVNHVNDTWGLKVRQSLWFHLSCLTFGQHTVQEFLVSFGVWIRTPAPYRPPNAPILSTLPEHTVIC

SEQ ID NO: 7493 - protein, 1365 aa, Artificial Sequence
  SARS-CoV-2/Iceland/189/2020__EPI_ISL_417709 spike protein (1-1211)(A972C_R995C) WhcAg construct
MFVFLVLLPLVSSQCVNLTTRTQLPPAYTNSFTRGVYYPDKVFRSSVLHSTQDLFLPFFSNVTWFHAIHVSGTNGTKRFDNPVLPFNDGVYFASTEKSNIIRGWIFGTTLDSKTQSLLIVNNATNVVIKVCEFQFCNDPFLGVYYHKNNKSWMESEFRVYSSANNCTFEYVSQPFLMDLEGKQGNFKNLREFVFKNIDGYFKIYSKHTPINLVRDLPQGFSALEPLVDLPIGINITRFQTLLALHRSYLTPGDSSSGWTAGAAAYYVGYLQPRTFLLKYNENGTITDAVDCALDPLSETKCTLKSFTVEKGIYQTSNFRVQPTESIVRFPNITNLCPFGEVFNATRFASVYAWNRKRISNCVADYSVLYNSASFSTFKCYGVSPTKLNDLCFTNVYADSFVIRGDEVRQIAPGQTGKIADYNYKLPDDFTGCVIAWNSNNLDSKVGGNYNYLYRLFRKSNLKPFERDISTEIYQAGSTPCNGVEGFNCYFPLQSYGFQPTNGVGYQPYRVVVLSFELLHAPATVCGPKKSTNLVKNKCVNFNFNGLTGTGVLTESNKKFLPFQQFGRDIADTTDAVRDPQTLEILDITPCSFGGVSVITPGTNTSNQVAVLYQGVNCTEVPVAIHADQLTPTWRVYSTGSNVFQTRAGCLIGAEHVNNSYECDIPIGAGICASYQTQTNSPRRARSVASQSIIAYTMSLGAENSVAYSNNSIAIPTNFTISVTTEILPVSMTKTSVDCTMYICGDSTECSNLLLQYGSFCTQLNRALTGIAVEQDKNTQEVFAQVKQIYKTPPIKDFGGFNFSQILPDPSKPSKRSFIEDLLFNKVTLADAGFTKQYGDCLGDIAARDLICAQKFNGLTVLPPLLTDEMIAQYTSALLAGTITSGWTFGAGAALQIPFAMQMAYRFNGIGVTQNVLYENQKLIANQFNSAIGKIQDSLSSTASALGKLQDVVNQNAQALNTLVKQLSSNFGCISSVLNDILSRLDKVEAEVQIDCLITGRLQSLQTYVTQQLIRAAEIRASANLAATKMSECVLGQSKRVDFCGKGYHLMSFPQSAPHGVVFLHVTYVPAQEKNFTTAPAICHDGKAHFPREGVFVSNGTHWFVTQRNFYEPQIITTDNTFVSGNCDVVIGIVNNTVYDPLQPELDSFKEELDKYFKNHTSPDVDLGDISGINASVVNIQKEIDRLNEVAKNLNESLIDLQELGKYEQYIKGGGGSDIDPYKEFGSSYQLLNFLPLDFFPDLNALVDTATALYEEELTGREHCSPHHTAIRQALVCWDELTKLIAWMSSNITSEQVRTIIVNHVNDTWGLKVRQSLWFHLSCLTFGQHTVQEFLVSFGVWIRTPAPYRPPNAPILSTLPEHTVIC

SEQ ID NO: 7494 - protein, 1365 aa, Artificial Sequence
  SARS-CoV-2/Australia/NSW56/2020__EPI_ISL_417408 spike protein (1-1211)(A972C_R995C) WhcAg construct
MFVFLVLLPLVSSQCVNLTTRTQLPPAYTNSFTRGVYYPDKVFRSSVLHSTQDLFLPFFSNVTWFHAIHVSGTNGTKRFDNPVLPFNDGVYFASTEKSNIIRGWIFGTTLDSKTQSLLIVNNATNVVIKVCEFQFCNDPFLGVYYHKNNKSWMESEFRVYSSANNCTFEYVSQPFLMDLEGKQGNFKNLREFVFKNIDGYFKIYSKHTPINLVRDLPQGFSALEPLVDLPIGINITRFQTLLALHRSYLTPGDSSSGWTAGAAAYYVGYLQPRTFLLKYNENGTITDAVDCALDPLSETKCTLKSFTVEKGIYQTSNFRVQPTESIVRFPNITNLCPFGEVFNATRFASVYAWNRKRISNCVADYSVLYNSASFSTFKCYGVSPTKLNDLCFTNVYADSFVIRGDEVRQIAPGQTGKIADYNYKLPDDFTGCVIAWNSNNLDSKVGGNYNYLYRLFRKSNLKPFERDISTEIYQAGSTPCNGVEGFNCYFPLQSYGFQPTNGVGYQPYRVVVLSFELLHAPATVCGPKKSTNLVKNKCVNFNFNGLTGTGVLTESNKKFLPFQQFGRDIADTTDAVRDPQTLEILDITPCSFGGVSVITPGTNTSNQVAVLYQDVNCTEVPVAIHADQLTPTWRVYSTGSNVFQTRAGCLIGAEHVNNSYECDIPIGAGICASYQTQTNSPRRARSVASQSIIAYTMSLGAENSVAYSNNSIAIPTNFTISVTTEILPVSMTKTSVDCTMYICGDSTECSNLLLQYGSFCTQLNRALTGIAVEQDKNTQEVFAQVKQIYKTPPIKDFGGFNFSQILPDSSKPSKRSFIEDLLFNKVTLADAGFIKQYGDCLGDIAARDLICAQKFNGLTVLPPLLTDEMIAQYTSALLAGTITSGWTFGAGAALQIPFAMQMAYRFNGIGVTQNVLYENQKLIANQFNSAIGKIQDSLSSTASALGKLQDVVNQNAQALNTLVKQLSSNFGCISSVLNDILSRLDKVEAEVQIDCLITGRLQSLQTYVTQQLIRAAEIRASANLAATKMSECVLGQSKRVDFCGKGYHLMSFPQSAPHGVVFLHVTYVPAQEKNFTTAPAICHDGKAHFPREGVFVSNGTHWFVTQRNFYEPQIITTDNTFVSGNCDVVIGIVNNTVYDPLQPELDSFKEELDKYFKNHTSPDVDLGDISGINASVVNIQKEIDRLNEVAKNLNESLIDLQELGKYEQYIKGGGGSDIDPYKEFGSSYQLLNFLPLDFFPDLNALVDTATALYEEELTGREHCSPHHTAIRQALVCWDELTKLIAWMSSNITSEQVRTIIVNHVNDTWGLKVRQSLWFHLSCLTFGQHTVQEFLVSFGVWIRTPAPYRPPNAPILSTLPEHTVIC

SEQ ID NO: 7495 - protein, 1365 aa, Artificial Sequence
  SARS-CoV-2/Iceland/280/2020__EPI_ISL_417608 spike protein (1-1211)(A972C_R995C) WhcAg construct
MFVFLVLLPLVSSQCVNLTTRTQLPPAYTNSFTRGVYYPDKVFRSSVLHSTQDLFLPFFSNVTWFHAIHVSGTNGTKRFDNPVLPFNDGVYFASTEKSNIIRGWIFGTTLDSKTQSLLIVNNATNVVIKVCEFQFCNDPFLGVYYHKNNKSWMESEFRVYSSANNCTFEYVSQPFLMDLEGKQGNFKNLREFVFKNIDGYFKIYSKHTPINLVRDLPQGFSALEPLVDLPIGINITRFQTLLALHRSYLTPGDSSSGWTAGAAAYYVGYLQPRTFLLKYNENGTITDAVDCALDPLSETKCTLKSFTVEKGIYQTSNFRVQPTESIVRFPNITNLCPFGEVFNATRFASVYAWNRKRISNCVADYSVLYNSASFSTFKCYGVSPTKLNDLCFTNVYADSFVIRGDEVRQIAPGQTGKIADYNYKLPDDFTGCVIAWNSNNLDSKVGGNYNYLYRLFRKSNLKPFERDISTEIYQAGSTPCNGVEGFNCYFPLQSYGFQPTNGVGYQPYRVVVLSFELLHAPATVCGPKKSTNLVKNKCVNFNFNGLTGTGVLTESNKKFLPFQQFGRDIADTTDAVRDPQTLEILDITPCSFGGVSVITPGTNTSNQVAVLYQGVNCTEVPVAIHADQLTPTWRVYSTGSNVFQTRAGCLIGAEHVNNSYECDIPIGAGICASYHTQTNSPRRARSVASQSIIAYTMSLGAENSVAYSNNSIAIPTNFTISVTTEILPVSMTKTSVDCTMYICGDSTECSNLLLQYGSFCTQLNRALTGIAVEQDKNTQEVFAQVKQIYKTPPIKDFGGFNFSQILPDPSKPSKRSFIEDLLFNKVTLADAGFIKQYGDCLGDIAARDLICAQKFNGLTVLPPLLTDEMIAQYTSALLAGTITSGWTFGAGAALQIPFAMQMAYRFNGIGVTQNVLYENQKLIANQFNSAIGKIQDSLSSTASALGKLQDVVNQNAQALNTLVKQLSSNFGCISSVLNDILSRLDKVEAEVQIDCLITGRLQSLQTYVTQQLIRAAEIRASANLAATKMSECVLGQSKRVDFCGKGYHLMSFPQSAPHGVVFLHVTYVPAQEKNFTTAPAICHDGKAHFPREGVFVSNGTHWFVTQRNFYEPQIITTDNTFVSGNCDVVIGIVNNTVYDPLQPELDSFKEELDKYFKNHTSPDVDLGDISGINASVVNIQKEIDRLNEVAKNLNESLIDLQELGKYEQYIKGGGGSDIDPYKEFGSSYQLLNFLPLDFFPDLNALVDTATALYEEELTGREHCSPHHTAIRQALVCWDELTKLIAWMSSNITSEQVRTIIVNHVNDTWGLKVRQSLWFHLSCLTFGQHTVQEFLVSFGVWIRTPAPYRPPNAPILSTLPEHTVIC

SEQ ID NO: 7496 - protein, 1365 aa, Artificial Sequence; identical to SEQ ID NO: 7451
  SARS-CoV-2/Iceland/247/2020__EPI_ISL_417575 spike protein (1-1211)(A972C_R995C) WhcAg construct

SEQ ID NO: 7497 - protein, 1365 aa, Artificial Sequence
  SARS-CoV-2/Iceland/238/2020__EPI_ISL_417566 spike protein (1-1211)(A972C_R995C) WhcAg construct
MFVFLVLLPLVSSQCVNLTTRTQLPPAYTNSFTRGVYYPDKVFRSSVLHSTQDLFLPFFSNVTWFHAIHVSGTNGTKRFDNPVLPFNDGVYFASTEKSNIIRGWIFGTTLDSKTQSLLIVNNATNVVIKVCEFQFCNDPFLGVYYHKNNKSWMESEFRVYSSANNCTFEYVSQPFLMDLEGKQGNFKNLREFVFKNIDGYFKIYSKHTPINLVRDLPQGFSALEPLVDLPIGINITRFQTLLALHRSYLTPGDSSSGWTAGAAAYYVGYLQPRTFLLKYNENGTITDAVDCALDPLSETKCTLKSFTVEKGIYQTSNFRVQPTESIVRFPNITNLCPFGEVFNATRFASVYAWNRKRISNCVADYSVLYNSASFSTFKCYGVSPTKLNDLCFTNVYADSFVIRGDEVRQIAPGQTGKIADYNYKLPDDFTGCVIAWNSNNLDSKVGGNYNYLYRLFRKSNLKPFERDISTEIYQAGSTPCNGVEGFNCYFPLQSYGFQPTNGVGYQPYRVVVLSFELLHAPATVCGPKKSTNLVKNKCVNFNFNGLTGTGVLTESNKKFLPFQQFGRDIADTTDAVRDPQTLEILDITPCSFGGVSVITPGTNTSNQVAVLYQGVNCTEVPVAIHADQLTPTWRVYSTGSNVFQTRAGCLIGAEHVNNSYECDIPIGAGICASYQTQTNSPRRARSVASQSIIAYTMSLGAENSVAYSNNSIAIPTNFTISVTTEILPVSMTKTSVDCTMYICGDSTECSNLLLQYGSFCTQLNRALTGIAVEQDKNTQEVFAQVKQIYKTPPIKDFGGFNFSQILPDPSKPSKRSFIEDLLFNKVTLADVGFIKQYGDCLGDIAARDLICAQKFNGLTVLPPLLTDEMIAQYTSALLAGTITSGWTFGAGAALQIPFAMQMAYRFNGIGVTQNVLYENQKLIANQFNSAIGKIQDSLSSTASALGKLQDVVNQNAQALNTLVKQLSSNFGCISSVLNDILSRLDKVEAEVQIDCLITGRLQSLQTYVTQQLIRAAEIRASANLAATKMSECVLGQSKRVDFCGKGYHLMSFPQSAPHGVVFLHVTYVPAQEKNFTTAPAICHDGKAHFPREGVFVSNGTHWFVTQRNFYEPQIITTDNTFVSGNCDVVIGIVNNTVYDPLQPELDSFKEELDKYFKNHTSPDVDLGDISGINASVVNIQKEIDRLNEVAKNLNESLIDLQELGKYEQYIKGGGGSDIDPYKEFGSSYQLLNFLPLDFFPDLNALVDTATALYEEELTGREHCSPHHTAIRQALVCWDELTKLIAWMSSNITSEQVRTIIVNHVNDTWGLKVRQSLWFHLSCLTFGQHTVQEFLVSFGVWIRTPAPYRPPNAPILSTLPEHTVIC

SEQ ID NO: 7498 - protein, 1365 aa, Artificial Sequence
  SARS-CoV-2/Greece/16/2020__EPI_ISL_418265 spike protein (1-1211)(A972C_R995C) WhcAg construct
MFVFLVLLPLVSSQCVNLTTRTQLPPAYTNSFTRGVYYPDKVFRSSVLHSTQDLFLPFFSNVTWFHAIHVSGTNGTKRFDNPVLPFNDGVYFASTEKSNIIRGWIFGTTLDSKTQSLLIVNNATNVVIKVCEFQFCNDPFLGVYYHKNNKSWMESEFRVYSSANNCTFEYVSQPFLMDLEGKQGNFKNLREFVFKNVDGYFKIYSKHTPINLVRDLPQGFSALEPLVDLPIGINITRFQTLLALHRSYLTPGDSSSGWTAGAAAYYVGYLQPRTFLLKYNENGTITDAVDCALDPLSETKCTLKSFTVEKGIYQTSNFRVQPTESIVRFPNITNLCPFGEVFNATRFASVYAWNRKRISNCVADYSVLYNSASFSTFKCYGVSPTKLNDLCFTNVYADSFVIRGDEVRQIAPGQTGKIADYNYKLPDDFTGCVIAWNSNNLDSKVGGNYNYLYRLFRKSNLKPFERDISTEIYQAGSTPCNGVEGFNCYFPLQSYGFQPTNGVGYQPYRVVVLSFELLHAPATVCGPKKSTNLVKNKCVNFNFNGLTGTGVLTESNKKFLPFQQFGRDIADTTDAVRDPQTLEILDITPCSFGGVSVITPGTNTSNQVAVLYQDVNCTEVPVAIHADQLTPTWRVYSTGSNVFQTRAGCLIGAEHVNNSYECDIPIGAGICASYQTQTNSPRRARSVASQSIIAYTMSLGAENSVAYSNNSIAIPTNFTISVTTEILPVSMTKTSVDCTMYICGDSTECSNLLLQYGSFCTQLNRALTGIAVEQDKNTQEVFAQVKQIYKTPPIKDFGGFNFSQILPDPSKPSKRSFIEDLLFNKVTLADAGFIKQYGDCLGDIAARDLICAQKFNGLTVLPPLLTDEMIAQYTSALLAGTITSGWTFGAGAALQIPFAMQMAYRFNGIGVTQNVLYENQKLIANQFNSAIGKIQDSLSSTASALGKLQDVVNQNAQALNTLVKQLSSNFGCISSVLNDILSRLDKVEAEVQIDCLITGRLQSLQTYVTQQLIRAAEIRASANLAATKMSECVLGQSKRVDFCGKGYHLMSFPQSAPHGVVFLHVTYVPAQEKNFTTAPAICHDGKAHFPREGVFVSNGTHWFVTQRNFYEPQIITTDNTFVSGNCDVVIGIVNNTVYDPLQPELDSFKEELDKYFKNHTSPDVDLGDISGINASVVNIQKEIDRLNEVAKNLNESLIDLQELGKYEQYIKGGGGSDIDPYKEFGSSYQLLNFLPLDFFPDLNALVDTATALYEEELTGREHCSPHHTAIRQALVCWDELTKLIAWMSSNITSEQVRTIIVNHVNDTWGLKVRQSLWFHLSCLTFGQHTVQEFLVSFGVWIRTPAPYRPPNAPILSTLPEHTVIC

SEQ ID NO: 7499 - protein, 1365 aa, Artificial Sequence
  SARS-CoV-2/Iceland/319/2020__EPI_ISL_417648 spike protein (1-1211)(A972C_R995C) WhcAg construct
MFVFLVLLPLVSSQCVNLTTRTQLPPAYTNSFTRGVYYPDKVFRSSVLHSTQDLFLPFFSNVTWFHAIHVSGTNGTKRFDNPVLPFNDGVYFASTEKSNIIRGWIFGTTLDSKTQSLLIVNNATNVVIKVCEFQFCNDPFLGVYYHKNNKSWMESEFRVYSSANNCTFEYVSQPFLIDLEGKQGNFKNLREFVFKNIDGYFKIYSKHTPINLVRDLPQGFSALEPLVDLPIGINITRFQTLLALHRSYLTPGDSSSGWTAGAAAYYVGYLQPRTFLLKYNENGTITDAVDCALDPLSETKCTLKSFTVEKGIYQTSNFRVQPTESIVRFPNITNLCPFGEVFNATRFASVYAWNRKRISNCVADYSVLYNSASFSTFKCYGVSPTKLNDLCFTNVYADSFVIRGDEVRQIAPGQTGKIADYNYKLPDDFTGCVIAWNSNNLDSKVGGNYNYLYRLFRKSNLKPFERDISTEIYQAGSTPCNGVEGFNCYFPLQSYGFQPTNGVGYQPYRVVVLSFELLHAPATVCGPKKSTNLVKNKCVNFNFNGLTGTGVLTESNKKFLPFQQFGRDIADTTDAVRDPQTLEILDITPCSFGGVSVITPGTNTSNQVAVLYQGVNCTEVPVAIHADQLTPTWRVYSTGSNVFQTRAGCLIGAEHVNNSYECDIPIGAGICASYQTQTNSPRRARSVASQSIIAYTMSLGAENSVAYSNNSIAIPTNFTISVTTEILPVSMTKTSVDCTMYICGDSTECSNLLLQYGSFCTQLNRALTGIAVEQDKNTQEVFAQVKQIYKTPPIKDFGGFNFSQILPDPSKPSKRSFIEDLLFNKVTLADAGFIKQYGDCLGDIAARDLICAQKFNGLTVLPPLLTDEMIAQYTSALLAGTITSGWTFGAGAALQIPFAMQMAYRFNGIGVTQNVLYENQKLIANQFNSAIGKIQDSLSSTASALGKLQDVVNQNAQALNTLVKQLSSNFGCISSVLNDILSRLDKVEAEVQIDCLITGRLQSLQTYVTQQLIRAAEIRASANLAATKMSECVLGQSKRVDFCGKGYHLMSFPQSAPHGVVFLHVTYVPAQEKNFTTAPAICHDGKAHFPREGVFVSNGTHWFVTQRNFYEPQIITTDNTFVSGNCDVVIGIVNNTVYDPLQPELDSFKEELDKYFKNHTSPDVDLGDISGINASVVNIQKEIDRLNEVAKNLNESLIDLQELGKYEQYIKGGGGSDIDPYKEFGSSYQLLNFLPLDFFPDLNALVDTATALYEEELTGREHCSPHHTAIRQALVCWDELTKLIAWMSSNITSEQVRTIIVNHVNDTWGLKVRQSLWFHLSCLTFGQHTVQEFLVSFGVWIRTPAPYRPPNAPILSTLPEHTVIC

SEQ ID NO: 7500 - protein, 1365 aa, Artificial Sequence
  SARS-CoV-2/Congo/94/2020__EPI_ISL_417947 spike protein (1-1211)(A972C_R995C) WhcAg construct
MFVFLVLLPLVSSQCVNLTTRTQLPPAYTNSFTRGVYYPDKVFRSSVLHSTQDLFLPFFSNVTWFHAIHVSGTNGTKRFDNPVLPFNDGVYFASTEKSNIIRGWIFGTTLDSKTQSLLIVNNATNVVIKVCEFQFCNDPFLGVYYHKNNKSWMESEFRVYSSANNCTFEYVSQPFLMDLEGKQGNFKNLREFVFKNIDGYFKIYSKHTPINLVRDLPQGFSALEPLVDLPIGINITRFQTLLALHRSYLTPGDSSSGWTAGAAAYYVGYLQPRTFLLKYNENGTITDAVDCALDPLSETKCTLKSFTVEKGIYQTSNFRVQPTESIVRFPNITNLCPFGEVFNATRFASVYAWNRKRISNCVADYSVLYNSASFSTFKCYGVSPTKLNDLCFTNVYADSFVIRGDEVRQIAPGQTGKIADYNYKLPDDFTGCVIAWNSNNLDSKVGGNYNYLYRLFRKSNLKPFERDISTEIYQAGSTPCNGVEGFNCYFPLQSYGFQPTNGVGYQPYRVVVLSFELLHAPATVCGPKKSTNLVKNKCVNFNFNGLTGTGVLTESNKKFLPFQQFGRDIADTTDAVRDPQTLEILDITPCSFGGVSVITPGTNTSNQVAVLYQGVNCTEVPVAIHADQLTPTWRVYSTGSNVFQTRAGCLIGAEHVNNSYECDIPIGAGICASYQTQTNSPRRARSVASQSIIAYTMSLGAENSVAYSNNSIAIPTNFTISVTTEILPVSMTKTSVDCTMYICGDSTECSNLLLQYGSFCTQLNRALTGIAVEQDKNTQEVFAQVKQIYKTPPIKDFGGFNFSQILPDPSKPSKRSFIEDILFNKVTLADAGFIKQYGDCLGDIAARDLICAQKFNGLTVLPPLLTDEMIAQYTSALLAGTITSGWTFGAGAALQIPFAMQMAYRFNGIGVTQNVLYENQKLIANQFNSAIGKIQDSLSSTASALGKLQDVVNQNAQALNTLVKQLSSNFGCISSVLNDILSRLDKVEAEVQIDCLITGRLQSLQTYVTQQLIRAAEIRASANLAATKMSECVLGQSKRVDFCGKGYHLMSFPQSAPHGVVFLHVTYVPAQEKNFTTAPAICHDGKAHFPREGVFVSNGTHWFVTQRNFYEPQIITTDNTFVSGNCDVVIGIVNNTVYDPLQPELDSFKEELDKYFKNHTSPDVDLGDISGINASVVNIQKEIDRLNEVAKNLNESLIDLQELGKYEQYIKGGGGSDIDPYKEFGSSYQLLNFLPLDFFPDLNALVDTATALYEEELTGREHCSPHHTAIRQALVCWDELTKLIAWMSSNITSEQVRTIIVNHVNDTWGLKVRQSLWFHLSCLTFGQHTVQEFLVSFGVWIRTPAPYRPPNAPILSTLPEHTVIC

SEQ ID NO: 7501 - protein, 1365 aa, Artificial Sequence
  SARS-CoV-2/Congo/158/2020__EPI_ISL_417950 spike protein (1-1211)(A972C_R995C) WhcAg construct
MFVFLVLLPLVSSQCVNLTTRTQLPPAYTNSFTRGVYYPDKVFRSSVLHSTQDLFLPFFSNVTWFHAIHVSGTNGTKRFDNPVLPFNDGVYFASTEKSNIIRGWIFGTTLDSKTQSLLIVNNATNVVIKVCEFQFCNDPFLGVYYHKNNKSWMESEFRVYSSANNCTFEYVSQPFLMDLEGKQGNFKNLREFVFKNIDGYFKIYSKHTPINLVRDLPQGFSALEPLVDLPIGINITRFQTLLALHRSYLTPGDSSSGWTAGAAAYYVGYLQPRTFLLKYNENGTITDAVDCALDPLSETKCTLKSFTVEKGIYQTSNFRVQPTESIVRFPNITNLCPFGEVFNATRFASVYAWNRKRISNCVADYSVLYNSASFSTFKCYGVSPTKLNDLCFTNVYADSFVIRGDEVRQIAPGQTGKIADYNYKLPDDFTGCVIAWNSNNLDSKVGGNYNYLYRLFRKSNLKPFERDISTEIYQAGSTPCNGVEGFNCYFPLQSYGFQPTNGVGYQPYRVVVLSFELLHAPATVCGPKKSTNLVKNKCVNFNFNGLTGTGVLTESNKKFLPFQQFGRDIADTTDAVRDPQTLEILDITPCSFGGVSVITPGTNTSNQVAVLYQDVNCTEVPVAIHADQLTPTWRVYSTGSNVFQTRAGCLIGAEHVNNSYECDIPIGAGICASYQTQTNSPRRARSVASQSIIAYTMSLGAENSVAYSNNSIAIPTNFTISVTTEILPVSMTKTSVDCTMYICGDSTECSNLLLQYGSFCTQLNRALTGIAVEQDKNTQEVFAQVKQIYKTPPIKDFGGFNFSQILPDPSKPSKRSFIEDLLFNKVTLADAGFIKQYGDCLGDIAARDLICAQKFNGLTVLPPLLTDEMIAQYTSALLAGTITSGWTFGAGAALQIPFAMQMAYRFNGIGVTQNVLYENQKLIANQFNSAIGKIQDSLSSTASALGKLQDVVNQNAQALNTLVKQLSSNFGCISSVLNDILSRLDKVEAEVQIDCLITGRLQSLQTYVTQQLIRAAEIRASANLAATKMSECVLGQSKRVDFCGKGYHLMSFPQSAPHGVVFLHVTYVPAQEKNFTTAPAICHDGKAHFPREGVFVSNGTHWFVTQRNFYEPQIITTDNTFLSGNCDVVIGIVNNTVYDPLQPELDSFKEELDKYFKNHTSPDVDLGDISGINASVVNIQKEIDRLNEVAKNLNESLIDLQELGKYEQYIKGGGGSDIDPYKEFGSSYQLLNFLPLDFFPDLNALVDTATALYEEELTGREHCSPHHTAIRQALVCWDELTKLIAWMSSNITSEQVRTIIVNHVNDTWGLKVRQSLWFHLSCLTFGQHTVQEFLVSFGVWIRTPAPYRPPNAPILSTLPEHTVIC

SEQ ID NO: 7502 - protein, 1365 aa, Artificial Sequence
  SARS-CoV-2/USA/UT-00034/2020__EPI_ISL_417977 spike protein (1-1211)(A972C_R995C) WhcAg construct
MFVFLVLLPLVSSQCVNLTTRTQLPPAYTNSFTRGVYYPDKVFRSSVLHSTQDLFLPFFSNVTWFHAIHVSGTNGTKRFDNPVLPFNDGVYFASTEKSNIIRGWIFGTTLDSKTQSLLIVNNATNVVIKVCEFQFCNDPFLGVYYYKNNKSWMESEFRVYSSANNCTFEYVSQPFLMDLEGKQGNFKNLREFVFKNIDGYFKIYSKHTPINLVRDLPQGFSALEPLVDLPIGINITRFQTLLALHRSYLTPGDSSSGWTAGAAAYYVGYLQPRTFLLKYNENGTITDAVDCALDPLSETKCTLKSFTVEKGIYQTSNFRVQPTESIVRFPNITNLCPFGEVFNATRFASVYAWNRKRISNCVADYSVLYNSASFSTFKCYGVSPTKLNDLCFTNVYADSFVIRGDEVRQIAPGQTGKIADYNYKLPDDFTGCVIAWNSNNLDSKVGGNYNYLYRLFRKSNLKPFERDISTEIYQAGSTPCNGVEGFNCYFPLQSYGFQPTNGVGYQPYRVVVLSFELLHAPATVCGPKKSTNLVKNKCVNFNFNGLTGTGVLTESNKKFLPFQQFGRDIADTTDAVRDPQTLEILDITPCSFGGVSVITPGTNTSNQVAVLYQGVNCTEVPVAIHADQLTPTWRVYSTGSNVFQTRAGCLIGAEHVNNSYECDIPIGAGICASYQTQTNSPRRARSVASQSIIAYTMSLGAENSVAYSNNSIAIPTNFTISVTTEILPVSMTKTSVDCTMYICGDSTECSNLLLQYGSFCTQLNRALTGIAVEQDKNTQEVFAQVKQIYKTPPIKDFGGFNFSQILPDPSKPSKRSFIEDLLFNKVTLADAGFIKQYGDCLGDIAARDLICAQKFNGLTVLPPLLTDEMIAQYTSALLAGTITSGWTFGAGAALQIPFAMQMAYRFNGIGVTQNVLYENQKLIANQFNSAIGKIQDSLSSTASALGKLQDVVNQNAQALNTLVKQLSSNFGCISSVLNDILSRLDKVEAEVQIDCLITGRLQSLQTYVTQQLIRAAEIRASANLAATKMSECVLGQSKRVDFCGKGYHLMSFPQSAPHGVVFLHVTYVPAQEKNFTTAPAICHDGKAHFPREGVFVSNGTHWFVTQRNFYEPQIITTDNTFVSGNCDVVIGIVNNTVYDPLQPELDSFKEELDKYFKNHTSPDVDLGDISGINASVVNIQKEIDRLNEVAKNLNESLIDLQELGKYEQYIKGGGGSDIDPYKEFGSSYQLLNFLPLDFFPDLNALVDTATALYEEELTGREHCSPHHTAIRQALVCWDELTKLIAWMSSNITSEQVRTIIVNHVNDTWGLKVRQSLWFHLSCLTFGQHTVQEFLVSFGVWIRTPAPYRPPNAPILSTLPEHTVIC

SEQ ID NO: 7503 - protein, 1365 aa, Artificial Sequence
  SARS-CoV-2/USA/UT-00033/2020__EPI_ISL_417976 spike protein (1-1211)(A972C_R995C) WhcAg construct
MFVFLVLLPLVSSQCVNLTTRTQLPPAYTNSFTRGVYYPDKVFRSSVLHSTQDLFLPFFSNVTWFHAIHVSGTNGTKRFDNPVLPFNDGVYFASTEKSNIIRGWIFGTTLDSKTQSLLIVNNATNVVIKVCEFQFCNDPFLGVYYHKNNKSWMESEFRVYSSANNCTFEYVSQPFLMDLEGKQGNFKNLREFVFKNIDGYFKIYSKHTPINLVRDLPQGFSALEPLVDLPIGINITRFQTLLALHRSYLTPGDSSSGLTAGAAAYYVGYLQPRTFLLKYNENGTITDAVDCALDPLSETKCTLKSFTVEKGIYQTSNFRVQPTESIVRFPNITNLCPFGEVFNATRFASVYAWNRKRISNCVADYSVLYNSASFSTFKCYGVSPTKLNDLCFTNVYADSFVIRGDEVRQIAPGQTGKIADYNYKLPDDFTGCVIAWNSNNLDSKVGGNYNYLYRLFRKSNLKPFERDISTEIYQAGSTPCNGVEGFNCYFPLQSYGFQPTNGVGYQPYRVVVLSFELLHAPATVCGPKKSTNLVKNKCVNFNFNGLTGTGVLTESNKKFLPFQQFGRDIADTTDAVRDPQTLEILDITPCSFGGVSVITPGTNTSNQVAVLYQGVNCTEVPVAIHADQLTPTWRVYSTGSNVFQTRAGCLIGAEHVNNSYECDIPIGAGICASYQTQTNSPRRARSVASQSIIAYTMSLGAENSVAYSNNSIAIPTNFTISVTTEILPVSMTKTSVDCTMYICGDSTECSNLLLQYGSFCTQLNRALTGIAVEQDKNTQEVFAQVKQIYKTPPIKDFGGFNFSQILPDPSKPSKRSFIEDLLFNKVTLADAGFIKQYGDCLGDIAARDLICAQKFNGLTVLPPLLTDEMIAQYTSALLAGTITSGWTFGAGAALQIPFAMQMAYRFNGIGVTQNVLYENQKLIANQFNSAIGKIQDSLSSTASALGKLQDVVNQNAQALNTLVKQLSSNFGCISSVLNDILSRLDKVEAEVQIDCLITGRLQSLQTYVTQQLIRAAEIRASANLAATKMSECVLGQSKRVDFCGKGYHLMSFPQSAPHGVVFLHVTYVPAQEKNFTTAPAICHDGKAHFPREGVFVSNGTHWFVTQRNFYEPQIITTDNTFVSGNCDVVIGIVNNTVYDPLQPELDSFKEELDKYFKNHTSPDVDLGDISGINASVVNIQKEIDRLNEVAKNLNESLIDLQELGKYEQYIKGGGGSDIDPYKEFGSSYQLLNFLPLDFFPDLNALVDTATALYEEELTGREHCSPHHTAIRQALVCWDELTKLIAWMSSNITSEQVRTIIVNHVNDTWGLKVRQSLWFHLSCLTFGQHTVQEFLVSFGVWIRTPAPYRPPNAPILSTLPEHTVIC

SEQ ID NO: 7504 - protein, 1365 aa, Artificial Sequence
  SARS-CoV-2/USA/WI-13/2020__EPI_ISL_417516 spike protein (1-1211)(A972C_R995C) WhcAg construct
MFVFLVLLPLVSSQCVNLTTRTQLPPAYTNSFTRGVYYPDKVFRSSVLHSTQDLFLPFFSNVTWFHAIHVSGTNGTKRFDNPVLPFNDGVYFASTEKSNIIRGWIFGTTLDSKTQSLLIVNNATNVVIKVCEFQFCNDPFLGVYYHKNNKSWMESEFRVYSSANNCTFEYVSQPFLMDLEGKQGNFKNLREFVFKNIDGYFKIYSKHTPINLVRDLPQGFSALEPLVDLPIGINITRFQTLLALHRSYLTPGDSSSGWTAGAAAYYVGYLQPRTFLLKYNENGTITDAVDCALDPLSETKCTLKSFTVEKGIYQTSNFRVLPTESIVRFPNITNLCPFGEVFNATRFASVYAWNRKRISNCVADYSVLYNSASFSTFKCYGVSPTKLNDLCFTNVYADSFVIRGDEVRQIAPGQTGKIADYNYKLPDDFTGCVIAWNSNNLDSKVGGNYNYLYRLFRKSNLKPFERDISTEIYQAGSTPCNGVEGFNCYFPLQSYGFQPTNGVGYQPYRVVVLSFELLHAPATVCGPKKSTNLVKNKCVNFNFNGLTGTGVLTESNKKFLPFQQFGRDIADTTDAVRDPQTLEILDITPCSFGGVSVITPGTNTSNQVAVLYQGVNCTEVPVAIHADQLTPTWRVYSTGSNVFQTRAGCLIGAEHVNNSYECDIPIGAGICASYQTQTNSPRRARSVASQSIIAYTMSLGAENSVAYSNNSIAIPTNFTISVTTEILPVSMTKTSVDCTMYICGDSTECSNLLLQYGSFCTQLNRALTGIAVEQDKNTQEVFAQVKQIYKTPPIKDFGGFNFSQILPDPSKPSKRSFIEDLLFNKVTLADAGFIKQYGDCLGDIAARDLICAQKFNGLTVLPPLLTDEMIAQYTSALLAGTITSGWTFGAGAALQIPFAMQMAYRFNGIGVTQNVLYENQKLIANQFNSAIGKIQDSLSSTASALGKLQDVVNQNAQALNTLVKQLSSNFGCISSVLNDILSRLDKVEAEVQIDCLITGRLQSLQTYVTQQLIRAAEIRASANLAATKMSECVLGQSKRVDFCGKGYHLMSFPQSAPHGVVFLHVTYVPAQEKNFTTAPAICHDGKAHFPREGVFVSNGTHWFVTQRNFYEPQIITTDNTFVSGNCDVVIGIVNNTVYDPLQPELDSFKEELDKYFKNHTSPDVDLGDISGINASVVNIQKEIDRLNEVAKNLNESLIDLQELGKYEQYIKGGGGSDIDPYKEFGSSYQLLNFLPLDFFPDLNALVDTATALYEEELTGREHCSPHHTAIRQALVCWDELTKLIAWMSSNITSEQVRTIIVNHVNDTWGLKVRQSLWFHLSCLTFGQHTVQEFLVSFGVWIRTPAPYRPPNAPILSTLPEHTVIC

SEQ ID NO: 7505 - protein, 1364 aa, Artificial Sequence
  SARS-CoV-2/India/1-27/2020__EPI_ISL_413522 spike protein (1-1210)(A971C_R994C) WhcAg construct
MFVFLVLLPLVSSQCVNLTTRTQLPPAYTNSFTRGVYYPDKVFRSSVLHSTQDLFLPFFSNVTWFHAIHVSGTNGTKRFDNPVLPFNDGVYFASTEKSNIIRGWIFGTTLDSKTQSLLIVNNATNVVIKVCEFQFCNDPFLGVYHKNNKSWMESEFRVYSSANNCTFEYVSQPFLMDLEGKQGNFKNLREFVFKNIDGYFKIYSKHTPINLVRDLPQGFSALEPLVDLPIGINITRFQTLLALHRSYLTPGDSSSGWTAGAAAYYVGYLQPRTFLLKYNENGTITDAVDCALDPLSETKCTLKSFTVEKGIYQTSNFRVQPTESIVRFPNITNLCPFGEVFNATRFASVYAWNRKRISNCVADYSVLYNSASFSTFKCYGVSPTKLNDLCFTNVYADSFVIRGDEVIQIAPGQTGKIADYNYKLPDDFTGCVIAWNSNNLDSKVGGNYNYLYRLFRKSNLKPFERDISTEIYQAGSTPCNGVEGFNCYFPLQSYGFQPTNGVGYQPYRVVVLSFELLHAPATVCGPKKSTNLVKNKCVNFNFNGLTGTGVLTESNKKFLPFQQFGRDIADTTDAVRDPQTLEILDITPCSFGGVSVITPGTNTSNQVAVLYQDVNCTEVPVAIHADQLTPTWRVYSTGSNVFQTRAGCLIGAEHVNNSYECDIPIGAGICASYQTQTNSPRRARSVASQSIIAYTMSLGAENSVAYSNNSIAIPTNFTISVTTEILPVSMTKTSVDCTMYICGDSTECSNLLLQYGSFCTQLNRALTGIAVEQDKNTQEVFAQVKQIYKTPPIKDFGGFNFSQILPDPSKPSKRSFIEDLLFNKVTLADAGFIKQYGDCLGDIAARDLICAQKFNGLTVLPPLLTDEMIAQYTSALLAGTITSGWTFGAGAALQIPFAMQMAYRFNGIGVTQNVLYENQKLIANQFNSAIGKIQDSLSSTASALGKLQDVVNQNAQALNTLVKQLSSNFGCISSVLNDILSRLDKVEAEVQIDCLITGRLQSLQTYVTQQLIRAAEIRASANLAATKMSECVLGQSKRVDFCGKGYHLMSFPQSAPHGVVFLHVTYVPAQEKNFTTAPAICHDGKAHFPREGVFVSNGTHWFVTQRNFYEPQIITTDNTFVSGNCDVVIGIVNNTVYDPLQPELDSFKEELDKYFKNHTSPDVDLGDISGINASVVNIQKEIDRLNEVAKNLNESLIDLQELGKYEQYIKGGGGSDIDPYKEFGSSYQLLNFLPLDFFPDLNALVDTATALYEEELTGREHCSPHHTAIRQALVCWDELTKLIAWMSSNITSEQVRTIIVNHVNDTWGLKVRQSLWFHLSCLTFGQHTVQEFLVSFGVWIRTPAPYRPPNAPILSTLPEHTVIC

SEQ ID NO: 7506 - protein, 1359 aa, Artificial Sequence
  SARS-CoV-2/pangolin/Guangxi/P4L/2017__EPI_ISL_410538 spike protein (1-1205)(A966C_R989C) WhcAg construct
MFVFLFVLPLVSSQCVNLTTRTGIPPGYTNSSTRGVYYPDKVFRSSILHLTQDLFLPFFSNVTWFNTINYQGGFKKFDNPVLPFNDGVYFASTEKSNIIRGWIFGTTLDARTQSLLIVNNATNVVIKVCEFQFCTDPFLGVYYHNNNKTWVENEFRVYSSANNCTFEYISQPFLMDLEGKQGNFKNLREFVFKNVDGYFKIYSKHTPIDLVRDLPRGFAALEPLVDLPIGINITRFQTLLALHRSYLTPGNLESGWTTGAAAYYVGYLQQRTFLLSYNQNGTITDAVDCSLDPLSETKCTLKSLTVEKGIYQTSNFRVQPTISIVRFPNITNLCPFGEVFNASKFASVYAWNRKRISNCVADYSVLYNSTSFSTFKCYGVSPTKLNDLCFTNVYADSFVVKGDEVRQIAPGQTGVIADYNYKLPDDFTGCVIAWNSVKQDALTGGNYGYLYRLFRKSKLKPFERDISTEIYQAGSTPCNGQVGLNCYYPLERYGFHPTTGVNYQPFRVVVLSFELLNGPATVCGPKLSTTLVKDKCVNFNFNGLTGTGVLTTSKKQFLPFQQFGRDISDTTDAVRDPQTLEILDITPCSFGGVSVITPGTNTSNQVAVLYQDVNCTEVPMAIHAEQLTPAWRVYSAGANVFQTRAGCLVGAEHVNNSYECDIPVGAGICASYHSMSSLRSVNQRSIIAYTMSLGAENSVAYSNNSIAIPTNFTISVTTEILPVSMTKTSVDCTMYICGDSIECSNLLLQYGSFCTQLNRALTGIAVEQDKNTQEVFAQVKQIYKTPPIKDFGGFNFSQILPDPSKPSKRSFIEDLLFNKVTLADAGFIKQYGDCLGDIAARDLICAQKFNGLTVLPPLLTDEMIAQYTSALLAGTITSGWTFGAGAALQIPFAMQMAYRFNGIGVTQNVLYENQKLIANQFNSAIGKIQDSLSSTASALGKLQDVVNQNAQALNTLVKQLSSNFGCISSVLNDILSRLDKVEAEVQIDCLITGRLQSLQTYVTQQLIRAAEIRASANLAATKMSECVLGQSKRVDFCGKGYHLMSFPQSAPHGVVFLHVTYVPAQEKNFTTAPAICHEGKAHFPREGVFVSNGTHWFITQRNFYEPQIITTDNTFVSGSCDVVIGIVNNTVYDPLQPELDSFKEELDKYFKNHTSPDVDLGDISGINASVVNIQKEIDRLNEVAKNLNESPIDLQELGKYEQYIKGGGGSDIDPYKEFGSSYQLLNFLPLDFFPDLNALVDTATALYEEELTGREHCSPHHTAIRQALVCWDELTKLIAWMSSNITSEQVRTIIVNHVNDTWGLKVRQSLWFHLSCLTFGQHTVQEFLVSFGVWIRTPAPYRPPNAPILSTLPEHTVIC

SEQ ID NO: 7507 - protein, 1359 aa, Artificial Sequence
  SARS-CoV-2/pangolin/Guangxi/P5L/2017__EPI_ISL_410540 spike protein (1-1205)(A966C_R989C) WhcAg construct
MFVFLFVLPLVSSQCVNLTTRTGIPPGYTNSSTRGVYYPDKVFRSSILHLTQDLFLPFFSNVTWFNTINYQGGFKKFDNPVLPFNDGVYFASTEKSNIIRGWIFGTTLDARTQSLLIVNNATNVVIKVCEFQFCTDPFLGVYYHNNNKTWVENEFRVYSSANNCTFEYISQPFLMDLEGKQGNFKNLREFVFKNVDGYFKIYSKHTPIDLVRDLPRGFAALEPLVDLPIGINITRFQTLLALHRSYLTPGKLESGWTTGAAAYYVGYLQQRTFLLSYNQNGTITDAVDCSLDPLSETKCTLKSLTVEKGIYQTSNFRVQPTISIVRFPNITNLCPFGEVFNASKFASVYAWNRKRISNCVADYSVLYNSTSFSTFKCYGVSPTKLNDLCFTNVYADSFVVKGDEVRQIAPGQTGVIADYNYKLPDDFTGCVIAWNSVKQDALTGGNYGYLYRLFRKSKLKPFERDISTEIYQAGSTPCNGQVGLNCYYPLERYGFHPTTGVNYQPFRVVVLSFELLNGPATVCGPKLSTTLVKDKCVNFNFNGLTGTGVLTTSKKQFLPFQQFGRDISDTTDAVRDPQTLEILDITPCSFGGVSVITPGTNTSNQVAVLYQDVNCTEVPMAIHAEQLTPAWRVYSAGANVFQTRAGCLVGAEHVNNSYECDIPVGAGICASYHSMSSFRSVNQRSIIAYTMSLGAENSVAYSNNSIAIPTNFTISVTTEILPVSMTKTSVDCTMYICGDSIECSNLLLQYGSFCTQLNRALTGIAVEQDKNTQEVFAQVKQIYKTPPIKDFGGFNFSQILPDPSKPSKRSFIEDLLFNKVTLADAGFIKQYGDCLGDIAARDLICAQKFNGLTVLPPLLTDEMIAQYTSALLAGTITSGWTFGAGAALQIPFAMQMAYRFNGIGVTQNVLYENQKLIANQFNSAIGKIQDSLSSTASALGKLQDVVNQNAQALNTLVKQLSSNFGCISSVLNDILSRLDKVEAEVQIDCLITGRLQSLQTYVTQQLIRAAEIRASANLAATKMSECVLGQSKRVDFCGKGYHLMSFPQSAPHGVVFLHVTYVPAQEKNFTTAPAICHEGKAHFPREGVFVSNGTHWFITQRNFYEPQIITTDNTFVSGSCDVVIGIVNNTVYDPLQPELDSFKEELDKYFKNHTSPDVDLGDISGINASVVNIQKEIDRLNEVAKNLNESLIDLQELGKYEQYIKGGGGSDIDPYKEFGSSYQLLNFLPLDFFPDLNALVDTATALYEEELTGREHCSPHHTAIRQALVCWDELTKLIAWMSSNITSEQVRTIIVNHVNDTWGLKVRQSLWFHLSCLTFGQHTVQEFLVSFGVWIRTPAPYRPPNAPILSTLPEHTVIC

SEQ ID NO: 7508 - protein, 1359 aa, Artificial Sequence
  SARS-CoV-2/pangolin/Guangxi/P5E/2017__EPI_ISL_410541 spike protein (1-1205)(A966C_R989C) WhcAg construct
MFVFLFVLPLVSSQCVNLTTRTGIPPGYTNSSTRGVYYPDKVFRSSILHLTQDLFLPFFSNVTWFNTITYQGGSKKFDNPVLPFNDGVYFASTEKSNIIRGWIFGTTLDARTQSLLIVNNATNVVIKVCEFQFCTDPFLGVYYHNNNKTWVENEFRVYSSANNCTFEYISQPFLMDLEGKQGNFKNLREFVFKNVDGYFKIYSKHTPIDLVRDLPRGFAALEPLVDLPIGINITRFQTLLALHRSYLTPGKLESGWTTGAAAYYVGYLQQRTFLLSYNQNGTITDAVDCSLDPLSETKCTLKSLTVEKGIYQTSNFRVQPTISIVRFPNITNLCPFGEVFNASKFASVYAWNRKRISNCVADYSVLYNSTSFSTFKCYGVSPTKLNDLCFTNVYADSFVVKGDEVRQIAPGQTGVIADYNYKLPDDFTGCVIAWNSVKQDALTGDNYGYLYRLFRKSKLKPFERDISTEIYQAGSTPCNGQVGLNCYYPLERYGFHPTTGVNYQPFRVVVLSFELLNGPATVCGPKLSTTLVKDKCVNFNFNGLTGTGVLTTSKKQFLPFQQFGRDISDTTDAVRDPQTLEILDITPCSFGGVSVITPGTNTSNQVAVLYQDVNCTEVPMAIHAEQLTPAWRVYSAGANVFQTRAGCLVGAEHVNNSYECDIPVGAGICASYHSMSSFRSVNQRSIIAYTMSLGAENSVAYSNNSIAIPTNFTISVTTEILPVSMTKTSVDCTMYICGDSIECSNLLLQYGSFCTQLNRALTGIAVEQDKNTQEVFAQVKQIYKTPPIKDFGGFNFSQILPDPSKPSKRSFIEDLLFNKVTLADAGFIKQYGDCLGDIAARDLICAQKFNGLTVLPPLLTDEMIAQYTSALLAGTITSGWTFGAGAALQIPFAMQMAYRFNGIGVTQNVLYENQKLIANQFNSAIGKIQDSLSSTASALGKLQDVVNQNAQALNTLVKQLSSNFGCISSVLNDILSRLDKVEAEVQIDCLITGRLQSLQTYVTQQLIRAAEIRASANLAATKMSECVLGQSKRVDFCGKGYHLMSFPQSAPHGVVFLHVTYVPAQEKNFTTAPAICHEGKAHFPREGVFVSNGTHWFITQRNFYEPQIITTDNTFVSGSCDVVIGIVNNTVYDPLQPELDSFKEELDKYFKNHTSPDVDLGDISGINASVVNIQKEIDRLNEVAKNLNESLIDLQELGKYEQYIKGGGGSDIDPYKEFGSSYQLLNFLPLDFFPDLNALVDTATALYEEELTGREHCSPHHTAIRQALVCWDELTKLIAWMSSNITSEQVRTIIVNHVNDTWGLKVRQSLWFHLSCLTFGQHTVQEFLVSFGVWIRTPAPYRPPNAPILSTLPEHTVIC

SEQ ID NO: 7509 - protein, 1357 aa, Artificial Sequence
  SARS-CoV-2/pangolin/Guangxi/P1E/2017__EPI_ISL_410539 spike protein (1-1203)(A964C_R987C) WhcAg construct
MFVFLFVLPLVSSQCVNLTTRTGIQPGYTNSSTRGVYYPDKVFRSSILHLTQDLFLPFFSNVTWFNTINYQGGFKKFDNPVLPFNDGVYFASTEKSNIIRGWIFGTTLDARTQSLLIVNNATNVVIKVCEFQFCTDPFLGVYYHNNNKTWVENEFRVYSSANNCTFEYISQPFLMDLEGKQGNFKNLREFVFKNVDGYFKIYSKHTPIDLVRDLPRGFAALEPLVDLPIGINITRFQTLLALHRSYLTPGKLESGWTTGAAAYYVGYLQQRTFLLSYNQNGTITDAVDCSLDPLSETKCTLKSLTVEKGIYQTSNFRVQPTISIVRFPNITNLCPFGEVFNASKFASVYAWNRKRISNCVADYSVLYNSTSFSTFKCYGVSPTKLNDLCFTNVYADSFVVKGDEVRQIAPGQTGVIADYNYKLPDDFTGCVIAWNSVKQDALTGGNYLYRLFRKSKLKPFERDISTEIYQAGSTPCNGQVGLNCYYPLERYGFHPTTGVNYQPFRVVVLSFELLNGPATVCGPKLSTTLVKDKCVNFNFNGLTGTGVLTTSKKQFLPFQQFGRDISDTTDAVRDPQTLEILDITPCSFGGVSVITPGTNTSNQVAVLYQDVNCTEVPMAIHAEQLTPAWRVYSAGANVFQTRAGCLVGAEHVNNSYECDIPVGAGICASYHSMSSLRSVNQRSIIAYTMSLGAENSVAYSNNSIAIPTNFTISVTTEILPVSMTKTSVDCTMYICGDSIECSNLLLQYGSFCTQLNRALTGIAVEQDKNTQEVFAQVKQIYKTPPIKDFGGFNFSQILPDPSKPSKRSFIEDLLFNKVTLADAGFIKQYGDCLGDIAARDLICAQKFNGLTVLPPLLTDEMIAQYTSALLAGTITSGWTFGAGAALQIPFAMQMAYRFNGIGVTQNVLYENQKLIANQFNSAIGKIQDSLSSTASALGKLQDVVNQNAQALNTLVKQLSSNFGCISSVLNDILSRLDKVEAEVQIDCLITGRLQSLQTYVTQQLIRAAEIRASANLAATKMSECVLGQSKRVDFCGKGYHLMSFPQSAPHGVVFLHVTYVPAQEKNFTTAPAICHEGKAHFPREGVFVSNGTHWFITQRNFYEPQIITTDNTFVSGSCDVVIGIVNNTVYDPLQPELDSFKEELDKYFKNHTSPDVDLGDISGINASVVNIQKEIDRLNEVAKNLNESLIDLQELGKYEQYIKGGGGSDIDPYKEFGSSYQLLNFLPLDFFPDLNALVDTATALYEEELTGREHCSPHHTAIRQALVCWDELTKLIAWMSSNITSEQVRTIIVNHVNDTWGLKVRQSLWFHLSCLTFGQHTVQEFLVSFGVWIRTPAPYRPPNAPILSTLPEHTVIC

SEQ ID NO: 7510 - protein, 1365 aa, Artificial Sequence
  SARS-CoV-2/Wuhan/WIV05/2019__EPI_ISL_402128 spike protein (1-1211)(A890C_V1040C) WhcAg construct
MFVFLVLLPLVSSQCVNLTTRTQLPPAYTNSFTRGVYYPDKVFRSSVLHSTQDLFLPFFSNVTWFHAIHVSGTNGTKRFDNPVLPFNDGVYFASTEKSNIIRGWIFGTTLDSKTQSLLIVNNATNVVIKVCEFQFCNDPFLGVYYHKNNKSWMESEFRVYSSANNCTFEYVSQPFLMDLEGKQGNFKNLREFVFKNIDGYFKIYSKHTPINLVRDLPQGFSALEPLVDLPIGINITRFQTLLALHRSYLTPGDSSSGWTAGAAAYYVGYLQPRTFLLKYNENGTITDAVDCALDPLSETKCTLKSFTVEKGIYQTSNFRVQPTESIVRFPNITNLCPFGEVFNATRFASVYAWNRKRISNCVADYSVLYNSASFSTFKCYGVSPTKLNDLCFTNVYADSFVIRGDEVRQIAPGQTGKIADYNYKLPDDFTGCVIAWNSNNLDSKVGGNYNYLYRLFRKSNLKPFERDISTEIYQAGSTPCNGVEGFNCYFPLQSYGFQPTNGVGYQPYRVVVLSFELLHAPATVCGPKKSTNLVKNKCVNFNFNGLTGTGVLTESNKKFLPFQQFGRDIADTTDAVRDPQTLEILDITPCSFGGVSVITPGTNTSNQVAVLYQDVNCTEVPVAIHADQLTPTWRVYSTGSNVFQTRAGCLIGAEHVNNSYECDIPIGAGICASYQTQTNSPRRARSVASQSIIAYTMSLGAENSVAYSNNSIAIPTNFTISVTTEILPVSMTKTSVDCTMYICGDSTECSNLLLQYGSFCTQLNRALTGIAVEQDKNTQEVFAQVKQIYKTPPIKDFGGFNFSQILPDPSKPSKRSFIEDLLFNKVTLADAGFIKQYGDCLGDIAARDLICAQKFNGLTVLPPLLTDEMIAQYTSALLAGTITSGWTFGCGAALQIPFAMQMAYRFNGIGVTQNVLYENQKLIANQFNSAIGKIQDSLSSTASALGKLQDVVNQNAQALNTLVKQLSSNFGAISSVLNDILSRLDKVEAEVQIDRLITGRLQSLQTYVTQQLIRAAEIRASANLAATKMSECVLGQSKRCDFCGKGYHLMSFPQSAPHGVVFLHVTYVPAQEKNFTTAPAICHDGKAHFPREGVFVSNGTHWFVTQRNFYEPQIITTDNTFVSGNCDVVIGIVNNTVYDPLQPELDSFKEELDKYFKNHTSPDVDLGDISGINASVVNIQKEIDRLNEVAKNLNESLIDLQELGKYEQYIKGGGGSDIDPYKEFGSSYQLLNFLPLDFFPDLNALVDTATALYEEELTGREHCSPHHTAIRQALVCWDELTKLIAWMSSNITSEQVRTIIVNHVNDTWGLKVRQSLWFHLSCLTFGQHTVQEFLVSFGVWIRTPAPYRPPNAPILSTLPEHTVIC

SEQ ID NO: 7511 - protein, 1361 aa, Artificial Sequence; identical to SEQ ID NO: 7243
  SARS-CoV-2/bat/Yunnan/RaTG13/2013__EPI_ISL_402131 spike protein (1-1207)(A886C_V1036C) WhcAg construct

SEQ ID NO: 7512 - protein, 1365 aa, Artificial Sequence; identical to SEQ ID NO: 7244
  SARS-CoV-2/Wuhan/HBCDC-HB-01/2019__EPI_ISL_402132 spike protein (1-1211)(A890C_V1040C) WhcAg construct

SEQ ID NO: 7513 - protein, 1365 aa, Artificial Sequence; identical to SEQ ID NO: 7245
  SARS-CoV-2/Guangdong/20SF028/2020__EPI_ISL_403936 spike protein (1-1211)(A890C_V1040C) WhcAg construct

SEQ ID NO: 7514 - protein, 1365 aa, Artificial Sequence; identical to SEQ ID NO: 7246
  SARS-CoV-2/Shenzhen/SZTH-001/2020__EPI_ISL_406592 spike protein (1-1211)(A890C_V1040C) WhcAg construct

SEQ ID NO: 7515 - protein, 1365 aa, Artificial Sequence; identical to SEQ ID NO: 7247
  SARS-CoV-2/Shenzhen/SZTH-004/2020__EPI_ISL_406595 spike protein (1-1211)(A890C_V1040C) WhcAg construct

SEQ ID NO: 7516 - protein, 1365 aa, Artificial Sequence; identical to SEQ ID NO: 7248
  SARS-CoV-2/France/IDF0372/2020__EPI_ISL_406596 spike protein (1-1211)(A890C_V1040C) WhcAg construct

SEQ ID NO: 7517 - protein, 1365 aa, Artificial Sequence; identical to SEQ ID NO: 7249
  SARS-CoV-2/Australia/VIC01/2020__EPI_ISL_406844 spike protein (1-1211)(A890C_V1040C) WhcAg construct

SEQ ID NO: 7518 - protein, 1365 aa, Artificial Sequence; identical to SEQ ID NO: 7250
  SARS-CoV-2/Germany/BavPat1/2020__EPI_ISL_406862 spike protein (1-1211)(A890C_V1040C) WhcAg construct

SEQ ID NO: 7519 - protein, 1365 aa, Artificial Sequence; identical to SEQ ID NO: 7251
  SARS-CoV-2/Wuhan/HBCDC-HB-02/2020__EPI_ISL_412978 spike protein (1-1211)(A890C_V1040C) WhcAg construct

SEQ ID NO: 7520 - protein, 1365 aa, Artificial Sequence; identical to SEQ ID NO: 7252
  SARS-CoV-2/Australia/QLD02/2020__EPI_ISL_407896 spike protein (1-1211)(A890C_V1040C) WhcAg construct

SEQ ID NO: 7521 - protein, 1365 aa, Artificial Sequence; identical to SEQ ID NO: 7253
  SARS-CoV-2/India/1-31/2020__EPI_ISL_413523 spike protein (1-1211)(A890C_V1040C) WhcAg construct

SEQ ID NO: 7522 - protein, 1365 aa, Artificial Sequence; identical to SEQ ID NO: 7254
  SARS-CoV-2/Guangdong/GD2020087-P0008/2020__EPI_ISL_413863 spike protein (1-1211)(A890C_V1040C) WhcAg construct

SEQ ID NO: 7523 - protein, 1365 aa, Artificial Sequence; identical to SEQ ID NO: 7255
  SARS-CoV-2/Sweden/01/2020__EPI_ISL_411951 spike protein (1-1211)(A890C_V1040C) WhcAg construct

SEQ ID NO: 7524 - protein, 1365 aa, Artificial Sequence; identical to SEQ ID NO: 7256
  SARS-CoV-2/Tianmen/HBCDC-HB-07/2020__EPI_ISL_412983 spike protein (1-1211)(A890C_V1040C) WhcAg construct

SEQ ID NO: 7525 - protein, 1365 aa, Artificial Sequence; identical to SEQ ID NO: 7257
  SARS-CoV-2/Hong Kong/case42_VM20002493/2020__EPI_ISL_414527 spike protein (1-1211)(A890C_V1040C) WhcAg construct

SEQ ID NO: 7526 - protein, 1365 aa, Artificial Sequence; identical to SEQ ID NO: 7258
  SARS-CoV-2/USA/CruiseA-23/2020__EPI_ISL_414482 spike protein (1-1211)(A890C_V1040C) WhcAg construct

SEQ ID NO: 7527 - protein, 1365 aa, Artificial Sequence; identical to SEQ ID NO: 7259
  SARS-CoV-2/Hong Kong/case85_VM20002868/2020__EPI_ISL_414519 spike protein (1-1211)(A890C_V1040C) WhcAg construct

SEQ ID NO: 7528 - protein, 1365 aa, Artificial Sequence; identical to SEQ ID NO: 7250
  SARS-CoV-2/England/200990660/2020__EPI_ISL_414523 spike protein (1-1211)(A890C_V1040C) WhcAg construct

SEQ ID NO: 7529 - protein, 1365 aa, Artificial Sequence; identical to SEQ ID NO: 7261
  SARS-CoV-2/Australia/NSW09/2020__EPI_ISL_413595 spike protein (1-1211)(A890C_V1040C) WhcAg construct

SEQ ID NO: 7530 - protein, 1365 aa, Artificial Sequence; identical to SEQ ID NO: 7242
  SARS-CoV-2/Australia/NSW10/2020__EPI_ISL_413596 spike protein (1-1211)(A890C_V1040C) WhcAg construct

SEQ ID NO: 7531 - protein, 1365 aa, Artificial Sequence; identical to SEQ ID NO: 7263
  SARS-CoV-2/Switzerland/1000477797/2020__EPI_ISL_413023 spike protein (1-1211)(A890C_V1040C) WhcAg construct

SEQ ID NO: 7532 - protein, 1365 aa, Artificial Sequence; identical to SEQ ID NO: 7264
  SARS-CoV-2/Belgium/BA-02291/2020__EPI_ISL_415159 spike protein (1-1211)(A890C_V1040C) WhcAg construct

SEQ ID NO: 7533 - protein, 1365 aa, Artificial Sequence; identical to SEQ ID NO: 7265
  SARS-CoV-2/USA/WA8-UW5/2020__EPI_ISL_413486 spike protein (1-1211)(A890C_V1040C) WhcAg construct

SEQ ID NO: 7534 - protein, 1365 aa, Artificial Sequence; identical to SEQ ID NO: 7266
  SARS-CoV-2/England/20102000506/2020__EPI_ISL_415147 spike protein (1-1211)(A890C_V1040C) WhcAg construct

SEQ ID NO: 7535 - protein, 1365 aa, Artificial Sequence; identical to SEQ ID NO: 7267
  SARS-CoV-2/Belgium/VAG-03013/2020__EPI_ISL_415155 spike protein (1-1211)(A890C_V1040C) WhcAg construct

SEQ ID NO: 7536 - protein, 1365 aa, Artificial Sequence; identical to SEQ ID NO: 7268
  SARS-CoV-2/Belgium/BC-03016/2020__EPI_ISL_415157 spike protein (1-1211)(A890C_V1040C) WhcAg construct

SEQ ID NO: 7537 - protein, 1365 aa, Artificial Sequence; identical to SEQ ID NO: 7269
  SARS-CoV-2/Germany/BavPat3/2020__EPI_ISL_414521 spike protein (1-1211)(A890C_V1040C) WhcAg construct

SEQ ID NO: 7538 - protein, 1365 aa, Artificial Sequence; identical to SEQ ID NO: 7270
  SARS-CoV-2/France/HF1805/2020__EPI_ISL_414628 spike protein (1-1211)(A890C_V1040C) WhcAg construct

SEQ ID NO: 7539 - protein, 1365 aa, Artificial Sequence; identical to SEQ ID NO: 7271
  SARS-CoV-2/Netherlands/ZuidHolland_9/2020__EPI_ISL_414445 spike protein (1-1211)(A890C_V1040C) WhcAg construct

SEQ ID NO: 7540 - protein, 1365 aa, Artificial Sequence; identical to SEQ ID NO: 7272
  SARS-CoV-2/Finland/FIN03032020A/2020__EPI_ISL_413602 spike protein (1-1211)(A890C_V1040C) WhcAg construct

SEQ ID NO: 7541 - protein, 1365 aa, Artificial Sequence; identical to SEQ ID NO: 7273
  SARS-CoV-2/France/GE1977/2020__EPI_ISL_414632 spike protein (1-1211)(A890C_V1040C) WhcAg construct

SEQ ID NO: 7542 - protein, 1365 aa, Artificial Sequence; identical to SEQ ID NO: 7274
  SARS-CoV-2/Finland/FIN-313/2020__EPI_ISL_414641 spike protein (1-1211)(A890C_V1040C) WhcAg construct

SEQ ID NO: 7543 - protein, 1365 aa, Artificial Sequence; identical to SEQ ID NO: 7275
  SARS-CoV-2/Netherlands/ZuidHolland_2/2020__EPI_ISL_414556 spike protein (1-1211)(A890C_V1040C) WhcAg construct

SEQ ID NO: 7544 - protein, 1365 aa, Artificial Sequence; identical to SEQ ID NO: 7276
  SARS-CoV-2/USA/WA-UW31/2020__EPI_ISL_414618 spike protein (1-1211)(A890C_V1040C) WhcAg construct

SEQ ID NO: 7545 - protein, 1365 aa, Artificial Sequence; identical to SEQ ID NO: 7277
  SARS-CoV-2/South Korea/SNU01/2020__EPI_ISL_411929 spike protein (1-1211)(A890C_V1040C) WhcAg construct

SEQ ID NO: 7546 - protein, 1365 aa, Artificial Sequence; identical to SEQ ID NO: 7278
  SARS-CoV-2/China/WF0004/2020__EPI_ISL_413694 spike protein (1-1211)(A890C_V1040C) WhcAg construct

SEQ ID NO: 7547 - protein, 1365 aa, Artificial Sequence; identical to SEQ ID NO: 7279
  SARS-CoV-2/China/WF0028/2020__EPI_ISL_413791 spike protein (1-1211)(A890C_V1040C) WhcAg construct

SEQ ID NO: 7548 - protein, 1365 aa, Artificial Sequence; identical to SEQ ID NO: 7280
  SARS-CoV-2/2019-nCoV/USA-CruiseA-18/2020__MT159716.1 spike protein (1-1211)(A890C_V1040C) WhcAg construct

SEQ ID NO: 7549 - protein, 1365 aa, Artificial Sequence; identical to SEQ ID NO: 7281
  SARS-CoV-2/SARS-CoV-2/Yunnan-01/human/2020/CHN__MT049951.1 spike protein (1-1211)(A890C_V1040C) WhcAg construct

SEQ ID NO: 7550 - protein, 1365 aa, Artificial Sequence; identical to SEQ ID NO: 7282
  SARS-CoV-2/USA/WA-UW292/2020__EPI_ISL_418077 spike protein (1-1211)(A890C_V1040C) WhcAg construct

SEQ ID NO: 7551 - protein, 1365 aa, Artificial Sequence; identical to SEQ ID NO: 7283
  SARS-CoV-2/Iceland/192/2020__EPI_ISL_417819 spike protein (1-1211)(A890C_V1040C) WhcAg construct

SEQ ID NO: 7552 - protein, 1365 aa, Artificial Sequence; identical to SEQ ID NO: 7284
  SARS-CoV-2/Belgium/ULG-6939/2020__EPI_ISL_417020 spike protein (1-1211)(A890C_V1040C) WhcAg construct

SEQ ID NO: 7553 - protein, 1365 aa, Artificial Sequence; identical to SEQ ID NO: 7285
  SARS-CoV-2/France/HF2496/2020__EPI_ISL_418231 spike protein (1-1211)(A890C_V1040C) WhcAg construct

SEQ ID NO: 7554 - protein, 1365 aa, Artificial Sequence; identical to SEQ ID NO: 7286
  SARS-CoV-2/USA/WA-UW291/2020__EPI_ISL_418076 spike protein (1-1211)(A890C_V1040C) WhcAg construct

SEQ ID NO: 7555 - protein, 1365 aa, Artificial Sequence; identical to SEQ ID NO: 7250
  SARS-CoV-2/Portugal/PT0034/2020__EPI_ISL_418019 spike protein (1-1211)(A890C_V1040C) WhcAg construct

SEQ ID NO: 7556 - protein, 1365 aa, Artificial Sequence; identical to SEQ ID NO: 7288
  SARS-CoV-2/Iceland/202/2020__EPI_ISL_417750 spike protein (1-1211)(A890C_V1040C) WhcAg construct

SEQ ID NO: 7557 - protein, 1365 aa, Artificial Sequence; identical to SEQ ID NO: 7289
  SARS-CoV-2/USA/WA-UW261/2020__EPI_ISL_418046 spike protein (1-1211)(A890C_V1040C) WhcAg construct

SEQ ID NO: 7558 - protein, 1365 aa, Artificial Sequence; identical to SEQ ID NO: 7290
  SARS-CoV-2/Portugal/PT0035/2020__EPI_ISL_418020 spike protein (1-1211)(A890C_V1040C) WhcAg construct

SEQ ID NO: 7559 - protein, 1365 aa, Artificial Sequence; identical to SEQ ID NO: 7291
  SARS-CoV-2/USA/NY-NYUMC7/2020__EPI_ISL_418192 spike protein (1-1211)(A890C_V1040C) WhcAg construct

SEQ ID NO: 7560 - protein, 1365 aa, Artificial Sequence; identical to SEQ ID NO: 7292
  SARS-CoV-2/Iceland/189/2020__EPI_ISL_417709 spike protein (1-1211)(A890C_V1040C) WhcAg construct

SEQ ID NO: 7561 - protein, 1365 aa, Artificial Sequence; identical to SEQ ID NO: 7293
  SARS-CoV-2/Australia/NSW56/2020__EPI_ISL_417408 spike protein (1-1211)(A890C_V1040C) WhcAg construct

SEQ ID NO: 7562 - protein, 1365 aa, Artificial Sequence; identical to SEQ ID NO: 7294
  SARS-CoV-2/Iceland/280/2020__EPI_ISL_417608 spike protein (1-1211)(A890C_V1040C) WhcAg construct

SEQ ID NO: 7563 - protein, 1365 aa, Artificial Sequence; identical to SEQ ID NO: 7250
  SARS-CoV-2/Iceland/247/2020__EPI_ISL_417575 spike protein (1-1211)(A890C_V1040C) WhcAg construct

SEQ ID NO: 7564 - protein, 1365 aa, Artificial Sequence; identical to SEQ ID NO: 7296
  SARS-CoV-2/Iceland/238/2020__EPI_ISL_417566 spike protein (1-1211)(A890C_V1040C) WhcAg construct

SEQ ID NO: 7565 - protein, 1365 aa, Artificial Sequence; identical to SEQ ID NO: 7297
  SARS-CoV-2/Greece/16/2020__EPI_ISL_418265 spike protein (1-1211)(A890C_V1040C) WhcAg construct

SEQ ID NO: 7566 - protein, 1365 aa, Artificial Sequence; identical to SEQ ID NO: 7298
  SARS-CoV-2/Iceland/319/2020__EPI_ISL_417648 spike protein (1-1211)(A890C_V1040C) WhcAg construct

SEQ ID NO: 7567 - protein, 1365 aa, Artificial Sequence; identical to SEQ ID NO: 7299
  SARS-CoV-2/Congo/94/2020__EPI_ISL_417947 spike protein (1-1211)(A890C_V1040C) WhcAg construct

SEQ ID NO: 7568 - protein, 1365 aa, Artificial Sequence; identical to SEQ ID NO: 7300
  SARS-CoV-2/Congo/158/2020__EPI_ISL_417950 spike protein (1-1211)(A890C_V1040C) WhcAg construct

SEQ ID NO: 7569 - protein, 1365 aa, Artificial Sequence; identical to SEQ ID NO: 7301
  SARS-CoV-2/USA/UT-00034/2020__EPI_ISL_417977 spike protein (1-1211)(A890C_V1040C) WhcAg construct

SEQ ID NO: 7570 - protein, 1365 aa, Artificial Sequence; identical to SEQ ID NO: 7302
  SARS-CoV-2/USA/UT-00033/2020__EPI_ISL_417976 spike protein (1-1211)(A890C_V1040C) WhcAg construct

SEQ ID NO: 7571 - protein, 1365 aa, Artificial Sequence; identical to SEQ ID NO: 7303
  SARS-CoV-2/USA/WI-13/2020__EPI_ISL_417516 spike protein (1-1211)(A890C_V1040C) WhcAg construct

SEQ ID NO: 7572 - protein, 1364 aa, Artificial Sequence; identical to SEQ ID NO: 7304
  SARS-CoV-2/India/1-27/2020__EPI_ISL_413522 spike protein (1-1210)(A889C_V1039C) WhcAg construct

SEQ ID NO: 7573 - protein, 1359 aa, Artificial Sequence; identical to SEQ ID NO: 7305
  SARS-CoV-2/pangolin/Guangxi/P4L/2017__EPI_ISL_410538 spike protein (1-1205)(A884C_V1034C) WhcAg construct

SEQ ID NO: 7574 - protein, 1359 aa, Artificial Sequence; identical to SEQ ID NO: 7306
  SARS-CoV-2/pangolin/Guangxi/P5L/2017__EPI_ISL_410540 spike protein (1-1205)(A884C_V1034C) WhcAg construct

SEQ ID NO: 7575 - protein, 1359 aa, Artificial Sequence; identical to SEQ ID NO: 7307
  SARS-CoV-2/pangolin/Guangxi/P5E/2017__EPI_ISL_410541 spike protein (1-1205)(A884C_V1034C) WhcAg construct

SEQ ID NO: 7576 - protein, 1357 aa, Artificial Sequence; identical to SEQ ID NO: 7308
  SARS-CoV-2/pangolin/Guangxi/P1E/2017__EPI_ISL_410539 spike protein (1-1203)(A882C_V1032C) WhcAg construct

SEQ ID NO: 7577 - protein, 1365 aa, Artificial Sequence
  SARS-CoV-2/Wuhan/WIV05/2019__EPI_ISL_402128 spike protein (1-1211)(T874C_S1055C) WhcAg construct
MFVFLVLLPLVSSQCVNLTTRTQLPPAYTNSFTRGVYYPDKVFRSSVLHSTQDLFLPFFSNVTWFHAIHVSGTNGTKRFDNPVLPFNDGVYFASTEKSNIIRGWIFGTTLDSKTQSLLIVNNATNVVIKVCEFQFCNDPFLGVYYHKNNKSWMESEFRVYSSANNCTFEYVSQPFLMDLEGKQGNFKNLREFVFKNIDGYFKIYSKHTPINLVRDLPQGFSALEPLVDLPIGINITRFQTLLALHRSYLTPGDSSSGWTAGAAAYYVGYLQPRTFLLKYNENGTITDAVDCALDPLSETKCTLKSFTVEKGIYQTSNFRVQPTESIVRFPNITNLCPFGEVFNATRFASVYAWNRKRISNCVADYSVLYNSASFSTFKCYGVSPTKLNDLCFTNVYADSFVIRGDEVRQIAPGQTGKIADYNYKLPDDFTGCVIAWNSNNLDSKVGGNYNYLYRLFRKSNLKPFERDISTEIYQAGSTPCNGVEGFNCYFPLQSYGFQPTNGVGYQPYRVVVLSFELLHAPATVCGPKKSTNLVKNKCVNFNFNGLTGTGVLTESNKKFLPFQQFGRDIADTTDAVRDPQTLEILDITPCSFGGVSVITPGTNTSNQVAVLYQDVNCTEVPVAIHADQLTPTWRVYSTGSNVFQTRAGCLIGAEHVNNSYECDIPIGAGICASYQTQTNSPRRARSVASQSIIAYTMSLGAENSVAYSNNSIAIPTNFTISVTTEILPVSMTKTSVDCTMYICGDSTECSNLLLQYGSFCTQLNRALTGIAVEQDKNTQEVFAQVKQIYKTPPIKDFGGFNFSQILPDPSKPSKRSFIEDLLFNKVTLADAGFIKQYGDCLGDIAARDLICAQKFNGLTVLPPLLTDEMIAQYCSALLAGTITSGWTFGAGAALQIPFAMQMAYRFNGIGVTQNVLYENQKLIANQFNSAIGKIQDSLSSTASALGKLQDVVNQNAQALNTLVKQLSSNFGAISSVLNDILSRLDKVEAEVQIDRLITGRLQSLQTYVTQQLIRAAEIRASANLAATKMSECVLGQSKRVDFCGKGYHLMSFPQCAPHGVVFLHVTYVPAQEKNFTTAPAICHDGKAHFPREGVFVSNGTHWFVTQRNFYEPQIITTDNTFVSGNCDVVIGIVNNTVYDPLQPELDSFKEELDKYFKNHTSPDVDLGDISGINASVVNIQKEIDRLNEVAKNLNESLIDLQELGKYEQYIKGGGGSDIDPYKEFGSSYQLLNFLPLDFFPDLNALVDTATALYEEELTGREHCSPHHTAIRQALVCWDELTKLIAWMSSNITSEQVRTIIVNHVNDTWGLKVRQSLWFHLSCLTFGQHTVQEFLVSFGVWIRTPAPYRPPNAPILSTLPEHTVIC

SEQ ID NO: 7578 - protein, 1361 aa, Artificial Sequence
  SARS-CoV-2/bat/Yunnan/RaTG13/2013__EPI_ISL_402131 spike protein (1-1207)(T870C_S1051C) WhcAg construct
MFVFLVLLPLVSSQCVNLTTRTQLPPAYTNSSTRGVYYPDKVFRSSVLHLTQDLFLPFFSNVTWFHAIHVSGTNGIKRFDNPVLPFNDGVYFASTEKSNIIRGWIFGTTLDSKTQSLLIVNNATNVVIKVCEFQFCNDPFLGVYYHKNNKSWMESEFRVYSSANNCTFEYVSQPFLMDLEGKQGNFKNLREFVFKNIDGYFKIYSKHTPINLVRDLPPGFSALEPLVDLPIGINITRFQTLLALHRSYLTPGDSSSGWTAGAAAYYVGYLQPRTFLLKYNENGTITDAVDCALDPLSETKCTLKSFTVEKGIYQTSNFRVQPTDSIVRFPNITNLCPFGEVFNATTFASVYAWNRKRISNCVADYSVLYNSTSFSTFKCYGVSPTKLNDLCFTNVYADSFVITGDEVRQIAPGQTGKIADYNYKLPDDFTGCVIAWNSKHIDAKEGGNFNYLYRLFRKANLKPFERDISTEIYQAGSKPCNGQTGLNCYYPLYRYGFYPTDGVGHQPYRVVVLSFELLNAPATVCGPKKSTNLVKNKCVNFNFNGLTGTGVLTESNKKFLPFQQFGRDIADTTDAVRDPQTLEILDITPCSFGGVSVITPGTNASNQVAVLYQDVNCTEVPVAIHADQLTPTWRVYSTGSNVFQTRAGCLIGAEHVNNSYECDIPIGAGICASYQTQTNSRSVASQSIIAYTMSLGAENSVAYSNNSIAIPTNFTISVTTEILPVSMTKTSVDCTMYICGDSTECSNLLLQYGSFCTQLNRALTGIAVEQDKNTQEVFAQVKQIYKTPPIKDFGGFNFSQILPDPSKPSKRSFIEDLLFNKVTLADAGFIKQYGDCLGDIAARDLICAQKFNGLTVLPPLLTDEMIAQYCSALLAGTITSGWTFGAGAALQIPFAMQMAYRFNGIGVTQNVLYENQKLIANQFNSAIGKIQDSLSSTASALGKLQDVVNQNAQALNTLVKQLSSNFGAISSVLNDILSRLDKVEAEVQIDRLITGRLQSLQTYVTQQLIRAAEIRASANLAATKMSECVLGQSKRVDFCGKGYHLMSFPQCAPHGVVFLHVTYVPAQEKNFTTAPAICHDGKAHFPREGVFVSNGTHWFVTQRNFYEPQIITTDNTFVSGSCDVVIGIVNNTVYDPLQPELDSFKEELDKYFKNHTSPDVDLGDISGINASVVNIQKEIDRLNEVAKNLNESLIDLQELGKYEQYIKGGGGSDIDPYKEFGSSYQLLNFLPLDFFPDLNALVDTATALYEEELTGREHCSPHHTAIRQALVCWDELTKLIAWMSSNITSEQVRTIIVNHVNDTWGLKVRQSLWFHLSCLTFGQHTVQEFLVSFGVWIRTPAPYRPPNAPILSTLPEHTVIC

SEQ ID NO: 7579 - protein, 1365 aa, Artificial Sequence
  SARS-CoV-2/Wuhan/HBCDC-HB-01/2019__EPI_ISL_402132 spike protein (1-1211)(T874C_S1055C) WhcAg construct
MFVFLVLLPLVSSQCVNLTTRTQLPPAYTNSITRGVYYPDKVFRSSVLHSTQDLFLPFFSNVTWFHAIHVSGTNGTKRFDNPVLPFNDGVYFASTEKSNIIRGWIFGTTLDSKTQSLLIVNNATNVVIKVCEFQFCNDPFLGVYYHKNNKSWMESEFRVYSSANNCTFEYVSQPFLMDLEGKQGNFKNLREFVFKNIDGYFKIYSKHTPINLVRDLPQGFSALEPLVDLPIGINITRFQTLLALHRSYLTPGDSSSGWTAGAAAYYVGYLQPRTFLLKYNENGTITDAVDCALDPLSETKCTLKSFTVEKGIYQTSNFRVQPTESIVRFPNITNLCPFGEVFNATRFASVYAWNRKRISNCVADYSVLYNSASFSTFKCYGVSPTKLNDLCFTNVYADSFVIRGDEVRQIAPGQTGKIADYNYKLPDDFTGCVIAWNSNNLDSKVGGNYNYLYRLFRKSNLKPFERDISTEIYQAGSTPCNGVEGFNCYFPLQSYGFQPTNGVGYQPYRVVVLSFELLHAPATVCGPKKSTNLVKNKCVNFNFNGLTGTGVLTESNKKFLPFQQFGRDIADTTDAVRDPQTLEILDITPCSFGGVSVITPGTNTSNQVAVLYQDVNCTEVPVAIHADQLTPTWRVYSTGSNVFQTRAGCLIGAEHVNNSYECDIPIGAGICASYQTQTNSPRRARSVASQSIIAYTMSLGAENSVAYSNNSIAIPTNFTISVTTEILPVSMTKTSVDCTMYICGDSTECSNLLLQYGSFCTQLNRALTGIAVEQDKNTQEVFAQVKQIYKTPPIKDFGGFNFSQILPDPSKPSKRSFIEDLLFNKVTLADAGFIKQYGDCLGDIAARDLICAQKFNGLTVLPPLLTDEMIAQYCSALLAGTITSGWTFGAGAALQIPFAMQMAYRFNGIGVTQNVLYENQKLIANQFNSAIGKIQDSLSSTASALGKLQDVVNQNAQALNTLVKQLSSNFGAISSVLNDILSRLDKVEAEVQIDRLITGRLQSLQTYVTQQLIRAAEIRASANLAATKMSECVLGQSKRVDFCGKGYHLMSFPQCAPHGVVFLHVTYVPAQEKNFTTAPAICHDGKAHFPREGVFVSNGTHWFVTQRNFYEPQIITTDNTFVSGNCDVVIGIVNNTVYDPLQPELDSFKEELDKYFKNHTSPDVDLGDISGINASVVNIQKEIDRLNEVAKNLNESLIDLQELGKYEQYIKGGGGSDIDPYKEFGSSYQLLNFLPLDFFPDLNALVDTATALYEEELTGREHCSPHHTAIRQALVCWDELTKLIAWMSSNITSEQVRTIIVNHVNDTWGLKVRQSLWFHLSCLTFGQHTVQEFLVSFGVWIRTPAPYRPPNAPILSTLPEHTVIC

SEQ ID NO: 7580 - protein, 1365 aa, Artificial Sequence
  SARS-CoV-2/Guangdong/20SF028/2020__EPI_ISL_403936 spike protein (1-1211)(T874C_S1055C) WhcAg construct
MFVFLVLLPLVSSQCVNLTTRTQLPPAYTNSFTRGVYYPDKVFRSSVLYSTQDLFLPFFSNVTWFHAIHVSGTNGTKRFDNPVLPFNDGVYFASTEKSNIIRGWIFGTTLDSKTQSLLIVNNATNVVIKVCEFQFCNDPFLGVYYHKNNKSWMESEFRVYSSANNCTFEYVSQPFLMDLEGKQGNFKNLREFVFKNIDGYFKIYSKHTPINLVRDLPQGFSALEPLVDLPIGINITRFQTLLALHRSYLTPGDSSSGWTAGAAAYYVGYLQPRTFLLKYNENGTITDAVDCALDPLSETKCTLKSFTVEKGIYQTSNFRVQPTESIVRFPNITNLCPFGEVFNATRFASVYAWNRKRISNCVADYSVLYNSASFSTFKCYGVSPTKLNDLCFTNVYADSFVIRGDEVRQIAPGQTGKIADYNYKLPDDFTGCVIAWNSNNLDSKVGGNYNYLYRLFRKSNLKPFERDISTEIYQAGSTPCNGVEGFNCYFPLQSYGFQPTNGVGYQPYRVVVLSFELLHAPATVCGPKKSTNLVKNKCVNFNFNGLTGTGVLTESNKKFLPFQQFGRDIADTTDAVRDPQTLEILDITPCSFGGVSVITPGTNTSNQVAVLYQDVNCTEVPVAIHADQLTPTWRVYSTGSNVFQTRAGCLIGAEHVNNSYECDIPIGAGICASYQTQTNSPRRARSVASQSIIAYTMSLGAENSVAYSNNSIAIPTNFTISVTTEILPVSMTKTSVDCTMYICGDSTECSNLLLQYGSFCTQLNRALTGIAVEQDKNTQEVFAQVKQIYKTPPIKDFGGFNFSQILPDPSKPSKRSFIEDLLFNKVTLADAGFIKQYGDCLGDIAARDLICAQKFNGLTVLPPLLTDEMIAQYCSALLAGTITSGWTFGAGAALQIPFAMQMAYRFNGIGVTQNVLYENQKLIANQFNSAIGKIQDSLSSTASALGKLQDVVNQNAQALNTLVKQLSSNFGAISSVLNDILSRLDKVEAEVQIDRLITGRLQSLQTYVTQQLIRAAEIRASANLAATKMSECVLGQSKRVDFCGKGYHLMSFPQCAPHGVVFLHVTYVPAQEKNFTTAPAICHDGKAHFPREGVFVSNGTHWFVTQRNFYEPQIITTDNTFVSGNCDVVIGIVNNTVYDPLQPELDSFKEELDKYFKNHTSPDVDLGDISGINASVVNIQKEIDRLNEVAKNLNESLIDLQELGKYEQYIKGGGGSDIDPYKEFGSSYQLLNFLPLDFFPDLNALVDTATALYEEELTGREHCSPHHTAIRQALVCWDELTKLIAWMSSNITSEQVRTIIVNHVNDTWGLKVRQSLWFHLSCLTFGQHTVQEFLVSFGVWIRTPAPYRPPNAPILSTLPEHTVIC

SEQ ID NO: 7581 - protein, 1365 aa, Artificial Sequence
  SARS-CoV-2/Shenzhen/SZTH-001/2020__EPI_ISL_406592 spike protein (1-1211)(T874C_S1055C) WhcAg construct
MFVFLVLLPLVSSQCVNLTTRTQLPPAYTNSFTRGVYYPDKVFRSSVLHSTQDLFLPFFSNVTWFHAIHVSGTNGTKRFDNPVLPFNDGVYFASTEKSNIIRGWIFGTTLDSKTQSLLIVNNATNVVIKVCEFQFCNDPFLGVYYHKNNKSWMESEFRVYSSANNCTFEYVSQPFLMDLEGKQGNFKNLREFVFKNIDGYFKIYSKHTPINLVRDLPQGFSALEPLVDLPIGINITRFQTLLALHRSYLTPGDSSSGWTAGAAAYYVGYLQPRTFLLKYNENGTITDAVDCALDPLSETKCTLKSFTVEKGIYQTSNFRVQPTESIVRFPNITNLCPFGEVFNATRFASVYAWNRKRISNCVADYSVLYNSASFSTFKCYGVSPTKLNDLCFTNVYADSFVIRGDEVRQIAPGQTGKIADYNYKLPDDFTGCVIAWNSNNLDSKVGGNYNYLYRLFRKSNLKPFERDISTEIYQAGSTPCNGVEGFNCYFPLQSYGFQPTNGVGYQPYRVVVLSFELLHAPATVCGPKKSTNLVKNKCVNFNFNGLTGTGVLTESNKKFLPFQQFGRDIADTTDAVRDPQTLEILDITPCSFGGVSVITPGTNTSNQVAVLYQDVNCTEVPVAIHADQLTPTWRVYSTGSNVFQTRAGCLIGAEHVNNSYECDIPIGAGICASYQTQTNSPRRARSVASQSIIAYTMSLGAENSVAYSNNSIAIPTNFTISVTTEILPVSMTKTSVDCTMYICGDSTECSNLLLQYGSFCTQLNRALTGIAVEQDKNTQEVFAQVKQIYKTPPIKDFGGFNFSQILPDPSKPSKRSFIEDLLFNKVTLADAGFIKQYGDCLGDIAARDLICAQKFNGLTVLPPLLTDEMIAQYCSALLAGTITSGWTFGAGAALQIPFAMQMAYRFNGIGVTQNVLYENQKLIANQFNSAIGKIQDSLSSTASALGKLQDVVNQNAQALNTLVKQLSSNFGAISSVLNDILSRLDKVEAEVQIDRLITGRLQSLQTYVTQQLIRAAEIRASANLAATKMSECVLGQSKRVDFCGKGYHLMSFPQCAPHGVVFLHVTYVPAQEKNFTTAPAICHDGKAHFPREGVFVSNGTHWFVTQRNFYEPQIITTDNTFVSGNCDVLIGIVNNTVYDPLQPELDSFKEELDKYFKNHTSPDVDLGDISGINASVVNIQKEIDRLNEVAKNLNESLIDLQELGKYEQYIKGGGGSDIDPYKEFGSSYQLLNFLPLDFFPDLNALVDTATALYEEELTGREHCSPHHTAIRQALVCWDELTKLIAWMSSNITSEQVRTIIVNHVNDTWGLKVRQSLWFHLSCLTFGQHTVQEFLVSFGVWIRTPAPYRPPNAPILSTLPEHTVIC

SEQ ID NO: 7582 - protein, 1365 aa, Artificial Sequence
  SARS-CoV-2/Shenzhen/SZTH-004/2020__EPI_ISL_406595 spike protein (1-1211)(T874C_S1055C) WhcAg construct
MFVFLVLLPLVSSQCVNLTTRTQLPPAYTNSFTRGVYYPDKVFRSSVLHSTQDLFLPFFSNVTWFHAIHVSGTNGTKRFDNPVLPFNDGVYFASTEKSNIIRGWIFGTTLDSKTQSLLIVNNATNVVIKVCEFQFCNDPFLGVYYHKNNKSWMESEFRVYSSANNCTFEYVSQPFLMDLEGKQGNFKNLREFVFKNIDGYFKIYSKHTPINLVRDLPQGFSALEPLVDLPIGINITRFQTLLALHRSYLTPGDSSSGWTAGAAAYYVGYLQPRTFLLKYNENGTITDAVDCALDPLSETKCTLKSFTVEKGIYQTSNFRVQPTESIVRFPNITNLCPFGEVFNATRFASVYAWDRKRISNCVAYYSVLYNSASFSTFKCYGVSPTKLNDLCFTNVYADSFVIRGDEVRQIAPGQTGKIADYNYKLPDDFTGCVIAWNSNNLDSKVGGNYNYLYRLFRKSNLKPFERDISTEIYQAGSTPCNGVEGFNCYFPLQSYGFQPTNGVGYQPYRVVVLSFELLHAPATVCGPKKSTNLVKNKCVNFNFNGLTGTGVLTESNKKFLPFQQFGRDIADTTDAVRDPQTLEILDITPCSFGGVSVITPGTNTSNQVAVLYQDVNCTEVPVAIHADQLTPTWRVYSTGSNVFQTRAGCLIGAEHVNNSYECDIPIGAGICASYQTQTNSPRRARSVASQSIIAYTMSLGAENSVAYSNNSIAIPTNFTISVTTEILPVSMTKTSVDCTMYICGDSTECSNLLLQYGSFCTQLNRALTGIAVEQDKNTQEVFAQVKQIYKTPPIKDFGGFNFSQILPDPSKPSKRSFIEDLLFNKVTLADAGFIKQYGDCLGDIAARDLICAQKFNGLTVLPPLLTDEMIAQYCSALLAGTITSGWTFGAGAALQIPFAMQMAYRFNGIGVTQNVLYENQKLIANQFNSAIGKIQDSLSSTASALGKLQDVVNQNAQALNTLVKQLSSNFGAISSVLNDILSRLDKVEAEVQIDRLITGRLQSLQTYVTQQLIRAAEIRASANLAATKMSECVLGQSKRVDFCGKGYHLMSFPQCAPHGVVFLHVTYVPAQEKNFTTAPAICHDGKAHFPREGVFVSNGTHWFVTQRNFYEPQIITTDNTFVSGNCDVVIGIVNNTVYDPLQPELDSFKEELDKYFKNHTSPDVDLGDISGINASVVNIQKEIDRLNEVAKNLNESLIDLQELGKYEQYIKGGGGSDIDPYKEFGSSYQLLNFLPLDFFPDLNALVDTATALYEEELTGREHCSPHHTAIRQALVCWDELTKLIAWMSSNITSEQVRTIIVNHVNDTWGLKVRQSLWFHLSCLTFGQHTVQEFLVSFGVWIRTPAPYRPPNAPILSTLPEHTVIC

SEQ ID NO: 7583 - protein, 1365 aa, Artificial Sequence
  SARS-CoV-2/France/IDF0372/2020__EPI_ISL_406596 spike protein (1-1211)(T874C_S1055C) WhcAg construct
MFVFLVLLPLVSSQCVNLTTRTQLPPAYTNSFTRGVYYPDKVFRSSVLHSTQDLFLPFFSNVTWFHAIHVSGTNGTKRFDNPVLPFNDGVYFASTEKSNIIRGWIFGTTLDSKTQSLLIVNNATNVVIKVCEFQFCNDPFLGVYYHKNNKSWMESEFRVYSSANNCTFEYVSQPFLMDLEGKQGNFKNLREFVFKNIDGYFKIYSKHTPINLVRDLPQGFSALEPLVDLPIGINITRFQTLLALHRSYLTPGDSSSGWTAGAAAYYVGYLQPRTFLLKYNENGTITDAVDCALDPLSETKCTLKSFTVEKGIYQTSNFRVQPTESIVRFPNITNLCPFGEVFNATRFASVYAWNRKRISNCVADYSFLYNSASFSTFKCYGVSPTKLNDLCFTNVYADSFVIRGDEVRQIAPGQTGKIADYNYKLPDDFTGCVIAWNSNNLDSKVGGNYNYLYRLFRKSNLKPFERDISTEIYQAGSTPCNGVEGFNCYFPLQSYGFQPTNGVGYQPYRVVVLSFELLHAPATVCGPKKSTNLVKNKCVNFNFNGLTGTGVLTESNKKFLPFQQFGRDIADTTDAVRDPQTLEILDITPCSFGGVSVITPGTNTSNQVAVLYQDVNCTEVPVAIHADQLTPTWRVYSTGSNVFQTRAGCLIGAEHVNNSYECDIPIGAGICASYQTQTNSPRRARSVASQSIIAYTMSLGAENSVAYSNNSIAIPTNFTISVTTEILPVSMTKTSVDCTMYICGDSTECSNLLLQYGSFCTQLNRALTGIAVEQDKNTQEVFAQVKQIYKTPPIKDFGGFNFSQILPDPSKPSKRSFIEDLLFNKVTLADAGFIKQYGDCLGDIAARDLICAQKFNGLTVLPPLLTDEMIAQYCSALLAGTITSGWTFGAGAALQIPFAMQMAYRFNGIGVTQNVLYENQKLIANQFNSAIGKIQDSLSSTASALGKLQDVVNQNAQALNTLVKQLSSNFGAISSVLNDILSRLDKVEAEVQIDRLITGRLQSLQTYVTQQLIRAAEIRASANLAATKMSECVLGQSKRVDFCGKGYHLMSFPQCAPHGVVFLHVTYVPAQEKNFTTAPAICHDGKAHFPREGVFVSNGTHWFVTQRNFYEPQIITTDNTFVSGNCDVVIGIVNNTVYDPLQPELDSFKEELDKYFKNHTSPDVDLGDISGINASVVNIQKEIDRLNEVAKNLNESLIDLQELGKYEQYIKGGGGSDIDPYKEFGSSYQLLNFLPLDFFPDLNALVDTATALYEEELTGREHCSPHHTAIRQALVCWDELTKLIAWMSSNITSEQVRTIIVNHVNDTWGLKVRQSLWFHLSCLTFGQHTVQEFLVSFGVWIRTPAPYRPPNAPILSTLPEHTVIC

SEQ ID NO: 7584 - protein, 1365 aa, Artificial Sequence
  SARS-CoV-2/Australia/VIC01/2020__EPI_ISL_406844 spike protein (1-1211)(T874C_S1055C) WhcAg construct
MFVFLVLLPLVSSQCVNLTTRTQLPPAYTNSFTRGVYYPDKVFRSSVLHSTQDLFLPFFSNVTWFHAIHVSGTNGTKRFDNPVLPFNDGVYFASTEKSNIIRGWIFGTTLDSKTQSLLIVNNATNVVIKVCEFQFCNDPFLGVYYHKNNKSWMESEFRVYSSANNCTFEYVSQPFLMDLEGKQGNFKNLREFVFKNIDGYFKIYSKHTPINLVRDLPQGFSALEPLVDLPIGINITRFQTLLALHRRYLTPGDSSSGWTAGAAAYYVGYLQPRTFLLKYNENGTITDAVDCALDPLSETKCTLKSFTVEKGIYQTSNFRVQPTESIVRFPNITNLCPFGEVFNATRFASVYAWNRKRISNCVADYSVLYNSASFSTFKCYGVSPTKLNDLCFTNVYADSFVIRGDEVRQIAPGQTGKIADYNYKLPDDFTGCVIAWNSNNLDSKVGGNYNYLYRLFRKSNLKPFERDISTEIYQAGSTPCNGVEGFNCYFPLQSYGFQPTNGVGYQPYRVVVLSFELLHAPATVCGPKKSTNLVKNKCVNFNFNGLTGTGVLTESNKKFLPFQQFGRDIADTTDAVRDPQTLEILDITPCSFGGVSVITPGTNTSNQVAVLYQDVNCTEVPVAIHADQLTPTWRVYSTGSNVFQTRAGCLIGAEHVNNSYECDIPIGAGICASYQTQTNSPRRARSVASQSIIAYTMSLGAENSVAYSNNSIAIPTNFTISVTTEILPVSMTKTSVDCTMYICGDSTECSNLLLQYGSFCTQLNRALTGIAVEQDKNTQEVFAQVKQIYKTPPIKDFGGFNFSQILPDPSKPSKRSFIEDLLFNKVTLADAGFIKQYGDCLGDIAARDLICAQKFNGLTVLPPLLTDEMIAQYCSALLAGTITSGWTFGAGAALQIPFAMQMAYRFNGIGVTQNVLYENQKLIANQFNSAIGKIQDSLSSTASALGKLQDVVNQNAQALNTLVKQLSSNFGAISSVLNDILSRLDKVEAEVQIDRLITGRLQSLQTYVTQQLIRAAEIRASANLAATKMSECVLGQSKRVDFCGKGYHLMSFPQCAPHGVVFLHVTYVPAQEKNFTTAPAICHDGKAHFPREGVFVSNGTHWFVTQRNFYEPQIITTDNTFVSGNCDVVIGIVNNTVYDPLQPELDSFKEELDKYFKNHTSPDVDLGDISGINASVVNIQKEIDRLNEVAKNLNESLIDLQELGKYEQYIKGGGGSDIDPYKEFGSSYQLLNFLPLDFFPDLNALVDTATALYEEELTGREHCSPHHTAIRQALVCWDELTKLIAWMSSNITSEQVRTIIVNHVNDTWGLKVRQSLWFHLSCLTFGQHTVQEFLVSFGVWIRTPAPYRPPNAPILSTLPEHTVIC

SEQ ID NO: 7585 - protein, 1365 aa, Artificial Sequence
  SARS-CoV-2/Germany/BavPat1/2020__EPI_ISL_406862 spike protein (1-1211)(T874C_S1055C) WhcAg construct
MFVFLVLLPLVSSQCVNLTTRTQLPPAYTNSFTRGVYYPDKVFRSSVLHSTQDLFLPFFSNVTWFHAIHVSGTNGTKRFDNPVLPFNDGVYFASTEKSNIIRGWIFGTTLDSKTQSLLIVNNATNVVIKVCEFQFCNDPFLGVYYHKNNKSWMESEFRVYSSANNCTFEYVSQPFLMDLEGKQGNFKNLREFVFKNIDGYFKIYSKHTPINLVRDLPQGFSALEPLVDLPIGINITRFQTLLALHRSYLTPGDSSSGWTAGAAAYYVGYLQPRTFLLKYNENGTITDAVDCALDPLSETKCTLKSFTVEKGIYQTSNFRVQPTESIVRFPNITNLCPFGEVFNATRFASVYAWNRKRISNCVADYSVLYNSASFSTFKCYGVSPTKLNDLCFTNVYADSFVIRGDEVRQIAPGQTGKIADYNYKLPDDFTGCVIAWNSNNLDSKVGGNYNYLYRLFRKSNLKPFERDISTEIYQAGSTPCNGVEGFNCYFPLQSYGFQPTNGVGYQPYRVVVLSFELLHAPATVCGPKKSTNLVKNKCVNFNFNGLTGTGVLTESNKKFLPFQQFGRDIADTTDAVRDPQTLEILDITPCSFGGVSVITPGTNTSNQVAVLYQGVNCTEVPVAIHADQLTPTWRVYSTGSNVFQTRAGCLIGAEHVNNSYECDIPIGAGICASYQTQTNSPRRARSVASQSIIAYTMSLGAENSVAYSNNSIAIPTNFTISVTTEILPVSMTKTSVDCTMYICGDSTECSNLLLQYGSFCTQLNRALTGIAVEQDKNTQEVFAQVKQIYKTPPIKDFGGFNFSQILPDPSKPSKRSFIEDLLFNKVTLADAGFIKQYGDCLGDIAARDLICAQKFNGLTVLPPLLTDEMIAQYCSALLAGTITSGWTFGAGAALQIPFAMQMAYRFNGIGVTQNVLYENQKLIANQFNSAIGKIQDSLSSTASALGKLQDVVNQNAQALNTLVKQLSSNFGAISSVLNDILSRLDKVEAEVQIDRLITGRLQSLQTYVTQQLIRAAEIRASANLAATKMSECVLGQSKRVDFCGKGYHLMSFPQCAPHGVVFLHVTYVPAQEKNFTTAPAICHDGKAHFPREGVFVSNGTHWFVTQRNFYEPQIITTDNTFVSGNCDVVIGIVNNTVYDPLQPELDSFKEELDKYFKNHTSPDVDLGDISGINASVVNIQKEIDRLNEVAKNLNESLIDLQELGKYEQYIKGGGGSDIDPYKEFGSSYQLLNFLPLDFFPDLNALVDTATALYEEELTGREHCSPHHTAIRQALVCWDELTKLIAWMSSNITSEQVRTIIVNHVNDTWGLKVRQSLWFHLSCLTFGQHTVQEFLVSFGVWIRTPAPYRPPNAPILSTLPEHTVIC

SEQ ID NO: 7586 - protein, 1365 aa, Artificial Sequence
  SARS-CoV-2/Wuhan/HBCDC-HB-02/2020__EPI_ISL_412978 spike protein (1-1211)(T874C_S1055C) WhcAg construct
MFVFLVLLPLVSSQCVNLTTRTQLPPAYTNSFTRGVYYPDKVFRSSVLHSTQDLFLPFFSNVTWFHAIHVSGTNGTKRFDNPVLPFNDGVYFASTEKSNIIRGWIFGTTLDSKTQSLLIVNNATNVVIKVCEFQFCNDPFLGVYYHKNNKSWMESEFRVYSSANNCTFEYVSQPFLMDLEGKQGNFKNLREFVFKNIDGYFKIYSKHTPINLVRDLPQGFSALEPLVDLPIGINITRFQTLLALHRSYLTPGDSSSGWTAGAAAYYVGYLQPRTFLLKYNENGTITDAVDCALDPLSETKCTLKSFTVEKGIYQTSNFRVQPTESIVRFPNITNLCPFGEVFNATRFASVYAWNRKRISNCVADYSVLYNSASFSTFKCYGVSPTKLNDLCFTNVYADSFVIRGDEVRQIAPGQTGKIADYNYKLPDDFTGCVIAWNSNNLDSKVGGNYNYLYRLFRKSNLKPFERDISTEIYQAGSTPCNGVEGFNCYFPLQSYGFQPTNGVGYQPYRVVVLSFELLHAPATVCGPKKSTNLVKNKCVNFNFNGLTGTGVLTESNKKFLPFQQFGRDIADTTDAVRDPQTLEILDITPCSFGGVSVITPGTNTSNQVAVLYQDVNCTEVPVAIHADQLTPTWRVYSTGSNVFQTRAGCLIGAEHVNNSYECDIPIGAGICASYQTQTNSPRRARSVASQSIIAYTMSLGAENSVAYSNNSIAIPTNFTISVTTEILPVSMTKTSVDCTMYICGDSTECSNFLLQYGSFCTQLNRALTGIAVEQDKNTQEVFAQVKQIYKTPPIKDFGGFNFSQILPDPSKPSKRSFIEDLLFNKVTLADAGFIKQYGDCLGDIAARDLICAQKFNGLTVLPPLLTDEMIAQYCSALLAGTITSGWTFGAGAALQIPFAMQMAYRFNGIGVTQNVLYENQKLIANQFNSAIGKIQDSLSSTASALGKLQDVVNQNAQALNTLVKQLSSNFGAISSVLNDILSRLDKVEAEVQIDRLITGRLQSLQTYVTQQLIRAAEIRASANLAATKMSECVLGQSKRVDFCGKGYHLMSFPQCAPHGVVFLHVTYVPAQEKNFTTAPAICHDGKAHFPREGVFVSNGTHWFVTQRNFYEPQIITTDNTFVSGNCDVVIGIVNNTVYDPLQPELDSFKEELDKYFKNHTSPDVDLGDISGINASVVNIQKEIDRLNEVAKNLNESLIDLQELGKYEQYIKGGGGSDIDPYKEFGSSYQLLNFLPLDFFPDLNALVDTATALYEEELTGREHCSPHHTAIRQALVCWDELTKLIAWMSSNITSEQVRTIIVNHVNDTWGLKVRQSLWFHLSCLTFGQHTVQEFLVSFGVWIRTPAPYRPPNAPILSTLPEHTVIC

SEQ ID NO: 7587 - protein, 1365 aa, Artificial Sequence
  SARS-CoV-2/Australia/QLD02/2020__EPI_ISL_407896 spike protein (1-1211)(T874C_S1055C) WhcAg construct
MFVFLVLLPLVSSQCVNLTTRTQLPPAYTNSFTRGVYYPDKVFRSSVLHSTQDLFLPFFSNVTWFHAIHVSGTNGTKRFDNPVLPFNDGVYFASTEKSNIIRGWIFGTTLDSKTQSLLIVNNATNVVIKVCEFQFCNDPFLGVYYHKNNKSWMESEFRVYSSANNCTFEYVSQPFLMDLEGKQGNFKNLREFVFKNIDGYFKIYSKHTPINLVRDLPQGFSALEPLVDLPIGINITRFQTLLALHRSYLTPGDSSSGWTAGAAAYYVGYLQPRTFLLKYNENGTITDAVDCALDPLSETKCTLKSFTVEKGIYQTSNFRVQPTESIVRFPNITNLCPFGEVFNATRFASVYAWNRKRISNCVADYSVLYNSASFSTFKCYGVSPTKLNDLCFTNVYADSFVIRGDEVRQIAPGQTGKIADYNYKLPDDFTGCVIAWNSNNLDSKVGGNYNYLYRLFRKSNLKPFERDISTEIYQAGSTPCNGVEGFNCYFPLQSYGFQPTNGVGYQPYRVVVLSFELLHAPATVCGPKKSTNLVKNKCVNFNFNGLTGTGVLTESNKKFLPFQQFGRDIADTTDAVRDPQTLEILDITPCSFGGVSVITPGTNTSNQVAVLYQDVNCTEVPVAIHADQLTPTWRVYSTGSNVFQTRAGCLIGAEHVNNSYECDIPIGAGICASYQTQTNSPRRARSVASQSIIAYTMSLGAENSVAYSNNSIAIPTNFTISVTTEILPVSMTKTSVDCTMYICGDSTECSNLLLQYGSFCTQLNRALTGIAVEQDKNTQEVFAQVKQIYKTPPIKDFGGFNFSQILPDPSKPSKRSFIEDLLFNKVTLADAGFIKQYGDCLGDIAARDLICAQKFNGLTVLPPLLTDEMIAQYCSALLAGTITSGWTFGAGAALQIPFAMQMAYRFNGIGVTQNVLYENQKLIANQFNSAIGKIQDSLSSTASALGKLQDVVNQNAQALNTLVKQLSSNFGAISSVLNDILSRLDKVEAEVQIDRLITGRLQSLQTYVTQQLIRAAEIRASANLAATKMSECVLGQSKRVDFCGKGYHLMSFPQCAPHGVVFLHVTYVPAQEKNFTTAPAICHDGKAHFPREGVFVSNGTHWFVTQRNFYEPQIITTDNTFVSGNCDVVIGIVNNTVYDPLQLELDSFKEELDKYFKNHTSPDVDLGDISGINASVVNIQKEIDRLNEVAKNLNESLIDLQELGKYEQYIKGGGGSDIDPYKEFGSSYQLLNFLPLDFFPDLNALVDTATALYEEELTGREHCSPHHTAIRQALVCWDELTKLIAWMSSNITSEQVRTIIVNHVNDTWGLKVRQSLWFHLSCLTFGQHTVQEFLVSFGVWIRTPAPYRPPNAPILSTLPEHTVIC

SEQ ID NO: 7588 - protein, 1365 aa, Artificial Sequence
  SARS-CoV-2/India/1-31/2020__EPI_ISL_413523 spike protein (1-1211)(T874C_S1055C) WhcAg construct
MFVFLVLLPLVSSQCVNLTTRTQLPPAYTNSFTRGVYYPDKVFRSSVLHSTQDLFLPFFSNVTWFHAIHVSGTNGTKRFDNPVLPFNDGVYFASTEKSNIIRGWIFGTTLDSKTQSLLIVNNATNVVIKVCEFQFCNDPFLGVYYHKNNKSWMESEFRVYSSANNCTFEYVSQPFLMDLEGKQGNFKNLREFVFKNIDGYFKIYSKHTPINLVRDLPQGFSALEPLVDLPIGINITRFQTLLALHRSYLTPGDSSSGWTAGAAAYYVGYLQPRTFLLKYNENGTITDAVDCALDPLSETKCTLKSFTVEKGIYQTSNFRVQPTESIVRFPNITNLCPFGEVFNATRFASVYAWNRKRISNCVADYSVLYNSASFSTFKCYGVSPTKLNDLCFTNVYADSFVIRGDEVRQIAPGQTGKIADYNYKLPDDFTGCVIAWNSNNLDSKVGGNYNYLYRLFRKSNLKPFERDISTEIYQAGSTPCNGVEGFNCYFPLQSYGFQPTNGVGYQPYRVVVLSFELLHAPATVCGPKKSTNLVKNKCVNFNFNGLTGTGVLTESNKKFLPFQQFGRDIADTTDAVRDPQTLEILDITPCSFGGVSVITPGTNTSNQVAVLYQDVNCTEVPVAIHADQLTPTWRVYSTGSNVFQTRAGCLIGAEHVNNSYECDIPIGAGICASYQTQTNSPRRARSVASQSIIAYTMSLGAENSVAYSNNSIAIPTNFTISVTTEILPVSMTKTSVDCTMYICGDSTECSNLLLQYGSFCTQLNRALTGIAVEQDKNTQEVFAQVKQIYKTPPIKDFGGFNFSQILPDPSKPSKRSFIEDLLFNKVTLADAGFIKQYGDCLGDIAARDLICAQKFNGLTVLPPLLTDEMIAQYCSALLAGTITSGWTFGAGAALQIPFAMQMAYRFNGIGVTQNVLYENQKLIANQFNSVIGKIQDSLSSTASALGKLQDVVNQNAQALNTLVKQLSSNFGAISSVLNDILSRLDKVEAEVQIDRLITGRLQSLQTYVTQQLIRAAEIRASANLAATKMSECVLGQSKRVDFCGKGYHLMSFPQCAPHGVVFLHVTYVPAQEKNFTTAPAICHDGKAHFPREGVFVSNGTHWFVTQRNFYEPQIITTDNTFVSGNCDVVIGIVNNTVYDPLQPELDSFKEELDKYFKNHTSPDVDLGDISGINASVVNIQKEIDRLNEVAKNLNESLIDLQELGKYEQYIKGGGGSDIDPYKEFGSSYQLLNFLPLDFFPDLNALVDTATALYEEELTGREHCSPHHTAIRQALVCWDELTKLIAWMSSNITSEQVRTIIVNHVNDTWGLKVRQSLWFHLSCLTFGQHTVQEFLVSFGVWIRTPAPYRPPNAPILSTLPEHTVIC

SEQ ID NO: 7589 - protein, 1365 aa, Artificial Sequence
  SARS-CoV-2/Guangdong/GD2020087-P0008/2020__EPI_ISL_413863 spike protein (1-1211)(T874C_S1055C) WhcAg construct
MFVFLVLLPLVSSQCVNLTTRTQLPPAYTNSFTRGVYYPDKVFRSSVLHSTQDLFLPFFSNVTWFHAIHVSGTNGTKRFDNPVLPFNDGVYFASTEKSNIIRGWIFGTTLDSKTQSLLIVNNATNVVIKVCEFQFCNDPFLGVYYHKNNKSWMESEFRVYSSANNCTFEYVSQPFLMDLEGKQGNFKNLREFVFKNIDGYFKIYSKHTPINLVRDLPQGFSALEPLVDLPIGINITRFQTLLALHRSYLTPGDSSSGWTAGAAAYYVGYLQPRTFLLKYNENGTITDAVDCALDPLSETKCTLKSFTVEKGIYQTSNFRVQPTESIVRFPNITNLCPFGEVFNATRFASVYAWNRKRISNCVADYSVLYNSASFSTFKCYGVSPTKLNDLCFTNVYADSFVIRGDEVREIAPGQTGKIADYNYKLPDDFTGCVIAWNSNNLDSKVGGNYNYLYRLFRKSNLKPFERDISTEIYQAGSTPCNGVEGFNCYFPLQSYGFQPTNGVGYQPYRVVVLSFELLHAPATVCGPKKSTNLVKNKCVNFNFNGLTGTGVLTESNKKFLPFQQFGRDIADTTDAVRDPQTLEILDITPCSFGGVSVITPGTNTSNQVAVLYQDVNCTEVPVAIHADQLTPTWRVYSTGSNVFQTRAGCLIGAEHVNNSYECDIPIGAGICASYQTQTNSPRRARSVASQSIIAYTMSLGAENSVAYSNNSIAIPTNFTISVTTEILPVSMTKTSVDCTMYICGDSTECSNLLLQYGSFCTQLNRALTGIAVEQDKNTQEVFAQVKQIYKTPPIKDFGGFNFSQILPDPSKPSKRSFIEDLLFNKVTLADAGFIKQYGDCLGDIAARDLICAQKFNGLTVLPPLLTDEMIAQYCSALLAGTITSGWTFGAGAALQIPFAMQMAYRFNGIGVTQNVLYENQKLIANQFNSAIGKIQDSLSSTASALGKLQDVVNQNAQALNTLVKQLSSNFGAISSVLNDILSRLDKVEAEVQIDRLITGRLQSLQTYVTQQLIRAAEIRASANLAATKMSECVLGQSKRVDFCGKGYHLMSFPQCAPHGVVFLHVTYVPAQEKNFTTAPAICHDGKAHFPREGVFVSNGTHWFVTQRNFYEPQIITTDNTFVSGNCDVVIGIVNNTVYDPLQPELDSFKEELDKYFKNHTSPDVDLGDISGINASVVNIQKEIDRLNEVAKNLNESLIDLQELGKYEQYIKGGGGSDIDPYKEFGSSYQLLNFLPLDFFPDLNALVDTATALYEEELTGREHCSPHHTAIRQALVCWDELTKLIAWMSSNITSEQVRTIIVNHVNDTWGLKVRQSLWFHLSCLTFGQHTVQEFLVSFGVWIRTPAPYRPPNAPILSTLPEHTVIC

SEQ ID NO: 7590 - protein, 1365 aa, Artificial Sequence
  SARS-CoV-2/Sweden/01/2020__EPI_ISL_411951 spike protein (1-1211)(T874C_S1055C) WhcAg construct
MFVFLVLLPLVSSQCVNLTTRTQLPPAYTNSFTRGVYYPDKVFRSSVLHSTQDLFLPFFSNVTWFHAIHVSGTNGTKRFDNPVLPFNDGVYFASTEKSNIIRGWIFGTTLDSKTQSLLIVNNATNVVIKVCEFQFCNDPFLGVYYHKNNKSWMESEFRVYSSANNCTFEYVSQPFLMDLEGKQGNFKNLREFVFKNIDGYFKIYSKHTPINLVRDLPQGFSALEPLVDLPIGINITRFQTLLALHRSYLTPGDSSSGWTAGAAAYYVGYLQPRTFLLKYNENGTITDAVDCALDPLSETKCTLKSFTVEKGIYQTSNFRVQPTESIVRFPNITNLCPFGEVFNATRFASVYAWNRKRISNCVADYSVLYNSASFSTFKCYGVSPTKLNDLCFTNVYADSFVIRGDEVRQIAPGQTGKIADYNYKLPDDFTGCVIAWNSNNLDSKVGGNYNYLYRLFRKSNLKPFERDISTEIYQAGSTPCNGVEGFNCYFPLQSYGFQPTNGVGYQPYRVVVLSFELLHAPATVCGPKKSTNLVKNKCVNFNFNGLTGTGVLTESNKKFLPFQQFGRDIADTTDAVRDPQTLEILDITPCSFGGVSVITPGTNTSNQVAVLYQDVNCTEVPVAIHADQLTPTWRVYSTGSNVFQTRAGCLIGAEHVNNSYECDIPIGAGICASYQTQTNSPRRARSVASQSIIAYTMSLGAENSVAYSNNSIAIPTNFTISVTTEILPVSMTKTSVDCTMYICGDSTECSNLLLQYGSFCTQLNRALTGIAVEQDKNTQEVFAQVKQIYKTPPIKDCGGFNFSQILPDPSKPSKRSFIEDLLFNKVTLADAGFIKQYGDCLGDIAARDLICAQKFNGLTVLPPLLTDEMIAQYCSALLAGTITSGWTFGAGAALQIPFAMQMAYRFNGIGVTQNVLYENQKLIANQFNSAIGKIQDSLSSTASALGKLQDVVNQNAQALNTLVKQLSSNFGAISSVLNDILSRLDKVEAEVQIDRLITGRLQSLQTYVTQQLIRAAEIRASANLAATKMSECVLGQSKRVDFCGKGYHLMSFPQCAPHGVVFLHVTYVPAQEKNFTTAPAICHDGKAHFPREGVFVSNGTHWFVTQRNFYEPQIITTDNTFVSGNCDVVIGIVNNTVYDPLQPELDSFKEELDKYFKNHTSPDVDLGDISGINASVVNIQKEIDRLNEVAKNLNESLIDLQELGKYEQYIKGGGGSDIDPYKEFGSSYQLLNFLPLDFFPDLNALVDTATALYEEELTGREHCSPHHTAIRQALVCWDELTKLIAWMSSNITSEQVRTIIVNHVNDTWGLKVRQSLWFHLSCLTFGQHTVQEFLVSFGVWIRTPAPYRPPNAPILSTLPEHTVIC

SEQ ID NO: 7591 - protein, 1365 aa, Artificial Sequence
  SARS-CoV-2/Tianmen/HBCDC-HB-07/2020__EPI_ISL_412983 spike protein (1-1211)(T874C_S1055C) WhcAg construct
MFVFLVLLPLVSSQCVNLTTRTQLPPAYTNSFTRGVYYPDKVFRSSVLHSTQDLFLPFFSNVTWFHAIHVSGTNGTKRFDNPVLPFNDGVYFASTEKSNIIRGWIFGTTLDSKTQSLLIVNNATNVVIKVCEFQFCNDPFLGVYYHKNNKSWMESEFRVYSSANNCTFEYVSQPFLMDLEGKQGNFKNLREFVFKNIDGYFKIYSKHTPINLVRDLPQGFSALEPLVDLPIGINITRFQTLLALHRSYLTPGDSSSGWTAGAAAYYVGYLQPRTFLLKYNENGTITDAVDCALDPLSETKCTLKSFTVEKGIYQTSNFRVQPTESIVRFPNITNLCPFGEVFNATRFASVYAWNRKRISNCVADYSVLYNSASFSTFKCYGVSPTKLNDLCFTNVYADSFVIRGDEVRQIAPGQTGKIADYNYKLPDDFTGCVIAWNSNNLDSKVGGNYNYLYRLFRKSNLKPFERDISTEIYQAGSTPCNGVEGFNCYFPLQSYGFQPTNGVGYQPYRVVVLSFELLHAPATVCGPKKSTNLVKNKCVNFNFNGLTGTGVLTESNKKFLPFQQFGRDIADTTDAVRDPQTLEILDITPCSFGGVSVITPGTNTSNQVAVLYQDLNCTEVPVAIHADQLTPTWRVYSTGSNVFQTRAGCLIGAEHVNNSYECDIPIGAGICASYQTQTNSPRRARSVASQSIIAYTMSLGAENSVAYSNNSIAIPTNFTISVTTEILPVSMTKTSVDCTMYICGDSTECSNLLLQYGSFCTQLNRALTGIAVEQDKNTQEVFAQVKQIYKTPPIKDFGGFNFSQILPDPSKPSKRSFIEDLLFNKVTLADAGFIKQYGDCLGDIAARDLICAQKFNGLTVLPPLLTDEMIAQYCSALLAGTITSGWTFGAGAALQIPFAMQMAYRFNGIGVTQNVLYENQKLIANQFNSAIGKIQDSLSSTASALGKLQDVVNQNAQALNTLVKQLSSNFGAISSVLNDILSRLDKVEAEVQIDRLITGRLQSLQTYVTQQLIRAAEIRASANLAATKMSECVLGQSKRVDFCGKGYHLMSFPQCAPHGVVFLHVTYVPAQEKNFTTAPAICHDGKAHFPREGVFVSNGTHWFVTQRNFYEPQIITTDNTFVSGNCDVVIGIVNNTVYDPLQPELDSFKEELDKYFKNHTSPDVDLGDISGINASVVNIQKEIDRLNEVAKNLNESLIDLQELGKYEQYIKGGGGSDIDPYKEFGSSYQLLNFLPLDFFPDLNALVDTATALYEEELTGREHCSPHHTAIRQALVCWDELTKLIAWMSSNITSEQVRTIIVNHVNDTWGLKVRQSLWFHLSCLTFGQHTVQEFLVSFGVWIRTPAPYRPPNAPILSTLPEHTVIC

SEQ ID NO: 7592 - protein, 1365 aa, Artificial Sequence
  SARS-CoV-2/Hong Kong/case42_VM20002493/2020__EPI_ISL_414527 spike protein (1-1211)(T874C_S1055C) WhcAg construct
MFVFLVLLPLVSSQCVNLTTRTQLPPAYTNSFTRGVYYPDKVFRSSVLHSTQDLFLPFFSNVTWFHAIHVSGTNGTKRFDNPVLPFNDGVYFASTEKSNIIRGWIFGTTLDSKTQSLLIVNNATNVVIKVCEFQFCNDPFLGVYYHKNNKSWMESEFRVYSSANNCTFEYVSQPFLMDLEGKQGNFKNLREFVFKNIDGYFKIYSKHTPINLVRDLPQGFSALEPLVDLPIGINITRFQTLLALHRSYLTPGDSSSGWTAGAAAYYVGYLQPRTFLLKYNENGTITDAVDCALDPLSETKCTLKSFTVEKGIYQTSNFRVQPTESIVRFPNITNLCPFGEVFNATRFASVYAWNRKRISNCVADYSVLYNSASFSTFKCYGVSPTKLNDLCFTNVYADSFVIRGDEVRQIAPGQTGKIADYNYKLPDDFTGCVIAWNSNNLDSKVGGNYNYLYRLFRKSNLKPFERDISTEIYQAGSTPCNGVEGFNCYFPLQSYGFQPTNGVGYQPYRVVVLSFELLHAPATVCGPKKSTNLVKNKCVNFNFNGLTGTGVLTESNKKFLPFQQFGRDIADTTDAVRDPQTLEILDITPCSFGGVSVITPGTNTSNQVAVLYQDVNCTEVPVAIHADQLTPTWRVYSTGSNVFQTRAGCLIGAEHVNNSYECDIPIGAGICASYQTQTNSPRRARSVASQSIIAYTMSLGAENSVAYSNNSIAIPTNFAISVTTEILPVSMTKTSVDCTMYICGDSTECSNLLLQYGSFCTQLNRALTGIAVEQDKNTQEVFAQVKQIYKTPPIKDFGGFNFSQILPDPSKPSKRSFIEDLLFNKVTLADAGFIKQYGDCLGDIAARDLICAQKFNGLTVLPPLLTDEMIAQYCSALLAGTITSGWTFGAGAALQIPFAMQMAYRFNGIGVTQNVLYENQKLIANQFNSAIGKIQDSLSSTASALGKLQDVVNQNAQALNTLVKQLSSNFGAISSVLNDILSRLDKVEAEVQIDRLITGRLQSLQTYVTQQLIRAAEIRASANLAATKMSECVLGQSKRVDFCGKGYHLMSFPQCAPHGVVFLHVTYVPAQEKNFTTAPAICHDGKAHFPREGVFVSNGTHWFVTQRNFYEPQIITTDNTFVSGNCDVVIGIVNNTVYDPLQPELDSFKEELDKYFKNHTSPDVDLGDISGINASVVNIQKEIDRLNEVAKNLNESLIDLQELGKYEQYIKGGGGSDIDPYKEFGSSYQLLNFLPLDFFPDLNALVDTATALYEEELTGREHCSPHHTAIRQALVCWDELTKLIAWMSSNITSEQVRTIIVNHVNDTWGLKVRQSLWFHLSCLTFGQHTVQEFLVSFGVWIRTPAPYRPPNAPILSTLPEHTVIC

SEQ ID NO: 7593 - protein, 1365 aa, Artificial Sequence
  SARS-CoV-2/USA/CruiseA-23/2020__EPI_ISL_414482 spike protein (1-1211)(T874C_S1055C) WhcAg construct
MFVFLVLLPLVSSQCVNLTTRTQLPPAYTNSFTRGVYYPDKVFRSSVLHSTQDLFLPFFSNVTWFHAIHVSGTNGTKRFDNPVLPFNDGVYFASTEKSNIIRGWIFGTTLDSKTQSLLIVNNATNVVIKVCEFQFCNDPFLGVYYHKNNKSWMESEFRVYSSANNCTFEYVSQPFLMDLEVKQGNFKNLREFVFKNIDGYFKIYSKHTPINLVRDLPQGFSALEPLVDLPIGINITRFQTLLALHRSYLTPGDSSSGWTAGAAAYYVGYLQPRTFLLKYNENGTITDAVDCALDPLSETKCTLKSFTVEKGIYQTSNFRVQPTESIVRFPNITNLCPFGEVFNATRFASVYAWNRKRISNCVADYSVLYNSASFSTFKCYGVSPTKLNDLCFTNVYADSFVIRGDEVRQIAPGQTGKIADYNYKLPDDFTGCVIAWNSNNLDSKVGGNYNYLYRLFRKSNLKPFERDISTEIYQAGSTPCNGVEGFNCYFPLQSYGFQPTNGVGYQPYRVVVLSFELLHAPATVCGPKKSTNLVKNKCVNFNFNGLTGTGVLTESNKKFLPFQQFGRDIADTTDAVRDPQTLEILDITPCSFGGVSVITPGTNTSNQVAVLYQDVNCTEVPVAIHADQLTPTWRVYSTGSNVFQTRAGCLIGAEHVNNSYECDIPIGAGICASYQTQTNSPRRARSVASQSIIAYTMSLGAENSVAYSNNSIAIPTNFTISVTTEILPVSMTKTSVDCTMYICGDSTECSNLLLQYGSFCTQLNRALTGIAVEQDKNTQEVFAQVKQIYKTPPIKDFGGFNFSQILPDPSKPSKRSFIEDLLFNKVTLADAGFIKQYGDCLGDIAARDLICAQKFNGLTVLPPLLTDEMIAQYCSALLAGTITSGWTFGAGAALQIPFAMQMAYRFNGIGVTQNVLYENQKLIANQFNSAIGKIQDSLSSTASALGKLQDVVNQNAQALNTLVKQLSSNFGAISSVLNDILSRLDKVEAEVQIDRLITGRLQSLQTYVTQQLIRAAEIRASANLAATKMSECVLGQSKRVDFCGKGYHLMSFPQCAPHGVVFLHVTYVPAQEKNFTTAPAICHDGKAHFPREGVFVSNGTHWFVTQRNFYEPQIITTDNTFVSGNCDVVIGIVNNTVYDPLQPELDSFKEELDKYFKNHTSPDVDLGDISGINASVVNIQKEIDRLNEVAKNLNESLIDLQELGKYEQYIKGGGGSDIDPYKEFGSSYQLLNFLPLDFFPDLNALVDTATALYEEELTGREHCSPHHTAIRQALVCWDELTKLIAWMSSNITSEQVRTIIVNHVNDTWGLKVRQSLWFHLSCLTFGQHTVQEFLVSFGVWIRTPAPYRPPNAPILSTLPEHTVIC

SEQ ID NO: 7594 - protein, 1365 aa, Artificial Sequence
  SARS-CoV-2/Hong Kong/case85_VM20002868/2020__EPI_ISL_414519 spike protein (1-1211)(T874C_S1055C) WhcAg construct
MFVFLVLVPLVSSQCVNLTTRTQLPPAYTNSFTRGVYYPDKVFRSSVLHSTQDLFLPFFSNVTWFHAIHVSGTNGTKRFDNPVLPFNDGVYFASTEKSNIIRGWIFGTTLDSKTQSLLIVNNATNVVIKVCEFQFCNDPFLGVYYHKNNKSWMESEFRVYSSANNCTFEYVSQPFLMDLEGKQGNFKNLREFVFKNIDGYFKIYSKHTPINLVRDLPQGFSALEPLVDLPIGINITRFQTLLALHRSYLTPGDSSSGWTAGAAAYYVGYLQPRTFLLKYNENGTITDAVDCALDPLSETKCTLKSFTVEKGIYQTSNFRVQPTESIVRFPNITNLCPFGEVFNATRFASVYAWNRKRISNCVADYSVLYNSASFSTFKCYGVSPTKLNDLCFTNVYADSFVIRGDEVRQIAPGQTGKIADYNYKLPDDFTGCVIAWNSNNLDSKVGGNYNYLYRLFRKSNLKPFERDISTEIYQAGSTPCNGVEGFNCYFPLQSYGFQPTNGVGYQPYRVVVLSFELLHAPATVCGPKKSTNLVKNKCVNFNFNGLTGTGVLTESNKKFLPFQQFGRDIADTTDAVRDPQTLEILDITPCSFGGVSVITPGTNTSNQVAVLYQDVNCTEVPVAIHADQLTPTWRVYSTGSNVFQTRAGCLIGAEHVNNSYECDIPIGAGICASYQTQTNSPRRARSVASQSIIAYTMSLGAENSVAYSNNSIAIPTNFTISVTTEILPVSMTKTSVDCTMYICGDSTECSNLLLQYGSFCTQLNRALTGIAVEQDKNTQEVFAQVKQIYKTPPIKDFGGFNFSQILPDPSKPSKRSFIEDLLFNKVTLADAGFIKQYGDCLGDIAARDLICAQKFNGLTVLPPLLTDEMIAQYCSALLAGTITSGWTFGAGAALQIPFAMQMAYRFNGIGVTQNVLYENQKLIANQFNSAIGKIQDSLSSTASALGKLQDVVNQNAQALNTLVKQLSSNFGAISSVLNDILSRLDKVEAEVQIDRLITGRLQSLQTYVTQQLIRAAEIRASANLAATKMSECVLGQSKRVDFCGKGYHLMSFPQCAPHGVVFLHVTYVPAQEKNFTTAPAICHDGKAHFPREGVFVSNGTHWFVTQRNFYEPQIITTDNTFVSGNCDVVIGIVNNTVYDPLQPELDSFKEELDKYFKNHTSPDVDLGDISGINASVVNIQKEIDRLNEVAKNLNESLIDLQELGKYEQYIKGGGGSDIDPYKEFGSSYQLLNFLPLDFFPDLNALVDTATALYEEELTGREHCSPHHTAIRQALVCWDELTKLIAWMSSNITSEQVRTIIVNHVNDTWGLKVRQSLWFHLSCLTFGQHTVQEFLVSFGVWIRTPAPYRPPNAPILSTLPEHTVIC

SEQ ID NO: 7595 - protein, 1365 aa, Artificial Sequence; identical to SEQ ID NO: 7585
  SARS-CoV-2/England/200990660/2020__EPI_ISL_414523 spike protein (1-1211)(T874C_S1055C) WhcAg construct

SEQ ID NO: 7596 - protein, 1365 aa, Artificial Sequence
  SARS-CoV-2/Australia/NSW09/2020__EPI_ISL_413595 spike protein (1-1211)(T874C_S1055C) WhcAg construct
MFVFLVLLPLVSSQCVNLTTRTQLPPAYTNSFTRGVYYPDKVFRSSVLHSTQDLFLPFFSNVTWFHAIHVSGTNGTKRFDNPVLPFNDGVYFASTEKSNIIRGWIFGTTLDSKTQSLLIVNNATNVVIKVCEFQFCNDPFLGVYYHKNNKSWMESEFRVYSSANNCTFEYVSQPFLMDLEGKQGNFKNLREFVFKNIDGYFKIYSKHTPINLVRDLPQGFSALEPLVDLPIGINITRFQTLLALHRSYLTPGDSSSGWTAGAAAYYVGYLQPRTFLLKYNENGTITDAVDCALDPLSETKCTLKSFTVEKGIYQTSNFRVQPTESIVRFPNITNLCPFGEVFNATRFASVYAWNRKRISNCVADYSVLYNSASFSTFKCYGVSPTKLNDLCFTNVYADSFVIRGDEVRQIAPGQTGKIADYNYKLPDDFTGCVIAWNSNNLDSKVGGNYNYLYRLFRKSNLKPFERDISTEIYQAGSTPCNGVEGFNCYFPLQSYGFQPTNGVGYQPYRVVVLSFELLHAPATVCGPKKSTNLVKNKCVNFNFNGLTGTGVLTESNKKFLPFQQFGRDIADTTDAVRDPQTLEILDITPCSFGGVSVITPGTNTSNQVAVLYQDVNCTEVPVAIHADQLTPTWRVYSTGSNVFQTRAGCLIGAEHVNNSYECDIPIGAGICASYQTQTNSPRRARSVASQSIIAYTMSLGAENSVAYSNNSIAIPTNFTISVTTEILPVSMTKTSVDCTMYICGDSTECSNLLLQYGSFCTQLNRALTGIAVEQDKNTQEVFAQVKQIYKTPPIKDFGGFNFSQILPDPSKPSKRSFIEDLLFNKVTLADAGFIKQYGDCLGDIAARDLICAQKFNGLTVLPPLLTDEMIAQYCSALLAGTITSGWTFGAGAALQIPFAMQMAYRFNGIGVTQNVLYENQKLIANQFNSAIGKIQDSLSFTASALGKLQDVVNQNAQALNTLVKQLSSNFGAISSVLNDILSRLDKVEAEVQIDRLITGRLQSLQTYVTQQLIRAAEIRASANLAATKMSECVLGQSKRVDFCGKGYHLMSFPQCAPHGVVFLHVTYVPAQEKNFTTAPAICHDGKAHFPREGVFVSNGTHWFVTQRNFYEPQIITTDNTFVSGNCDVVIGIVNNTVYDPLQPELDSFKEELDKYFKNHTSPDVDLGDISGINASVVNIQKEIDRLNEVAKNLNESLIDLQELGKYEQYIKGGGGSDIDPYKEFGSSYQLLNFLPLDFFPDLNALVDTATALYEEELTGREHCSPHHTAIRQALVCWDELTKLIAWMSSNITSEQVRTIIVNHVNDTWGLKVRQSLWFHLSCLTFGQHTVQEFLVSFGVWIRTPAPYRPPNAPILSTLPEHTVIC

SEQ ID NO: 7597 - protein, 1365 aa, Artificial Sequence; identical to SEQ ID NO: 7577
  SARS-CoV-2/Australia/NSW10/2020__EPI_ISL_413596 spike protein (1-1211)(T874C_S1055C) WhcAg construct

SEQ ID NO: 7598 - protein, 1365 aa, Artificial Sequence
  SARS-CoV-2/Switzerland/1000477797/2020__EPI_ISL_413023 spike protein (1-1211)(T874C_S1055C) WhcAg construct
MFVFLVLLPLVSSQCVNLTTRTQLPPAYTNSFTRGVYYPDKVFRSSVLHSTQDLFLPFFSNVTWFHAIHVSGTNGTKRFDNPVLPFNDGVYFASTEKSNIIRGWIFGTTLDSKTQSLLIVNNATNVVIKVCEFQFCNDPFLGVYYHKNNKSWMESEFRVYSSANNCTFEYVSQPFLMDLEGKQGNFKNLREFVFKNIDGYFNIYSKHTPINLVRDLPQGFSALEPLVDLPIGINITRFQTLLALHRSYLTPGDSSSGWTAGAAAYYVGYLQPRTFLLKYNENGTITDAVDCALDPLSETKCTLKSFTVEKGIYQTSNFRVQPTESIVRFPNITNLCPFGEVFNATRFASVYAWNRKRISNCVADYSVLYNSASFSTFKCYGVSPTKLNDLCFTNVYADSFVIRGDEVRQIAPGQTGKIADYNYKLPDDFTGCVIAWNSNNLDSKVGGNYNYLYRLFRKSNLKPFERDISTEIYQAGSTPCNGVEGFNCYFPLQSYGFQPTNGVGYQPYRVVVLSFELLHAPATVCGPKKSTNLVKNKCVNFNFNGLTGTGVLTESNKKFLPFQQFGRDIADTTDAVRDPQTLEILDITPCSFGGVSVITPGTNTSNQVAVLYQGVNCTEVPVAIHADQLTPTWRVYSTGSNVFQTRAGCLIGAEHVNNSYECDIPIGAGICASYQTQTNSPRRARSVASQSIIAYTMSLGAENSVAYSNNSIAIPTNFTISVTTEILPVSMTKTSVDCTMYICGDSTECSNLLLQYGSFCTQLNRALTGIAVEQDKNTQEVFAQVKQIYKTPPIKDFGGFNFSQILPDPSKPSKRSFIEDLLFNKVTLADAGFIKQYGDCLGDIAARDLICAQKFNGLTVLPPLLTDEMIAQYCSALLAGTITSGWTFGAGAALQIPFAMQMAYRFNGIGVTQNVLYENQKLIANQFNSAIGKIQDSLSSTASALGKLQDVVNQNAQALNTLVKQLSSNFGAISSVLNDILSRLDKVEAEVQIDRLITGRLQSLQTYVTQQLIRAAEIRASANLAATKMSECVLGQSKRVDFCGKGYHLMSFPQCAPHGVVFLHVTYVPAQEKNFTTAPAICHDGKAHFPREGVFVSNGTHWFVTQRNFYEPQIITTDNTFVSGNCDVVIGIVNNTVYDPLQPELDSFKEELDKYFKNHTSPDVDLGDISGINASVVNIQKEIDRLNEVAKNLNESLIDLQELGKYEQYIKGGGGSDIDPYKEFGSSYQLLNFLPLDFFPDLNALVDTATALYEEELTGREHCSPHHTAIRQALVCWDELTKLIAWMSSNITSEQVRTIIVNHVNDTWGLKVRQSLWFHLSCLTFGQHTVQEFLVSFGVWIRTPAPYRPPNAPILSTLPEHTVIC

SEQ ID NO: 7599 - protein, 1365 aa, Artificial Sequence
  SARS-CoV-2/Belgium/BA-02291/2020__EPI_ISL_415159 spike protein (1-1211)(T874C_S1055C) WhcAg construct
MFVFLVLLPLVSSQCVNLTTRTQLPPAYTNSFTRGVYYPDKVFRSSVLHSTQDLFLPFFSNVTWFHAIHVSGTNGTKRFDNPVLPFNDGVYFASTEKSNIIRGWIFGTTLDSKTQSLLIVNNATNVVIKVCEFQFCNDPFLGVYYHKNNKSWMESEFRVYSSANNCTFEYVSQPFLMDLEGKQGNFKNLREFVFKNIDGYFKIYSKHTPINLVRDLPQGFSALEPLVDLPIGINITRFQTLLALHRSYLTPGDSSSGWTAGAAAYYVGYLQPRTFLLKYNENGTITDAVDCALDPLSETKCTLKSFTVEKGIYQTSNFRVQPTESIVRFPNITNLCPFGEVFNATRFASVYAWNRKRISNCVADYSVLYNSASFSTFKCYGVSPTKLNDLCFTNVYADSFVIRGDEVRQIAPGQTGKIADYNYKLPDDFTGCVIAWNSNNLDSKVGGNYNYLYRLFRRSNLKPFERDISTEIYQAGSTPCNGVEGFNCYFPLQSYGFQPTNGVGYQPYRVVVLSFELLPAPATVCGPKKSTNLVKNKCVNFNFNGLTGTGVLTESNKKFLPFQQFGRDIADTTDAVRDPQTLEILDITPCSFGGVSVITPGTNTSNQVAVLYQGVNCTEVPVAIHADQLTPTWRVYSTGSNVFQTRAGCLIGAEHVNNSYECDIPIGAGICASYQTQTNSPRRARSVASQSIIAYTMSLGAENSVAYSNNSIAIPTNFTISVTTEILPVSMTKTSVDCTMYICGDSTECSNLLLQYGSFCTQLNRALTGIAVEQDKNTQEVFAQVKQIYKTPPIKDFGGFNFSQILPDPSKPSKRSFIEDLLFNKVTLADAGFIKQYGDCLGDIAARDLICAQKFNGLTVLPPLLTDEMIAQYCSALLAGTITSGWTFGAGAALQIPFAMQMAYRFNGIGVTQNVLYENQKLIANQFNSAIGKIQDSLSSAAPALGKLQDVVNQNAQALNTLVKQLSSNFGAISSVLNDILSRLDKVEAEVQIDRLITGRLQSLQTYVTQQLIRAAEIRASANLAATKMSECVLGQSKRVDFCGKGYHLMSFPQCAPHGVVFLHVTYVPAQEKNFTTAPAICHDGKAHFPREGVFVSNGTHWFVTQRNFYEPQIITTDNTFVSGNCDVVIGIVNNTVYDPLQPELDSFKEELDKYFKNHTSPDVDLGDISGINASVVNIQKEIDRLNEVAKNLNESLIDLQELGKYEQYIKGGGGSDIDPYKEFGSSYQLLNFLPLDFFPDLNALVDTATALYEEELTGREHCSPHHTAIRQALVCWDELTKLIAWMSSNITSEQVRTIIVNHVNDTWGLKVRQSLWFHLSCLTFGQHTVQEFLVSFGVWIRTPAPYRPPNAPILSTLPEHTVIC

SEQ ID NO: 7600 - protein, 1365 aa, Artificial Sequence
  SARS-CoV-2/USA/WA8-UW5/2020__EPI_ISL_413486 spike protein (1-1211)(T874C_S1055C) WhcAg construct
MFVFLVLLPLVSSQCVNLTTRTQLPPAYTNSFTRGVYYPDKVFRSSVLHSTQDLFLPFFSNVTWFHAIHVSGTNGTKRFDNPVLPFNDGVYFASTEKSNIIRGWIFGTTLDSKTQSLLIVNNATNVVIKVCEFQFCNDPFLGVYYHKNNKSWMESEFRVYSSANNCTFEYVSQPFLMDLEGKQGNFKNLREFVFKNIDGYFKIYSKHTPINLVRDLPQGFSALEPLVDLPIGINITRFQTLLALHRSYLTPGDSSSGWTAGAAAYYVGYLQPRTFLLKYNENGTITDAVDCALDPLSETKCTLKSFTVEKGIYQTSNFRVQPTESIVRFPNITNLCPFGEVFNATRFASVYAWNRKRISNCVADYSVLYNSASFSTFKCYGVSPTKLNDLCFTNVYADSFVIRGDEVRQIAPGQTGKIADYNYKLPDDFTGCVIAWNSNNLDSKVGGNYNYLYRLFRKSNLKPFERDISTEIYQAGSTPCNGVEGFNCYFPLQSYGFQPTNGVGYQPYRVVVLSFELLHAPATVCGPKKSTNLVKNKCVNFNFNGLTGTGVLTESNKKFLPFQQFGRDIADTTDAVRDPQTLEILDITPCSFGGVSVITPGTNTSNQVAVLYQDVNCTEVPVAIHADQLTPTWRVYSTGSNVFQTRAGCLIGAEYVNNSYECDIPIGAGICASYQTQTNSPRRARSVASQSIIAYTMSLGAENSVAYSNNSIAIPTNFTISVTTEILPVSMTKTSVDCTMYICGDSTECSNLLLQYGSFCTQLNRALTGIAVEQDKNTQEVFAQVKQIYKTPPIKDFGGFNFSQILPDPSKPSKRSFIEDLLFNKVTLADAGFIKQYGDCLGDIAARDLICAQKFNGLTVLPPLLTDEMIAQYCSALLAGTITSGWTFGAGAALQIPFAMQMAYRFNGIGVTQNVLYENQKLIANQFNSAIGKIQDSLSSTASALGKLQDVVNQNAQALNTLVKQLSSNFGAISSVLNDILSRLDKVEAEVQIDRLITGRLQSLQTYVTQQLIRAAEIRASANLAATKMSECVLGQSKRVDFCGKGYHLMSFPQCAPHGVVFLHVTYVPAQEKNFTTAPAICHDGKAHFPREGVFVSNGTHWFVTQRNFYEPQIITTDNTFVSGNCDVVIGIVNNTVYDPLQPELDSFKEELDKYFKNHTSPDVDLGDISGINASVVNIQKEIDRLNEVAKNLNESLIDLQELGKYEQYIKGGGGSDIDPYKEFGSSYQLLNFLPLDFFPDLNALVDTATALYEEELTGREHCSPHHTAIRQALVCWDELTKLIAWMSSNITSEQVRTIIVNHVNDTWGLKVRQSLWFHLSCLTFGQHTVQEFLVSFGVWIRTPAPYRPPNAPILSTLPEHTVIC

SEQ ID NO: 7601 - protein, 1365 aa, Artificial Sequence
  SARS-CoV-2/England/20102000506/2020__EPI_ISL_415147 spike protein (1-1211)(T874C_S1055C) WhcAg construct
MFVFLVLLPLVSSQCVNLTTRTQLPPAYTNSFTRGVYYPDKVFRSSVLHSTQDLFLPFFSNVTWFHAIHVSGTNGTKRFDNPVLPFNDGVYFASTEKSNIIRGWIFGTTLDSKTQSLLIVNNATNVVIKVCEFQFCNDPFLGVYYHKNNKSWMESEFRVYSSANNCTFEYVSQPFLMDLEGKQGNFKNLREFVFKNIDGYFKIYSKHTPINLVRDLPQGFSALEPLVDLPIGINITRFQTLLALHRSYLTPGDSSSGWTAGAAAYYVGYLQPRTFLLKYNENGTITDAVDCALDPLSETKCTLKSFTVEKGIYQTSNFRVQPTESIVRFPNITNLCPFGEVFNATRFASVYAWNRKRISNCVADYSVLYNSASFSTFKCYGVSPTKLNDLCFTNVYADSFVIRGDEVRQIAPGQTGKIADYNYKLPDDFTGCVIAWNSNNLDSKVGGNYNYLYRLFRKSNLKPFERDISTEIYQAGSTPCNGVEGFNCYFPLQSYGFQPTNGVGYQPYRVVVLSFELLHAPATVCGPKKSTNLVKNKCVNFNFNGLTGTGVLTESNKKFLPFQQFGRDIADTTDAVRDPQTLEILDITPCSFGGVSVITPGTNTSNQVAVLYQGVNCTEVPVAIHADQLTPTWRVYSTGSNVFQTRAGCLIGAEHVNNSYECDIPIGAGICASYQTQTNSPRRARSVASQSIIAYTMSLGAENSVAYSNNSIAIPTNFTISVTTEILPVSMTKTSVDCTMYICGDSTECSNLLLQYGSFCTQLNRALTGIAVEQDKNTQEVFAQVKQIYKTPPIKDFGGFNFSQILPDPSKPSKRSFIEDLLFNKVTLADAGFIKQYGYCLGDIAARDLICAQKFNGLTVLPPLLTDEMIAQYCSALLAGTITSGWTFGAGAALQIPFAMQMAYRFNGIGVTQNVLYENQKLIANQFNSAIGKIQDSLSSTASALGKLQDVVNQNAQALNTLVKQLSSNFGAISSVLNDILSRLDKVEAEVQIDRLITGRLQSLQTYVTQQLIRAAEIRASANLAATKMSECVLGQSKRVDFCGKGYHLMSFPQCAPHGVVFLHVTYVPAQEKNFTTAPAICHDGKAHFPREGVFVSNGTHWFVTQRNFYEPQIITTDNTFVSGNCDVVIGIVNNTVYDPLQPELDSFKEELDKYFKNHTSPDVDLGDISGINASVVNIQKEIDRLNEVAKNLNESLIDLQELGKYEQYIKGGGGSDIDPYKEFGSSYQLLNFLPLDFFPDLNALVDTATALYEEELTGREHCSPHHTAIRQALVCWDELTKLIAWMSSNITSEQVRTIIVNHVNDTWGLKVRQSLWFHLSCLTFGQHTVQEFLVSFGVWIRTPAPYRPPNAPILSTLPEHTVIC

SEQ ID NO: 7602 - protein, 1365 aa, Artificial Sequence
  SARS-CoV-2/Belgium/VAG-03013/2020__EPI_ISL_415155 spike protein (1-1211)(T874C_S1055C) WhcAg construct
MFVFLVLLPLVSSQCVNLTTRTQLPPAYTNSFTRGVYYPDKVFRSSVLHSTQDLFLPFFSNVTWFHAIHVSGTNGTKRFDNPVLPFNDGVYFASTEKSNIIRGWIFGTTLDSKTQSLLIVNNATNVVIKVCEFQFCNDPFLGVYYHKNNKSWMESEFRVYSSANNCTFEYVSQPFLMDLEGKQGNFKNLREFVFKNIDGYFKIYSKHTPINLVRDLPQGFSALEPLVDLPIGINITRFQTLLALHRSYLTPGDSSSGWTAGAAAYYVGYLQPRTFLLKYNENGTITDAVDCALDPLSETKCTLKSFTVEKGIYQTSNFRVQPTESIVRFPNITNLCPFGEVFNATRFASVYAWNRKRISNCVADYSVLYNSASFSTFKCYGVSPTKLNDLCFTNVYADSFVIRGDEVRQIAPGQTGKIADYNYKLPDDFTGCVIAWNSNNLDSKVGGNYNYLYRLFRKSNLKPFERDISTEIYQAGSTPCNGVEGFNCYFPLQSYGFQPTNGVGYQPYRVVVLSFELLHAPATVCGPKKSTNLVKNKCVNFNFNGLTGTGVLTESNKKFLPFQQFGRDIADTTDAVRDPQTLEILDITPCSFGGVSVITPGTNTSNQVAVLYQGVNCTEVPVAIHADQLTPTWRVYSTGSNVFQTRAGCLIGAEHVNNSYECDIPIGAGICASYQTQTNSPRRARSVASQSIIAYTMSLGAENSVAYSNNSIAIPTNFTISVTTEILPVSMTKTSVDCTMYICGDSTECSNLLLQYGSFCTQLNRALTGIAVEQDKNTQEVFAQVKQIYKTPPIKDFGGFNFSQILPDPSKPSKRSFIEDLLFNKVTLADAGFIKQYGDCLGDIAARDLICAQKFNGLTVLPPLLTDEMIAQYCSALLAGTITSGWTFGAGAALQIPFAMQMAYRFNGIGVTQNVLYENQKLIANQFNSAIGKIQDSLSSTATALGKLQDVVNQNAQALNTLVKQLSSNFGAISSVLNDILSRLDKVEAEVQIDRLITGRLQSLQTYVTQQLIRAAEIRASANLAATKMSECVLGQSKRVDFCGKGYHLMSFPQCAPHGVVFLHVTYVPAQEKNFTTAPAICHDGKAHFPREGVFVSNGTHWFVTQRNFYEPQIITTDNTFVSGNCDVVIGIVNNTVYDPLQPELDSFKEELDKYFKNHTSPDVDLGDISGINASVVNIQKEIDRLNEVAKNLNESLIDLQELGKYEQYIKGGGGSDIDPYKEFGSSYQLLNFLPLDFFPDLNALVDTATALYEEELTGREHCSPHHTAIRQALVCWDELTKLIAWMSSNITSEQVRTIIVNHVNDTWGLKVRQSLWFHLSCLTFGQHTVQEFLVSFGVWIRTPAPYRPPNAPILSTLPEHTVIC

SEQ ID NO: 7603 - protein, 1365 aa, Artificial Sequence
  SARS-CoV-2/Belgium/BC-03016/2020__EPI_ISL_415157 spike protein (1-1211)(T874C_S1055C) WhcAg construct
MFVFLVLLPLVSSQCVNLTTRTQLPPAYTNSFTRGVYYPDKVFRSSVLHSTQDLFLPFFSNVTWFHAIHVSGTNGTKRFDNPVLPFNDGVYFASTEKSNIIRGWIFGTTLDSKTQSLLIVNNATNVVIKVCEFQFCNDPFLGVYYHKNNKSWMESEFRVYSSANNCTFEYVSQPFLMDLEGKQGNFKNLREFVFKNIDGYFKIYSKHTPINLVRDLPQGFSALEPLVDLPIGINITRFQTLLALHRSYLTPGDSSSGWTAGAAAYYVGYLQPRTFLLKYNENGTITDAVDCALDPLSETKCTLKSFTVEKGIYQTSNFRVQPTESIVRFPNITNLCPFGEVFNATRFASVYAWNRKRISNCVADYSVLYNSASFSTFKCYGVSPTKLNDLCFTNVYADSFVIRGDEVRQIAPGQTGKIADYNYKLPDDFTGCVIAWNSNNLDSKVGGNYNYLYRLFRKSNLKPFERDISTEIYQAGSTPCNGVEGFNCYFPLQSYGFQPTNGVGYQPYRVVVLSFELLHAPATVCGPKKSTNLVKNKCVNFNFNGLTGTGVLTESNKKFLPFQQFGRDIADTTDAVRDPQTLEILDITPCSFGGVSVITPGTNTSNQVAVLYQGVNCTEVPVAIHADQLTPTWRVYSTGSNVFQTRAGCLIGAEHVNNSYECDIPIGAGICASYQTQTNSPRRARSVASQSIIAYTMSLGAENSVAYSNNSIAIPTNFTISVTTEILPVSMTKTSVDCTMYICGDSTECSNLLLQYGSFCTQLNRALTGIAVEQDKNTQEVFAQVKQIYKTPPIKDFGGFNFSQILPDPSKPSKRSFIEDLLFNKVTLADAGFIKQYGDCLGDIAARDLICAQKFNGLTVLPPLLTDEMIAQYCSALLAGTITSGWTFGAGAALQIPFAMQMAYRFNGIGVTQNVLYENQKLIANQFNSAIGKIQDSLSSTAPALGKLQDVVNQNAQALNTLVKQLSSNFGAISSVLNDILSRLDKVEAEVQIDRLITGRLQSLQTYVTQQLIRAAEIRASANLAATKMSECVLGQSKRVDFCGKGYHLMSFPQCAPHGVVFLHVTYVPAQEKNFTTAPAICHDGKAHFPREGVFVSNGTHWFVTQRNFYEPQIITTDNTFVSGNCDVVIGIVNNTVYDPLQPELDSFKEELDKYFKNHTSPDVDLGDISGINASVVNIQKEIDRLNEVAKNLNESLIDLQELGKYEQYIKGGGGSDIDPYKEFGSSYQLLNFLPLDFFPDLNALVDTATALYEEELTGREHCSPHHTAIRQALVCWDELTKLIAWMSSNITSEQVRTIIVNHVNDTWGLKVRQSLWFHLSCLTFGQHTVQEFLVSFGVWIRTPAPYRPPNAPILSTLPEHTVIC

SEQ ID NO: 7604 - protein, 1365 aa, Artificial Sequence
  SARS-CoV-2/Germany/BavPat3/2020__EPI_ISL_414521 spike protein (1-1211)(T874C_S1055C) WhcAg construct
MFVFLVLLPLVSSQCVNLTTRTQLPPAYTNSFTRGVYYPDKVFRSSVLHSTQDLFLPFFSNVTWFHAIHVSGTNGTKRFDNPVLPFNDGVYFASTEKSNIIRGWIFGTTLDSKTQSLLIVNNATNVVIKVCEFQFCNDPFLGVYYHKNNKSWMESEFRVYSSANNCTFEYVSQPFLMDLEGKQGNFKNLREFVFKNIDGYFKIYSKHTPINLVRDLPQGFSALEPLVDLPIGINITRFQTLLALHRSYLTPGDSSSGWTAGAAAYYVGYLQPRTFLLKYNENGTITDAVDCALDPLSETKCTLKSFTVEKGIYQTSNFRVQPTESIVRFPNITNLCPFGEVFNATRFASVYAWNRKRISNCVADYSVLYNSASFSTFKCYGVSPTKLNDLCFTNVYADSFVIRGDEVRQIAPGQTGKIADYNYKLPDDFTGCVIAWNSNNLDSKVGGNYNYLYRLFRKSNLKPFERDISTEIYQAGSTPCNGVEGFNCYFPLQSYGFQPTNGVGYQPYRVVVLSFELLHAPATVCGPKKSTNLVKNKCVNFNFNGLTGTGVLTESNKKFLPFQQFGRDIADTTDAVRDPQTLEILDITPCSFGGVSVITPGTNTSNQVAVLYQDVNCTEVPVAIHADQLTPTWRVYSTGSNVFQTRAGCLIGAEHVNNSYECDIPIGAGICASYQTQTNSPRRARSVASQSIIAYTMSLGAENSVAYSNNSIAIPTNFTISVTTEILPVSMTKTSVDCTMYICGDSTECSNLLLQYGSFCTQLNRALTGIAVEQDKNTQQVFAQVKQIYKTPPIKDFGGFNFSQILPDPSKPSKRSFIEDLLFNKVTLADAGFIKQYGDCLGDIAARDLICAQKFNGLTVLPPLLTDEMIAQYCSALLAGTITSGWTFGAGAALQIPFAMQMAYRFNGIGVTQNVLYENQKLIANQFNSAIGKIQDSLSSTASALGKLQDVVNQNAQALNTLVKQLSSNFGAISSVLNDILSRLDKVEAEVQIDRLITGRLQSLQTYVTQQLIRAAEIRASANLAATKMSECVLGQSKRVDFCGKGYHLMSFPQCAPHGVVFLHVTYVPAQEKNFTTAPAICHDGKAHFPREGVFVSNGTHWFVTQRNFYEPQIITTDNTFVSGNCDVVIGIVNNTVYDPLQPELDSFKEELDKYFKNHTSPDVDLGDISGINASVVNIQKEIDRLNEVAKNLNESLIDLQELGKYEQYIKGGGGSDIDPYKEFGSSYQLLNFLPLDFFPDLNALVDTATALYEEELTGREHCSPHHTAIRQALVCWDELTKLIAWMSSNITSEQVRTIIVNHVNDTWGLKVRQSLWFHLSCLTFGQHTVQEFLVSFGVWIRTPAPYRPPNAPILSTLPEHTVIC

SEQ ID NO: 7605 - protein, 1365 aa, Artificial Sequence
  SARS-CoV-2/France/HF1805/2020__EPI_ISL_414628 spike protein (1-1211)(T874C_S1055C) WhcAg construct
MFVFLVLLPLVSSQCVNLTTRTQLPPAYTNSFTRGVYYPDKVFRSSVLHSTQDLFLPFFSNVTWFHAIHVSGTNGTKRFDNPVLPFNDGVYFASTEKSNIIRGWIFGTTLDSKTQSLLIVNNATNVVIKVCEFQFCNDPFLGVYYHKNNKSWMESEFRVYSSANNCTFEYVSQPFLMDLEGKQGNFKNLREFVFKNIDGYFKIYSKHTPINLVRDLPQGFSALEPLVDLPIGINITRFQTLLALHRSYLTPGDSSSGWTAGAAAYYVGYLQPRTFLLKYNENGTITDAVDCALDPLSETKCTLKSFTVEKGIYQTSNFRVQPTESIVRFPNITNLCPFGEVFNATRFASVYAWNRKRISNCVADYSVLYNSASFSTFKCYGVSPTKLNDLCFTNVYADSFVIRGDEVRQIAPGQTGKIADYNYKLPDDFTGCVIAWNSNNLDSKVGGNYNYLYRLFRKSNLKPFERDISTEIYQAGSTPCNGVEGFNCYFPLQSYGFQPTNGVGYQPYRVVVLSFELLHAPATVCGPKKSTNLVKNKCVNFNFNGLTGTGVLTESNKKFLPFQQFGRDIADTTDAVRDPQTLEILDITPCSFGGVSVITPGTNTSNQVAVLYQGVNCTEVPVAIHADQLTPTWRVYSTGSNVFQTRAGCLIGAEHVNNSYECDIPIGAGICASYQTQTNSPRRARSVASQSIIAYTMSLGAENSVAYSNNSIAIPTNFTISVTTEILPVSMTKTSVDCTMYICGDSTECSNLLLQYGSFCTQLNRALTGIAVEQDKNTQEVFAQVKQIYKTPPIKDFGGFNFSQILPDPSKPSKRSFIEDLLFNKVTLADAGFIKQYGDCLGDIAARDLICAQKFNGLTVLPPLLTDEMIAQYCSALLAGTITSGWTFGAGAALQIPFAMQMAYRFNGIGVTQNVLYENQKLIANQFNSAIGKIQDSLSSTASALGKLQDVVNQNAQALNTLVKQLSSNFGAISSVLNDILSRLDKVEAEVQIDRLITGRLQSLQTYVTQQLIRAAEIRASANLAATKMSECVLGQSKRVDFCGKGYHLMSFPQCAPHGVVFLHVTYVPAQEKNFTTAPAICHDGKAHFPREGVFVSNGTHWFVTQRNFYEPQIITTDNTFVSGNCDVVIGVVNNTVYDPLQPELDSFKEELDKYFKNHTSPDVDLGDISGINASVVNIQKEIDRLNEVAKNLNESLIDLQELGKYEQYIKGGGGSDIDPYKEFGSSYQLLNFLPLDFFPDLNALVDTATALYEEELTGREHCSPHHTAIRQALVCWDELTKLIAWMSSNITSEQVRTIIVNHVNDTWGLKVRQSLWFHLSCLTFGQHTVQEFLVSFGVWIRTPAPYRPPNAPILSTLPEHTVIC

SEQ ID NO: 7606 - protein, 1365 aa, Artificial Sequence
  SARS-CoV-2/Netherlands/ZuidHolland_9/2020__EPI_ISL_414445 spike protein (1-1211)(T874C_S1055C) WhcAg construct
MFVFLVLLPLVSSQCVNLTTRTQLPPAYTNSFTRGVYYPDKVFRSSVLHSTQDLFLPFFSNVTWFHAIHVSGTNGTKRFDNPVLPFNDGVYFASTEKSNIIRGWIFGTTLDSKTQSLLIVNNATNVVIKVCEFQFCNDPFLGVYYHKNNKSWMESEFRVYSSANNCTFEYVSQPFLMDLEGKQGNFKNLREFVFKNIDGYFKIYSKHTPINLVRDLPQGFSALEPLVDLPIGINITRFQTLLALHRSYLTPGDSSSGWTAGAAAYYVGYLQPRTFLLKYNENGTITDAVDCALDPLSETKCTLKSFTVEKGIYQTSNFRVQPTESIVRFPNITNLCPFGEVFNATRFASVYAWNRKRISNCVADYSVLYNSASFSTFKCYGVSPTKLNDLCFTNVYADSFVIRGDEVRQIAPGQTGKIADYNYKLPDDFTGCVIAWNSNNLDSKVGGNYNYLYRLFRKSNLKPFERDISTEIYQAGSTPCNGVEGFNCYFPLQSYGFQPTNGVGYQPYRVVVLSFELLHAPATVCGPKKSTNLVKNKCVNFNFNGLTGTGVLTESNKKFLPFQQFGRDIADTTDAVRDPQTLEILDITPCSFGGVSVITPGTNTSNQVAVLYQGVNCTEVPVAIHADQLTPTWRVYSTGSNVFQTRAGCLIGAEHVNNSYECDIPIGAGICASYQTQTNSPRRARSVASQSIIAYTMSLGAENSVAYSNNSIAIPTNFTISVTTEILPVSMTKTSVDCTMYICGDSTECSNLLLQYGSFCTQLNRALTGIAVEQDKNTQEVFAQVKQIYKTPPIKDFGGFNFSQILPDPSKPSKRSFIEDLLFNKVTLADAGFIKQYGDCLGDIAARDLICVQKFNGLTVLPPLLTDEMIAQYCSALLAGTITSGWTFGAGAALQIPFAMQMAYRFNGIGVTQNVLYENQKLIANQFNSAIGKIQDSLSSTASALGKLQDVVNQNAQALNTLVKQLSSNFGAISSVLNDILSRLDKVEAEVQIDRLITGRLQSLQTYVTQQLIRAAEIRASANLAATKMSECVLGQSKRVDFCGKGYHLMSFPQCAPHGVVFLHVTYVPAQEKNFTTAPAICHDGKAHFPREGVFVSNGTHWFVTQRNFYEPQIITTDNTFVSGNCDVVIGIVNNTVYDPLQPELDSFKEELDKYFKNHTSPDVDLGDISGINASVVNIQKEIDRLNEVAKNLNESLIDLQELGKYEQYIKGGGGSDIDPYKEFGSSYQLLNFLPLDFFPDLNALVDTATALYEEELTGREHCSPHHTAIRQALVCWDELTKLIAWMSSNITSEQVRTIIVNHVNDTWGLKVRQSLWFHLSCLTFGQHTVQEFLVSFGVWIRTPAPYRPPNAPILSTLPEHTVIC

SEQ ID NO: 7607 - protein, 1365 aa, Artificial Sequence
  SARS-CoV-2/Finland/FIN03032020A/2020__EPI_ISL_413602 spike protein (1-1211)(T874C_S1055C) WhcAg construct
MFVFLVLLPLVSSQCVNLTTRTQLPPAYTNSFTRGVYYPDKVFRSSVLHSTQDLFLPFFSNVTWFHAIHVSGTNGTKRFDNPVLPFNDGVYFASTEKSNIIRGWIFGTTLDSKTQSLLIVNNATNVVIKVCEFQFCNDPFLGVYYHKNNKSWMESEFRVYSSANNCTFEYVSQPFLMDLEGKQGNFKNLREFVFKNIDGYFKIYSKHTPINLVRDLPQGFSALEPLVDLPIGINITRFQTLLALHRSYLTPGDSSSGWTAGAAAYYVGYLQPRTFLLKYNENGTITDAVDCALDPLSETKCTLKSFTVEKGIYQTSNFRVQPTESIVRFPNITNLCPFGEVFNATRFASVYAWNRKRISNCVADYSVLYNSASFSTFKCYGVSPTKLNDLCFTNVYADSFVIRGDEVRQIAPGQTGKIADYNYKLPDDFTGCVISWNSNNLDSKVGGNYNYLYRLFRKSNLKPFERDISTEIYQAGSTPCNGVEGFNCYFPLQSYGFQPTNGVGYQPYRVVVLSFELLHAPATVCGPKKSTNLVKNKCVNFNFNGLTGTGVLTESNKKFLPFQQFGRDIADTTDAVRDPQTLEILDITPCSFGGVSVITPGTNTSNQVAVLYQGVNCTEVPVAIHADQLTPTWRVYSTGSNVFQTRAGCLIGAEHVNNSYECDIPIGAGICASYQTQTNSPRRARSVASQSIIAYTMSLGAENSVAYSNNSIAIPTNFTISVTTEILPVSMTKTSVDCTMYICGDSTECSNLLLQYGSFCTQLNRALTGIAVEQDKNTQEVFAQVKQIYKTPPIKDFGGFNFSQILPDPSKPSKRSFIEDLLFNKVTLADAGFIKQYGDCLGDIAARDLICAQKFNGLTVLPPLLTDEMIAQYCSALLAGTITSGWTFGAGAALQIPFAMQMAYRFNGIGVTQNVLYENQKLIANQFNSAIGKIQDSLSSTASALGKLQDVVNQNAQALNTLVKQLSSNFGAISSVLNDILSRLDKVEAEVQIDRLITGRLQSLQTYVTQQLIRAAEIRASANLAATKMSECVLGQSKRVDFCGKGYHLMSFPQCAPHGVVFLHVTYVPAQEKNFTTAPAICHDGKAHFPREGVFVSNGTHWFVTQRNFYEPQIITTDNTFVSGNCDVVIGIVNNTVYDPLQPELDSFKEELDKYFKNHTSPDVDLGDISGINASVVNIQKEIDRLNEVAKNLNESLIDLQELGKYEQYIKGGGGSDIDPYKEFGSSYQLLNFLPLDFFPDLNALVDTATALYEEELTGREHCSPHHTAIRQALVCWDELTKLIAWMSSNITSEQVRTIIVNHVNDTWGLKVRQSLWFHLSCLTFGQHTVQEFLVSFGVWIRTPAPYRPPNAPILSTLPEHTVIC

SEQ ID NO: 7608 - protein, 1365 aa, Artificial Sequence
  SARS-CoV-2/France/GE1977/2020__EPI_ISL_414632 spike protein (1-1211)(T874C_S1055C) WhcAg construct
MFVFLVLLPLVSSQCVNLTTRTQLPPAYTNSFTRGVYYPDKVFRSSVLHSTQDLFLPFFSNVTWFHAIHVSGTNGTKRFDNPVLPFNDGVYFASTEKSNIIRGWIFGTTLDSKTQSLLIVNNATNVVIKVCEFQFCNDPFLGVYYHKNNKSWMESEFRVYSSANNCTFEYVSQPFLMDLEGKQGNFKNLREFVFKNIDGYFKIYSKHTPINLVRDLPQGFSALEPLVDLPIGINITRFQTLLALHRSYLTPGDSSSGWTAGAAAYYVGYLQPRTFLLKYNENGTITDAVDCALDPLSETKCTLKSFTVEKGIYQTSNFRVQPTESIVRFPNITNLCPFGEVFNATRFASVYAWNRKRISNCVADYSVLYNSASFSTFKCYGVSPTKLNDLCFTNVYADSFVIRGDEVRQIAPGQTGKIADYNYKLPDDFTGCVIAWNSNNLDSKVGGNYNYLYRLFRKSNLKPFERDISTEIYQAGSTPCNGVEGFNCYFPLQSYGFQPTNGVGYQPYRVVVLSFELLHAPATVCGPKKSTNLVKNKCVNFNFNGLTGTGVLTESNKKFLPFQQFGRDIADTTDAVRDPQTLEILDITPCSFGGVSVITPGTNTSNQVAVLYQGVNCTEVPVAIHADQLTPTWRVYSTGSNVFQTRAGCLIGAEHVNNSYECDIPIGAGICASYQTQTNSPRRARSVASQSIIAYTMSLGAENSVAYSNNSIAIPTNFTISVTTEILPVSMTKTSVDCTMYICGDSTECSNLLLQYGSFCTQLNRALTGIAVEQDKNTQEVFAQVKQIYKTPPIKDFGGFNFSQILPDPSKPSKRSFIEDLLFNKVTLADAGFIKQYGDCLGDIAARDLICAQKFNGLTVLPPLLTDEMIAQYCSALLAGTITSGWTFGAGAALQIPFAMQMAYRFNGIGVTQNVLYENQKLIANQFNSAIGKIQDSLFSTASALGKLQDVVNQNAQALNTLVKQLSSNFGAISSVLNDILSRLDKVEAEVQIDRLITGRLQSLQTYVTQQLIRAAEIRASANLAATKMSECVLGQSKRVDFCGKGYHLMSFPQCAPHGVVFLHVTYVPAQEKNFTTAPAICHDGKAHFPREGVFVSNGTHWFVTQRNFYEPQIITTDNTFVSGNCDVVIGIVNNTVYDPLQPELDSFKEELDKYFKNHTSPDVDLGDISGINASVVNIQKEIDRLNEVAKNLNESLIDLQELGKYEQYIKGGGGSDIDPYKEFGSSYQLLNFLPLDFFPDLNALVDTATALYEEELTGREHCSPHHTAIRQALVCWDELTKLIAWMSSNITSEQVRTIIVNHVNDTWGLKVRQSLWFHLSCLTFGQHTVQEFLVSFGVWIRTPAPYRPPNAPILSTLPEHTVIC

SEQ ID NO: 7609 - protein, 1365 aa, Artificial Sequence
  SARS-CoV-2/Finland/FIN-313/2020__EPI_ISL_414641 spike protein (1-1211)(T874C_S1055C) WhcAg construct
MFVFLVLLPLVSSQCVNLTTRTQLPPAYTNSFTRGVYYPDKVFRSSVLHSTQDLFLPFFSNVTWFHAIHVSGTNGTKRFDNPVLPFNDGVYFASTEKSNIIRGWIFGTTLDSKTQSLLIVNNATNVVIKVCEFQFCNDPFLGVYYHKNNKSWMESEFRVYSSANNCTFEYVSQPFLMDLEGKQGNFKNLREFVFKNIDGYFKIYSKHTPINLVRDLPQGFSALEPLVDLPIGINITRFKTLLALHRSYLTPGDSSSGWTAGAAAYYVGYLQPRTFLLKYNENGTITDAVDCALDPLSETKCTLKSFTVEKGIYQTSNFRVQPTESIVRFPNITNLCPFGEVFNATRFASVYAWNRKRISNCVADYSVLYNSASFSTFKCYGVSPTKLNDLCFTNVYADSFVIRGDEVRQIAPGQTGKIADYNYKLPDDFTGCVIAWNSNNLDSKVGGNYNYLYRLFRKSNLKPFERDISTEIYQAGSTPCNGVEGFNCYFPLQSYGFQPTNGVGYQPYRVVVLSFELLHAPATVCGPKKSTNLVKNKCVNFNFNGLTGTGVLTESNKKFLPFQQFGRDIADTTDAVRDPQTLEILDITPCSFGGVSVITPGTNTSNQVAVLYQGVNCTEVPVAIHADQLTPTWRVYSTGSNVFQTRAGCLIGAEHVNNSYECDIPIGAGICASYQTQTNSPRRARSVASQSIIAYTMSLGAENSVAYSNNSIAIPTNFTISVTTEILPVSMTKTSVDCTMYICGDSTECSNLLLQYGSFCTQLNRALTGIAVEQDKNTQEVFAQVKQIYKTPPIKDFGGFNFSQILPDPSKPSKRSFIEDLLFNKVTLADAGFIKQYGDCLGDIAARDLICAQKFNGLTVLPPLLTDEMIAQYCSALLAGTITSGWTFGAGAALQIPFAMQMAYRFNGIGVTQNVLYENQKLIANQFNSAIGKIQDSLSSTASALGKLQDVVNQNAQALNTLVKQLSSNFGAISSVLNDILSRLDKVEAEVQIDRLITGRLQSLQTYVTQQLIRAAEIRASANLAATKMSECVLGQSKRVDFCGKGYHLMSFPQCAPHGVVFLHVTYVPAQEKNFTTAPAICHDGKAHFPREGVFVSNGTHWFVTQRNFYEPQIITTDNTFVSGNCDVVIGIVNNTVYDPLQPELDSFKEELDKYFKNHTSPDVDLGDISGINASVVNIQKEIDRLNEVAKNLNESLIDLQELGKYEQYIKGGGGSDIDPYKEFGSSYQLLNFLPLDFFPDLNALVDTATALYEEELTGREHCSPHHTAIRQALVCWDELTKLIAWMSSNITSEQVRTIIVNHVNDTWGLKVRQSLWFHLSCLTFGQHTVQEFLVSFGVWIRTPAPYRPPNAPILSTLPEHTVIC

SEQ ID NO: 7610 - protein, 1365 aa, Artificial Sequence
  SARS-CoV-2/Netherlands/ZuidHolland_2/2020__EPI_ISL_414556 spike protein (1-1211)(T874C_S1055C) WhcAg construct
MFVFLVLLPLVSSQCVNLTTRTQLPPAYTNSFTRGVYYPDKVFRSSVLHSTQDLFLPFFSNVTWFHAIHVSGTNGTKRFDNPVLPFNDGVYFASTEKSNIIRGWIFGTTLDSKTQSLLIVNNATNVVIKVCEFQFCNDPFLGVYYHKNNKSWMESEFRVYSSANNCTFEYVSQPFLMDLEGKQGNFKNLREFVFKNIDGYFKIYSKHTPINLVRDLPQGFSALEPLVDLPIGINITRFQTLLALHRSYLTPGDSSSGWTAGAAAYYVGYLQPRTFLLKYNENGTITDAVDCALDPLSETKCTLKSFTVEKGIYQTSNFRVQPTESIVRFPNITNLCPFGEVFNATRFASVYAWNRKRISNCVADYSVLYNSASFSTFKCYGVSPTKLNDLCFTNVYADSFVIRGDEVRQIAPGQTGKIADYNYKLPDDFTGCVIAWNSNNLDSKVGGNYNYLYRLFRKSNLKPFERDISTEIYQAGSTPCNGVEGFNCYFPLQSYGFQPTNGVGYQPYRVVVLSFELLHAPATVCGPKKSTNLVKNKCVNFNFNGLTGTGVLTESNKKFLPFQQFGRDIADTTDAVRDPQTLEILDITPCSFGGVSVITPGTNTSNQVAVLYQGVNCTEVPVAIHADQLTPTWRVYSTGSNVFQTRAGCLIGAEHVNNSYECDIPIGAGICASYQTQTNSPRRARSVASQSIIAYTMSLGAENSVAYSNNSIAIPTNFTISVTTEILPVSMTKTSVDCTMYICGDSTECSNLLLQYGSFCTQLNRALTGIALEQDKNTQEVFAQVKQIYKTPPIKDFGGFNFSQILPDPSKPSKRSFIEDLLFNKVTLADAGFIKQYGDCLGDIAARDLICAQKFNGLTVLPPLLTDEMIAQYCSALLAGTITSGWTFGAGAALQIPFAMQMAYRFNGIGVTQNVLYENQKLIANQFNSAIGKIQDSLSSTASALGKLQDVVNQNAQALNTLVKQLSSNFGAISSVLNDILSRLDKVEAEVQIDRLITGRLQSLQTYVTQQLIRAAEIRASANLAATKMSECVLGQSKRVDFCGKGYHLMSFPQCAPHGVVFLHVTYVPAQEKNFTTAPAICHDGKAHFPREGVFVSNGTHWFVTQRNFYEPQIITTDNTFVSGNCDVVIGIVNNTVYDPLQPELDSFKEELDKYFKNHTSPDVDLGDISGINASVVNIQKEIDRLNEVAKNLNESLIDLQELGKYEQYIKGGGGSDIDPYKEFGSSYQLLNFLPLDFFPDLNALVDTATALYEEELTGREHCSPHHTAIRQALVCWDELTKLIAWMSSNITSEQVRTIIVNHVNDTWGLKVRQSLWFHLSCLTFGQHTVQEFLVSFGVWIRTPAPYRPPNAPILSTLPEHTVIC

SEQ ID NO: 7611 - protein, 1365 aa, Artificial Sequence
  SARS-CoV-2/USA/WA-UW31/2020__EPI_ISL_414618 spike protein (1-1211)(T874C_S1055C) WhcAg construct
MFVFLVLLPLVSSQCVNLTTRTQLPPAYTNSFTRGVYYPDKVFRSSVLHSTQDLFLPFFSNVTWFHAIHVSGTNGTKRFDNPVLPFNDGVYFASTEKSNIIRGWIFGTTLDSKTQSLLIVNNATNVVIKVCEFQFCNDPFLGVYYHKNNKSWMESEFRVYSSANNCTFEYVSQPFLMDLEGKQGNFKNLREFVFKNIDGYFKIYSKHTPINLVRDLPQGFSALEPLVDLPIGINITRFQTLLALHRSYLTPGDSSSGWTAGAAAYYVGYLQPRTFLLKYNENGTITDAVDCALDPLSETKCTLKSFTVEKGIYQTSNFRVQPTESIVRFPNITNLCPFGEVFNATRFASVYAWNRKRISNCVADYSVLYNSASFSTFKCYGVSPTKLNDLCFTNVYADSFVIRGDEVRQIAPGQTGKIADYNYKLPDDFTGCVIAWNSNNLDSKVGGNYNYLYRLFRKSNLKPFERDISTEIYQAGSTPCNGAEGFNCYFPLQSYGFQPTNGVGYQPYRVVVLSFELLHAPATVCGPKKSTNLVKNKCVNFNFNGLTGTGVLTESNKKFLPFQQFGRDIADTTDAVRDPQTLEILDITPCSFGGVSVITPGTNTSNQVAVLYQDVNCTEVPVAIHADQLTPTWRVYSTGSNVFQTRAGCLIGAEHVNNSYECDIPIGAGICASYQTQTNSPRRARSVASQSIIAYTMSLGAENSVAYSNNSIAIPTNFTISVTTEILPVSMTKTSVDCTMYICGDSTECSNLLLQYGSFCTQLNRALTGIAVEQDKNTQEVFAQVKQIYKTPPIKDFGGFNFSQILPDPSKPSKRSFIEDLLFNKVTLADAGFIKQYGDCLGDIAARDLICAQKFNGLTVLPPLLTDEMIAQYCSALLAGTITSGWTFGAGAALQIPFAMQMAYRFNGIGVTQNVLYENQKLIANQFNSAIGKIQDSLSSTASALGKLQDVVNQNAQALNTLVKQLSSNFGAISSVLNDILSRLDKVEAEVQIDRLITGRLQSLQTYVTQQLIRAAEIRASANLAATKMSECVLGQSKRVDFCGKGYHLMSFPQCAPHGVVFLHVTYVPAQEKNFTTAPAICHDGKAHFPREGVFVSNGTHWFVTQRNFYEPQIITTDNTFVSGNCDVVIGIVNNTVYDPLQPELDSFKEELDKYFKNHTSPDVDLGDISGINASVVNIQKEIDRLNEVAKNLNESLIDLQELGKYEQYIKGGGGSDIDPYKEFGSSYQLLNFLPLDFFPDLNALVDTATALYEEELTGREHCSPHHTAIRQALVCWDELTKLIAWMSSNITSEQVRTIIVNHVNDTWGLKVRQSLWFHLSCLTFGQHTVQEFLVSFGVWIRTPAPYRPPNAPILSTLPEHTVIC

SEQ ID NO: 7612 - protein, 1365 aa, Artificial Sequence
  SARS-CoV-2/South Korea/SNU01/2020__EPI_ISL_411929 spike protein (1-1211)(T874C_S1055C) WhcAg construct
MFVFLVLLPLVSSQCVNLTTRTQLPPAYTNSFTRGVYYPDKVFRSSVLHSTQDLFLPFFSNVTWFHAIHVSGTNGTKRFDNPVLPFNDGVYFASTEKSNIIRGWIFGTTLDSKTQSLLIVNNATNVVIKVCEFQFCNDPFLGVYYHKNNKSWMESEFRVYSSANNCTFEYVSQPFLMDLEGKQGNFKNLREFVFKNIDGYFKIYSKHTPINLVRDLPQGFWALEPLVDLPIGINITRFQTLLALHRSYLTPGDSSSGWTAGAAAYYVGYLQPRTFLLKYNENGTITDAVDCALDPLSETKCTLKSFTVEKGIYQTSNFRVQPTESIVRFPNITNLCPFGEVFNATRFASVYAWNRKRISNCVADYSVLYNSASFSTFKCYGVSPTKLNDLCFTNVYADSFVIRGDEVRQIAPGQTGKIADYNYKLPDDFTGCVIAWNSNNLDSKVGGNYNYLYRLFRKSNLKPFERDISTEIYQAGSTPCNGVEGFNCYFPLQSYGFQPTNGVGYQPYRVVVLSFELLHAPATVCGPKKSTNLVKNKCVNFNFNGLTGTGVLTESNKKFLPFQQFGRDIADTTDAVRDPQTLEILDITPCSFGGVSVITPGTNTSNQVAVLYQDVNCTEVPVAIHADQLTPTWRVYSTGSNVFQTRAGCLIGAEHVNNSYECDIPIGAGICASYQTQTNSPRRARSVASQSIIAYTMSLGAENSVAYSNNSIAIPTNFTISVTTEILPVSMTKTSVDCTMYICGDSTECSNLLLQYGSFCTQLNRALTGIAVEQDKNTQEVFAQVKQIYKTPPIKDFGGFNFSQILPDPSKPSKRSFIEDLLFNKVTLADAGFIKQYGDCLGDIAARDLICAQKFNGLTVLPPLLTDEMIAQYCSALLAGTITSGWTFGAGAALQIPFAMQMAYRFNGIGVTQNVLYENQKLIANQFNSAIGKIQDSLSSTASALGKLQDVVNQNAQALNTLVKQLSSNFGAISSVLNDILSRLDKVEAEVQIDRLITGRLQSLQTYVTQQLIRAAEIRASANLAATKMSECVLGQSKRVDFCGKGYHLMSFPQCAPHGVVFLHVTYVPAQEKNFTTAPAICHDGKAHFPREGVFVSNGTHWFVTQRNFYEPQIITTDNTFVSGNCDVVIGIVNNTVYDPLQPELDSFKEELDKYFKNHTSPDVDLGDISGINASVVNIQKEIDRLNEVAKNLNESLIDLQELGKYEQYIKGGGGSDIDPYKEFGSSYQLLNFLPLDFFPDLNALVDTATALYEEELTGREHCSPHHTAIRQALVCWDELTKLIAWMSSNITSEQVRTIIVNHVNDTWGLKVRQSLWFHLSCLTFGQHTVQEFLVSFGVWIRTPAPYRPPNAPILSTLPEHTVIC

SEQ ID NO: 7613 - protein, 1365 aa, Artificial Sequence
  SARS-CoV-2/China/WF0004/2020__EPI_ISL_413694 spike protein (1-1211)(T874C_S1055C) WhcAg construct
MFVFLVLLPLVSSQCVNLTTRTQLPPAYTNSFTRGVYYPDKVFRSSVLHSTQDLFLPFFSNVTWFHAIHVSGTNGTKRFDNPVLPFNDGVYFASTEKSNIIRGWIFGTTLDSKTQSLLIVNNATNVVIKVCEFQFCNDPFLGVYYHKNNKSWTESEFRVYSSANNCTFEYVSQPFLMDLEGKQGNFKNLREFVFKNIDGYFKIYSKHTPINLVRDLPQGFSALEPLVDLPIGINITRFQTLLALHRSYLTPGDSSSGWTAGAAAYYVGYLQPRTFLLKYNENGTITDAVDCALDPLSETKCTLKSFTVEKGIYQTSNFRVQPTESIVRFPNITNLCPFGEVFNATRFASVYAWNRKRISNCVADYSVLYNSASFSTFKCYGVSPTKLNDLCFTNVYADSFVIRGDEVRQIAPGQTGKIADYNYKLPDDFTGCVIAWNSNNLDSKVGGNYNYLYRLFRKSNLKPFERDISTEIYQAGSTPCNGVEGFNCYFPLQSYGFQPTNGVGYQPYRVVVLSFELLHAPATVCGPKKSTNLVKNKCVNFNFNGLTGTGVLTESNKKFLPFQQFGRDIADTTDAVRDPQTLEILDITPCSFGGVSVITPGTNTSNQVAVLYQDVNCTEVPVAIHADQLTPTWRVYSTGSNVFQTRAGCLIGAEHVNNSYECDIPIGAGICASYQTQTNSPRRARSVASQSIIAYTMSLGAENSVAYSNNSIAIPTNFTISVTTEILPVSMTKTSVDCTMYICGDSTECSNLLLQYGSFCTQLNRALTGIAVEQDKNTQEVFAQVKQIYKTPPIKDFGGFNFSQILPDPSKPSKRSFIEDLLFNKVTLADAGFIKQYGDCLGDIAARDLICAQKFNGLTVLPPLLTDEMIAQYCSALLAGTITSGWTFGAGAALQIPFAMQMAYRFNGIGVTQNVLYENQKLIANQFNSAIGKIQDSLSSTASALGKLQDVVNQNAQALNTLVKQLSSNFGAISSVLNDILSRLDKVEAEVQIDRLITGRLQSLQTYVTQQLIRAAEIRASANLAATKMSECVLGQSKRFDFCGKGYHLMSFPQCAPHGVVFLHVTYVPAQEKNFTTAPAICHDGKAHFPREGVFVSNGTHWFVTQRNFYEPQIITTDNTFVSGNCDVVIGIVNNTVYDPLQPELDSFKEELDKYFKNHTSPDVDLGDISGINASVVNIQKEIDRLNEVAKNLNESLIDLQELGKYEQYIKGGGGSDIDPYKEFGSSYQLLNFLPLDFFPDLNALVDTATALYEEELTGREHCSPHHTAIRQALVCWDELTKLIAWMSSNITSEQVRTIIVNHVNDTWGLKVRQSLWFHLSCLTFGQHTVQEFLVSFGVWIRTPAPYRPPNAPILSTLPEHTVIC

SEQ ID NO: 7614 - protein, 1365 aa, Artificial Sequence
  SARS-CoV-2/China/WF0028/2020__EPI_ISL_413791 spike protein (1-1211)(T874C_S1055C) WhcAg construct
MFVFLVLLPLVSSQCVNLTTRTQLPPAYTNSFTRGVYYPDKVFRSSVLHSTQDLFLPFFSNVTWFHAIHVSGTNGTKRFDNPVLPFNDGVYFASTEKSNIIRGWIFGTTLDSKTQSLLIVNNATNVVIKVCEFQFCNDPFLGVYYHKNNKSWMESEFRVYSSANNCTFEYVSQPFLMDLEGKQGNFKNLREFVFKNIDGYFKIYSKHTPINLVRDLPQGFSALEPLVDLPIGINITRFQTLLALHRSYLTPGDSSSGWTAGAAAYYVGYLQPRTFLLKYNENGTITDAVDCALDPLSETKCTLKSFTVEKGIYQTSNFRVQPTESIVRFPNITNLCPFGEVFNATRFASVYAWNRKRISNCVADYSVLYNSASFSTFKCYGVSPTKLNDLCFTNVYADSFVIRGDEVRQIAPGQTGKIADYNYKLPDDFTGCVIAWNSNNLDSKVGGNYNYLYRLFRKSNLKPFERDISTEIYQAGSTPCNGVEGFNCYFPLQSYGFQPTNGVGYQPYRVVVLSFELLHAPATVCGPKKSTNLVKNKCVNFNFNGLTGTGVLTESNKKFLPFQQFGRDIADTTDAVRDPQTLEILDITPCSFGGVSVITPGTNTSNQVAVLYQDVNCTEVPVAIHADQLTPTWRVYSTGSNVFQTRAGCLIGAEHVNNSYECDIPIGAGICASYQTQTNSPRRARSVASQSIIAYTMSLGAENSVAYSNNSIAIPTNFTISVTTEILPVSMTKTSVDCTMYICGDSTECSNLLLQYGSFCTQLNRALTGIAVEQDKNTQEVFAQVKQIYKTPPIKDFGGFNFSQILPDPSKPSKRSFIEDLLFNKVTLADAGFIKQYGDCLGDIAARDLICAQKFNGLTVLPPLLTDEMIAQYCSALLAGTITSGWTFGAGAALQIPFAMQMAYRFNGIGVTQNVLYENQKLIANQFNSAIGKIQDSLSSTASALGKLQDVVNQNAQALNTLVKQLSSNFGAISSVLNDILSRLDKVEAEVQIDRLITGRLQSLQTYVTQQLIRAAEIRASANLAATKMSECVLGQSKRVDFCGKGYHLMSFPQCAPHGVVFLHVTYVPAQEKNFTTAPAICHDGKAHFPREGVFVSNGTHWFVTQRNFYEPQIITTDNTFVSGNCDVVIGIVNNTVYDPLQPELESFKEELDKYFKNHTSPDVDLGDISGINASVVNIQKEIDRLNEVAKNLNESLIDLQELGKYEQYIKGGGGSDIDPYKEFGSSYQLLNFLPLDFFPDLNALVDTATALYEEELTGREHCSPHHTAIRQALVCWDELTKLIAWMSSNITSEQVRTIIVNHVNDTWGLKVRQSLWFHLSCLTFGQHTVQEFLVSFGVWIRTPAPYRPPNAPILSTLPEHTVIC

SEQ ID NO: 7615 - protein, 1365 aa, Artificial Sequence
  SARS-CoV-2/2019-nCoV/USA-CruiseA-18/2020__MT159716.1 spike protein (1-1211)(T874C_S1055C) WhcAg construct
MFVFLVLLPLVSSQCVNLTTRTQLPPAYTNSFTRGVYYPDKVFRSSVLHSTQDLFLPFFSNVTWFHAIHVSGTNGTKRFDNPVLPFNDGVYFASTEKSNIIRGWIFGTTLDSKTQSLLIVNNATNVVIKVCEFQFCNDPFLGVYYHKNNKSWMESELRVYSSANNCTFEYVSQPFLMDLEGKQGNFKNLREFVFKNIDGYFKIYSKHTPINLVRDLPQGFSALEPLVDLPIGINITRFQTLLALHRSYLTPGDSSSGWTAGAAAYYVGYLQPRTFLLKYNENGTITDAVDCALDPLSETKCTLKSFTVEKGIYQTSNFRVQPTESIVRFPNITNLCPFGEVFNATRFASVYAWNRKRISNCVADYSVLYNSASFSTFKCYGVSPTKLNDLCFTNVYADSFVIRGDEVRQIAPGQTGKIADYNYKLPDDFTGCVIAWNSNNLDSKVGGNYNYLYRLFRKSNLKPFERDISTEIYQAGSTPCNGVEGFNCYFPLQSYGFQPTNGVGYQPYRVVVLSFELLHAPATVCGPKKSTNLVKNKCVNFNFNGLTGTGVLTESNKKFLPFQQFGRDIADTTDAVRDPQTLEILDITPCSFGGVSVITPGTNTSNQVAVLYQDVNCTEVPVAIHADQLTPTWRVYSTGSNVFQTRAGCLIGAEHVNNSYECDIPIGAGICASYQTQTNSPRRARSVASQSIIAYTMSLGAENSVAYSNNSIAIPTNFTISVTTEILPVSMTKTSVDCTMYICGDSTECSNLLLQYGSFCTQLNRALTGIAVEQDKNTQEVFAQVKQIYKTPPIKDFGGFNFSQILPDPSKPSKRSFIEDLLFNKVTLADAGFIKQYGDCLGDIAARDLICAQKFNGLTVLPPLLTDEMIAQYCSALLAGTITSGWTFGAGAALQIPFAMQMAYRFNGIGVTQNVLYENQKLIANQFNSAIGKIQDSLSSTASALGKLQDVVNQNAQALNTLVKQLSSNFGAISSVLNDILSRLDKVEAEVQIDRLITGRLQSLQTYVTQQLIRAAEIRASANLAATKMSECVLGQSKRVDFCGKGYHLMSFPQCAPHGVVFLHVTYVPAQEKNFTTAPAICHDGKAHFPREGVFVSNGTHWFVTQRNFYEPQIITTDNTFVSGNCDVVIGIVNNTVYDPLQPELDSFKEELDKYFKNHTSPDVDLGDISGINASVVNIQKEIDRLNEVAKNLNESLIDLQELGKYEQYIKGGGGSDIDPYKEFGSSYQLLNFLPLDFFPDLNALVDTATALYEEELTGREHCSPHHTAIRQALVCWDELTKLIAWMSSNITSEQVRTIIVNHVNDTWGLKVRQSLWFHLSCLTFGQHTVQEFLVSFGVWIRTPAPYRPPNAPILSTLPEHTVIC

SEQ ID NO: 7616 - protein, 1365 aa, Artificial Sequence
  SARS-CoV-2/SARS-CoV-2/Yunnan-01/human/2020/CHN__MT049951.1 spike protein (1-1211)(T874C_S1055C) WhcAg construct
MFVFLVLLPLVSSQCVNLTTRTQLPPANTNSFTRGVYYPDKVFRSSVLHSTQDLFLPFFSNVTWFHAIHVSGTNGTKRFDNPVLPFNDGVYFASTEKSNIIRGWIFGTTLDSKTQSLLIVNNATNVVIKVCEFQFCNDPFLGVYYHKNNKSWMESEFRVYSSANNCTFEYVSQPFLMDLEGKQGNFKNLREFVFKNIDGYFKIYSKHTPINLVRDLPQGFSALEPLVDLPIGINITRFQTLLALHRSYLTPGDSSSGWTAGAAAYYVGYLQPRTFLLKYNENGTITDAVDCALDPLSETKCTLKSFTVEKGIYQTSNFRVQPTESIVRFPNITNLCPFGEVFNATRFASVYAWNRKRISNCVADYSVLYNSASFSTFKCYGVSPTKLNDLCFTNVYADSFVIRGDEVRQIAPGQTGKIADYNYKLPDDFTGCVIAWNSNNLDSKVGGNYNYLYRLFRKSNLKPFERDISTEIYQAGSTPCNGVEGFNCYFPLQSYGFQPTNGVGYQPYRVVVLSFELLHAPATVCGPKKSTNLVKNKCVNFNFNGLTGTGVLTESNKKFLPFQQFGRDIADTTDAVRDPQTLEILDITPCSFGGVSVITPGTNTSNQVAVLYQDVNCTEVPVAIHADQLTPTWRVYSTGSNVFQTRAGCLIGAEHVNNSYECDIPIGAGICASYQTQTNSPRRARSVASQSIIAYTMSLGAENSVAYSNNSIAIPTNFTISVTTEILPVSMTKTSVDCTMYICGDSTECSNLLLQYGSFCTQLNRALTGIAVEQDKNTQEVFAQVKQIYKTPPIKDFGGFNFSQILPDPSKPSKRSFIEDLLFNKVTLADAGFIKQYGDCLGDIAARDLICAQKFNGLTVLPPLLTDEMIAQYCSALLAGTITSGWTFGAGAALQIPFAMQMAYRFNGIGVTQNVLYENQKLIANQFNSAIGKIQDSLSSTASALGKLQDVVNQNAQALNTLVKQLSSNFGAISSVLNDILSRLDKVEAEVQIDRLITGRLQSLQTYVTQQLIRAAEIRASANLAATKMSECVLGQSKRVDFCGKGYHLMSFPQCAPHGVVFLHVTYVPAQEKNFTTAPAICHDGKAHFPREGVFVSNGTHWFVTQRNFYEPQIITTDNTFVSGNCDVVIGIVNNTVYDPLQPELDSFKEELDKYFKNHTSPDVDLGDISGINASVVNIQKEIDRLNEVAKNLNESLIDLQELGKYEQYIKGGGGSDIDPYKEFGSSYQLLNFLPLDFFPDLNALVDTATALYEEELTGREHCSPHHTAIRQALVCWDELTKLIAWMSSNITSEQVRTIIVNHVNDTWGLKVRQSLWFHLSCLTFGQHTVQEFLVSFGVWIRTPAPYRPPNAPILSTLPEHTVIC

SEQ ID NO: 7617 - protein, 1365 aa, Artificial Sequence
  SARS-CoV-2/USA/WA-UW292/2020__EPI_ISL_418077 spike protein (1-1211)(T874C_S1055C) WhcAg construct
MFVFLVLLPLVSSQCVNLTTRTQLPPAYTNSFTRGVYYPDKVFRSSVLHSTQDLFLPFFSNVTWFHAIHVSGTNGTKRFDNPVLPFNDGVYFASTEKSNIIRGWIFGTTLDSKTQSLLIVNNATNVVIKVCEFQFCNDPFLGVYYHKNNKSWMESEFRVYSSANNCTFEYVSQPFLMDLEGKQGNFKNLREFVFKNIDGYFKIYSKHTPINLVRDLPQGFSALEPLVDLPIGINITRFQTLLALHRSYLTPGDSSSGWTAGAAAYYVGYLQPRTFLLKYNENGTITDAVDCALDPLSETKCTLKSFTVEKGIYQTSNFRVQPTESIVRFPNITNLCPFGEVFNATRFASVYAWNRKRISNCVADYSVLYNSASFSTFKCYGVSPTKLNDLCFTNVYADSFVIRGDEVRQIAPGQTGKIADYNYKLPDDFTGCVIAWNSNNLDSKVGGNYNYLYRLFRKSNLKPFERDISTEIYQASSTPCNGVEGFNCYFPLQSYGFQPTNGVGYQPYRVVVLSFELLHAPATVCGPKKSTNLVKNKCVNFNFNGLTGTGVLTESNKKFLPFQQFGRDIADTTDAVRDPQTLEILDITPCSFGGVSVITPGTNTSNQVAVLYQDVNCTEVPVAIHADQLTPTWRVYSTGSNVFQTRAGCLIGAEHVNNSYECDIPIGAGICASYQTQTNSPRRARSVASQSIIAYTMSLGAENSVAYSNNSIAIPTNFTISVTTEILPVSMTKTSVDCTMYICGDSTECSNLLLQYGSFCTQLNRALTGIAVEQDKNTQEVFAQVKQIYKTPPIKDFGGFNFSQILPDPSKPSKRSFIEDLLFNKVTLADAGFIKQYGDCLGDIAARDLICAQKFNGLTVLPPLLTDEMIAQYCSALLAGTITSGWTFGAGAALQIPFAMQMAYRFNGIGVTQNVLYENQKLIANQFNSAIGKIQDSLSSTASALGKLQDVVNQNAQALNTLVKQLSSNFGAISSVLNDILSRLDKVEAEVQIDRLITGRLQSLQTYVTQQLIRAAEIRASANLAATKMSECVLGQSKRVDFCGKGYHLMSFPQCAPHGVVFLHVTYVPAQEKNFTTAPAICHDGKAHFPREGVFVSNGTHWFVTQRNFYEPQIITTDNTFVSGNCDVVIGIVNNTVYDPLQPELDSFKEELDKYFKNHTSPDVDLGDISGINASVVNIQKEIDRLNEVAKNLNESLIDLQELGKYEQYIKGGGGSDIDPYKEFGSSYQLLNFLPLDFFPDLNALVDTATALYEEELTGREHCSPHHTAIRQALVCWDELTKLIAWMSSNITSEQVRTIIVNHVNDTWGLKVRQSLWFHLSCLTFGQHTVQEFLVSFGVWIRTPAPYRPPNAPILSTLPEHTVIC

SEQ ID NO: 7618 - protein, 1365 aa, Artificial Sequence
  SARS-CoV-2/Iceland/192/2020__EPI_ISL_417819 spike protein (1-1211)(T874C_S1055C) WhcAg construct
MFVFFVLLPLVSSQCVNLTTRTQLPPAYTNSFTRGVYYPDKVFRSSVLHSTQDLFLPFFSNVTWFHAIHVSGTNGTKRFDNPVLPFNDGVYFASTEKSNIIRGWIFGTTLDSKTQSLLIVNNATNVVIKVCEFQFCNDPFLGVYYHKNNKSWMESEFRVYSSANNCTFEYVSQPFLMDLEGKQGNFKNLREFVFKNIDGYFKIYSKHTPINLVRDLPQGFSALEPLVDLPIGINITRFQTLLALHRSYLTPGDSSSGWTAGAAAYYVGYLQPRTFLLKYNENGTITDAVDCALDPLSETKCTLKSFTVEKGIYQTSNFRVQPTESIVRFPNITNLCPFGEVFNATRFASVYAWNRKRISNCVADYSVLYNSASFSTFKCYGVSPTKLNDLCFTNVYADSFVIRGDEVRQIAPGQTGKIADYNYKLPDDFTGCVIAWNSNNLDSKVGGNYNYLYRLFRKSNLKPFERDISTEIYQAGSTPCNGVEGFNCYFPLQSYGFQPTNGVGYQPYRVVVLSFELLHAPATVCGPKKSTNLVKNKCVNFNFNGLTGTGVLTESNKKFLPFQQFGRDIADTTDAVRDPQTLEILDITPCSFGGVSVITPGTNTSNQVAVLYQGVNCTEVPVAIHADQLTPTWRVYSTGSNVFQTRAGCLIGAEHVNNSYECDIPIGAGICASYQTQTNSPRRARSVASQSIIAYTMSLGAENSVAYSNNSIAIPTNFTISVTTEILPVSMTKTSVDCTMYICGDSTECSNLLLQYGSFCTQLNRALTGIAVEQDKNTQEVFAQVKQIYKTPPIKDFGGFNFSQILPDPSKPSKRSFIEDLLFNKVTLADAGFIKQYGDCLGDIAARDLICAQKFNGLTVLPPLLTDEMIAQYCSALLAGTITSGWTFGAGAALQIPFAMQMAYRFNGIGVTQNVLYENQKLIANQFNSAIGKIQDSLSSTASALGKLQDVVNQNAQALNTLVKQLSSNFGAISSVLNDILSRLDKVEAEVQIDRLITGRLQSLQTYVTQQLIRAAEIRASANLAATKMSECVLGQSKRVDFCGKGYHLMSFPQCAPHGVVFLHVTYVPAQEKNFTTAPAICHDGKAHFPREGVFVSNGTHWFVTQRNFYEPQIITTDNTFVSGNCDVVIGIVNNTVYDPLQPELDSFKEELDKYFKNHTSPDVDLGDISGINASVVNIQKEIDRLNEVAKNLNESLIDLQELGKYEQYIKGGGGSDIDPYKEFGSSYQLLNFLPLDFFPDLNALVDTATALYEEELTGREHCSPHHTAIRQALVCWDELTKLIAWMSSNITSEQVRTIIVNHVNDTWGLKVRQSLWFHLSCLTFGQHTVQEFLVSFGVWIRTPAPYRPPNAPILSTLPEHTVIC

SEQ ID NO: 7619 - protein, 1365 aa, Artificial Sequence
  SARS-CoV-2/Belgium/ULG-6939/2020__EPI_ISL_417020 spike protein (1-1211)(T874C_S1055C) WhcAg construct
MFVFLVLLPLVSSQCVNLTTRTQLPPAYTNSFTRGVYYPDKVFRSSVLHSTQDLFLPFFSNVTWFHAIHVSGTNGTKRFDNPVLPFNDGVYFASTEKSNIIRGWIFGTTLDSKTQSLLIVNNATNVVIKVCEFQFCNDPFLGVYYHKNNKSWMESEFRVYSSANNCTFEYVSQPFLMDLEGKQGNFKNLREFVFKNIDGYFKIYSKHTPINLVRDLPQGFSALEPLVDLPIGINITRFQTLLALHRSYLTPGDSSSGWTAGAAAYYVGYLQPRTFLLKYNENGTITDAVDCALDPLSETKCTLKSFTVEKGIYQTSNFRVQPTESIVRFPNITNLCPFGEVFNATRFASVYAWNRKRISNCVADYSVLYNSASFSTFKCYGVSPTKLNDLCFTNVYADSFVIRGDEVRQIAPGQTGKIADYNYKLPDDFTGCVIAWNSNNLDSKVGGNYNYLYRLFRKSNLKPFERDISTEIYQAGSTPCNGVEGFNCYFPLQSYGFQPTNGVGYQPYRVVVLSFELLHAPATVCGPKKSTNLVKNKCVNFNFNGLTGTGVLTESNKKFLPFQQFGRDIADTTDAVRDPQTLEILDITPCSFGGVSVITPGTNTSNQVAVLYQGVNCTEVPVAIHADQLTPTWRVYSTGSNVFQTRAGCLIGAEHVNNSYECDIPIGAGICASYQTQTNSPRRARSVASQSIIAYTMSLGAENSVVYSNNSIAIPTNFTISVTTEILPVSMTKTSVDCTMYICGDSTECSNLLLQYGSFCTQLNRALTGIAVEQDKNTQEVFAQVKQIYKTPPIKDFGGFNFSQILPDPSKPSKRSFIEDLLFNKVTLADAGFIKQYGDCLGDIAARDLICAQKFNGLTVLPPLLTDEMIAQYCSALLAGTITSGWTFGAGAALQIPFAMQMAYRFNGIGVTQNVLYENQKLIANQFNSAIGKIQDSLSSTASALGKLQDVVNQNAQALNTLVKQLSSNFGAISSVLNDILSRLDKVEAEVQIDRLITGRLQSLQTYVTQQLIRAAEIRASANLAATKMSECVLGQSKRVDFCGKGYHLMSFPQCAPHGVVFLHVTYVPAQEKNFTTAPAICHDGKAHFPREGVFVSNGTHWFVTQRNFYEPQIITTDNTFVSGNCDVVIGIVNNTVYDPLQPELDSFKEELDKYFKNHTSPDVDLGDISGINASVVNIQKEIDRLNEVAKNLNESLIDLQELGKYEQYIKGGGGSDIDPYKEFGSSYQLLNFLPLDFFPDLNALVDTATALYEEELTGREHCSPHHTAIRQALVCWDELTKLIAWMSSNITSEQVRTIIVNHVNDTWGLKVRQSLWFHLSCLTFGQHTVQEFLVSFGVWIRTPAPYRPPNAPILSTLPEHTVIC

SEQ ID NO: 7620 - protein, 1365 aa, Artificial Sequence
  SARS-CoV-2/France/HF2496/2020__EPI_ISL_418231 spike protein (1-1211)(T874C_S1055C) WhcAg construct
MFVFLVLLPLVSSQCVNLTTRTQLPPAYTNSFTRGVYYPDKVFRSSVLHSTQDLFLPFFSNVTWFHAIHVSGTNGTKRFDNPVLPFNDGVYFASTEKSNIIRGWIFGTTLDSKTQSLLIVNNATNVVIKVCEFQFCNDPFLGVYYHKNNKSWMESEFRVYSSANNCTFEYVSQPFLMDLEGKQGNFKNLREFVFKNIDGYFKIYSKHTPINLVRDLPQGFSALEPLVDLPIGINITRFQTLLALHRSYLTPGDSSSGWTAGAAAYYVGYLQPRTFLLKYNENGTITDAVDCALDPLSETKCTLKSFTVEKGIYQTSNFRVQPTESIVRFPNITNLCPFGEVFNATRFASVYAWNRKRISNCVADYSVLYNSASFSTFKCYGVSPTKLNDLCFTNVYADSFVIRGDEVRQIAPGQTGKIADYNYKLPDDFTGCVIAWNSNNLDSKVGGNYNYLYRLFRKSNLKPFERDISTEIYQAGSTPCNGVEGFNCYFPLQSYGFQPTNGVGYQPYRVVVLSFELLHAPATVCGPKKSTNLVKNKCVNFNFNGLTGTGVLTESNKKFLPFQQFGRDIADTTDAVRDPQTLEILDITPCSFGGVSVITPGTNTSNQVAVLYQGVNCTEVPVAIHADQLTPTWRVYSTGSNVFQTRAGCLIGAEHVNNSYECDIPIGAGICASYQTQTNSPRRARSVASQSIIAYTMSLGAENSVAYSNNSIAIPTNFTISVTTEILPVSMTKTSVDCTMYICGDSTECSNLLLQYGSFCTQLNRALTGIAVEQDKNTQEVFAQVKQIYKTPPIKDFGGFNFSQILPDPSKPSKRSFIEDLLFNKVTLADAGFIKQYGDCLGDIVARDLICAQKFNGLTVLPPLLTDEMIAQYCSALLAGTITSGWTFGAGAALQIPFAMQMAYRFNGIGVTQNVLYENQKLIANQFNSAIGKIQDSLSSTASALGKLQDVVNQNAQALNTLVKQLSSNFGAISSVLNDILSRLDKVEAEVQIDRLITGRLQSLQTYVTQQLIRAAEIRASANLAATKMSECVLGQSKRVDFCGKGYHLMSFPQCAPHGVVFLHVTYVPAQEKNFTTAPAICHDGKAHFPREGVFVSNGTHWFVTQRNFYEPQIITTDNTFVSGNCDVVIGIVNNTVYDPLQPELDSFKEELDKYFKNHTSPDVDLGDISGINASVVNIQKEIDRLNEVAKNLNESLIDLQELGKYEQYIKGGGGSDIDPYKEFGSSYQLLNFLPLDFFPDLNALVDTATALYEEELTGREHCSPHHTAIRQALVCWDELTKLIAWMSSNITSEQVRTIIVNHVNDTWGLKVRQSLWFHLSCLTFGQHTVQEFLVSFGVWIRTPAPYRPPNAPILSTLPEHTVIC

SEQ ID NO: 7621 - protein, 1365 aa, Artificial Sequence
  SARS-CoV-2/USA/WA-UW291/2020__EPI_ISL_418076 spike protein (1-1211)(T874C_S1055C) WhcAg construct
MFVFLVLLPLVSSQCVNLTTRTQLPPAYTNSFTRGVYYPDKVFRSSVLHSTQDLFLPFFSNVTWFHAIHVSGTNGTKRFDNPVLPFNDGVYFASTEKSNIIRGWIFGTTLDSKTQSLLIVNNATNVVIKVCEFQFCNDPFLGVYYHKNNKSWMESEFRVYSSANNCTFEYVSQPFLMDLEGKQGNFKNLREFVFKNIDGYFKIYSKHTPINLVRDLPQGFSALEPLVDLPIGINITRFQTLLALHRSYLTPGDSSSGWTAGAAAYYVGYLQPRTFLLKYNENGTITDAVDCALDPLSETKCTLKSFTVEKGIYQTSNFRVQPTESIVRFPNITNLCPFGEVFNATRFASVYAWNRKRISNCVADYSVLYNSASFSTFKCYGVSPTKLNDLCFTNVYADSFVIRGDEVRQIAPGQTGKIADYNYKLPDDFTGCVIAWNSNNLDSKVGGNYNYLYRLFRKSNLKPFERDISTEIYQAGSTPCNGVEGFNCYFPLQSYGFQPTNGVGYQPYRVVVLSFELLHAPATVCGPKKSTNLVKNKCVNFNFNGLTGTGVLTESNKKFLPFQQFGRDIADTTDAVRDPQTLEILDITPCSFGGVSVITPGTNTSNQVAVLYQGVNCTEVPVAIHADQLTPTWRVYSTGSNVFQTRAGCLIGAEHVNNSYECDIPIGAGICASYQTQTNSPRRARSVASQSIIAYTMSLGAENSVAYSNNSIAIPTNFTISVTTEILPVSMTKTSVDCTMYICGDSTECSNLLLQYGSFCTQLNRALTGIAVEQDKNTQEVFAQVKQIYKTPPIKDFGGFNFSQILPDPSKPSKRSFIEDLLFNKVTLADAGFIKQYGDCLGDIAARDLICAQKFNGLTVLPPLLTDEMIAQYCSALLAGTITSGWTFGAGAALQIPFAMQMAYRFNGIGVTQNVLYENQKLIANQFNSAIGKIQYSLSSTASALGKLQDVVNQNAQALNTLVKQLSSNFGAISSVLNDILSRLDKVEAEVQIDRLITGRLQSLQTYVTQQLIRAAEIRASANLAATKMSECVLGQSKRVDFCGKGYHLMSFPQCAPHGVVFLHVTYVPAQEKNFTTAPAICHDGKAHFPREGVFVSNGTHWFVTQRNFYEPQIITTDNTFVSGNCDVVIGIVNNTVYDPLQPELDSFKEELDKYFKNHTSPDVDLGDISGINASVVNIQKEIDRLNEVAKNLNESLIDLQELGKYEQYIKGGGGSDIDPYKEFGSSYQLLNFLPLDFFPDLNALVDTATALYEEELTGREHCSPHHTAIRQALVCWDELTKLIAWMSSNITSEQVRTIIVNHVNDTWGLKVRQSLWFHLSCLTFGQHTVQEFLVSFGVWIRTPAPYRPPNAPILSTLPEHTVIC

SEQ ID NO: 7622 - protein, 1365 aa, Artificial Sequence; identical to SEQ ID NO: 7585
  SARS-CoV-2/Portugal/PT0034/2020__EPI_ISL_418019 spike protein (1-1211)(T874C_S1055C) WhcAg construct

SEQ ID NO: 7623 - protein, 1365 aa, Artificial Sequence
  SARS-CoV-2/Iceland/202/2020__EPI_ISL_417750 spike protein (1-1211)(T874C_S1055C) WhcAg construct
MFVFLVLLPLVSSQCVNLTTRTQLPPAYTNSFTRGVYYPDKVFRSSVLHSTQDLFLPFFSNVTWFHAIHVSGTNGTKRFDNPVLPFNDGVYFASTEKSNIIRGWIFGTTLDSKTQSLLIVNNATNVVIKVCEFQFCNDPFLGVYYHKNNKSWMESEFRVYSSANNCTFEYVSQPFLMDLEGKQGNFKNLREFVFKNIDGYFKIYSKHTPINLVRDLPQGFSALEPLVDLPIGINITRFQTLLALHRSYLTPGDSSSGWTAGAAAYYVGYLQPRTFLLKYNENGTITDAVDCALDPLSETKCTLKSFTVEKGIYQTSNFRVQPTESIVRFPNITNLCPFGEVFNATRFASVYAWNRKRISNCVADYSVLYNSASFSTFKCYGVSPTKLNDLCFTNVYADSFVIRGDEVRQIAPGQTGKIADYNYKLPDDFTGCVIAWNSNNLDSKVGGNYNYLYRLFRKSNLKPFERDISTEIYQAGSTPCNGVEGFNCYFPLQSYGFQPTNGVGYQPYRVVVLSFELLHAPATVCGPKKSTNLVKNKCVNFNFNGLTGTGVLTESNKKFLPFQQFGRDIADTTDAVRDPQTLEILDITPCSFGGVSVITPGTNTSNQVAVLYQDVNCTEVPVAIHADQLTPTWRVYSTGSNVFQTRAGCLIGAEHVNNSYECDIPIGAGICASYQTQTNSPRRARSVASQSIIAYTMSLGAENSVAYSNNSIAIPTNFTISVTTEILPVSMTKTSVDCTMYICGDSTECSNLLLQYGSFCTQLNRALTGIAVEQDKNTQEVFAQVKQIYKTPPIKDFGGFNFSQILPDPSKPSKRSFIEDLLFNKVTLADAGFIKQYGDCLGDIAARDLICAQKFNGLTVLPPLLTDEMIAQYCSALLAGTITSGWTFGAGAALQIPFAMQMAYRFNGIGVTQNVLYENQKLIANQFNSAIGKIQDSLSSTASALGKLQDVVNQNAQALNTLVKQLSSNFGAISSVLNDILSRLDKVEAEVQIDRLITGRLQSLQTYVTQQLIRAAEIRASANLAATKMSECVLGQSKRVDFCGKGYHLMSFPQCAPHGVVFLHVTYVPAQEKNFTTAPAICHDGKAHFPREGVFVSNGTHWFVTQRNFYEPQIITTDNTFVSGNCDVVIGIVNNTVYDPLQPELDSFKEELDKYFKNHTSPDVDLGDIPGINASVVNIQKEIDRLNEVAKNLNESLIDLQELGKYEQYIKGGGGSDIDPYKEFGSSYQLLNFLPLDFFPDLNALVDTATALYEEELTGREHCSPHHTAIRQALVCWDELTKLIAWMSSNITSEQVRTIIVNHVNDTWGLKVRQSLWFHLSCLTFGQHTVQEFLVSFGVWIRTPAPYRPPNAPILSTLPEHTVIC

SEQ ID NO: 7624 - protein, 1365 aa, Artificial Sequence
  SARS-CoV-2/USA/WA-UW261/2020__EPI_ISL_418046 spike protein (1-1211)(T874C_S1055C) WhcAg construct
MFVFLVLLPLVSSQCVNLTTRTQLPPAYTNSFTRGVYYPDKVFRSSVLHSTQDLFLPFFSNVTWFHAIHVSGTNGTKRFDNPVLPFNDGVYFASTEKSNIIRGWIFGTTLDSKTQSLLIVNNATNVVIKVCEFQFCNDPFLGVYYHKNNKSWMESEFRVYSSANNCTFEYVSQPFLMDLEGKQGNFKNLREFVFKNIDGYFKIYSKHTPINLVRDLPQGFSALEPLVDLPIGINITRFQTLLALHRSYLTPGDSSSGWTAGAAAYYVGYLQPRTFLLKYNENGTITDAVDCALDPLSETKCTLKSFTVEKGIYQTSNFRVQPTESIVRFPNITNLCPFGEVFNATRFTSVYAWNRKRISNCVADYSVLYNSASFSTFKCYGVSPTKLNDLCFTNVYADSFVIRGDEVRQIAPGQTGKIADYNYKLPDDFTGCVIAWNSNNLDSKVGGNYNYLYRLFRKSNLKPFERDISTEIYQAGSTPCNGVEGFNCYFPLQSYGFQPTNGVGYQPYRVVVLSFELLHAPATVCGPKKSTNLVKNKCVNFNFNGLTGTGVLTESNKKFLPFQQFGRDIADTTDAVRDPQTLEILDITPCSFGGVSVITPGTNTSNQVAVLYQDVNCTEVPVAIHADQLTPTWRVYSTGSNVFQTRAGCLIGAEHVNNSYECDIPIGAGICASYQTQTNSPRRARSVASQSIIAYTMSLGAENSVAYSNNSIAIPTNFTISVTTEILPVSMTKTSVDCTMYICGDSTECSNLLLQYGSFCTQLNRALTGIAVEQDKNTQEVFAQVKQIYKTPPIKDFGGFNFSQILPDPSKPSKRSFIEDLLFNKVTLADAGFIKQYGDCLGDIAARDLICAQKFNGLTVLPPLLTDEMIAQYCSALLAGTITSGWTFGAGAALQIPFAMQMAYRFNGIGVTQNVLYENQKLIANQFNSAIGKIQDSLSSTASALGKLQDVVNQNAQALNTLVKQLSSNFGAISSVLNDILSRLDKVEAEVQIDRLITGRLQSLQTYVTQQLIRAAEIRASANLAATKMSECVLGQSKRVDFCGKGYHLMSFPQCAPHGVVFLHVTYVPAQEKNFTTAPAICHDGKAHFPREGVFVSNGTHWFVTQRNFYEPQIITTDNTFVSGNCDVVIGIVNNTVYDPLQPELDSFKEELDKYFKNHTSPDVDLGDISGINASVVNIQKEIDRLNEVAKNLNESLIDLQELGKYEQYIKGGGGSDIDPYKEFGSSYQLLNFLPLDFFPDLNALVDTATALYEEELTGREHCSPHHTAIRQALVCWDELTKLIAWMSSNITSEQVRTIIVNHVNDTWGLKVRQSLWFHLSCLTFGQHTVQEFLVSFGVWIRTPAPYRPPNAPILSTLPEHTVIC

SEQ ID NO: 7625 - protein, 1365 aa, Artificial Sequence
  SARS-CoV-2/Portugal/PT0035/2020__EPI_ISL_418020 spike protein (1-1211)(T874C_S1055C) WhcAg construct
MFVFLVLLPLVSSQCVNLTTRTQLPPAYTNSFTRGVYYPDKVFRSSVLHSTQDLFLPFFSNVTWFHAIHVSGTNGTKRFDNPVLPFNDGVYFASTEKSNIIRGWIFGTTLDSKTQSLLIVNNATNVVIKVCEFQFCNDPFLGVYYHKNNKSWMESEFRVYSSANNCTFEYVSQPFLMDLEGKQGNFKNLREFVFKNIDGYFKIYSKHTPINLVRDLPQGFSALEPLVDLPIGINITRFQTLLALHRSYLTPGDSSSGWTAGAAAYYVGYLQPRTFLLKYNENGTITDAVDCALDPLSETKCTLKSFTVEKGIYQTSNFRVQPTESIVRFPNITNLCPFGEVFNATRFASVYAWNRKRISNCVADYSVLYNSASFSTFKCYGVSPTKLNDLCFTNVYADSFVIRGDEVRQIAPGQTGKIADYNYKLPDDFTGCVIAWNSNNLDSKVGGNYNYLYRLFRKSNLKPFERDISTEIYQAGSTPCNGVEGFNCYFPLQSYGFQPTNGVGYQPYRVVVLSFELLHAPATVCGPKKSTNLVKNKCVNFNFNGLTGTGVLTESNKKFLPFQQFGRDIADTTDAVRDPQTLEILDITPCSFGGVSVITPGTNTSNQVAVLYQDVNCTEVPVAIHADQLTPTWRVYSTGSNVFQTRAGCLIGAEHVNNSYECDIPIGAGICASYQTQTNSPRRARSVASQSIIAYTMSLGAENSVAYSNNSIAIPTNFTISVTTEILPVSMTKTSVDCTMYICGDSTECSNLLLQYGSFCTQLNRALTGIAVEQDKNTQEVFAQVKQIYKTPPIKDFGGFNFSQILPDPSKPSKRSFIEDLLFNKVTLADAGFIKQYGDCLGDISARDLICAQKFNGLTVLPPLLTDEMIAQYCSALLAGTITSGWTFGAGAALQIPFAMQMAYRFNGIGVTQNVLYENQKLIANQFNSAIGKIQDSLSSTASALGKLQDVVNQNAQALNTLVKQLSSNFGAISSVLNDILSRLDKVEAEVQIDRLITGRLQSLQTYVTQQLIRAAEIRASANLAATKMSECVLGQSKRVDFCGKGYHLMSFPQCAPHGVVFLHVTYVPAQEKNFTTAPAICHDGKAHFPREGVFVSNGTHWFVTQRNFYEPQIITTDNTFVSGNCDVVIGIVNNTVYDPLQPELDSFKEELDKYFKNHTSPDVDLGDISGINASVVNIQKEIDRLNEVAKNLNESLIDLQELGKYEQYIKGGGGSDIDPYKEFGSSYQLLNFLPLDFFPDLNALVDTATALYEEELTGREHCSPHHTAIRQALVCWDELTKLIAWMSSNITSEQVRTIIVNHVNDTWGLKVRQSLWFHLSCLTFGQHTVQEFLVSFGVWIRTPAPYRPPNAPILSTLPEHTVIC

SEQ ID NO: 7626 - protein, 1365 aa, Artificial Sequence
  SARS-CoV-2/USA/NY-NYUMC7/2020__EPI_ISL_418192 spike protein (1-1211)(T874C_S1055C) WhcAg construct
MFVFLVLLPLVSSQCVNLTTRTQLPPAYTNSFTRGVYYPDKVFRSSVLHSTQDLFLPFFSNVTWFHAIHVSGTNGTKRFDNPVLPFNDGVYFASTEKSNIIRGWIFGTTLDSKTQSLLIVNNATNVVIKVCEFQFCNDPFLGVYHHKNNKSWMESEFRVYSSANNCTFEYVSQPFLMDLEGKQGNFKNLREFVFKNIDGYFKIYSKHTPINLVRDLPQGFSALEPLVDLPIGINITRFQTLLALHRSYLTPGDSSSGWTAGAAAYYVGYLQPRTFLLKYNENGTITDAVDCALDPLSETKCTLKSFTVEKGIYQTSNFRVQPTESIVRFPNITNLCPFGEVFNATRFASVYAWNRKRISNCVADYSVLYNSASFSTFKCYGVSPTKLNDLCFTNVYADSFVIRGDEVRQIAPGQTGKIADYNYKLPDDFTGCVIAWNSNNLDSKVGGNYNYLYRLFRKSNLKPFERDISTEIYQAGSTPCNGVEGFNCYFPLQSYGFQPTNGVGYQPYRVVVLSFELLHAPATVCGPKKSTNLVKNKCVNFNFNGLTGTGVLTESNKKFLPFQQFGRDIADTTDAVRDPQTLEILDITPCSFGGVSVITPGTNTSNQVAVLYQGVNCTEVPVAIHADQLTPTWRVYSTGSNVFQTRAGCLIGAEHVNNSYECDIPIGAGICASYQTQTNSPRRARSVASQSIIAYTMSLGAENSVAYSNNSIAIPTNFTISVTTEILPVSMTKTSVDCTMYICGDSTECSNLLLQYGSFCTQLNRALTGIAVEQDKNTQEVFAQVKQIYKTPPIKDFGGFNFSQILPDPSKPSKRSFIEDLLFNKVTLADAGFIKQYGDCLGDIAARDLICAQKFNGLTVLPPLLTDEMIAQYCSALLAGTITSGWTFGAGAALQIPFAMQMAYRFNGIGVTQNVLYENQKLIANQFNSAIGKIQDSLSSTASALGKLQDVVNQNAQALNTLVKQLSSNFGAISSVLNDILSRLDKVEAEVQIDRLITGRLQSLQTYVTQQLIRAAEIRASANLAATKMSECVLGQSKRVDFCGKGYHLMSFPQCAPHGVVFLHVTYVPAQEKNFTTAPAICHDGKAHFPREGVFVSNGTHWFVTQRNFYEPQIITTDNTFVSGNCDVVIGIVNNTVYDPLQPELDSFKEELDKYFKNHTSPDVDLGDISGINASVVNIQKEIDRLNEVAKNLNESLIDLQELGKYEQYIKGGGGSDIDPYKEFGSSYQLLNFLPLDFFPDLNALVDTATALYEEELTGREHCSPHHTAIRQALVCWDELTKLIAWMSSNITSEQVRTIIVNHVNDTWGLKVRQSLWFHLSCLTFGQHTVQEFLVSFGVWIRTPAPYRPPNAPILSTLPEHTVIC

SEQ ID NO: 7627 - protein, 1365 aa, Artificial Sequence
  SARS-CoV-2/Iceland/189/2020__EPI_ISL_417709 spike protein (1-1211)(T874C_S1055C) WhcAg construct
MFVFLVLLPLVSSQCVNLTTRTQLPPAYTNSFTRGVYYPDKVFRSSVLHSTQDLFLPFFSNVTWFHAIHVSGTNGTKRFDNPVLPFNDGVYFASTEKSNIIRGWIFGTTLDSKTQSLLIVNNATNVVIKVCEFQFCNDPFLGVYYHKNNKSWMESEFRVYSSANNCTFEYVSQPFLMDLEGKQGNFKNLREFVFKNIDGYFKIYSKHTPINLVRDLPQGFSALEPLVDLPIGINITRFQTLLALHRSYLTPGDSSSGWTAGAAAYYVGYLQPRTFLLKYNENGTITDAVDCALDPLSETKCTLKSFTVEKGIYQTSNFRVQPTESIVRFPNITNLCPFGEVFNATRFASVYAWNRKRISNCVADYSVLYNSASFSTFKCYGVSPTKLNDLCFTNVYADSFVIRGDEVRQIAPGQTGKIADYNYKLPDDFTGCVIAWNSNNLDSKVGGNYNYLYRLFRKSNLKPFERDISTEIYQAGSTPCNGVEGFNCYFPLQSYGFQPTNGVGYQPYRVVVLSFELLHAPATVCGPKKSTNLVKNKCVNFNFNGLTGTGVLTESNKKFLPFQQFGRDIADTTDAVRDPQTLEILDITPCSFGGVSVITPGTNTSNQVAVLYQGVNCTEVPVAIHADQLTPTWRVYSTGSNVFQTRAGCLIGAEHVNNSYECDIPIGAGICASYQTQTNSPRRARSVASQSIIAYTMSLGAENSVAYSNNSIAIPTNFTISVTTEILPVSMTKTSVDCTMYICGDSTECSNLLLQYGSFCTQLNRALTGIAVEQDKNTQEVFAQVKQIYKTPPIKDFGGFNFSQILPDPSKPSKRSFIEDLLFNKVTLADAGFTKQYGDCLGDIAARDLICAQKFNGLTVLPPLLTDEMIAQYCSALLAGTITSGWTFGAGAALQIPFAMQMAYRFNGIGVTQNVLYENQKLIANQFNSAIGKIQDSLSSTASALGKLQDVVNQNAQALNTLVKQLSSNFGAISSVLNDILSRLDKVEAEVQIDRLITGRLQSLQTYVTQQLIRAAEIRASANLAATKMSECVLGQSKRVDFCGKGYHLMSFPQCAPHGVVFLHVTYVPAQEKNFTTAPAICHDGKAHFPREGVFVSNGTHWFVTQRNFYEPQIITTDNTFVSGNCDVVIGIVNNTVYDPLQPELDSFKEELDKYFKNHTSPDVDLGDISGINASVVNIQKEIDRLNEVAKNLNESLIDLQELGKYEQYIKGGGGSDIDPYKEFGSSYQLLNFLPLDFFPDLNALVDTATALYEEELTGREHCSPHHTAIRQALVCWDELTKLIAWMSSNITSEQVRTIIVNHVNDTWGLKVRQSLWFHLSCLTFGQHTVQEFLVSFGVWIRTPAPYRPPNAPILSTLPEHTVIC

SEQ ID NO: 7628 - protein, 1365 aa, Artificial Sequence
  SARS-CoV-2/Australia/NSW56/2020__EPI_ISL_417408 spike protein (1-1211)(T874C_S1055C) WhcAg construct
MFVFLVLLPLVSSQCVNLTTRTQLPPAYTNSFTRGVYYPDKVFRSSVLHSTQDLFLPFFSNVTWFHAIHVSGTNGTKRFDNPVLPFNDGVYFASTEKSNIIRGWIFGTTLDSKTQSLLIVNNATNVVIKVCEFQFCNDPFLGVYYHKNNKSWMESEFRVYSSANNCTFEYVSQPFLMDLEGKQGNFKNLREFVFKNIDGYFKIYSKHTPINLVRDLPQGFSALEPLVDLPIGINITRFQTLLALHRSYLTPGDSSSGWTAGAAAYYVGYLQPRTFLLKYNENGTITDAVDCALDPLSETKCTLKSFTVEKGIYQTSNFRVQPTESIVRFPNITNLCPFGEVFNATRFASVYAWNRKRISNCVADYSVLYNSASFSTFKCYGVSPTKLNDLCFTNVYADSFVIRGDEVRQIAPGQTGKIADYNYKLPDDFTGCVIAWNSNNLDSKVGGNYNYLYRLFRKSNLKPFERDISTEIYQAGSTPCNGVEGFNCYFPLQSYGFQPTNGVGYQPYRVVVLSFELLHAPATVCGPKKSTNLVKNKCVNFNFNGLTGTGVLTESNKKFLPFQQFGRDIADTTDAVRDPQTLEILDITPCSFGGVSVITPGTNTSNQVAVLYQDVNCTEVPVAIHADQLTPTWRVYSTGSNVFQTRAGCLIGAEHVNNSYECDIPIGAGICASYQTQTNSPRRARSVASQSIIAYTMSLGAENSVAYSNNSIAIPTNFTISVTTEILPVSMTKTSVDCTMYICGDSTECSNLLLQYGSFCTQLNRALTGIAVEQDKNTQEVFAQVKQIYKTPPIKDFGGFNFSQILPDSSKPSKRSFIEDLLFNKVTLADAGFIKQYGDCLGDIAARDLICAQKFNGLTVLPPLLTDEMIAQYCSALLAGTITSGWTFGAGAALQIPFAMQMAYRFNGIGVTQNVLYENQKLIANQFNSAIGKIQDSLSSTASALGKLQDVVNQNAQALNTLVKQLSSNFGAISSVLNDILSRLDKVEAEVQIDRLITGRLQSLQTYVTQQLIRAAEIRASANLAATKMSECVLGQSKRVDFCGKGYHLMSFPQCAPHGVVFLHVTYVPAQEKNFTTAPAICHDGKAHFPREGVFVSNGTHWFVTQRNFYEPQIITTDNTFVSGNCDVVIGIVNNTVYDPLQPELDSFKEELDKYFKNHTSPDVDLGDISGINASVVNIQKEIDRLNEVAKNLNESLIDLQELGKYEQYIKGGGGSDIDPYKEFGSSYQLLNFLPLDFFPDLNALVDTATALYEEELTGREHCSPHHTAIRQALVCWDELTKLIAWMSSNITSEQVRTIIVNHVNDTWGLKVRQSLWFHLSCLTFGQHTVQEFLVSFGVWIRTPAPYRPPNAPILSTLPEHTVIC

SEQ ID NO: 7629 - protein, 1365 aa, Artificial Sequence
  SARS-CoV-2/Iceland/280/2020__EPI_ISL_417608 spike protein (1-1211)(T874C_S1055C) WhcAg construct
MFVFLVLLPLVSSQCVNLTTRTQLPPAYTNSFTRGVYYPDKVFRSSVLHSTQDLFLPFFSNVTWFHAIHVSGTNGTKRFDNPVLPFNDGVYFASTEKSNIIRGWIFGTTLDSKTQSLLIVNNATNVVIKVCEFQFCNDPFLGVYYHKNNKSWMESEFRVYSSANNCTFEYVSQPFLMDLEGKQGNFKNLREFVFKNIDGYFKIYSKHTPINLVRDLPQGFSALEPLVDLPIGINITRFQTLLALHRSYLTPGDSSSGWTAGAAAYYVGYLQPRTFLLKYNENGTITDAVDCALDPLSETKCTLKSFTVEKGIYQTSNFRVQPTESIVRFPNITNLCPFGEVFNATRFASVYAWNRKRISNCVADYSVLYNSASFSTFKCYGVSPTKLNDLCFTNVYADSFVIRGDEVRQIAPGQTGKIADYNYKLPDDFTGCVIAWNSNNLDSKVGGNYNYLYRLFRKSNLKPFERDISTEIYQAGSTPCNGVEGFNCYFPLQSYGFQPTNGVGYQPYRVVVLSFELLHAPATVCGPKKSTNLVKNKCVNFNFNGLTGTGVLTESNKKFLPFQQFGRDIADTTDAVRDPQTLEILDITPCSFGGVSVITPGTNTSNQVAVLYQGVNCTEVPVAIHADQLTPTWRVYSTGSNVFQTRAGCLIGAEHVNNSYECDIPIGAGICASYHTQTNSPRRARSVASQSIIAYTMSLGAENSVAYSNNSIAIPTNFTISVTTEILPVSMTKTSVDCTMYICGDSTECSNLLLQYGSFCTQLNRALTGIAVEQDKNTQEVFAQVKQIYKTPPIKDFGGFNFSQILPDPSKPSKRSFIEDLLFNKVTLADAGFIKQYGDCLGDIAARDLICAQKFNGLTVLPPLLTDEMIAQYCSALLAGTITSGWTFGAGAALQIPFAMQMAYRFNGIGVTQNVLYENQKLIANQFNSAIGKIQDSLSSTASALGKLQDVVNQNAQALNTLVKQLSSNFGAISSVLNDILSRLDKVEAEVQIDRLITGRLQSLQTYVTQQLIRAAEIRASANLAATKMSECVLGQSKRVDFCGKGYHLMSFPQCAPHGVVFLHVTYVPAQEKNFTTAPAICHDGKAHFPREGVFVSNGTHWFVTQRNFYEPQIITTDNTFVSGNCDVVIGIVNNTVYDPLQPELDSFKEELDKYFKNHTSPDVDLGDISGINASVVNIQKEIDRLNEVAKNLNESLIDLQELGKYEQYIKGGGGSDIDPYKEFGSSYQLLNFLPLDFFPDLNALVDTATALYEEELTGREHCSPHHTAIRQALVCWDELTKLIAWMSSNITSEQVRTIIVNHVNDTWGLKVRQSLWFHLSCLTFGQHTVQEFLVSFGVWIRTPAPYRPPNAPILSTLPEHTVIC

SEQ ID NO: 7630 - protein, 1365 aa, Artificial Sequence; identical to SEQ ID NO: 7585
  SARS-CoV-2/Iceland/247/2020__EPI_ISL_417575 spike protein (1-1211)(T874C_S1055C) WhcAg construct

SEQ ID NO: 7631 - protein, 1365 aa, Artificial Sequence
  SARS-CoV-2/Iceland/238/2020__EPI_ISL_417566 spike protein (1-1211)(T874C_S1055C) WhcAg construct
MFVFLVLLPLVSSQCVNLTTRTQLPPAYTNSFTRGVYYPDKVFRSSVLHSTQDLFLPFFSNVTWFHAIHVSGTNGTKRFDNPVLPFNDGVYFASTEKSNIIRGWIFGTTLDSKTQSLLIVNNATNVVIKVCEFQFCNDPFLGVYYHKNNKSWMESEFRVYSSANNCTFEYVSQPFLMDLEGKQGNFKNLREFVFKNIDGYFKIYSKHTPINLVRDLPQGFSALEPLVDLPIGINITRFQTLLALHRSYLTPGDSSSGWTAGAAAYYVGYLQPRTFLLKYNENGTITDAVDCALDPLSETKCTLKSFTVEKGIYQTSNFRVQPTESIVRFPNITNLCPFGEVFNATRFASVYAWNRKRISNCVADYSVLYNSASFSTFKCYGVSPTKLNDLCFTNVYADSFVIRGDEVRQIAPGQTGKIADYNYKLPDDFTGCVIAWNSNNLDSKVGGNYNYLYRLFRKSNLKPFERDISTEIYQAGSTPCNGVEGFNCYFPLQSYGFQPTNGVGYQPYRVVVLSFELLHAPATVCGPKKSTNLVKNKCVNFNFNGLTGTGVLTESNKKFLPFQQFGRDIADTTDAVRDPQTLEILDITPCSFGGVSVITPGTNTSNQVAVLYQGVNCTEVPVAIHADQLTPTWRVYSTGSNVFQTRAGCLIGAEHVNNSYECDIPIGAGICASYQTQTNSPRRARSVASQSIIAYTMSLGAENSVAYSNNSIAIPTNFTISVTTEILPVSMTKTSVDCTMYICGDSTECSNLLLQYGSFCTQLNRALTGIAVEQDKNTQEVFAQVKQIYKTPPIKDFGGFNFSQILPDPSKPSKRSFIEDLLFNKVTLADVGFIKQYGDCLGDIAARDLICAQKFNGLTVLPPLLTDEMIAQYCSALLAGTITSGWTFGAGAALQIPFAMQMAYRFNGIGVTQNVLYENQKLIANQFNSAIGKIQDSLSSTASALGKLQDVVNQNAQALNTLVKQLSSNFGAISSVLNDILSRLDKVEAEVQIDRLITGRLQSLQTYVTQQLIRAAEIRASANLAATKMSECVLGQSKRVDFCGKGYHLMSFPQCAPHGVVFLHVTYVPAQEKNFTTAPAICHDGKAHFPREGVFVSNGTHWFVTQRNFYEPQIITTDNTFVSGNCDVVIGIVNNTVYDPLQPELDSFKEELDKYFKNHTSPDVDLGDISGINASVVNIQKEIDRLNEVAKNLNESLIDLQELGKYEQYIKGGGGSDIDPYKEFGSSYQLLNFLPLDFFPDLNALVDTATALYEEELTGREHCSPHHTAIRQALVCWDELTKLIAWMSSNITSEQVRTIIVNHVNDTWGLKVRQSLWFHLSCLTFGQHTVQEFLVSFGVWIRTPAPYRPPNAPILSTLPEHTVIC

SEQ ID NO: 7632 - protein, 1365 aa, Artificial Sequence
  SARS-CoV-2/Greece/16/2020__EPI_ISL_418265 spike protein (1-1211)(T874C_S1055C) WhcAg construct
MFVFLVLLPLVSSQCVNLTTRTQLPPAYTNSFTRGVYYPDKVFRSSVLHSTQDLFLPFFSNVTWFHAIHVSGTNGTKRFDNPVLPFNDGVYFASTEKSNIIRGWIFGTTLDSKTQSLLIVNNATNVVIKVCEFQFCNDPFLGVYYHKNNKSWMESEFRVYSSANNCTFEYVSQPFLMDLEGKQGNFKNLREFVFKNVDGYFKIYSKHTPINLVRDLPQGFSALEPLVDLPIGINITRFQTLLALHRSYLTPGDSSSGWTAGAAAYYVGYLQPRTFLLKYNENGTITDAVDCALDPLSETKCTLKSFTVEKGIYQTSNFRVQPTESIVRFPNITNLCPFGEVFNATRFASVYAWNRKRISNCVADYSVLYNSASFSTFKCYGVSPTKLNDLCFTNVYADSFVIRGDEVRQIAPGQTGKIADYNYKLPDDFTGCVIAWNSNNLDSKVGGNYNYLYRLFRKSNLKPFERDISTEIYQAGSTPCNGVEGFNCYFPLQSYGFQPTNGVGYQPYRVVVLSFELLHAPATVCGPKKSTNLVKNKCVNFNFNGLTGTGVLTESNKKFLPFQQFGRDIADTTDAVRDPQTLEILDITPCSFGGVSVITPGTNTSNQVAVLYQDVNCTEVPVAIHADQLTPTWRVYSTGSNVFQTRAGCLIGAEHVNNSYECDIPIGAGICASYQTQTNSPRRARSVASQSIIAYTMSLGAENSVAYSNNSIAIPTNFTISVTTEILPVSMTKTSVDCTMYICGDSTECSNLLLQYGSFCTQLNRALTGIAVEQDKNTQEVFAQVKQIYKTPPIKDFGGFNFSQILPDPSKPSKRSFIEDLLFNKVTLADAGFIKQYGDCLGDIAARDLICAQKFNGLTVLPPLLTDEMIAQYCSALLAGTITSGWTFGAGAALQIPFAMQMAYRFNGIGVTQNVLYENQKLIANQFNSAIGKIQDSLSSTASALGKLQDVVNQNAQALNTLVKQLSSNFGAISSVLNDILSRLDKVEAEVQIDRLITGRLQSLQTYVTQQLIRAAEIRASANLAATKMSECVLGQSKRVDFCGKGYHLMSFPQCAPHGVVFLHVTYVPAQEKNFTTAPAICHDGKAHFPREGVFVSNGTHWFVTQRNFYEPQIITTDNTFVSGNCDVVIGIVNNTVYDPLQPELDSFKEELDKYFKNHTSPDVDLGDISGINASVVNIQKEIDRLNEVAKNLNESLIDLQELGKYEQYIKGGGGSDIDPYKEFGSSYQLLNFLPLDFFPDLNALVDTATALYEEELTGREHCSPHHTAIRQALVCWDELTKLIAWMSSNITSEQVRTIIVNHVNDTWGLKVRQSLWFHLSCLTFGQHTVQEFLVSFGVWIRTPAPYRPPNAPILSTLPEHTVIC

SEQ ID NO: 7633 - protein, 1365 aa, Artificial Sequence
  SARS-CoV-2/Iceland/319/2020__EPI_ISL_417648 spike protein (1-1211)(T874C_S1055C) WhcAg construct
MFVFLVLLPLVSSQCVNLTTRTQLPPAYTNSFTRGVYYPDKVFRSSVLHSTQDLFLPFFSNVTWFHAIHVSGTNGTKRFDNPVLPFNDGVYFASTEKSNIIRGWIFGTTLDSKTQSLLIVNNATNVVIKVCEFQFCNDPFLGVYYHKNNKSWMESEFRVYSSANNCTFEYVSQPFLIDLEGKQGNFKNLREFVFKNIDGYFKIYSKHTPINLVRDLPQGFSALEPLVDLPIGINITRFQTLLALHRSYLTPGDSSSGWTAGAAAYYVGYLQPRTFLLKYNENGTITDAVDCALDPLSETKCTLKSFTVEKGIYQTSNFRVQPTESIVRFPNITNLCPFGEVFNATRFASVYAWNRKRISNCVADYSVLYNSASFSTFKCYGVSPTKLNDLCFTNVYADSFVIRGDEVRQIAPGQTGKIADYNYKLPDDFTGCVIAWNSNNLDSKVGGNYNYLYRLFRKSNLKPFERDISTEIYQAGSTPCNGVEGFNCYFPLQSYGFQPTNGVGYQPYRVVVLSFELLHAPATVCGPKKSTNLVKNKCVNFNFNGLTGTGVLTESNKKFLPFQQFGRDIADTTDAVRDPQTLEILDITPCSFGGVSVITPGTNTSNQVAVLYQGVNCTEVPVAIHADQLTPTWRVYSTGSNVFQTRAGCLIGAEHVNNSYECDIPIGAGICASYQTQTNSPRRARSVASQSIIAYTMSLGAENSVAYSNNSIAIPTNFTISVTTEILPVSMTKTSVDCTMYICGDSTECSNLLLQYGSFCTQLNRALTGIAVEQDKNTQEVFAQVKQIYKTPPIKDFGGFNFSQILPDPSKPSKRSFIEDLLFNKVTLADAGFIKQYGDCLGDIAARDLICAQKFNGLTVLPPLLTDEMIAQYCSALLAGTITSGWTFGAGAALQIPFAMQMAYRFNGIGVTQNVLYENQKLIANQFNSAIGKIQDSLSSTASALGKLQDVVNQNAQALNTLVKQLSSNFGAISSVLNDILSRLDKVEAEVQIDRLITGRLQSLQTYVTQQLIRAAEIRASANLAATKMSECVLGQSKRVDFCGKGYHLMSFPQCAPHGVVFLHVTYVPAQEKNFTTAPAICHDGKAHFPREGVFVSNGTHWFVTQRNFYEPQIITTDNTFVSGNCDVVIGIVNNTVYDPLQPELDSFKEELDKYFKNHTSPDVDLGDISGINASVVNIQKEIDRLNEVAKNLNESLIDLQELGKYEQYIKGGGGSDIDPYKEFGSSYQLLNFLPLDFFPDLNALVDTATALYEEELTGREHCSPHHTAIRQALVCWDELTKLIAWMSSNITSEQVRTIIVNHVNDTWGLKVRQSLWFHLSCLTFGQHTVQEFLVSFGVWIRTPAPYRPPNAPILSTLPEHTVIC

SEQ ID NO: 7634 - protein, 1365 aa, Artificial Sequence
  SARS-CoV-2/Congo/94/2020__EPI_ISL_417947 spike protein (1-1211)(T874C_S1055C) WhcAg construct
MFVFLVLLPLVSSQCVNLTTRTQLPPAYTNSFTRGVYYPDKVFRSSVLHSTQDLFLPFFSNVTWFHAIHVSGTNGTKRFDNPVLPFNDGVYFASTEKSNIIRGWIFGTTLDSKTQSLLIVNNATNVVIKVCEFQFCNDPFLGVYYHKNNKSWMESEFRVYSSANNCTFEYVSQPFLMDLEGKQGNFKNLREFVFKNIDGYFKIYSKHTPINLVRDLPQGFSALEPLVDLPIGINITRFQTLLALHRSYLTPGDSSSGWTAGAAAYYVGYLQPRTFLLKYNENGTITDAVDCALDPLSETKCTLKSFTVEKGIYQTSNFRVQPTESIVRFPNITNLCPFGEVFNATRFASVYAWNRKRISNCVADYSVLYNSASFSTFKCYGVSPTKLNDLCFTNVYADSFVIRGDEVRQIAPGQTGKIADYNYKLPDDFTGCVIAWNSNNLDSKVGGNYNYLYRLFRKSNLKPFERDISTEIYQAGSTPCNGVEGFNCYFPLQSYGFQPTNGVGYQPYRVVVLSFELLHAPATVCGPKKSTNLVKNKCVNFNFNGLTGTGVLTESNKKFLPFQQFGRDIADTTDAVRDPQTLEILDITPCSFGGVSVITPGTNTSNQVAVLYQGVNCTEVPVAIHADQLTPTWRVYSTGSNVFQTRAGCLIGAEHVNNSYECDIPIGAGICASYQTQTNSPRRARSVASQSIIAYTMSLGAENSVAYSNNSIAIPTNFTISVTTEILPVSMTKTSVDCTMYICGDSTECSNLLLQYGSFCTQLNRALTGIAVEQDKNTQEVFAQVKQIYKTPPIKDFGGFNFSQILPDPSKPSKRSFIEDILFNKVTLADAGFIKQYGDCLGDIAARDLICAQKFNGLTVLPPLLTDEMIAQYCSALLAGTITSGWTFGAGAALQIPFAMQMAYRFNGIGVTQNVLYENQKLIANQFNSAIGKIQDSLSSTASALGKLQDVVNQNAQALNTLVKQLSSNFGAISSVLNDILSRLDKVEAEVQIDRLITGRLQSLQTYVTQQLIRAAEIRASANLAATKMSECVLGQSKRVDFCGKGYHLMSFPQCAPHGVVFLHVTYVPAQEKNFTTAPAICHDGKAHFPREGVFVSNGTHWFVTQRNFYEPQIITTDNTFVSGNCDVVIGIVNNTVYDPLQPELDSFKEELDKYFKNHTSPDVDLGDISGINASVVNIQKEIDRLNEVAKNLNESLIDLQELGKYEQYIKGGGGSDIDPYKEFGSSYQLLNFLPLDFFPDLNALVDTATALYEEELTGREHCSPHHTAIRQALVCWDELTKLIAWMSSNITSEQVRTIIVNHVNDTWGLKVRQSLWFHLSCLTFGQHTVQEFLVSFGVWIRTPAPYRPPNAPILSTLPEHTVIC

SEQ ID NO: 7635 - protein, 1365 aa, Artificial Sequence
  SARS-CoV-2/Congo/158/2020__EPI_ISL_417950 spike protein (1-1211)(T874C_S1055C) WhcAg construct
MFVFLVLLPLVSSQCVNLTTRTQLPPAYTNSFTRGVYYPDKVFRSSVLHSTQDLFLPFFSNVTWFHAIHVSGTNGTKRFDNPVLPFNDGVYFASTEKSNIIRGWIFGTTLDSKTQSLLIVNNATNVVIKVCEFQFCNDPFLGVYYHKNNKSWMESEFRVYSSANNCTFEYVSQPFLMDLEGKQGNFKNLREFVFKNIDGYFKIYSKHTPINLVRDLPQGFSALEPLVDLPIGINITRFQTLLALHRSYLTPGDSSSGWTAGAAAYYVGYLQPRTFLLKYNENGTITDAVDCALDPLSETKCTLKSFTVEKGIYQTSNFRVQPTESIVRFPNITNLCPFGEVFNATRFASVYAWNRKRISNCVADYSVLYNSASFSTFKCYGVSPTKLNDLCFTNVYADSFVIRGDEVRQIAPGQTGKIADYNYKLPDDFTGCVIAWNSNNLDSKVGGNYNYLYRLFRKSNLKPFERDISTEIYQAGSTPCNGVEGFNCYFPLQSYGFQPTNGVGYQPYRVVVLSFELLHAPATVCGPKKSTNLVKNKCVNFNFNGLTGTGVLTESNKKFLPFQQFGRDIADTTDAVRDPQTLEILDITPCSFGGVSVITPGTNTSNQVAVLYQDVNCTEVPVAIHADQLTPTWRVYSTGSNVFQTRAGCLIGAEHVNNSYECDIPIGAGICASYQTQTNSPRRARSVASQSIIAYTMSLGAENSVAYSNNSIAIPTNFTISVTTEILPVSMTKTSVDCTMYICGDSTECSNLLLQYGSFCTQLNRALTGIAVEQDKNTQEVFAQVKQIYKTPPIKDFGGFNFSQILPDPSKPSKRSFIEDLLFNKVTLADAGFIKQYGDCLGDIAARDLICAQKFNGLTVLPPLLTDEMIAQYCSALLAGTITSGWTFGAGAALQIPFAMQMAYRFNGIGVTQNVLYENQKLIANQFNSAIGKIQDSLSSTASALGKLQDVVNQNAQALNTLVKQLSSNFGAISSVLNDILSRLDKVEAEVQIDRLITGRLQSLQTYVTQQLIRAAEIRASANLAATKMSECVLGQSKRVDFCGKGYHLMSFPQCAPHGVVFLHVTYVPAQEKNFTTAPAICHDGKAHFPREGVFVSNGTHWFVTQRNFYEPQIITTDNTFLSGNCDVVIGIVNNTVYDPLQPELDSFKEELDKYFKNHTSPDVDLGDISGINASVVNIQKEIDRLNEVAKNLNESLIDLQELGKYEQYIKGGGGSDIDPYKEFGSSYQLLNFLPLDFFPDLNALVDTATALYEEELTGREHCSPHHTAIRQALVCWDELTKLIAWMSSNITSEQVRTIIVNHVNDTWGLKVRQSLWFHLSCLTFGQHTVQEFLVSFGVWIRTPAPYRPPNAPILSTLPEHTVIC

SEQ ID NO: 7636 - protein, 1365 aa, Artificial Sequence
  SARS-CoV-2/USA/UT-00034/2020__EPI_ISL_417977 spike protein (1-1211)(T874C_S1055C) WhcAg construct
MFVFLVLLPLVSSQCVNLTTRTQLPPAYTNSFTRGVYYPDKVFRSSVLHSTQDLFLPFFSNVTWFHAIHVSGTNGTKRFDNPVLPFNDGVYFASTEKSNIIRGWIFGTTLDSKTQSLLIVNNATNVVIKVCEFQFCNDPFLGVYYYKNNKSWMESEFRVYSSANNCTFEYVSQPFLMDLEGKQGNFKNLREFVFKNIDGYFKIYSKHTPINLVRDLPQGFSALEPLVDLPIGINITRFQTLLALHRSYLTPGDSSSGWTAGAAAYYVGYLQPRTFLLKYNENGTITDAVDCALDPLSETKCTLKSFTVEKGIYQTSNFRVQPTESIVRFPNITNLCPFGEVFNATRFASVYAWNRKRISNCVADYSVLYNSASFSTFKCYGVSPTKLNDLCFTNVYADSFVIRGDEVRQIAPGQTGKIADYNYKLPDDFTGCVIAWNSNNLDSKVGGNYNYLYRLFRKSNLKPFERDISTEIYQAGSTPCNGVEGFNCYFPLQSYGFQPTNGVGYQPYRVVVLSFELLHAPATVCGPKKSTNLVKNKCVNFNFNGLTGTGVLTESNKKFLPFQQFGRDIADTTDAVRDPQTLEILDITPCSFGGVSVITPGTNTSNQVAVLYQGVNCTEVPVAIHADQLTPTWRVYSTGSNVFQTRAGCLIGAEHVNNSYECDIPIGAGICASYQTQTNSPRRARSVASQSIIAYTMSLGAENSVAYSNNSIAIPTNFTISVTTEILPVSMTKTSVDCTMYICGDSTECSNLLLQYGSFCTQLNRALTGIAVEQDKNTQEVFAQVKQIYKTPPIKDFGGFNFSQILPDPSKPSKRSFIEDLLFNKVTLADAGFIKQYGDCLGDIAARDLICAQKFNGLTVLPPLLTDEMIAQYCSALLAGTITSGWTFGAGAALQIPFAMQMAYRFNGIGVTQNVLYENQKLIANQFNSAIGKIQDSLSSTASALGKLQDVVNQNAQALNTLVKQLSSNFGAISSVLNDILSRLDKVEAEVQIDRLITGRLQSLQTYVTQQLIRAAEIRASANLAATKMSECVLGQSKRVDFCGKGYHLMSFPQCAPHGVVFLHVTYVPAQEKNFTTAPAICHDGKAHFPREGVFVSNGTHWFVTQRNFYEPQIITTDNTFVSGNCDVVIGIVNNTVYDPLQPELDSFKEELDKYFKNHTSPDVDLGDISGINASVVNIQKEIDRLNEVAKNLNESLIDLQELGKYEQYIKGGGGSDIDPYKEFGSSYQLLNFLPLDFFPDLNALVDTATALYEEELTGREHCSPHHTAIRQALVCWDELTKLIAWMSSNITSEQVRTIIVNHVNDTWGLKVRQSLWFHLSCLTFGQHTVQEFLVSFGVWIRTPAPYRPPNAPILSTLPEHTVIC

SEQ ID NO: 7637 - protein, 1365 aa, Artificial Sequence
  SARS-CoV-2/USA/UT-00033/2020__EPI_ISL_417976 spike protein (1-1211)(T874C_S1055C) WhcAg construct
MFVFLVLLPLVSSQCVNLTTRTQLPPAYTNSFTRGVYYPDKVFRSSVLHSTQDLFLPFFSNVTWFHAIHVSGTNGTKRFDNPVLPFNDGVYFASTEKSNIIRGWIFGTTLDSKTQSLLIVNNATNVVIKVCEFQFCNDPFLGVYYHKNNKSWMESEFRVYSSANNCTFEYVSQPFLMDLEGKQGNFKNLREFVFKNIDGYFKIYSKHTPINLVRDLPQGFSALEPLVDLPIGINITRFQTLLALHRSYLTPGDSSSGLTAGAAAYYVGYLQPRTFLLKYNENGTITDAVDCALDPLSETKCTLKSFTVEKGIYQTSNFRVQPTESIVRFPNITNLCPFGEVFNATRFASVYAWNRKRISNCVADYSVLYNSASFSTFKCYGVSPTKLNDLCFTNVYADSFVIRGDEVRQIAPGQTGKIADYNYKLPDDFTGCVIAWNSNNLDSKVGGNYNYLYRLFRKSNLKPFERDISTEIYQAGSTPCNGVEGFNCYFPLQSYGFQPTNGVGYQPYRVVVLSFELLHAPATVCGPKKSTNLVKNKCVNFNFNGLTGTGVLTESNKKFLPFQQFGRDIADTTDAVRDPQTLEILDITPCSFGGVSVITPGTNTSNQVAVLYQGVNCTEVPVAIHADQLTPTWRVYSTGSNVFQTRAGCLIGAEHVNNSYECDIPIGAGICASYQTQTNSPRRARSVASQSIIAYTMSLGAENSVAYSNNSIAIPTNFTISVTTEILPVSMTKTSVDCTMYICGDSTECSNLLLQYGSFCTQLNRALTGIAVEQDKNTQEVFAQVKQIYKTPPIKDFGGFNFSQILPDPSKPSKRSFIEDLLFNKVTLADAGFIKQYGDCLGDIAARDLICAQKFNGLTVLPPLLTDEMIAQYCSALLAGTITSGWTFGAGAALQIPFAMQMAYRFNGIGVTQNVLYENQKLIANQFNSAIGKIQDSLSSTASALGKLQDVVNQNAQALNTLVKQLSSNFGAISSVLNDILSRLDKVEAEVQIDRLITGRLQSLQTYVTQQLIRAAEIRASANLAATKMSECVLGQSKRVDFCGKGYHLMSFPQCAPHGVVFLHVTYVPAQEKNFTTAPAICHDGKAHFPREGVFVSNGTHWFVTQRNFYEPQIITTDNTFVSGNCDVVIGIVNNTVYDPLQPELDSFKEELDKYFKNHTSPDVDLGDISGINASVVNIQKEIDRLNEVAKNLNESLIDLQELGKYEQYIKGGGGSDIDPYKEFGSSYQLLNFLPLDFFPDLNALVDTATALYEEELTGREHCSPHHTAIRQALVCWDELTKLIAWMSSNITSEQVRTIIVNHVNDTWGLKVRQSLWFHLSCLTFGQHTVQEFLVSFGVWIRTPAPYRPPNAPILSTLPEHTVIC

SEQ ID NO: 7638 - protein, 1365 aa, Artificial Sequence
  SARS-CoV-2/USA/WI-13/2020__EPI_ISL_417516 spike protein (1-1211)(T874C_S1055C) WhcAg construct
MFVFLVLLPLVSSQCVNLTTRTQLPPAYTNSFTRGVYYPDKVFRSSVLHSTQDLFLPFFSNVTWFHAIHVSGTNGTKRFDNPVLPFNDGVYFASTEKSNIIRGWIFGTTLDSKTQSLLIVNNATNVVIKVCEFQFCNDPFLGVYYHKNNKSWMESEFRVYSSANNCTFEYVSQPFLMDLEGKQGNFKNLREFVFKNIDGYFKIYSKHTPINLVRDLPQGFSALEPLVDLPIGINITRFQTLLALHRSYLTPGDSSSGWTAGAAAYYVGYLQPRTFLLKYNENGTITDAVDCALDPLSETKCTLKSFTVEKGIYQTSNFRVLPTESIVRFPNITNLCPFGEVFNATRFASVYAWNRKRISNCVADYSVLYNSASFSTFKCYGVSPTKLNDLCFTNVYADSFVIRGDEVRQIAPGQTGKIADYNYKLPDDFTGCVIAWNSNNLDSKVGGNYNYLYRLFRKSNLKPFERDISTEIYQAGSTPCNGVEGFNCYFPLQSYGFQPTNGVGYQPYRVVVLSFELLHAPATVCGPKKSTNLVKNKCVNFNFNGLTGTGVLTESNKKFLPFQQFGRDIADTTDAVRDPQTLEILDITPCSFGGVSVITPGTNTSNQVAVLYQGVNCTEVPVAIHADQLTPTWRVYSTGSNVFQTRAGCLIGAEHVNNSYECDIPIGAGICASYQTQTNSPRRARSVASQSIIAYTMSLGAENSVAYSNNSIAIPTNFTISVTTEILPVSMTKTSVDCTMYICGDSTECSNLLLQYGSFCTQLNRALTGIAVEQDKNTQEVFAQVKQIYKTPPIKDFGGFNFSQILPDPSKPSKRSFIEDLLFNKVTLADAGFIKQYGDCLGDIAARDLICAQKFNGLTVLPPLLTDEMIAQYCSALLAGTITSGWTFGAGAALQIPFAMQMAYRFNGIGVTQNVLYENQKLIANQFNSAIGKIQDSLSSTASALGKLQDVVNQNAQALNTLVKQLSSNFGAISSVLNDILSRLDKVEAEVQIDRLITGRLQSLQTYVTQQLIRAAEIRASANLAATKMSECVLGQSKRVDFCGKGYHLMSFPQCAPHGVVFLHVTYVPAQEKNFTTAPAICHDGKAHFPREGVFVSNGTHWFVTQRNFYEPQIITTDNTFVSGNCDVVIGIVNNTVYDPLQPELDSFKEELDKYFKNHTSPDVDLGDISGINASVVNIQKEIDRLNEVAKNLNESLIDLQELGKYEQYIKGGGGSDIDPYKEFGSSYQLLNFLPLDFFPDLNALVDTATALYEEELTGREHCSPHHTAIRQALVCWDELTKLIAWMSSNITSEQVRTIIVNHVNDTWGLKVRQSLWFHLSCLTFGQHTVQEFLVSFGVWIRTPAPYRPPNAPILSTLPEHTVIC

SEQ ID NO: 7639 - protein, 1364 aa, Artificial Sequence
  SARS-CoV-2/India/1-27/2020__EPI_ISL_413522 spike protein (1-1210)(T873C_S1054C) WhcAg construct
MFVFLVLLPLVSSQCVNLTTRTQLPPAYTNSFTRGVYYPDKVFRSSVLHSTQDLFLPFFSNVTWFHAIHVSGTNGTKRFDNPVLPFNDGVYFASTEKSNIIRGWIFGTTLDSKTQSLLIVNNATNVVIKVCEFQFCNDPFLGVYHKNNKSWMESEFRVYSSANNCTFEYVSQPFLMDLEGKQGNFKNLREFVFKNIDGYFKIYSKHTPINLVRDLPQGFSALEPLVDLPIGINITRFQTLLALHRSYLTPGDSSSGWTAGAAAYYVGYLQPRTFLLKYNENGTITDAVDCALDPLSETKCTLKSFTVEKGIYQTSNFRVQPTESIVRFPNITNLCPFGEVFNATRFASVYAWNRKRISNCVADYSVLYNSASFSTFKCYGVSPTKLNDLCFTNVYADSFVIRGDEVIQIAPGQTGKIADYNYKLPDDFTGCVIAWNSNNLDSKVGGNYNYLYRLFRKSNLKPFERDISTEIYQAGSTPCNGVEGFNCYFPLQSYGFQPTNGVGYQPYRVVVLSFELLHAPATVCGPKKSTNLVKNKCVNFNFNGLTGTGVLTESNKKFLPFQQFGRDIADTTDAVRDPQTLEILDITPCSFGGVSVITPGTNTSNQVAVLYQDVNCTEVPVAIHADQLTPTWRVYSTGSNVFQTRAGCLIGAEHVNNSYECDIPIGAGICASYQTQTNSPRRARSVASQSIIAYTMSLGAENSVAYSNNSIAIPTNFTISVTTEILPVSMTKTSVDCTMYICGDSTECSNLLLQYGSFCTQLNRALTGIAVEQDKNTQEVFAQVKQIYKTPPIKDFGGFNFSQILPDPSKPSKRSFIEDLLFNKVTLADAGFIKQYGDCLGDIAARDLICAQKFNGLTVLPPLLTDEMIAQYCSALLAGTITSGWTFGAGAALQIPFAMQMAYRFNGIGVTQNVLYENQKLIANQFNSAIGKIQDSLSSTASALGKLQDVVNQNAQALNTLVKQLSSNFGAISSVLNDILSRLDKVEAEVQIDRLITGRLQSLQTYVTQQLIRAAEIRASANLAATKMSECVLGQSKRVDFCGKGYHLMSFPQCAPHGVVFLHVTYVPAQEKNFTTAPAICHDGKAHFPREGVFVSNGTHWFVTQRNFYEPQIITTDNTFVSGNCDVVIGIVNNTVYDPLQPELDSFKEELDKYFKNHTSPDVDLGDISGINASVVNIQKEIDRLNEVAKNLNESLIDLQELGKYEQYIKGGGGSDIDPYKEFGSSYQLLNFLPLDFFPDLNALVDTATALYEEELTGREHCSPHHTAIRQALVCWDELTKLIAWMSSNITSEQVRTIIVNHVNDTWGLKVRQSLWFHLSCLTFGQHTVQEFLVSFGVWIRTPAPYRPPNAPILSTLPEHTVIC

SEQ ID NO: 7640 - protein, 1359 aa, Artificial Sequence
  SARS-CoV-2/pangolin/Guangxi/P4L/2017__EPI_ISL_410538 spike protein (1-1205)(T868C_S1049C) WhcAg construct
MFVFLFVLPLVSSQCVNLTTRTGIPPGYTNSSTRGVYYPDKVFRSSILHLTQDLFLPFFSNVTWFNTINYQGGFKKFDNPVLPFNDGVYFASTEKSNIIRGWIFGTTLDARTQSLLIVNNATNVVIKVCEFQFCTDPFLGVYYHNNNKTWVENEFRVYSSANNCTFEYISQPFLMDLEGKQGNFKNLREFVFKNVDGYFKIYSKHTPIDLVRDLPRGFAALEPLVDLPIGINITRFQTLLALHRSYLTPGNLESGWTTGAAAYYVGYLQQRTFLLSYNQNGTITDAVDCSLDPLSETKCTLKSLTVEKGIYQTSNFRVQPTISIVRFPNITNLCPFGEVFNASKFASVYAWNRKRISNCVADYSVLYNSTSFSTFKCYGVSPTKLNDLCFTNVYADSFVVKGDEVRQIAPGQTGVIADYNYKLPDDFTGCVIAWNSVKQDALTGGNYGYLYRLFRKSKLKPFERDISTEIYQAGSTPCNGQVGLNCYYPLERYGFHPTTGVNYQPFRVVVLSFELLNGPATVCGPKLSTTLVKDKCVNFNFNGLTGTGVLTTSKKQFLPFQQFGRDISDTTDAVRDPQTLEILDITPCSFGGVSVITPGTNTSNQVAVLYQDVNCTEVPMAIHAEQLTPAWRVYSAGANVFQTRAGCLVGAEHVNNSYECDIPVGAGICASYHSMSSLRSVNQRSIIAYTMSLGAENSVAYSNNSIAIPTNFTISVTTEILPVSMTKTSVDCTMYICGDSIECSNLLLQYGSFCTQLNRALTGIAVEQDKNTQEVFAQVKQIYKTPPIKDFGGFNFSQILPDPSKPSKRSFIEDLLFNKVTLADAGFIKQYGDCLGDIAARDLICAQKFNGLTVLPPLLTDEMIAQYCSALLAGTITSGWTFGAGAALQIPFAMQMAYRFNGIGVTQNVLYENQKLIANQFNSAIGKIQDSLSSTASALGKLQDVVNQNAQALNTLVKQLSSNFGAISSVLNDILSRLDKVEAEVQIDRLITGRLQSLQTYVTQQLIRAAEIRASANLAATKMSECVLGQSKRVDFCGKGYHLMSFPQCAPHGVVFLHVTYVPAQEKNFTTAPAICHEGKAHFPREGVFVSNGTHWFITQRNFYEPQIITTDNTFVSGSCDVVIGIVNNTVYDPLQPELDSFKEELDKYFKNHTSPDVDLGDISGINASVVNIQKEIDRLNEVAKNLNESPIDLQELGKYEQYIKGGGGSDIDPYKEFGSSYQLLNFLPLDFFPDLNALVDTATALYEEELTGREHCSPHHTAIRQALVCWDELTKLIAWMSSNITSEQVRTIIVNHVNDTWGLKVRQSLWFHLSCLTFGQHTVQEFLVSFGVWIRTPAPYRPPNAPILSTLPEHTVIC

SEQ ID NO: 7641 - protein, 1359 aa, Artificial Sequence
  SARS-CoV-2/pangolin/Guangxi/P5L/2017__EPI_ISL_410540 spike protein (1-1205)(T868C_S1049C) WhcAg construct
MFVFLFVLPLVSSQCVNLTTRTGIPPGYTNSSTRGVYYPDKVFRSSILHLTQDLFLPFFSNVTWFNTINYQGGFKKFDNPVLPFNDGVYFASTEKSNIIRGWIFGTTLDARTQSLLIVNNATNVVIKVCEFQFCTDPFLGVYYHNNNKTWVENEFRVYSSANNCTFEYISQPFLMDLEGKQGNFKNLREFVFKNVDGYFKIYSKHTPIDLVRDLPRGFAALEPLVDLPIGINITRFQTLLALHRSYLTPGKLESGWTTGAAAYYVGYLQQRTFLLSYNQNGTITDAVDCSLDPLSETKCTLKSLTVEKGIYQTSNFRVQPTISIVRFPNITNLCPFGEVFNASKFASVYAWNRKRISNCVADYSVLYNSTSFSTFKCYGVSPTKLNDLCFTNVYADSFVVKGDEVRQIAPGQTGVIADYNYKLPDDFTGCVIAWNSVKQDALTGGNYGYLYRLFRKSKLKPFERDISTEIYQAGSTPCNGQVGLNCYYPLERYGFHPTTGVNYQPFRVVVLSFELLNGPATVCGPKLSTTLVKDKCVNFNFNGLTGTGVLTTSKKQFLPFQQFGRDISDTTDAVRDPQTLEILDITPCSFGGVSVITPGTNTSNQVAVLYQDVNCTEVPMAIHAEQLTPAWRVYSAGANVFQTRAGCLVGAEHVNNSYECDIPVGAGICASYHSMSSFRSVNQRSIIAYTMSLGAENSVAYSNNSIAIPTNFTISVTTEILPVSMTKTSVDCTMYICGDSIECSNLLLQYGSFCTQLNRALTGIAVEQDKNTQEVFAQVKQIYKTPPIKDFGGFNFSQILPDPSKPSKRSFIEDLLFNKVTLADAGFIKQYGDCLGDIAARDLICAQKFNGLTVLPPLLTDEMIAQYCSALLAGTITSGWTFGAGAALQIPFAMQMAYRFNGIGVTQNVLYENQKLIANQFNSAIGKIQDSLSSTASALGKLQDVVNQNAQALNTLVKQLSSNFGAISSVLNDILSRLDKVEAEVQIDRLITGRLQSLQTYVTQQLIRAAEIRASANLAATKMSECVLGQSKRVDFCGKGYHLMSFPQCAPHGVVFLHVTYVPAQEKNFTTAPAICHEGKAHFPREGVFVSNGTHWFITQRNFYEPQIITTDNTFVSGSCDVVIGIVNNTVYDPLQPELDSFKEELDKYFKNHTSPDVDLGDISGINASVVNIQKEIDRLNEVAKNLNESLIDLQELGKYEQYIKGGGGSDIDPYKEFGSSYQLLNFLPLDFFPDLNALVDTATALYEEELTGREHCSPHHTAIRQALVCWDELTKLIAWMSSNITSEQVRTIIVNHVNDTWGLKVRQSLWFHLSCLTFGQHTVQEFLVSFGVWIRTPAPYRPPNAPILSTLPEHTVIC

SEQ ID NO: 7642 - protein, 1359 aa, Artificial Sequence
  SARS-CoV-2/pangolin/Guangxi/P5E/2017__EPI_ISL_410541 spike protein (1-1205)(T868C_S1049C) WhcAg construct
MFVFLFVLPLVSSQCVNLTTRTGIPPGYTNSSTRGVYYPDKVFRSSILHLTQDLFLPFFSNVTWFNTITYQGGSKKFDNPVLPFNDGVYFASTEKSNIIRGWIFGTTLDARTQSLLIVNNATNVVIKVCEFQFCTDPFLGVYYHNNNKTWVENEFRVYSSANNCTFEYISQPFLMDLEGKQGNFKNLREFVFKNVDGYFKIYSKHTPIDLVRDLPRGFAALEPLVDLPIGINITRFQTLLALHRSYLTPGKLESGWTTGAAAYYVGYLQQRTFLLSYNQNGTITDAVDCSLDPLSETKCTLKSLTVEKGIYQTSNFRVQPTISIVRFPNITNLCPFGEVFNASKFASVYAWNRKRISNCVADYSVLYNSTSFSTFKCYGVSPTKLNDLCFTNVYADSFVVKGDEVRQIAPGQTGVIADYNYKLPDDFTGCVIAWNSVKQDALTGDNYGYLYRLFRKSKLKPFERDISTEIYQAGSTPCNGQVGLNCYYPLERYGFHPTTGVNYQPFRVVVLSFELLNGPATVCGPKLSTTLVKDKCVNFNFNGLTGTGVLTTSKKQFLPFQQFGRDISDTTDAVRDPQTLEILDITPCSFGGVSVITPGTNTSNQVAVLYQDVNCTEVPMAIHAEQLTPAWRVYSAGANVFQTRAGCLVGAEHVNNSYECDIPVGAGICASYHSMSSFRSVNQRSIIAYTMSLGAENSVAYSNNSIAIPTNFTISVTTEILPVSMTKTSVDCTMYICGDSIECSNLLLQYGSFCTQLNRALTGIAVEQDKNTQEVFAQVKQIYKTPPIKDFGGFNFSQILPDPSKPSKRSFIEDLLFNKVTLADAGFIKQYGDCLGDIAARDLICAQKFNGLTVLPPLLTDEMIAQYCSALLAGTITSGWTFGAGAALQIPFAMQMAYRFNGIGVTQNVLYENQKLIANQFNSAIGKIQDSLSSTASALGKLQDVVNQNAQALNTLVKQLSSNFGAISSVLNDILSRLDKVEAEVQIDRLITGRLQSLQTYVTQQLIRAAEIRASANLAATKMSECVLGQSKRVDFCGKGYHLMSFPQCAPHGVVFLHVTYVPAQEKNFTTAPAICHEGKAHFPREGVFVSNGTHWFITQRNFYEPQIITTDNTFVSGSCDVVIGIVNNTVYDPLQPELDSFKEELDKYFKNHTSPDVDLGDISGINASVVNIQKEIDRLNEVAKNLNESLIDLQELGKYEQYIKGGGGSDIDPYKEFGSSYQLLNFLPLDFFPDLNALVDTATALYEEELTGREHCSPHHTAIRQALVCWDELTKLIAWMSSNITSEQVRTIIVNHVNDTWGLKVRQSLWFHLSCLTFGQHTVQEFLVSFGVWIRTPAPYRPPNAPILSTLPEHTVIC

SEQ ID NO: 7643 - protein, 1357 aa, Artificial Sequence
  SARS-CoV-2/pangolin/Guangxi/P1E/2017__EPI_ISL_410539 spike protein (1-1203)(T866C_S1047C) WhcAg construct
MFVFLFVLPLVSSQCVNLTTRTGIQPGYTNSSTRGVYYPDKVFRSSILHLTQDLFLPFFSNVTWFNTINYQGGFKKFDNPVLPFNDGVYFASTEKSNIIRGWIFGTTLDARTQSLLIVNNATNVVIKVCEFQFCTDPFLGVYYHNNNKTWVENEFRVYSSANNCTFEYISQPFLMDLEGKQGNFKNLREFVFKNVDGYFKIYSKHTPIDLVRDLPRGFAALEPLVDLPIGINITRFQTLLALHRSYLTPGKLESGWTTGAAAYYVGYLQQRTFLLSYNQNGTITDAVDCSLDPLSETKCTLKSLTVEKGIYQTSNFRVQPTISIVRFPNITNLCPFGEVFNASKFASVYAWNRKRISNCVADYSVLYNSTSFSTFKCYGVSPTKLNDLCFTNVYADSFVVKGDEVRQIAPGQTGVIADYNYKLPDDFTGCVIAWNSVKQDALTGGNYLYRLFRKSKLKPFERDISTEIYQAGSTPCNGQVGLNCYYPLERYGFHPTTGVNYQPFRVVVLSFELLNGPATVCGPKLSTTLVKDKCVNFNFNGLTGTGVLTTSKKQFLPFQQFGRDISDTTDAVRDPQTLEILDITPCSFGGVSVITPGTNTSNQVAVLYQDVNCTEVPMAIHAEQLTPAWRVYSAGANVFQTRAGCLVGAEHVNNSYECDIPVGAGICASYHSMSSLRSVNQRSIIAYTMSLGAENSVAYSNNSIAIPTNFTISVTTEILPVSMTKTSVDCTMYICGDSIECSNLLLQYGSFCTQLNRALTGIAVEQDKNTQEVFAQVKQIYKTPPIKDFGGFNFSQILPDPSKPSKRSFIEDLLFNKVTLADAGFIKQYGDCLGDIAARDLICAQKFNGLTVLPPLLTDEMIAQYCSALLAGTITSGWTFGAGAALQIPFAMQMAYRFNGIGVTQNVLYENQKLIANQFNSAIGKIQDSLSSTASALGKLQDVVNQNAQALNTLVKQLSSNFGAISSVLNDILSRLDKVEAEVQIDRLITGRLQSLQTYVTQQLIRAAEIRASANLAATKMSECVLGQSKRVDFCGKGYHLMSFPQCAPHGVVFLHVTYVPAQEKNFTTAPAICHEGKAHFPREGVFVSNGTHWFITQRNFYEPQIITTDNTFVSGSCDVVIGIVNNTVYDPLQPELDSFKEELDKYFKNHTSPDVDLGDISGINASVVNIQKEIDRLNEVAKNLNESLIDLQELGKYEQYIKGGGGSDIDPYKEFGSSYQLLNFLPLDFFPDLNALVDTATALYEEELTGREHCSPHHTAIRQALVCWDELTKLIAWMSSNITSEQVRTIIVNHVNDTWGLKVRQSLWFHLSCLTFGQHTVQEFLVSFGVWIRTPAPYRPPNAPILSTLPEHTVIC

SEQ ID NO: 7644 - protein, 1307 aa, Artificial Sequence
  SARS-CoV-2/Wuhan/WIV05/2019__EPI_ISL_402128 spike protein (1-1147) LumSynth construct
MFVFLVLLPLVSSQCVNLTTRTQLPPAYTNSFTRGVYYPDKVFRSSVLHSTQDLFLPFFSNVTWFHAIHVSGTNGTKRFDNPVLPFNDGVYFASTEKSNIIRGWIFGTTLDSKTQSLLIVNNATNVVIKVCEFQFCNDPFLGVYYHKNNKSWMESEFRVYSSANNCTFEYVSQPFLMDLEGKQGNFKNLREFVFKNIDGYFKIYSKHTPINLVRDLPQGFSALEPLVDLPIGINITRFQTLLALHRSYLTPGDSSSGWTAGAAAYYVGYLQPRTFLLKYNENGTITDAVDCALDPLSETKCTLKSFTVEKGIYQTSNFRVQPTESIVRFPNITNLCPFGEVFNATRFASVYAWNRKRISNCVADYSVLYNSASFSTFKCYGVSPTKLNDLCFTNVYADSFVIRGDEVRQIAPGQTGKIADYNYKLPDDFTGCVIAWNSNNLDSKVGGNYNYLYRLFRKSNLKPFERDISTEIYQAGSTPCNGVEGFNCYFPLQSYGFQPTNGVGYQPYRVVVLSFELLHAPATVCGPKKSTNLVKNKCVNFNFNGLTGTGVLTESNKKFLPFQQFGRDIADTTDAVRDPQTLEILDITPCSFGGVSVITPGTNTSNQVAVLYQDVNCTEVPVAIHADQLTPTWRVYSTGSNVFQTRAGCLIGAEHVNNSYECDIPIGAGICASYQTQTNSPRRARSVASQSIIAYTMSLGAENSVAYSNNSIAIPTNFTISVTTEILPVSMTKTSVDCTMYICGDSTECSNLLLQYGSFCTQLNRALTGIAVEQDKNTQEVFAQVKQIYKTPPIKDFGGFNFSQILPDPSKPSKRSFIEDLLFNKVTLADAGFIKQYGDCLGDIAARDLICAQKFNGLTVLPPLLTDEMIAQYTSALLAGTITSGWTFGAGAALQIPFAMQMAYRFNGIGVTQNVLYENQKLIANQFNSAIGKIQDSLSSTASALGKLQDVVNQNAQALNTLVKQLSSNFGAISSVLNDILSRLDKVEAEVQIDRLITGRLQSLQTYVTQQLIRAAEIRASANLAATKMSECVLGQSKRVDFCGKGYHLMSFPQSAPHGVVFLHVTYVPAQEKNFTTAPAICHDGKAHFPREGVFVSNGTHWFVTQRNFYEPQIITTDNTFVSGNCDVVIGIVNNTVYDPLQPELDSGGGSGGGQIYEGKLTAEGLRFGIVASRFNHALVDRLVEGAIDAIVRHGGREEDITLVRVPGSWEIPVAAGELARKEDIDAVIAIGVLIRGATPHFDYIASEVSKGLADLSLELRKPITFGVITADTLEQAIERAGTKHGNKGWEAALSAIEMANLFKSLR

SEQ ID NO: 7645 - protein, 1303 aa, Artificial Sequence
  SARS-CoV-2/bat/Yunnan/RaTG13/2013__EPI_ISL_402131 spike protein (1-1143) LumSynth construct
MFVFLVLLPLVSSQCVNLTTRTQLPPAYTNSSTRGVYYPDKVFRSSVLHLTQDLFLPFFSNVTWFHAIHVSGTNGIKRFDNPVLPFNDGVYFASTEKSNIIRGWIFGTTLDSKTQSLLIVNNATNVVIKVCEFQFCNDPFLGVYYHKNNKSWMESEFRVYSSANNCTFEYVSQPFLMDLEGKQGNFKNLREFVFKNIDGYFKIYSKHTPINLVRDLPPGFSALEPLVDLPIGINITRFQTLLALHRSYLTPGDSSSGWTAGAAAYYVGYLQPRTFLLKYNENGTITDAVDCALDPLSETKCTLKSFTVEKGIYQTSNFRVQPTDSIVRFPNITNLCPFGEVFNATTFASVYAWNRKRISNCVADYSVLYNSTSFSTFKCYGVSPTKLNDLCFTNVYADSFVITGDEVRQIAPGQTGKIADYNYKLPDDFTGCVIAWNSKHIDAKEGGNFNYLYRLFRKANLKPFERDISTEIYQAGSKPCNGQTGLNCYYPLYRYGFYPTDGVGHQPYRVVVLSFELLNAPATVCGPKKSTNLVKNKCVNFNFNGLTGTGVLTESNKKFLPFQQFGRDIADTTDAVRDPQTLEILDITPCSFGGVSVITPGTNASNQVAVLYQDVNCTEVPVAIHADQLTPTWRVYSTGSNVFQTRAGCLIGAEHVNNSYECDIPIGAGICASYQTQTNSRSVASQSIIAYTMSLGAENSVAYSNNSIAIPTNFTISVTTEILPVSMTKTSVDCTMYICGDSTECSNLLLQYGSFCTQLNRALTGIAVEQDKNTQEVFAQVKQIYKTPPIKDFGGFNFSQILPDPSKPSKRSFIEDLLFNKVTLADAGFIKQYGDCLGDIAARDLICAQKFNGLTVLPPLLTDEMIAQYTSALLAGTITSGWTFGAGAALQIPFAMQMAYRFNGIGVTQNVLYENQKLIANQFNSAIGKIQDSLSSTASALGKLQDVVNQNAQALNTLVKQLSSNFGAISSVLNDILSRLDKVEAEVQIDRLITGRLQSLQTYVTQQLIRAAEIRASANLAATKMSECVLGQSKRVDFCGKGYHLMSFPQSAPHGVVFLHVTYVPAQEKNFTTAPAICHDGKAHFPREGVFVSNGTHWFVTQRNFYEPQIITTDNTFVSGSCDVVIGIVNNTVYDPLQPELDSGGGSGGGQIYEGKLTAEGLRFGIVASRFNHALVDRLVEGAIDAIVRHGGREEDITLVRVPGSWEIPVAAGELARKEDIDAVIAIGVLIRGATPHFDYIASEVSKGLADLSLELRKPITFGVITADTLEQAIERAGTKHGNKGWEAALSAIEMANLFKSLR

SEQ ID NO: 7646 - protein, 1307 aa, Artificial Sequence
  SARS-CoV-2/Wuhan/HBCDC-HB-01/2019__EPI_ISL_402132 spike protein (1-1147) LumSynth construct
MFVFLVLLPLVSSQCVNLTTRTQLPPAYTNSITRGVYYPDKVFRSSVLHSTQDLFLPFFSNVTWFHAIHVSGTNGTKRFDNPVLPFNDGVYFASTEKSNIIRGWIFGTTLDSKTQSLLIVNNATNVVIKVCEFQFCNDPFLGVYYHKNNKSWMESEFRVYSSANNCTFEYVSQPFLMDLEGKQGNFKNLREFVFKNIDGYFKIYSKHTPINLVRDLPQGFSALEPLVDLPIGINITRFQTLLALHRSYLTPGDSSSGWTAGAAAYYVGYLQPRTFLLKYNENGTITDAVDCALDPLSETKCTLKSFTVEKGIYQTSNFRVQPTESIVRFPNITNLCPFGEVFNATRFASVYAWNRKRISNCVADYSVLYNSASFSTFKCYGVSPTKLNDLCFTNVYADSFVIRGDEVRQIAPGQTGKIADYNYKLPDDFTGCVIAWNSNNLDSKVGGNYNYLYRLFRKSNLKPFERDISTEIYQAGSTPCNGVEGFNCYFPLQSYGFQPTNGVGYQPYRVVVLSFELLHAPATVCGPKKSTNLVKNKCVNFNFNGLTGTGVLTESNKKFLPFQQFGRDIADTTDAVRDPQTLEILDITPCSFGGVSVITPGTNTSNQVAVLYQDVNCTEVPVAIHADQLTPTWRVYSTGSNVFQTRAGCLIGAEHVNNSYECDIPIGAGICASYQTQTNSPRRARSVASQSIIAYTMSLGAENSVAYSNNSIAIPTNFTISVTTEILPVSMTKTSVDCTMYICGDSTECSNLLLQYGSFCTQLNRALTGIAVEQDKNTQEVFAQVKQIYKTPPIKDFGGFNFSQILPDPSKPSKRSFIEDLLFNKVTLADAGFIKQYGDCLGDIAARDLICAQKFNGLTVLPPLLTDEMIAQYTSALLAGTITSGWTFGAGAALQIPFAMQMAYRFNGIGVTQNVLYENQKLIANQFNSAIGKIQDSLSSTASALGKLQDVVNQNAQALNTLVKQLSSNFGAISSVLNDILSRLDKVEAEVQIDRLITGRLQSLQTYVTQQLIRAAEIRASANLAATKMSECVLGQSKRVDFCGKGYHLMSFPQSAPHGVVFLHVTYVPAQEKNFTTAPAICHDGKAHFPREGVFVSNGTHWFVTQRNFYEPQIITTDNTFVSGNCDVVIGIVNNTVYDPLQPELDSGGGSGGGQIYEGKLTAEGLRFGIVASRFNHALVDRLVEGAIDAIVRHGGREEDITLVRVPGSWEIPVAAGELARKEDIDAVIAIGVLIRGATPHFDYIASEVSKGLADLSLELRKPITFGVITADTLEQAIERAGTKHGNKGWEAALSAIEMANLFKSLR

SEQ ID NO: 7647 - protein, 1307 aa, Artificial Sequence
  SARS-CoV-2/Guangdong/20SF028/2020__EPI_ISL_403936 spike protein (1-1147) LumSynth construct
MFVFLVLLPLVSSQCVNLTTRTQLPPAYTNSFTRGVYYPDKVFRSSVLYSTQDLFLPFFSNVTWFHAIHVSGTNGTKRFDNPVLPFNDGVYFASTEKSNIIRGWIFGTTLDSKTQSLLIVNNATNVVIKVCEFQFCNDPFLGVYYHKNNKSWMESEFRVYSSANNCTFEYVSQPFLMDLEGKQGNFKNLREFVFKNIDGYFKIYSKHTPINLVRDLPQGFSALEPLVDLPIGINITRFQTLLALHRSYLTPGDSSSGWTAGAAAYYVGYLQPRTFLLKYNENGTITDAVDCALDPLSETKCTLKSFTVEKGIYQTSNFRVQPTESIVRFPNITNLCPFGEVFNATRFASVYAWNRKRISNCVADYSVLYNSASFSTFKCYGVSPTKLNDLCFTNVYADSFVIRGDEVRQIAPGQTGKIADYNYKLPDDFTGCVIAWNSNNLDSKVGGNYNYLYRLFRKSNLKPFERDISTEIYQAGSTPCNGVEGFNCYFPLQSYGFQPTNGVGYQPYRVVVLSFELLHAPATVCGPKKSTNLVKNKCVNFNFNGLTGTGVLTESNKKFLPFQQFGRDIADTTDAVRDPQTLEILDITPCSFGGVSVITPGTNTSNQVAVLYQDVNCTEVPVAIHADQLTPTWRVYSTGSNVFQTRAGCLIGAEHVNNSYECDIPIGAGICASYQTQTNSPRRARSVASQSIIAYTMSLGAENSVAYSNNSIAIPTNFTISVTTEILPVSMTKTSVDCTMYICGDSTECSNLLLQYGSFCTQLNRALTGIAVEQDKNTQEVFAQVKQIYKTPPIKDFGGFNFSQILPDPSKPSKRSFIEDLLFNKVTLADAGFIKQYGDCLGDIAARDLICAQKFNGLTVLPPLLTDEMIAQYTSALLAGTITSGWTFGAGAALQIPFAMQMAYRFNGIGVTQNVLYENQKLIANQFNSAIGKIQDSLSSTASALGKLQDVVNQNAQALNTLVKQLSSNFGAISSVLNDILSRLDKVEAEVQIDRLITGRLQSLQTYVTQQLIRAAEIRASANLAATKMSECVLGQSKRVDFCGKGYHLMSFPQSAPHGVVFLHVTYVPAQEKNFTTAPAICHDGKAHFPREGVFVSNGTHWFVTQRNFYEPQIITTDNTFVSGNCDVVIGIVNNTVYDPLQPELDSGGGSGGGQIYEGKLTAEGLRFGIVASRFNHALVDRLVEGAIDAIVRHGGREEDITLVRVPGSWEIPVAAGELARKEDIDAVIAIGVLIRGATPHFDYIASEVSKGLADLSLELRKPITFGVITADTLEQAIERAGTKHGNKGWEAALSAIEMANLFKSLR

SEQ ID NO: 7648 - protein, 1307 aa, Artificial Sequence
  SARS-CoV-2/Shenzhen/SZTH-001/2020__EPI_ISL_406592 spike protein (1-1147) LumSynth construct
MFVFLVLLPLVSSQCVNLTTRTQLPPAYTNSFTRGVYYPDKVFRSSVLHSTQDLFLPFFSNVTWFHAIHVSGTNGTKRFDNPVLPFNDGVYFASTEKSNIIRGWIFGTTLDSKTQSLLIVNNATNVVIKVCEFQFCNDPFLGVYYHKNNKSWMESEFRVYSSANNCTFEYVSQPFLMDLEGKQGNFKNLREFVFKNIDGYFKIYSKHTPINLVRDLPQGFSALEPLVDLPIGINITRFQTLLALHRSYLTPGDSSSGWTAGAAAYYVGYLQPRTFLLKYNENGTITDAVDCALDPLSETKCTLKSFTVEKGIYQTSNFRVQPTESIVRFPNITNLCPFGEVFNATRFASVYAWNRKRISNCVADYSVLYNSASFSTFKCYGVSPTKLNDLCFTNVYADSFVIRGDEVRQIAPGQTGKIADYNYKLPDDFTGCVIAWNSNNLDSKVGGNYNYLYRLFRKSNLKPFERDISTEIYQAGSTPCNGVEGFNCYFPLQSYGFQPTNGVGYQPYRVVVLSFELLHAPATVCGPKKSTNLVKNKCVNFNFNGLTGTGVLTESNKKFLPFQQFGRDIADTTDAVRDPQTLEILDITPCSFGGVSVITPGTNTSNQVAVLYQDVNCTEVPVAIHADQLTPTWRVYSTGSNVFQTRAGCLIGAEHVNNSYECDIPIGAGICASYQTQTNSPRRARSVASQSIIAYTMSLGAENSVAYSNNSIAIPTNFTISVTTEILPVSMTKTSVDCTMYICGDSTECSNLLLQYGSFCTQLNRALTGIAVEQDKNTQEVFAQVKQIYKTPPIKDFGGFNFSQILPDPSKPSKRSFIEDLLFNKVTLADAGFIKQYGDCLGDIAARDLICAQKFNGLTVLPPLLTDEMIAQYTSALLAGTITSGWTFGAGAALQIPFAMQMAYRFNGIGVTQNVLYENQKLIANQFNSAIGKIQDSLSSTASALGKLQDVVNQNAQALNTLVKQLSSNFGAISSVLNDILSRLDKVEAEVQIDRLITGRLQSLQTYVTQQLIRAAEIRASANLAATKMSECVLGQSKRVDFCGKGYHLMSFPQSAPHGVVFLHVTYVPAQEKNFTTAPAICHDGKAHFPREGVFVSNGTHWFVTQRNFYEPQIITTDNTFVSGNCDVLIGIVNNTVYDPLQPELDSGGGSGGGQIYEGKLTAEGLRFGIVASRFNHALVDRLVEGAIDAIVRHGGREEDITLVRVPGSWEIPVAAGELARKEDIDAVIAIGVLIRGATPHFDYIASEVSKGLADLSLELRKPITFGVITADTLEQAIERAGTKHGNKGWEAALSAIEMANLFKSLR

SEQ ID NO: 7649 - protein, 1307 aa, Artificial Sequence
  SARS-CoV-2/Shenzhen/SZTH-004/2020__EPI_ISL_406595 spike protein (1-1147) LumSynth construct
MFVFLVLLPLVSSQCVNLTTRTQLPPAYTNSFTRGVYYPDKVFRSSVLHSTQDLFLPFFSNVTWFHAIHVSGTNGTKRFDNPVLPFNDGVYFASTEKSNIIRGWIFGTTLDSKTQSLLIVNNATNVVIKVCEFQFCNDPFLGVYYHKNNKSWMESEFRVYSSANNCTFEYVSQPFLMDLEGKQGNFKNLREFVFKNIDGYFKIYSKHTPINLVRDLPQGFSALEPLVDLPIGINITRFQTLLALHRSYLTPGDSSSGWTAGAAAYYVGYLQPRTFLLKYNENGTITDAVDCALDPLSETKCTLKSFTVEKGIYQTSNFRVQPTESIVRFPNITNLCPFGEVFNATRFASVYAWDRKRISNCVAYYSVLYNSASFSTFKCYGVSPTKLNDLCFTNVYADSFVIRGDEVRQIAPGQTGKIADYNYKLPDDFTGCVIAWNSNNLDSKVGGNYNYLYRLFRKSNLKPFERDISTEIYQAGSTPCNGVEGFNCYFPLQSYGFQPTNGVGYQPYRVVVLSFELLHAPATVCGPKKSTNLVKNKCVNFNFNGLTGTGVLTESNKKFLPFQQFGRDIADTTDAVRDPQTLEILDITPCSFGGVSVITPGTNTSNQVAVLYQDVNCTEVPVAIHADQLTPTWRVYSTGSNVFQTRAGCLIGAEHVNNSYECDIPIGAGICASYQTQTNSPRRARSVASQSIIAYTMSLGAENSVAYSNNSIAIPTNFTISVTTEILPVSMTKTSVDCTMYICGDSTECSNLLLQYGSFCTQLNRALTGIAVEQDKNTQEVFAQVKQIYKTPPIKDFGGFNFSQILPDPSKPSKRSFIEDLLFNKVTLADAGFIKQYGDCLGDIAARDLICAQKFNGLTVLPPLLTDEMIAQYTSALLAGTITSGWTFGAGAALQIPFAMQMAYRFNGIGVTQNVLYENQKLIANQFNSAIGKIQDSLSSTASALGKLQDVVNQNAQALNTLVKQLSSNFGAISSVLNDILSRLDKVEAEVQIDRLITGRLQSLQTYVTQQLIRAAEIRASANLAATKMSECVLGQSKRVDFCGKGYHLMSFPQSAPHGVVFLHVTYVPAQEKNFTTAPAICHDGKAHFPREGVFVSNGTHWFVTQRNFYEPQIITTDNTFVSGNCDVVIGIVNNTVYDPLQPELDSGGGSGGGQIYEGKLTAEGLRFGIVASRFNHALVDRLVEGAIDAIVRHGGREEDITLVRVPGSWEIPVAAGELARKEDIDAVIAIGVLIRGATPHFDYIASEVSKGLADLSLELRKPITFGVITADTLEQAIERAGTKHGNKGWEAALSAIEMANLFKSLR

SEQ ID NO: 7650 - protein, 1307 aa, Artificial Sequence
  SARS-CoV-2/France/IDF0372/2020__EPI_ISL_406596 spike protein (1-1147) LumSynth construct
MFVFLVLLPLVSSQCVNLTTRTQLPPAYTNSFTRGVYYPDKVFRSSVLHSTQDLFLPFFSNVTWFHAIHVSGTNGTKRFDNPVLPFNDGVYFASTEKSNIIRGWIFGTTLDSKTQSLLIVNNATNVVIKVCEFQFCNDPFLGVYYHKNNKSWMESEFRVYSSANNCTFEYVSQPFLMDLEGKQGNFKNLREFVFKNIDGYFKIYSKHTPINLVRDLPQGFSALEPLVDLPIGINITRFQTLLALHRSYLTPGDSSSGWTAGAAAYYVGYLQPRTFLLKYNENGTITDAVDCALDPLSETKCTLKSFTVEKGIYQTSNFRVQPTESIVRFPNITNLCPFGEVFNATRFASVYAWNRKRISNCVADYSFLYNSASFSTFKCYGVSPTKLNDLCFTNVYADSFVIRGDEVRQIAPGQTGKIADYNYKLPDDFTGCVIAWNSNNLDSKVGGNYNYLYRLFRKSNLKPFERDISTEIYQAGSTPCNGVEGFNCYFPLQSYGFQPTNGVGYQPYRVVVLSFELLHAPATVCGPKKSTNLVKNKCVNFNFNGLTGTGVLTESNKKFLPFQQFGRDIADTTDAVRDPQTLEILDITPCSFGGVSVITPGTNTSNQVAVLYQDVNCTEVPVAIHADQLTPTWRVYSTGSNVFQTRAGCLIGAEHVNNSYECDIPIGAGICASYQTQTNSPRRARSVASQSIIAYTMSLGAENSVAYSNNSIAIPTNFTISVTTEILPVSMTKTSVDCTMYICGDSTECSNLLLQYGSFCTQLNRALTGIAVEQDKNTQEVFAQVKQIYKTPPIKDFGGFNFSQILPDPSKPSKRSFIEDLLFNKVTLADAGFIKQYGDCLGDIAARDLICAQKFNGLTVLPPLLTDEMIAQYTSALLAGTITSGWTFGAGAALQIPFAMQMAYRFNGIGVTQNVLYENQKLIANQFNSAIGKIQDSLSSTASALGKLQDVVNQNAQALNTLVKQLSSNFGAISSVLNDILSRLDKVEAEVQIDRLITGRLQSLQTYVTQQLIRAAEIRASANLAATKMSECVLGQSKRVDFCGKGYHLMSFPQSAPHGVVFLHVTYVPAQEKNFTTAPAICHDGKAHFPREGVFVSNGTHWFVTQRNFYEPQIITTDNTFVSGNCDVVIGIVNNTVYDPLQPELDSGGGSGGGQIYEGKLTAEGLRFGIVASRFNHALVDRLVEGAIDAIVRHGGREEDITLVRVPGSWEIPVAAGELARKEDIDAVIAIGVLIRGATPHFDYIASEVSKGLADLSLELRKPITFGVITADTLEQAIERAGTKHGNKGWEAALSAIEMANLFKSLR

SEQ ID NO: 7651 - protein, 1307 aa, Artificial Sequence
  SARS-CoV-2/Australia/VIC01/2020__EPI_ISL_406844 spike protein (1-1147) LumSynth construct
MFVFLVLLPLVSSQCVNLTTRTQLPPAYTNSFTRGVYYPDKVFRSSVLHSTQDLFLPFFSNVTWFHAIHVSGTNGTKRFDNPVLPFNDGVYFASTEKSNIIRGWIFGTTLDSKTQSLLIVNNATNVVIKVCEFQFCNDPFLGVYYHKNNKSWMESEFRVYSSANNCTFEYVSQPFLMDLEGKQGNFKNLREFVFKNIDGYFKIYSKHTPINLVRDLPQGFSALEPLVDLPIGINITRFQTLLALHRRYLTPGDSSSGWTAGAAAYYVGYLQPRTFLLKYNENGTITDAVDCALDPLSETKCTLKSFTVEKGIYQTSNFRVQPTESIVRFPNITNLCPFGEVFNATRFASVYAWNRKRISNCVADYSVLYNSASFSTFKCYGVSPTKLNDLCFTNVYADSFVIRGDEVRQIAPGQTGKIADYNYKLPDDFTGCVIAWNSNNLDSKVGGNYNYLYRLFRKSNLKPFERDISTEIYQAGSTPCNGVEGFNCYFPLQSYGFQPTNGVGYQPYRVVVLSFELLHAPATVCGPKKSTNLVKNKCVNFNFNGLTGTGVLTESNKKFLPFQQFGRDIADTTDAVRDPQTLEILDITPCSFGGVSVITPGTNTSNQVAVLYQDVNCTEVPVAIHADQLTPTWRVYSTGSNVFQTRAGCLIGAEHVNNSYECDIPIGAGICASYQTQTNSPRRARSVASQSIIAYTMSLGAENSVAYSNNSIAIPTNFTISVTTEILPVSMTKTSVDCTMYICGDSTECSNLLLQYGSFCTQLNRALTGIAVEQDKNTQEVFAQVKQIYKTPPIKDFGGFNFSQILPDPSKPSKRSFIEDLLFNKVTLADAGFIKQYGDCLGDIAARDLICAQKFNGLTVLPPLLTDEMIAQYTSALLAGTITSGWTFGAGAALQIPFAMQMAYRFNGIGVTQNVLYENQKLIANQFNSAIGKIQDSLSSTASALGKLQDVVNQNAQALNTLVKQLSSNFGAISSVLNDILSRLDKVEAEVQIDRLITGRLQSLQTYVTQQLIRAAEIRASANLAATKMSECVLGQSKRVDFCGKGYHLMSFPQSAPHGVVFLHVTYVPAQEKNFTTAPAICHDGKAHFPREGVFVSNGTHWFVTQRNFYEPQIITTDNTFVSGNCDVVIGIVNNTVYDPLQPELDSGGGSGGGQIYEGKLTAEGLRFGIVASRFNHALVDRLVEGAIDAIVRHGGREEDITLVRVPGSWEIPVAAGELARKEDIDAVIAIGVLIRGATPHFDYIASEVSKGLADLSLELRKPITFGVITADTLEQAIERAGTKHGNKGWEAALSAIEMANLFKSLR

SEQ ID NO: 7652 - protein, 1307 aa, Artificial Sequence
  SARS-CoV-2/Germany/BavPat1/2020__EPI_ISL_406862 spike protein (1-1147) LumSynth construct
MFVFLVLLPLVSSQCVNLTTRTQLPPAYTNSFTRGVYYPDKVFRSSVLHSTQDLFLPFFSNVTWFHAIHVSGTNGTKRFDNPVLPFNDGVYFASTEKSNIIRGWIFGTTLDSKTQSLLIVNNATNVVIKVCEFQFCNDPFLGVYYHKNNKSWMESEFRVYSSANNCTFEYVSQPFLMDLEGKQGNFKNLREFVFKNIDGYFKIYSKHTPINLVRDLPQGFSALEPLVDLPIGINITRFQTLLALHRSYLTPGDSSSGWTAGAAAYYVGYLQPRTFLLKYNENGTITDAVDCALDPLSETKCTLKSFTVEKGIYQTSNFRVQPTESIVRFPNITNLCPFGEVFNATRFASVYAWNRKRISNCVADYSVLYNSASFSTFKCYGVSPTKLNDLCFTNVYADSFVIRGDEVRQIAPGQTGKIADYNYKLPDDFTGCVIAWNSNNLDSKVGGNYNYLYRLFRKSNLKPFERDISTEIYQAGSTPCNGVEGFNCYFPLQSYGFQPTNGVGYQPYRVVVLSFELLHAPATVCGPKKSTNLVKNKCVNFNFNGLTGTGVLTESNKKFLPFQQFGRDIADTTDAVRDPQTLEILDITPCSFGGVSVITPGTNTSNQVAVLYQGVNCTEVPVAIHADQLTPTWRVYSTGSNVFQTRAGCLIGAEHVNNSYECDIPIGAGICASYQTQTNSPRRARSVASQSIIAYTMSLGAENSVAYSNNSIAIPTNFTISVTTEILPVSMTKTSVDCTMYICGDSTECSNLLLQYGSFCTQLNRALTGIAVEQDKNTQEVFAQVKQIYKTPPIKDFGGFNFSQILPDPSKPSKRSFIEDLLFNKVTLADAGFIKQYGDCLGDIAARDLICAQKFNGLTVLPPLLTDEMIAQYTSALLAGTITSGWTFGAGAALQIPFAMQMAYRFNGIGVTQNVLYENQKLIANQFNSAIGKIQDSLSSTASALGKLQDVVNQNAQALNTLVKQLSSNFGAISSVLNDILSRLDKVEAEVQIDRLITGRLQSLQTYVTQQLIRAAEIRASANLAATKMSECVLGQSKRVDFCGKGYHLMSFPQSAPHGVVFLHVTYVPAQEKNFTTAPAICHDGKAHFPREGVFVSNGTHWFVTQRNFYEPQIITTDNTFVSGNCDVVIGIVNNTVYDPLQPELDSGGGSGGGQIYEGKLTAEGLRFGIVASRFNHALVDRLVEGAIDAIVRHGGREEDITLVRVPGSWEIPVAAGELARKEDIDAVIAIGVLIRGATPHFDYIASEVSKGLADLSLELRKPITFGVITADTLEQAIERAGTKHGNKGWEAALSAIEMANLFKSLR

SEQ ID NO: 7653 - protein, 1307 aa, Artificial Sequence
  SARS-CoV-2/Wuhan/HBCDC-HB-02/2020__EPI_ISL_412978 spike protein (1-1147) LumSynth construct
MFVFLVLLPLVSSQCVNLTTRTQLPPAYTNSFTRGVYYPDKVFRSSVLHSTQDLFLPFFSNVTWFHAIHVSGTNGTKRFDNPVLPFNDGVYFASTEKSNIIRGWIFGTTLDSKTQSLLIVNNATNVVIKVCEFQFCNDPFLGVYYHKNNKSWMESEFRVYSSANNCTFEYVSQPFLMDLEGKQGNFKNLREFVFKNIDGYFKIYSKHTPINLVRDLPQGFSALEPLVDLPIGINITRFQTLLALHRSYLTPGDSSSGWTAGAAAYYVGYLQPRTFLLKYNENGTITDAVDCALDPLSETKCTLKSFTVEKGIYQTSNFRVQPTESIVRFPNITNLCPFGEVFNATRFASVYAWNRKRISNCVADYSVLYNSASFSTFKCYGVSPTKLNDLCFTNVYADSFVIRGDEVRQIAPGQTGKIADYNYKLPDDFTGCVIAWNSNNLDSKVGGNYNYLYRLFRKSNLKPFERDISTEIYQAGSTPCNGVEGFNCYFPLQSYGFQPTNGVGYQPYRVVVLSFELLHAPATVCGPKKSTNLVKNKCVNFNFNGLTGTGVLTESNKKFLPFQQFGRDIADTTDAVRDPQTLEILDITPCSFGGVSVITPGTNTSNQVAVLYQDVNCTEVPVAIHADQLTPTWRVYSTGSNVFQTRAGCLIGAEHVNNSYECDIPIGAGICASYQTQTNSPRRARSVASQSIIAYTMSLGAENSVAYSNNSIAIPTNFTISVTTEILPVSMTKTSVDCTMYICGDSTECSNFLLQYGSFCTQLNRALTGIAVEQDKNTQEVFAQVKQIYKTPPIKDFGGFNFSQILPDPSKPSKRSFIEDLLFNKVTLADAGFIKQYGDCLGDIAARDLICAQKFNGLTVLPPLLTDEMIAQYTSALLAGTITSGWTFGAGAALQIPFAMQMAYRFNGIGVTQNVLYENQKLIANQFNSAIGKIQDSLSSTASALGKLQDVVNQNAQALNTLVKQLSSNFGAISSVLNDILSRLDKVEAEVQIDRLITGRLQSLQTYVTQQLIRAAEIRASANLAATKMSECVLGQSKRVDFCGKGYHLMSFPQSAPHGVVFLHVTYVPAQEKNFTTAPAICHDGKAHFPREGVFVSNGTHWFVTQRNFYEPQIITTDNTFVSGNCDVVIGIVNNTVYDPLQPELDSGGGSGGGQIYEGKLTAEGLRFGIVASRFNHALVDRLVEGAIDAIVRHGGREEDITLVRVPGSWEIPVAAGELARKEDIDAVIAIGVLIRGATPHFDYIASEVSKGLADLSLELRKPITFGVITADTLEQAIERAGTKHGNKGWEAALSAIEMANLFKSLR

SEQ ID NO: 7654 - protein, 1307 aa, Artificial Sequence
  SARS-CoV-2/Australia/QLD02/2020__EPI_ISL_407896 spike protein (1-1147) LumSynth construct
MFVFLVLLPLVSSQCVNLTTRTQLPPAYTNSFTRGVYYPDKVFRSSVLHSTQDLFLPFFSNVTWFHAIHVSGTNGTKRFDNPVLPFNDGVYFASTEKSNIIRGWIFGTTLDSKTQSLLIVNNATNVVIKVCEFQFCNDPFLGVYYHKNNKSWMESEFRVYSSANNCTFEYVSQPFLMDLEGKQGNFKNLREFVFKNIDGYFKIYSKHTPINLVRDLPQGFSALEPLVDLPIGINITRFQTLLALHRSYLTPGDSSSGWTAGAAAYYVGYLQPRTFLLKYNENGTITDAVDCALDPLSETKCTLKSFTVEKGIYQTSNFRVQPTESIVRFPNITNLCPFGEVFNATRFASVYAWNRKRISNCVADYSVLYNSASFSTFKCYGVSPTKLNDLCFTNVYADSFVIRGDEVRQIAPGQTGKIADYNYKLPDDFTGCVIAWNSNNLDSKVGGNYNYLYRLFRKSNLKPFERDISTEIYQAGSTPCNGVEGFNCYFPLQSYGFQPTNGVGYQPYRVVVLSFELLHAPATVCGPKKSTNLVKNKCVNFNFNGLTGTGVLTESNKKFLPFQQFGRDIADTTDAVRDPQTLEILDITPCSFGGVSVITPGTNTSNQVAVLYQDVNCTEVPVAIHADQLTPTWRVYSTGSNVFQTRAGCLIGAEHVNNSYECDIPIGAGICASYQTQTNSPRRARSVASQSIIAYTMSLGAENSVAYSNNSIAIPTNFTISVTTEILPVSMTKTSVDCTMYICGDSTECSNLLLQYGSFCTQLNRALTGIAVEQDKNTQEVFAQVKQIYKTPPIKDFGGFNFSQILPDPSKPSKRSFIEDLLFNKVTLADAGFIKQYGDCLGDIAARDLICAQKFNGLTVLPPLLTDEMIAQYTSALLAGTITSGWTFGAGAALQIPFAMQMAYRFNGIGVTQNVLYENQKLIANQFNSAIGKIQDSLSSTASALGKLQDVVNQNAQALNTLVKQLSSNFGAISSVLNDILSRLDKVEAEVQIDRLITGRLQSLQTYVTQQLIRAAEIRASANLAATKMSECVLGQSKRVDFCGKGYHLMSFPQSAPHGVVFLHVTYVPAQEKNFTTAPAICHDGKAHFPREGVFVSNGTHWFVTQRNFYEPQIITTDNTFVSGNCDVVIGIVNNTVYDPLQLELDSGGGSGGGQIYEGKLTAEGLRFGIVASRFNHALVDRLVEGAIDAIVRHGGREEDITLVRVPGSWEIPVAAGELARKEDIDAVIAIGVLIRGATPHFDYIASEVSKGLADLSLELRKPITFGVITADTLEQAIERAGTKHGNKGWEAALSAIEMANLFKSLR

SEQ ID NO: 7655 - protein, 1307 aa, Artificial Sequence
  SARS-CoV-2/India/1-31/2020__EPI_ISL_413523 spike protein (1-1147) LumSynth construct
MFVFLVLLPLVSSQCVNLTTRTQLPPAYTNSFTRGVYYPDKVFRSSVLHSTQDLFLPFFSNVTWFHAIHVSGTNGTKRFDNPVLPFNDGVYFASTEKSNIIRGWIFGTTLDSKTQSLLIVNNATNVVIKVCEFQFCNDPFLGVYYHKNNKSWMESEFRVYSSANNCTFEYVSQPFLMDLEGKQGNFKNLREFVFKNIDGYFKIYSKHTPINLVRDLPQGFSALEPLVDLPIGINITRFQTLLALHRSYLTPGDSSSGWTAGAAAYYVGYLQPRTFLLKYNENGTITDAVDCALDPLSETKCTLKSFTVEKGIYQTSNFRVQPTESIVRFPNITNLCPFGEVFNATRFASVYAWNRKRISNCVADYSVLYNSASFSTFKCYGVSPTKLNDLCFTNVYADSFVIRGDEVRQIAPGQTGKIADYNYKLPDDFTGCVIAWNSNNLDSKVGGNYNYLYRLFRKSNLKPFERDISTEIYQAGSTPCNGVEGFNCYFPLQSYGFQPTNGVGYQPYRVVVLSFELLHAPATVCGPKKSTNLVKNKCVNFNFNGLTGTGVLTESNKKFLPFQQFGRDIADTTDAVRDPQTLEILDITPCSFGGVSVITPGTNTSNQVAVLYQDVNCTEVPVAIHADQLTPTWRVYSTGSNVFQTRAGCLIGAEHVNNSYECDIPIGAGICASYQTQTNSPRRARSVASQSIIAYTMSLGAENSVAYSNNSIAIPTNFTISVTTEILPVSMTKTSVDCTMYICGDSTECSNLLLQYGSFCTQLNRALTGIAVEQDKNTQEVFAQVKQIYKTPPIKDFGGFNFSQILPDPSKPSKRSFIEDLLFNKVTLADAGFIKQYGDCLGDIAARDLICAQKFNGLTVLPPLLTDEMIAQYTSALLAGTITSGWTFGAGAALQIPFAMQMAYRFNGIGVTQNVLYENQKLIANQFNSVIGKIQDSLSSTASALGKLQDVVNQNAQALNTLVKQLSSNFGAISSVLNDILSRLDKVEAEVQIDRLITGRLQSLQTYVTQQLIRAAEIRASANLAATKMSECVLGQSKRVDFCGKGYHLMSFPQSAPHGVVFLHVTYVPAQEKNFTTAPAICHDGKAHFPREGVFVSNGTHWFVTQRNFYEPQIITTDNTFVSGNCDVVIGIVNNTVYDPLQPELDSGGGSGGGQIYEGKLTAEGLRFGIVASRFNHALVDRLVEGAIDAIVRHGGREEDITLVRVPGSWEIPVAAGELARKEDIDAVIAIGVLIRGATPHFDYIASEVSKGLADLSLELRKPITFGVITADTLEQAIERAGTKHGNKGWEAALSAIEMANLFKSLR

SEQ ID NO: 7656 - protein, 1307 aa, Artificial Sequence
  SARS-CoV-2/Guangdong/GD2020087-P0008/2020__EPI_ISL_413863 spike protein (1-1147) LumSynth construct
MFVFLVLLPLVSSQCVNLTTRTQLPPAYTNSFTRGVYYPDKVFRSSVLHSTQDLFLPFFSNVTWFHAIHVSGTNGTKRFDNPVLPFNDGVYFASTEKSNIIRGWIFGTTLDSKTQSLLIVNNATNVVIKVCEFQFCNDPFLGVYYHKNNKSWMESEFRVYSSANNCTFEYVSQPFLMDLEGKQGNFKNLREFVFKNIDGYFKIYSKHTPINLVRDLPQGFSALEPLVDLPIGINITRFQTLLALHRSYLTPGDSSSGWTAGAAAYYVGYLQPRTFLLKYNENGTITDAVDCALDPLSETKCTLKSFTVEKGIYQTSNFRVQPTESIVRFPNITNLCPFGEVFNATRFASVYAWNRKRISNCVADYSVLYNSASFSTFKCYGVSPTKLNDLCFTNVYADSFVIRGDEVREIAPGQTGKIADYNYKLPDDFTGCVIAWNSNNLDSKVGGNYNYLYRLFRKSNLKPFERDISTEIYQAGSTPCNGVEGFNCYFPLQSYGFQPTNGVGYQPYRVVVLSFELLHAPATVCGPKKSTNLVKNKCVNFNFNGLTGTGVLTESNKKFLPFQQFGRDIADTTDAVRDPQTLEILDITPCSFGGVSVITPGTNTSNQVAVLYQDVNCTEVPVAIHADQLTPTWRVYSTGSNVFQTRAGCLIGAEHVNNSYECDIPIGAGICASYQTQTNSPRRARSVASQSIIAYTMSLGAENSVAYSNNSIAIPTNFTISVTTEILPVSMTKTSVDCTMYICGDSTECSNLLLQYGSFCTQLNRALTGIAVEQDKNTQEVFAQVKQIYKTPPIKDFGGFNFSQILPDPSKPSKRSFIEDLLFNKVTLADAGFIKQYGDCLGDIAARDLICAQKFNGLTVLPPLLTDEMIAQYTSALLAGTITSGWTFGAGAALQIPFAMQMAYRFNGIGVTQNVLYENQKLIANQFNSAIGKIQDSLSSTASALGKLQDVVNQNAQALNTLVKQLSSNFGAISSVLNDILSRLDKVEAEVQIDRLITGRLQSLQTYVTQQLIRAAEIRASANLAATKMSECVLGQSKRVDFCGKGYHLMSFPQSAPHGVVFLHVTYVPAQEKNFTTAPAICHDGKAHFPREGVFVSNGTHWFVTQRNFYEPQIITTDNTFVSGNCDVVIGIVNNTVYDPLQPELDSGGGSGGGQIYEGKLTAEGLRFGIVASRFNHALVDRLVEGAIDAIVRHGGREEDITLVRVPGSWEIPVAAGELARKEDIDAVIAIGVLIRGATPHFDYIASEVSKGLADLSLELRKPITFGVITADTLEQAIERAGTKHGNKGWEAALSAIEMANLFKSLR

SEQ ID NO: 7657 - protein, 1307 aa, Artificial Sequence
  SARS-CoV-2/Sweden/01/2020__EPI_ISL_411951 spike protein (1-1147) LumSynth construct
MFVFLVLLPLVSSQCVNLTTRTQLPPAYTNSFTRGVYYPDKVFRSSVLHSTQDLFLPFFSNVTWFHAIHVSGTNGTKRFDNPVLPFNDGVYFASTEKSNIIRGWIFGTTLDSKTQSLLIVNNATNVVIKVCEFQFCNDPFLGVYYHKNNKSWMESEFRVYSSANNCTFEYVSQPFLMDLEGKQGNFKNLREFVFKNIDGYFKIYSKHTPINLVRDLPQGFSALEPLVDLPIGINITRFQTLLALHRSYLTPGDSSSGWTAGAAAYYVGYLQPRTFLLKYNENGTITDAVDCALDPLSETKCTLKSFTVEKGIYQTSNFRVQPTESIVRFPNITNLCPFGEVFNATRFASVYAWNRKRISNCVADYSVLYNSASFSTFKCYGVSPTKLNDLCFTNVYADSFVIRGDEVRQIAPGQTGKIADYNYKLPDDFTGCVIAWNSNNLDSKVGGNYNYLYRLFRKSNLKPFERDISTEIYQAGSTPCNGVEGFNCYFPLQSYGFQPTNGVGYQPYRVVVLSFELLHAPATVCGPKKSTNLVKNKCVNFNFNGLTGTGVLTESNKKFLPFQQFGRDIADTTDAVRDPQTLEILDITPCSFGGVSVITPGTNTSNQVAVLYQDVNCTEVPVAIHADQLTPTWRVYSTGSNVFQTRAGCLIGAEHVNNSYECDIPIGAGICASYQTQTNSPRRARSVASQSIIAYTMSLGAENSVAYSNNSIAIPTNFTISVTTEILPVSMTKTSVDCTMYICGDSTECSNLLLQYGSFCTQLNRALTGIAVEQDKNTQEVFAQVKQIYKTPPIKDCGGFNFSQILPDPSKPSKRSFIEDLLFNKVTLADAGFIKQYGDCLGDIAARDLICAQKFNGLTVLPPLLTDEMIAQYTSALLAGTITSGWTFGAGAALQIPFAMQMAYRFNGIGVTQNVLYENQKLIANQFNSAIGKIQDSLSSTASALGKLQDVVNQNAQALNTLVKQLSSNFGAISSVLNDILSRLDKVEAEVQIDRLITGRLQSLQTYVTQQLIRAAEIRASANLAATKMSECVLGQSKRVDFCGKGYHLMSFPQSAPHGVVFLHVTYVPAQEKNFTTAPAICHDGKAHFPREGVFVSNGTHWFVTQRNFYEPQIITTDNTFVSGNCDVVIGIVNNTVYDPLQPELDSGGGSGGGQIYEGKLTAEGLRFGIVASRFNHALVDRLVEGAIDAIVRHGGREEDITLVRVPGSWEIPVAAGELARKEDIDAVIAIGVLIRGATPHFDYIASEVSKGLADLSLELRKPITFGVITADTLEQAIERAGTKHGNKGWEAALSAIEMANLFKSLR

SEQ ID NO: 7658 - protein, 1307 aa, Artificial Sequence
  SARS-CoV-2/Tianmen/HBCDC-HB-07/2020__EPI_ISL_412983 spike protein (1-1147) LumSynth construct
MFVFLVLLPLVSSQCVNLTTRTQLPPAYTNSFTRGVYYPDKVFRSSVLHSTQDLFLPFFSNVTWFHAIHVSGTNGTKRFDNPVLPFNDGVYFASTEKSNIIRGWIFGTTLDSKTQSLLIVNNATNVVIKVCEFQFCNDPFLGVYYHKNNKSWMESEFRVYSSANNCTFEYVSQPFLMDLEGKQGNFKNLREFVFKNIDGYFKIYSKHTPINLVRDLPQGFSALEPLVDLPIGINITRFQTLLALHRSYLTPGDSSSGWTAGAAAYYVGYLQPRTFLLKYNENGTITDAVDCALDPLSETKCTLKSFTVEKGIYQTSNFRVQPTESIVRFPNITNLCPFGEVFNATRFASVYAWNRKRISNCVADYSVLYNSASFSTFKCYGVSPTKLNDLCFTNVYADSFVIRGDEVRQIAPGQTGKIADYNYKLPDDFTGCVIAWNSNNLDSKVGGNYNYLYRLFRKSNLKPFERDISTEIYQAGSTPCNGVEGFNCYFPLQSYGFQPTNGVGYQPYRVVVLSFELLHAPATVCGPKKSTNLVKNKCVNFNFNGLTGTGVLTESNKKFLPFQQFGRDIADTTDAVRDPQTLEILDITPCSFGGVSVITPGTNTSNQVAVLYQDLNCTEVPVAIHADQLTPTWRVYSTGSNVFQTRAGCLIGAEHVNNSYECDIPIGAGICASYQTQTNSPRRARSVASQSIIAYTMSLGAENSVAYSNNSIAIPTNFTISVTTEILPVSMTKTSVDCTMYICGDSTECSNLLLQYGSFCTQLNRALTGIAVEQDKNTQEVFAQVKQIYKTPPIKDFGGFNFSQILPDPSKPSKRSFIEDLLFNKVTLADAGFIKQYGDCLGDIAARDLICAQKFNGLTVLPPLLTDEMIAQYTSALLAGTITSGWTFGAGAALQIPFAMQMAYRFNGIGVTQNVLYENQKLIANQFNSAIGKIQDSLSSTASALGKLQDVVNQNAQALNTLVKQLSSNFGAISSVLNDILSRLDKVEAEVQIDRLITGRLQSLQTYVTQQLIRAAEIRASANLAATKMSECVLGQSKRVDFCGKGYHLMSFPQSAPHGVVFLHVTYVPAQEKNFTTAPAICHDGKAHFPREGVFVSNGTHWFVTQRNFYEPQIITTDNTFVSGNCDVVIGIVNNTVYDPLQPELDSGGGSGGGQIYEGKLTAEGLRFGIVASRFNHALVDRLVEGAIDAIVRHGGREEDITLVRVPGSWEIPVAAGELARKEDIDAVIAIGVLIRGATPHFDYIASEVSKGLADLSLELRKPITFGVITADTLEQAIERAGTKHGNKGWEAALSAIEMANLFKSLR

SEQ ID NO: 7659 - protein, 1307 aa, Artificial Sequence
  SARS-CoV-2/Hong Kong/case42_VM20002493/2020__EPI_ISL_414527 spike protein (1-1147) LumSynth construct
MFVFLVLLPLVSSQCVNLTTRTQLPPAYTNSFTRGVYYPDKVFRSSVLHSTQDLFLPFFSNVTWFHAIHVSGTNGTKRFDNPVLPFNDGVYFASTEKSNIIRGWIFGTTLDSKTQSLLIVNNATNVVIKVCEFQFCNDPFLGVYYHKNNKSWMESEFRVYSSANNCTFEYVSQPFLMDLEGKQGNFKNLREFVFKNIDGYFKIYSKHTPINLVRDLPQGFSALEPLVDLPIGINITRFQTLLALHRSYLTPGDSSSGWTAGAAAYYVGYLQPRTFLLKYNENGTITDAVDCALDPLSETKCTLKSFTVEKGIYQTSNFRVQPTESIVRFPNITNLCPFGEVFNATRFASVYAWNRKRISNCVADYSVLYNSASFSTFKCYGVSPTKLNDLCFTNVYADSFVIRGDEVRQIAPGQTGKIADYNYKLPDDFTGCVIAWNSNNLDSKVGGNYNYLYRLFRKSNLKPFERDISTEIYQAGSTPCNGVEGFNCYFPLQSYGFQPTNGVGYQPYRVVVLSFELLHAPATVCGPKKSTNLVKNKCVNFNFNGLTGTGVLTESNKKFLPFQQFGRDIADTTDAVRDPQTLEILDITPCSFGGVSVITPGTNTSNQVAVLYQDVNCTEVPVAIHADQLTPTWRVYSTGSNVFQTRAGCLIGAEHVNNSYECDIPIGAGICASYQTQTNSPRRARSVASQSIIAYTMSLGAENSVAYSNNSIAIPTNFAISVTTEILPVSMTKTSVDCTMYICGDSTECSNLLLQYGSFCTQLNRALTGIAVEQDKNTQEVFAQVKQIYKTPPIKDFGGFNFSQILPDPSKPSKRSFIEDLLFNKVTLADAGFIKQYGDCLGDIAARDLICAQKFNGLTVLPPLLTDEMIAQYTSALLAGTITSGWTFGAGAALQIPFAMQMAYRFNGIGVTQNVLYENQKLIANQFNSAIGKIQDSLSSTASALGKLQDVVNQNAQALNTLVKQLSSNFGAISSVLNDILSRLDKVEAEVQIDRLITGRLQSLQTYVTQQLIRAAEIRASANLAATKMSECVLGQSKRVDFCGKGYHLMSFPQSAPHGVVFLHVTYVPAQEKNFTTAPAICHDGKAHFPREGVFVSNGTHWFVTQRNFYEPQIITTDNTFVSGNCDVVIGIVNNTVYDPLQPELDSGGGSGGGQIYEGKLTAEGLRFGIVASRFNHALVDRLVEGAIDAIVRHGGREEDITLVRVPGSWEIPVAAGELARKEDIDAVIAIGVLIRGATPHFDYIASEVSKGLADLSLELRKPITFGVITADTLEQAIERAGTKHGNKGWEAALSAIEMANLFKSLR

SEQ ID NO: 7660 - protein, 1307 aa, Artificial Sequence
  SARS-CoV-2/USA/CruiseA-23/2020__EPI_ISL_414482 spike protein (1-1147) LumSynth construct
MFVFLVLLPLVSSQCVNLTTRTQLPPAYTNSFTRGVYYPDKVFRSSVLHSTQDLFLPFFSNVTWFHAIHVSGTNGTKRFDNPVLPFNDGVYFASTEKSNIIRGWIFGTTLDSKTQSLLIVNNATNVVIKVCEFQFCNDPFLGVYYHKNNKSWMESEFRVYSSANNCTFEYVSQPFLMDLEVKQGNFKNLREFVFKNIDGYFKIYSKHTPINLVRDLPQGFSALEPLVDLPIGINITRFQTLLALHRSYLTPGDSSSGWTAGAAAYYVGYLQPRTFLLKYNENGTITDAVDCALDPLSETKCTLKSFTVEKGIYQTSNFRVQPTESIVRFPNITNLCPFGEVFNATRFASVYAWNRKRISNCVADYSVLYNSASFSTFKCYGVSPTKLNDLCFTNVYADSFVIRGDEVRQIAPGQTGKIADYNYKLPDDFTGCVIAWNSNNLDSKVGGNYNYLYRLFRKSNLKPFERDISTEIYQAGSTPCNGVEGFNCYFPLQSYGFQPTNGVGYQPYRVVVLSFELLHAPATVCGPKKSTNLVKNKCVNFNFNGLTGTGVLTESNKKFLPFQQFGRDIADTTDAVRDPQTLEILDITPCSFGGVSVITPGTNTSNQVAVLYQDVNCTEVPVAIHADQLTPTWRVYSTGSNVFQTRAGCLIGAEHVNNSYECDIPIGAGICASYQTQTNSPRRARSVASQSIIAYTMSLGAENSVAYSNNSIAIPTNFTISVTTEILPVSMTKTSVDCTMYICGDSTECSNLLLQYGSFCTQLNRALTGIAVEQDKNTQEVFAQVKQIYKTPPIKDFGGFNFSQILPDPSKPSKRSFIEDLLFNKVTLADAGFIKQYGDCLGDIAARDLICAQKFNGLTVLPPLLTDEMIAQYTSALLAGTITSGWTFGAGAALQIPFAMQMAYRFNGIGVTQNVLYENQKLIANQFNSAIGKIQDSLSSTASALGKLQDVVNQNAQALNTLVKQLSSNFGAISSVLNDILSRLDKVEAEVQIDRLITGRLQSLQTYVTQQLIRAAEIRASANLAATKMSECVLGQSKRVDFCGKGYHLMSFPQSAPHGVVFLHVTYVPAQEKNFTTAPAICHDGKAHFPREGVFVSNGTHWFVTQRNFYEPQIITTDNTFVSGNCDVVIGIVNNTVYDPLQPELDSGGGSGGGQIYEGKLTAEGLRFGIVASRFNHALVDRLVEGAIDAIVRHGGREEDITLVRVPGSWEIPVAAGELARKEDIDAVIAIGVLIRGATPHFDYIASEVSKGLADLSLELRKPITFGVITADTLEQAIERAGTKHGNKGWEAALSAIEMANLFKSLR

SEQ ID NO: 7661 - protein, 1307 aa, Artificial Sequence
  SARS-CoV-2/Hong Kong/case85_VM20002868/2020__EPI_ISL_414519 spike protein (1-1147) LumSynth construct
MFVFLVLVPLVSSQCVNLTTRTQLPPAYTNSFTRGVYYPDKVFRSSVLHSTQDLFLPFFSNVTWFHAIHVSGTNGTKRFDNPVLPFNDGVYFASTEKSNIIRGWIFGTTLDSKTQSLLIVNNATNVVIKVCEFQFCNDPFLGVYYHKNNKSWMESEFRVYSSANNCTFEYVSQPFLMDLEGKQGNFKNLREFVFKNIDGYFKIYSKHTPINLVRDLPQGFSALEPLVDLPIGINITRFQTLLALHRSYLTPGDSSSGWTAGAAAYYVGYLQPRTFLLKYNENGTITDAVDCALDPLSETKCTLKSFTVEKGIYQTSNFRVQPTESIVRFPNITNLCPFGEVFNATRFASVYAWNRKRISNCVADYSVLYNSASFSTFKCYGVSPTKLNDLCFTNVYADSFVIRGDEVRQIAPGQTGKIADYNYKLPDDFTGCVIAWNSNNLDSKVGGNYNYLYRLFRKSNLKPFERDISTEIYQAGSTPCNGVEGFNCYFPLQSYGFQPTNGVGYQPYRVVVLSFELLHAPATVCGPKKSTNLVKNKCVNFNFNGLTGTGVLTESNKKFLPFQQFGRDIADTTDAVRDPQTLEILDITPCSFGGVSVITPGTNTSNQVAVLYQDVNCTEVPVAIHADQLTPTWRVYSTGSNVFQTRAGCLIGAEHVNNSYECDIPIGAGICASYQTQTNSPRRARSVASQSIIAYTMSLGAENSVAYSNNSIAIPTNFTISVTTEILPVSMTKTSVDCTMYICGDSTECSNLLLQYGSFCTQLNRALTGIAVEQDKNTQEVFAQVKQIYKTPPIKDFGGFNFSQILPDPSKPSKRSFIEDLLFNKVTLADAGFIKQYGDCLGDIAARDLICAQKFNGLTVLPPLLTDEMIAQYTSALLAGTITSGWTFGAGAALQIPFAMQMAYRFNGIGVTQNVLYENQKLIANQFNSAIGKIQDSLSSTASALGKLQDVVNQNAQALNTLVKQLSSNFGAISSVLNDILSRLDKVEAEVQIDRLITGRLQSLQTYVTQQLIRAAEIRASANLAATKMSECVLGQSKRVDFCGKGYHLMSFPQSAPHGVVFLHVTYVPAQEKNFTTAPAICHDGKAHFPREGVFVSNGTHWFVTQRNFYEPQIITTDNTFVSGNCDVVIGIVNNTVYDPLQPELDSGGGSGGGQIYEGKLTAEGLRFGIVASRFNHALVDRLVEGAIDAIVRHGGREEDITLVRVPGSWEIPVAAGELARKEDIDAVIAIGVLIRGATPHFDYIASEVSKGLADLSLELRKPITFGVITADTLEQAIERAGTKHGNKGWEAALSAIEMANLFKSLR

SEQ ID NO: 7662 - protein, 1307 aa, Artificial Sequence; identical to SEQ ID NO: 7652
  SARS-CoV-2/England/200990660/2020__EPI_ISL_414523 spike protein (1-1147) LumSynth construct

SEQ ID NO: 7663 - protein, 1307 aa, Artificial Sequence
  SARS-CoV-2/Australia/NSW09/2020__EPI_ISL_413595 spike protein (1-1147) LumSynth construct
MFVFLVLLPLVSSQCVNLTTRTQLPPAYTNSFTRGVYYPDKVFRSSVLHSTQDLFLPFFSNVTWFHAIHVSGTNGTKRFDNPVLPFNDGVYFASTEKSNIIRGWIFGTTLDSKTQSLLIVNNATNVVIKVCEFQFCNDPFLGVYYHKNNKSWMESEFRVYSSANNCTFEYVSQPFLMDLEGKQGNFKNLREFVFKNIDGYFKIYSKHTPINLVRDLPQGFSALEPLVDLPIGINITRFQTLLALHRSYLTPGDSSSGWTAGAAAYYVGYLQPRTFLLKYNENGTITDAVDCALDPLSETKCTLKSFTVEKGIYQTSNFRVQPTESIVRFPNITNLCPFGEVFNATRFASVYAWNRKRISNCVADYSVLYNSASFSTFKCYGVSPTKLNDLCFTNVYADSFVIRGDEVRQIAPGQTGKIADYNYKLPDDFTGCVIAWNSNNLDSKVGGNYNYLYRLFRKSNLKPFERDISTEIYQAGSTPCNGVEGFNCYFPLQSYGFQPTNGVGYQPYRVVVLSFELLHAPATVCGPKKSTNLVKNKCVNFNFNGLTGTGVLTESNKKFLPFQQFGRDIADTTDAVRDPQTLEILDITPCSFGGVSVITPGTNTSNQVAVLYQDVNCTEVPVAIHADQLTPTWRVYSTGSNVFQTRAGCLIGAEHVNNSYECDIPIGAGICASYQTQTNSPRRARSVASQSIIAYTMSLGAENSVAYSNNSIAIPTNFTISVTTEILPVSMTKTSVDCTMYICGDSTECSNLLLQYGSFCTQLNRALTGIAVEQDKNTQEVFAQVKQIYKTPPIKDFGGFNFSQILPDPSKPSKRSFIEDLLFNKVTLADAGFIKQYGDCLGDIAARDLICAQKFNGLTVLPPLLTDEMIAQYTSALLAGTITSGWTFGAGAALQIPFAMQMAYRFNGIGVTQNVLYENQKLIANQFNSAIGKIQDSLSFTASALGKLQDVVNQNAQALNTLVKQLSSNFGAISSVLNDILSRLDKVEAEVQIDRLITGRLQSLQTYVTQQLIRAAEIRASANLAATKMSECVLGQSKRVDFCGKGYHLMSFPQSAPHGVVFLHVTYVPAQEKNFTTAPAICHDGKAHFPREGVFVSNGTHWFVTQRNFYEPQIITTDNTFVSGNCDVVIGIVNNTVYDPLQPELDSGGGSGGGQIYEGKLTAEGLRFGIVASRFNHALVDRLVEGAIDAIVRHGGREEDITLVRVPGSWEIPVAAGELARKEDIDAVIAIGVLIRGATPHFDYIASEVSKGLADLSLELRKPITFGVITADTLEQAIERAGTKHGNKGWEAALSAIEMANLFKSLR

SEQ ID NO: 7664 - protein, 1307 aa, Artificial Sequence; identical to SEQ ID NO: 7644
  SARS-CoV-2/Australia/NSW10/2020__EPI_ISL_413596 spike protein (1-1147) LumSynth construct

SEQ ID NO: 7665 - protein, 1307 aa, Artificial Sequence
  SARS-CoV-2/Switzerland/1000477797/2020__EPI_ISL_413023 spike protein (1-1147) LumSynth construct
MFVFLVLLPLVSSQCVNLTTRTQLPPAYTNSFTRGVYYPDKVFRSSVLHSTQDLFLPFFSNVTWFHAIHVSGTNGTKRFDNPVLPFNDGVYFASTEKSNIIRGWIFGTTLDSKTQSLLIVNNATNVVIKVCEFQFCNDPFLGVYYHKNNKSWMESEFRVYSSANNCTFEYVSQPFLMDLEGKQGNFKNLREFVFKNIDGYFNIYSKHTPINLVRDLPQGFSALEPLVDLPIGINITRFQTLLALHRSYLTPGDSSSGWTAGAAAYYVGYLQPRTFLLKYNENGTITDAVDCALDPLSETKCTLKSFTVEKGIYQTSNFRVQPTESIVRFPNITNLCPFGEVFNATRFASVYAWNRKRISNCVADYSVLYNSASFSTFKCYGVSPTKLNDLCFTNVYADSFVIRGDEVRQIAPGQTGKIADYNYKLPDDFTGCVIAWNSNNLDSKVGGNYNYLYRLFRKSNLKPFERDISTEIYQAGSTPCNGVEGFNCYFPLQSYGFQPTNGVGYQPYRVVVLSFELLHAPATVCGPKKSTNLVKNKCVNFNFNGLTGTGVLTESNKKFLPFQQFGRDIADTTDAVRDPQTLEILDITPCSFGGVSVITPGTNTSNQVAVLYQGVNCTEVPVAIHADQLTPTWRVYSTGSNVFQTRAGCLIGAEHVNNSYECDIPIGAGICASYQTQTNSPRRARSVASQSIIAYTMSLGAENSVAYSNNSIAIPTNFTISVTTEILPVSMTKTSVDCTMYICGDSTECSNLLLQYGSFCTQLNRALTGIAVEQDKNTQEVFAQVKQIYKTPPIKDFGGFNFSQILPDPSKPSKRSFIEDLLFNKVTLADAGFIKQYGDCLGDIAARDLICAQKFNGLTVLPPLLTDEMIAQYTSALLAGTITSGWTFGAGAALQIPFAMQMAYRFNGIGVTQNVLYENQKLIANQFNSAIGKIQDSLSSTASALGKLQDVVNQNAQALNTLVKQLSSNFGAISSVLNDILSRLDKVEAEVQIDRLITGRLQSLQTYVTQQLIRAAEIRASANLAATKMSECVLGQSKRVDFCGKGYHLMSFPQSAPHGVVFLHVTYVPAQEKNFTTAPAICHDGKAHFPREGVFVSNGTHWFVTQRNFYEPQIITTDNTFVSGNCDVVIGIVNNTVYDPLQPELDSGGGSGGGQIYEGKLTAEGLRFGIVASRFNHALVDRLVEGAIDAIVRHGGREEDITLVRVPGSWEIPVAAGELARKEDIDAVIAIGVLIRGATPHFDYIASEVSKGLADLSLELRKPITFGVITADTLEQAIERAGTKHGNKGWEAALSAIEMANLFKSLR

SEQ ID NO: 7666 - protein, 1307 aa, Artificial Sequence
  SARS-CoV-2/Belgium/BA-02291/2020__EPI_ISL_415159 spike protein (1-1147) LumSynth construct
MFVFLVLLPLVSSQCVNLTTRTQLPPAYTNSFTRGVYYPDKVFRSSVLHSTQDLFLPFFSNVTWFHAIHVSGTNGTKRFDNPVLPFNDGVYFASTEKSNIIRGWIFGTTLDSKTQSLLIVNNATNVVIKVCEFQFCNDPFLGVYYHKNNKSWMESEFRVYSSANNCTFEYVSQPFLMDLEGKQGNFKNLREFVFKNIDGYFKIYSKHTPINLVRDLPQGFSALEPLVDLPIGINITRFQTLLALHRSYLTPGDSSSGWTAGAAAYYVGYLQPRTFLLKYNENGTITDAVDCALDPLSETKCTLKSFTVEKGIYQTSNFRVQPTESIVRFPNITNLCPFGEVFNATRFASVYAWNRKRISNCVADYSVLYNSASFSTFKCYGVSPTKLNDLCFTNVYADSFVIRGDEVRQIAPGQTGKIADYNYKLPDDFTGCVIAWNSNNLDSKVGGNYNYLYRLFRRSNLKPFERDISTEIYQAGSTPCNGVEGFNCYFPLQSYGFQPTNGVGYQPYRVVVLSFELLPAPATVCGPKKSTNLVKNKCVNFNFNGLTGTGVLTESNKKFLPFQQFGRDIADTTDAVRDPQTLEILDITPCSFGGVSVITPGTNTSNQVAVLYQGVNCTEVPVAIHADQLTPTWRVYSTGSNVFQTRAGCLIGAEHVNNSYECDIPIGAGICASYQTQTNSPRRARSVASQSIIAYTMSLGAENSVAYSNNSIAIPTNFTISVTTEILPVSMTKTSVDCTMYICGDSTECSNLLLQYGSFCTQLNRALTGIAVEQDKNTQEVFAQVKQIYKTPPIKDFGGFNFSQILPDPSKPSKRSFIEDLLFNKVTLADAGFIKQYGDCLGDIAARDLICAQKFNGLTVLPPLLTDEMIAQYTSALLAGTITSGWTFGAGAALQIPFAMQMAYRFNGIGVTQNVLYENQKLIANQFNSAIGKIQDSLSSAAPALGKLQDVVNQNAQALNTLVKQLSSNFGAISSVLNDILSRLDKVEAEVQIDRLITGRLQSLQTYVTQQLIRAAEIRASANLAATKMSECVLGQSKRVDFCGKGYHLMSFPQSAPHGVVFLHVTYVPAQEKNFTTAPAICHDGKAHFPREGVFVSNGTHWFVTQRNFYEPQIITTDNTFVSGNCDVVIGIVNNTVYDPLQPELDSGGGSGGGQIYEGKLTAEGLRFGIVASRFNHALVDRLVEGAIDAIVRHGGREEDITLVRVPGSWEIPVAAGELARKEDIDAVIAIGVLIRGATPHFDYIASEVSKGLADLSLELRKPITFGVITADTLEQAIERAGTKHGNKGWEAALSAIEMANLFKSLR

SEQ ID NO: 7667 - protein, 1307 aa, Artificial Sequence
  SARS-CoV-2/USA/WA8-UW5/2020__EPI_ISL_413486 spike protein (1-1147) LumSynth construct
MFVFLVLLPLVSSQCVNLTTRTQLPPAYTNSFTRGVYYPDKVFRSSVLHSTQDLFLPFFSNVTWFHAIHVSGTNGTKRFDNPVLPFNDGVYFASTEKSNIIRGWIFGTTLDSKTQSLLIVNNATNVVIKVCEFQFCNDPFLGVYYHKNNKSWMESEFRVYSSANNCTFEYVSQPFLMDLEGKQGNFKNLREFVFKNIDGYFKIYSKHTPINLVRDLPQGFSALEPLVDLPIGINITRFQTLLALHRSYLTPGDSSSGWTAGAAAYYVGYLQPRTFLLKYNENGTITDAVDCALDPLSETKCTLKSFTVEKGIYQTSNFRVQPTESIVRFPNITNLCPFGEVFNATRFASVYAWNRKRISNCVADYSVLYNSASFSTFKCYGVSPTKLNDLCFTNVYADSFVIRGDEVRQIAPGQTGKIADYNYKLPDDFTGCVIAWNSNNLDSKVGGNYNYLYRLFRKSNLKPFERDISTEIYQAGSTPCNGVEGFNCYFPLQSYGFQPTNGVGYQPYRVVVLSFELLHAPATVCGPKKSTNLVKNKCVNFNFNGLTGTGVLTESNKKFLPFQQFGRDIADTTDAVRDPQTLEILDITPCSFGGVSVITPGTNTSNQVAVLYQDVNCTEVPVAIHADQLTPTWRVYSTGSNVFQTRAGCLIGAEYVNNSYECDIPIGAGICASYQTQTNSPRRARSVASQSIIAYTMSLGAENSVAYSNNSIAIPTNFTISVTTEILPVSMTKTSVDCTMYICGDSTECSNLLLQYGSFCTQLNRALTGIAVEQDKNTQEVFAQVKQIYKTPPIKDFGGFNFSQILPDPSKPSKRSFIEDLLFNKVTLADAGFIKQYGDCLGDIAARDLICAQKFNGLTVLPPLLTDEMIAQYTSALLAGTITSGWTFGAGAALQIPFAMQMAYRFNGIGVTQNVLYENQKLIANQFNSAIGKIQDSLSSTASALGKLQDVVNQNAQALNTLVKQLSSNFGAISSVLNDILSRLDKVEAEVQIDRLITGRLQSLQTYVTQQLIRAAEIRASANLAATKMSECVLGQSKRVDFCGKGYHLMSFPQSAPHGVVFLHVTYVPAQEKNFTTAPAICHDGKAHFPREGVFVSNGTHWFVTQRNFYEPQIITTDNTFVSGNCDVVIGIVNNTVYDPLQPELDSGGGSGGGQIYEGKLTAEGLRFGIVASRFNHALVDRLVEGAIDAIVRHGGREEDITLVRVPGSWEIPVAAGELARKEDIDAVIAIGVLIRGATPHFDYIASEVSKGLADLSLELRKPITFGVITADTLEQAIERAGTKHGNKGWEAALSAIEMANLFKSLR

SEQ ID NO: 7668 - protein, 1307 aa, Artificial Sequence
  SARS-CoV-2/England/20102000506/2020__EPI_ISL_415147 spike protein (1-1147) LumSynth construct
MFVFLVLLPLVSSQCVNLTTRTQLPPAYTNSFTRGVYYPDKVFRSSVLHSTQDLFLPFFSNVTWFHAIHVSGTNGTKRFDNPVLPFNDGVYFASTEKSNIIRGWIFGTTLDSKTQSLLIVNNATNVVIKVCEFQFCNDPFLGVYYHKNNKSWMESEFRVYSSANNCTFEYVSQPFLMDLEGKQGNFKNLREFVFKNIDGYFKIYSKHTPINLVRDLPQGFSALEPLVDLPIGINITRFQTLLALHRSYLTPGDSSSGWTAGAAAYYVGYLQPRTFLLKYNENGTITDAVDCALDPLSETKCTLKSFTVEKGIYQTSNFRVQPTESIVRFPNITNLCPFGEVFNATRFASVYAWNRKRISNCVADYSVLYNSASFSTFKCYGVSPTKLNDLCFTNVYADSFVIRGDEVRQIAPGQTGKIADYNYKLPDDFTGCVIAWNSNNLDSKVGGNYNYLYRLFRKSNLKPFERDISTEIYQAGSTPCNGVEGFNCYFPLQSYGFQPTNGVGYQPYRVVVLSFELLHAPATVCGPKKSTNLVKNKCVNFNFNGLTGTGVLTESNKKFLPFQQFGRDIADTTDAVRDPQTLEILDITPCSFGGVSVITPGTNTSNQVAVLYQGVNCTEVPVAIHADQLTPTWRVYSTGSNVFQTRAGCLIGAEHVNNSYECDIPIGAGICASYQTQTNSPRRARSVASQSIIAYTMSLGAENSVAYSNNSIAIPTNFTISVTTEILPVSMTKTSVDCTMYICGDSTECSNLLLQYGSFCTQLNRALTGIAVEQDKNTQEVFAQVKQIYKTPPIKDFGGFNFSQILPDPSKPSKRSFIEDLLFNKVTLADAGFIKQYGYCLGDIAARDLICAQKFNGLTVLPPLLTDEMIAQYTSALLAGTITSGWTFGAGAALQIPFAMQMAYRFNGIGVTQNVLYENQKLIANQFNSAIGKIQDSLSSTASALGKLQDVVNQNAQALNTLVKQLSSNFGAISSVLNDILSRLDKVEAEVQIDRLITGRLQSLQTYVTQQLIRAAEIRASANLAATKMSECVLGQSKRVDFCGKGYHLMSFPQSAPHGVVFLHVTYVPAQEKNFTTAPAICHDGKAHFPREGVFVSNGTHWFVTQRNFYEPQIITTDNTFVSGNCDVVIGIVNNTVYDPLQPELDSGGGSGGGQIYEGKLTAEGLRFGIVASRFNHALVDRLVEGAIDAIVRHGGREEDITLVRVPGSWEIPVAAGELARKEDIDAVIAIGVLIRGATPHFDYIASEVSKGLADLSLELRKPITFGVITADTLEQAIERAGTKHGNKGWEAALSAIEMANLFKSLR

SEQ ID NO: 7669 - protein, 1307 aa, Artificial Sequence
  SARS-CoV-2/Belgium/VAG-03013/2020__EPI_ISL_415155 spike protein (1-1147) LumSynth construct
MFVFLVLLPLVSSQCVNLTTRTQLPPAYTNSFTRGVYYPDKVFRSSVLHSTQDLFLPFFSNVTWFHAIHVSGTNGTKRFDNPVLPFNDGVYFASTEKSNIIRGWIFGTTLDSKTQSLLIVNNATNVVIKVCEFQFCNDPFLGVYYHKNNKSWMESEFRVYSSANNCTFEYVSQPFLMDLEGKQGNFKNLREFVFKNIDGYFKIYSKHTPINLVRDLPQGFSALEPLVDLPIGINITRFQTLLALHRSYLTPGDSSSGWTAGAAAYYVGYLQPRTFLLKYNENGTITDAVDCALDPLSETKCTLKSFTVEKGIYQTSNFRVQPTESIVRFPNITNLCPFGEVFNATRFASVYAWNRKRISNCVADYSVLYNSASFSTFKCYGVSPTKLNDLCFTNVYADSFVIRGDEVRQIAPGQTGKIADYNYKLPDDFTGCVIAWNSNNLDSKVGGNYNYLYRLFRKSNLKPFERDISTEIYQAGSTPCNGVEGFNCYFPLQSYGFQPTNGVGYQPYRVVVLSFELLHAPATVCGPKKSTNLVKNKCVNFNFNGLTGTGVLTESNKKFLPFQQFGRDIADTTDAVRDPQTLEILDITPCSFGGVSVITPGTNTSNQVAVLYQGVNCTEVPVAIHADQLTPTWRVYSTGSNVFQTRAGCLIGAEHVNNSYECDIPIGAGICASYQTQTNSPRRARSVASQSIIAYTMSLGAENSVAYSNNSIAIPTNFTISVTTEILPVSMTKTSVDCTMYICGDSTECSNLLLQYGSFCTQLNRALTGIAVEQDKNTQEVFAQVKQIYKTPPIKDFGGFNFSQILPDPSKPSKRSFIEDLLFNKVTLADAGFIKQYGDCLGDIAARDLICAQKFNGLTVLPPLLTDEMIAQYTSALLAGTITSGWTFGAGAALQIPFAMQMAYRFNGIGVTQNVLYENQKLIANQFNSAIGKIQDSLSSTATALGKLQDVVNQNAQALNTLVKQLSSNFGAISSVLNDILSRLDKVEAEVQIDRLITGRLQSLQTYVTQQLIRAAEIRASANLAATKMSECVLGQSKRVDFCGKGYHLMSFPQSAPHGVVFLHVTYVPAQEKNFTTAPAICHDGKAHFPREGVFVSNGTHWFVTQRNFYEPQIITTDNTFVSGNCDVVIGIVNNTVYDPLQPELDSGGGSGGGQIYEGKLTAEGLRFGIVASRFNHALVDRLVEGAIDAIVRHGGREEDITLVRVPGSWEIPVAAGELARKEDIDAVIAIGVLIRGATPHFDYIASEVSKGLADLSLELRKPITFGVITADTLEQAIERAGTKHGNKGWEAALSAIEMANLFKSLR

SEQ ID NO: 7670 - protein, 1307 aa, Artificial Sequence
  SARS-CoV-2/Belgium/BC-03016/2020__EPI_ISL_415157 spike protein (1-1147) LumSynth construct
MFVFLVLLPLVSSQCVNLTTRTQLPPAYTNSFTRGVYYPDKVFRSSVLHSTQDLFLPFFSNVTWFHAIHVSGTNGTKRFDNPVLPFNDGVYFASTEKSNIIRGWIFGTTLDSKTQSLLIVNNATNVVIKVCEFQFCNDPFLGVYYHKNNKSWMESEFRVYSSANNCTFEYVSQPFLMDLEGKQGNFKNLREFVFKNIDGYFKIYSKHTPINLVRDLPQGFSALEPLVDLPIGINITRFQTLLALHRSYLTPGDSSSGWTAGAAAYYVGYLQPRTFLLKYNENGTITDAVDCALDPLSETKCTLKSFTVEKGIYQTSNFRVQPTESIVRFPNITNLCPFGEVFNATRFASVYAWNRKRISNCVADYSVLYNSASFSTFKCYGVSPTKLNDLCFTNVYADSFVIRGDEVRQIAPGQTGKIADYNYKLPDDFTGCVIAWNSNNLDSKVGGNYNYLYRLFRKSNLKPFERDISTEIYQAGSTPCNGVEGFNCYFPLQSYGFQPTNGVGYQPYRVVVLSFELLHAPATVCGPKKSTNLVKNKCVNFNFNGLTGTGVLTESNKKFLPFQQFGRDIADTTDAVRDPQTLEILDITPCSFGGVSVITPGTNTSNQVAVLYQGVNCTEVPVAIHADQLTPTWRVYSTGSNVFQTRAGCLIGAEHVNNSYECDIPIGAGICASYQTQTNSPRRARSVASQSIIAYTMSLGAENSVAYSNNSIAIPTNFTISVTTEILPVSMTKTSVDCTMYICGDSTECSNLLLQYGSFCTQLNRALTGIAVEQDKNTQEVFAQVKQIYKTPPIKDFGGFNFSQILPDPSKPSKRSFIEDLLFNKVTLADAGFIKQYGDCLGDIAARDLICAQKFNGLTVLPPLLTDEMIAQYTSALLAGTITSGWTFGAGAALQIPFAMQMAYRFNGIGVTQNVLYENQKLIANQFNSAIGKIQDSLSSTAPALGKLQDVVNQNAQALNTLVKQLSSNFGAISSVLNDILSRLDKVEAEVQIDRLITGRLQSLQTYVTQQLIRAAEIRASANLAATKMSECVLGQSKRVDFCGKGYHLMSFPQSAPHGVVFLHVTYVPAQEKNFTTAPAICHDGKAHFPREGVFVSNGTHWFVTQRNFYEPQIITTDNTFVSGNCDVVIGIVNNTVYDPLQPELDSGGGSGGGQIYEGKLTAEGLRFGIVASRFNHALVDRLVEGAIDAIVRHGGREEDITLVRVPGSWEIPVAAGELARKEDIDAVIAIGVLIRGATPHFDYIASEVSKGLADLSLELRKPITFGVITADTLEQAIERAGTKHGNKGWEAALSAIEMANLFKSLR

SEQ ID NO: 7671 - protein, 1307 aa, Artificial Sequence
  SARS-CoV-2/Germany/BavPat3/2020__EPI_ISL_414521 spike protein (1-1147) LumSynth construct
MFVFLVLLPLVSSQCVNLTTRTQLPPAYTNSFTRGVYYPDKVFRSSVLHSTQDLFLPFFSNVTWFHAIHVSGTNGTKRFDNPVLPFNDGVYFASTEKSNIIRGWIFGTTLDSKTQSLLIVNNATNVVIKVCEFQFCNDPFLGVYYHKNNKSWMESEFRVYSSANNCTFEYVSQPFLMDLEGKQGNFKNLREFVFKNIDGYFKIYSKHTPINLVRDLPQGFSALEPLVDLPIGINITRFQTLLALHRSYLTPGDSSSGWTAGAAAYYVGYLQPRTFLLKYNENGTITDAVDCALDPLSETKCTLKSFTVEKGIYQTSNFRVQPTESIVRFPNITNLCPFGEVFNATRFASVYAWNRKRISNCVADYSVLYNSASFSTFKCYGVSPTKLNDLCFTNVYADSFVIRGDEVRQIAPGQTGKIADYNYKLPDDFTGCVIAWNSNNLDSKVGGNYNYLYRLFRKSNLKPFERDISTEIYQAGSTPCNGVEGFNCYFPLQSYGFQPTNGVGYQPYRVVVLSFELLHAPATVCGPKKSTNLVKNKCVNFNFNGLTGTGVLTESNKKFLPFQQFGRDIADTTDAVRDPQTLEILDITPCSFGGVSVITPGTNTSNQVAVLYQDVNCTEVPVAIHADQLTPTWRVYSTGSNVFQTRAGCLIGAEHVNNSYECDIPIGAGICASYQTQTNSPRRARSVASQSIIAYTMSLGAENSVAYSNNSIAIPTNFTISVTTEILPVSMTKTSVDCTMYICGDSTECSNLLLQYGSFCTQLNRALTGIAVEQDKNTQQVFAQVKQIYKTPPIKDFGGFNFSQILPDPSKPSKRSFIEDLLFNKVTLADAGFIKQYGDCLGDIAARDLICAQKFNGLTVLPPLLTDEMIAQYTSALLAGTITSGWTFGAGAALQIPFAMQMAYRFNGIGVTQNVLYENQKLIANQFNSAIGKIQDSLSSTASALGKLQDVVNQNAQALNTLVKQLSSNFGAISSVLNDILSRLDKVEAEVQIDRLITGRLQSLQTYVTQQLIRAAEIRASANLAATKMSECVLGQSKRVDFCGKGYHLMSFPQSAPHGVVFLHVTYVPAQEKNFTTAPAICHDGKAHFPREGVFVSNGTHWFVTQRNFYEPQIITTDNTFVSGNCDVVIGIVNNTVYDPLQPELDSGGGSGGGQIYEGKLTAEGLRFGIVASRFNHALVDRLVEGAIDAIVRHGGREEDITLVRVPGSWEIPVAAGELARKEDIDAVIAIGVLIRGATPHFDYIASEVSKGLADLSLELRKPITFGVITADTLEQAIERAGTKHGNKGWEAALSAIEMANLFKSLR

SEQ ID NO: 7672 - protein, 1307 aa, Artificial Sequence
  SARS-CoV-2/France/HF1805/2020__EPI_ISL_414628 spike protein (1-1147) LumSynth construct
MFVFLVLLPLVSSQCVNLTTRTQLPPAYTNSFTRGVYYPDKVFRSSVLHSTQDLFLPFFSNVTWFHAIHVSGTNGTKRFDNPVLPFNDGVYFASTEKSNIIRGWIFGTTLDSKTQSLLIVNNATNVVIKVCEFQFCNDPFLGVYYHKNNKSWMESEFRVYSSANNCTFEYVSQPFLMDLEGKQGNFKNLREFVFKNIDGYFKIYSKHTPINLVRDLPQGFSALEPLVDLPIGINITRFQTLLALHRSYLTPGDSSSGWTAGAAAYYVGYLQPRTFLLKYNENGTITDAVDCALDPLSETKCTLKSFTVEKGIYQTSNFRVQPTESIVRFPNITNLCPFGEVFNATRFASVYAWNRKRISNCVADYSVLYNSASFSTFKCYGVSPTKLNDLCFTNVYADSFVIRGDEVRQIAPGQTGKIADYNYKLPDDFTGCVIAWNSNNLDSKVGGNYNYLYRLFRKSNLKPFERDISTEIYQAGSTPCNGVEGFNCYFPLQSYGFQPTNGVGYQPYRVVVLSFELLHAPATVCGPKKSTNLVKNKCVNFNFNGLTGTGVLTESNKKFLPFQQFGRDIADTTDAVRDPQTLEILDITPCSFGGVSVITPGTNTSNQVAVLYQGVNCTEVPVAIHADQLTPTWRVYSTGSNVFQTRAGCLIGAEHVNNSYECDIPIGAGICASYQTQTNSPRRARSVASQSIIAYTMSLGAENSVAYSNNSIAIPTNFTISVTTEILPVSMTKTSVDCTMYICGDSTECSNLLLQYGSFCTQLNRALTGIAVEQDKNTQEVFAQVKQIYKTPPIKDFGGFNFSQILPDPSKPSKRSFIEDLLFNKVTLADAGFIKQYGDCLGDIAARDLICAQKFNGLTVLPPLLTDEMIAQYTSALLAGTITSGWTFGAGAALQIPFAMQMAYRFNGIGVTQNVLYENQKLIANQFNSAIGKIQDSLSSTASALGKLQDVVNQNAQALNTLVKQLSSNFGAISSVLNDILSRLDKVEAEVQIDRLITGRLQSLQTYVTQQLIRAAEIRASANLAATKMSECVLGQSKRVDFCGKGYHLMSFPQSAPHGVVFLHVTYVPAQEKNFTTAPAICHDGKAHFPREGVFVSNGTHWFVTQRNFYEPQIITTDNTFVSGNCDVVIGVVNNTVYDPLQPELDSGGGSGGGQIYEGKLTAEGLRFGIVASRFNHALVDRLVEGAIDAIVRHGGREEDITLVRVPGSWEIPVAAGELARKEDIDAVIAIGVLIRGATPHFDYIASEVSKGLADLSLELRKPITFGVITADTLEQAIERAGTKHGNKGWEAALSAIEMANLFKSLR

SEQ ID NO: 7673 - protein, 1307 aa, Artificial Sequence
  SARS-CoV-2/Netherlands/ZuidHolland_9/2020__EPI_ISL_414445 spike protein (1-1147) LumSynth construct
MFVFLVLLPLVSSQCVNLTTRTQLPPAYTNSFTRGVYYPDKVFRSSVLHSTQDLFLPFFSNVTWFHAIHVSGTNGTKRFDNPVLPFNDGVYFASTEKSNIIRGWIFGTTLDSKTQSLLIVNNATNVVIKVCEFQFCNDPFLGVYYHKNNKSWMESEFRVYSSANNCTFEYVSQPFLMDLEGKQGNFKNLREFVFKNIDGYFKIYSKHTPINLVRDLPQGFSALEPLVDLPIGINITRFQTLLALHRSYLTPGDSSSGWTAGAAAYYVGYLQPRTFLLKYNENGTITDAVDCALDPLSETKCTLKSFTVEKGIYQTSNFRVQPTESIVRFPNITNLCPFGEVFNATRFASVYAWNRKRISNCVADYSVLYNSASFSTFKCYGVSPTKLNDLCFTNVYADSFVIRGDEVRQIAPGQTGKIADYNYKLPDDFTGCVIAWNSNNLDSKVGGNYNYLYRLFRKSNLKPFERDISTEIYQAGSTPCNGVEGFNCYFPLQSYGFQPTNGVGYQPYRVVVLSFELLHAPATVCGPKKSTNLVKNKCVNFNFNGLTGTGVLTESNKKFLPFQQFGRDIADTTDAVRDPQTLEILDITPCSFGGVSVITPGTNTSNQVAVLYQGVNCTEVPVAIHADQLTPTWRVYSTGSNVFQTRAGCLIGAEHVNNSYECDIPIGAGICASYQTQTNSPRRARSVASQSIIAYTMSLGAENSVAYSNNSIAIPTNFTISVTTEILPVSMTKTSVDCTMYICGDSTECSNLLLQYGSFCTQLNRALTGIAVEQDKNTQEVFAQVKQIYKTPPIKDFGGFNFSQILPDPSKPSKRSFIEDLLFNKVTLADAGFIKQYGDCLGDIAARDLICVQKFNGLTVLPPLLTDEMIAQYTSALLAGTITSGWTFGAGAALQIPFAMQMAYRFNGIGVTQNVLYENQKLIANQFNSAIGKIQDSLSSTASALGKLQDVVNQNAQALNTLVKQLSSNFGAISSVLNDILSRLDKVEAEVQIDRLITGRLQSLQTYVTQQLIRAAEIRASANLAATKMSECVLGQSKRVDFCGKGYHLMSFPQSAPHGVVFLHVTYVPAQEKNFTTAPAICHDGKAHFPREGVFVSNGTHWFVTQRNFYEPQIITTDNTFVSGNCDVVIGIVNNTVYDPLQPELDSGGGSGGGQIYEGKLTAEGLRFGIVASRFNHALVDRLVEGAIDAIVRHGGREEDITLVRVPGSWEIPVAAGELARKEDIDAVIAIGVLIRGATPHFDYIASEVSKGLADLSLELRKPITFGVITADTLEQAIERAGTKHGNKGWEAALSAIEMANLFKSLR

SEQ ID NO: 7674 - protein, 1307 aa, Artificial Sequence
  SARS-CoV-2/Finland/FIN03032020A/2020__EPI_ISL_413602 spike protein (1-1147) LumSynth construct
MFVFLVLLPLVSSQCVNLTTRTQLPPAYTNSFTRGVYYPDKVFRSSVLHSTQDLFLPFFSNVTWFHAIHVSGTNGTKRFDNPVLPFNDGVYFASTEKSNIIRGWIFGTTLDSKTQSLLIVNNATNVVIKVCEFQFCNDPFLGVYYHKNNKSWMESEFRVYSSANNCTFEYVSQPFLMDLEGKQGNFKNLREFVFKNIDGYFKIYSKHTPINLVRDLPQGFSALEPLVDLPIGINITRFQTLLALHRSYLTPGDSSSGWTAGAAAYYVGYLQPRTFLLKYNENGTITDAVDCALDPLSETKCTLKSFTVEKGIYQTSNFRVQPTESIVRFPNITNLCPFGEVFNATRFASVYAWNRKRISNCVADYSVLYNSASFSTFKCYGVSPTKLNDLCFTNVYADSFVIRGDEVRQIAPGQTGKIADYNYKLPDDFTGCVISWNSNNLDSKVGGNYNYLYRLFRKSNLKPFERDISTEIYQAGSTPCNGVEGFNCYFPLQSYGFQPTNGVGYQPYRVVVLSFELLHAPATVCGPKKSTNLVKNKCVNFNFNGLTGTGVLTESNKKFLPFQQFGRDIADTTDAVRDPQTLEILDITPCSFGGVSVITPGTNTSNQVAVLYQGVNCTEVPVAIHADQLTPTWRVYSTGSNVFQTRAGCLIGAEHVNNSYECDIPIGAGICASYQTQTNSPRRARSVASQSIIAYTMSLGAENSVAYSNNSIAIPTNFTISVTTEILPVSMTKTSVDCTMYICGDSTECSNLLLQYGSFCTQLNRALTGIAVEQDKNTQEVFAQVKQIYKTPPIKDFGGFNFSQILPDPSKPSKRSFIEDLLFNKVTLADAGFIKQYGDCLGDIAARDLICAQKFNGLTVLPPLLTDEMIAQYTSALLAGTITSGWTFGAGAALQIPFAMQMAYRFNGIGVTQNVLYENQKLIANQFNSAIGKIQDSLSSTASALGKLQDVVNQNAQALNTLVKQLSSNFGAISSVLNDILSRLDKVEAEVQIDRLITGRLQSLQTYVTQQLIRAAEIRASANLAATKMSECVLGQSKRVDFCGKGYHLMSFPQSAPHGVVFLHVTYVPAQEKNFTTAPAICHDGKAHFPREGVFVSNGTHWFVTQRNFYEPQIITTDNTFVSGNCDVVIGIVNNTVYDPLQPELDSGGGSGGGQIYEGKLTAEGLRFGIVASRFNHALVDRLVEGAIDAIVRHGGREEDITLVRVPGSWEIPVAAGELARKEDIDAVIAIGVLIRGATPHFDYIASEVSKGLADLSLELRKPITFGVITADTLEQAIERAGTKHGNKGWEAALSAIEMANLFKSLR

SEQ ID NO: 7675 - protein, 1307 aa, Artificial Sequence
  SARS-CoV-2/France/GE1977/2020__EPI_ISL_414632 spike protein (1-1147) LumSynth construct
MFVFLVLLPLVSSQCVNLTTRTQLPPAYTNSFTRGVYYPDKVFRSSVLHSTQDLFLPFFSNVTWFHAIHVSGTNGTKRFDNPVLPFNDGVYFASTEKSNIIRGWIFGTTLDSKTQSLLIVNNATNVVIKVCEFQFCNDPFLGVYYHKNNKSWMESEFRVYSSANNCTFEYVSQPFLMDLEGKQGNFKNLREFVFKNIDGYFKIYSKHTPINLVRDLPQGFSALEPLVDLPIGINITRFQTLLALHRSYLTPGDSSSGWTAGAAAYYVGYLQPRTFLLKYNENGTITDAVDCALDPLSETKCTLKSFTVEKGIYQTSNFRVQPTESIVRFPNITNLCPFGEVFNATRFASVYAWNRKRISNCVADYSVLYNSASFSTFKCYGVSPTKLNDLCFTNVYADSFVIRGDEVRQIAPGQTGKIADYNYKLPDDFTGCVIAWNSNNLDSKVGGNYNYLYRLFRKSNLKPFERDISTEIYQAGSTPCNGVEGFNCYFPLQSYGFQPTNGVGYQPYRVVVLSFELLHAPATVCGPKKSTNLVKNKCVNFNFNGLTGTGVLTESNKKFLPFQQFGRDIADTTDAVRDPQTLEILDITPCSFGGVSVITPGTNTSNQVAVLYQGVNCTEVPVAIHADQLTPTWRVYSTGSNVFQTRAGCLIGAEHVNNSYECDIPIGAGICASYQTQTNSPRRARSVASQSIIAYTMSLGAENSVAYSNNSIAIPTNFTISVTTEILPVSMTKTSVDCTMYICGDSTECSNLLLQYGSFCTQLNRALTGIAVEQDKNTQEVFAQVKQIYKTPPIKDFGGFNFSQILPDPSKPSKRSFIEDLLFNKVTLADAGFIKQYGDCLGDIAARDLICAQKFNGLTVLPPLLTDEMIAQYTSALLAGTITSGWTFGAGAALQIPFAMQMAYRFNGIGVTQNVLYENQKLIANQFNSAIGKIQDSLFSTASALGKLQDVVNQNAQALNTLVKQLSSNFGAISSVLNDILSRLDKVEAEVQIDRLITGRLQSLQTYVTQQLIRAAEIRASANLAATKMSECVLGQSKRVDFCGKGYHLMSFPQSAPHGVVFLHVTYVPAQEKNFTTAPAICHDGKAHFPREGVFVSNGTHWFVTQRNFYEPQIITTDNTFVSGNCDVVIGIVNNTVYDPLQPELDSGGGSGGGQIYEGKLTAEGLRFGIVASRFNHALVDRLVEGAIDAIVRHGGREEDITLVRVPGSWEIPVAAGELARKEDIDAVIAIGVLIRGATPHFDYIASEVSKGLADLSLELRKPITFGVITADTLEQAIERAGTKHGNKGWEAALSAIEMANLFKSLR

SEQ ID NO: 7676 - protein, 1307 aa, Artificial Sequence
  SARS-CoV-2/Finland/FIN-313/2020__EPI_ISL_414641 spike protein (1-1147) LumSynth construct
MFVFLVLLPLVSSQCVNLTTRTQLPPAYTNSFTRGVYYPDKVFRSSVLHSTQDLFLPFFSNVTWFHAIHVSGTNGTKRFDNPVLPFNDGVYFASTEKSNIIRGWIFGTTLDSKTQSLLIVNNATNVVIKVCEFQFCNDPFLGVYYHKNNKSWMESEFRVYSSANNCTFEYVSQPFLMDLEGKQGNFKNLREFVFKNIDGYFKIYSKHTPINLVRDLPQGFSALEPLVDLPIGINITRFKTLLALHRSYLTPGDSSSGWTAGAAAYYVGYLQPRTFLLKYNENGTITDAVDCALDPLSETKCTLKSFTVEKGIYQTSNFRVQPTESIVRFPNITNLCPFGEVFNATRFASVYAWNRKRISNCVADYSVLYNSASFSTFKCYGVSPTKLNDLCFTNVYADSFVIRGDEVRQIAPGQTGKIADYNYKLPDDFTGCVIAWNSNNLDSKVGGNYNYLYRLFRKSNLKPFERDISTEIYQAGSTPCNGVEGFNCYFPLQSYGFQPTNGVGYQPYRVVVLSFELLHAPATVCGPKKSTNLVKNKCVNFNFNGLTGTGVLTESNKKFLPFQQFGRDIADTTDAVRDPQTLEILDITPCSFGGVSVITPGTNTSNQVAVLYQGVNCTEVPVAIHADQLTPTWRVYSTGSNVFQTRAGCLIGAEHVNNSYECDIPIGAGICASYQTQTNSPRRARSVASQSIIAYTMSLGAENSVAYSNNSIAIPTNFTISVTTEILPVSMTKTSVDCTMYICGDSTECSNLLLQYGSFCTQLNRALTGIAVEQDKNTQEVFAQVKQIYKTPPIKDFGGFNFSQILPDPSKPSKRSFIEDLLFNKVTLADAGFIKQYGDCLGDIAARDLICAQKFNGLTVLPPLLTDEMIAQYTSALLAGTITSGWTFGAGAALQIPFAMQMAYRFNGIGVTQNVLYENQKLIANQFNSAIGKIQDSLSSTASALGKLQDVVNQNAQALNTLVKQLSSNFGAISSVLNDILSRLDKVEAEVQIDRLITGRLQSLQTYVTQQLIRAAEIRASANLAATKMSECVLGQSKRVDFCGKGYHLMSFPQSAPHGVVFLHVTYVPAQEKNFTTAPAICHDGKAHFPREGVFVSNGTHWFVTQRNFYEPQIITTDNTFVSGNCDVVIGIVNNTVYDPLQPELDSGGGSGGGQIYEGKLTAEGLRFGIVASRFNHALVDRLVEGAIDAIVRHGGREEDITLVRVPGSWEIPVAAGELARKEDIDAVIAIGVLIRGATPHFDYIASEVSKGLADLSLELRKPITFGVITADTLEQAIERAGTKHGNKGWEAALSAIEMANLFKSLR

SEQ ID NO: 7677 - protein, 1307 aa, Artificial Sequence
  SARS-CoV-2/Netherlands/ZuidHolland_2/2020__EPI_ISL_414556 spike protein (1-1147) LumSynth construct
MFVFLVLLPLVSSQCVNLTTRTQLPPAYTNSFTRGVYYPDKVFRSSVLHSTQDLFLPFFSNVTWFHAIHVSGTNGTKRFDNPVLPFNDGVYFASTEKSNIIRGWIFGTTLDSKTQSLLIVNNATNVVIKVCEFQFCNDPFLGVYYHKNNKSWMESEFRVYSSANNCTFEYVSQPFLMDLEGKQGNFKNLREFVFKNIDGYFKIYSKHTPINLVRDLPQGFSALEPLVDLPIGINITRFQTLLALHRSYLTPGDSSSGWTAGAAAYYVGYLQPRTFLLKYNENGTITDAVDCALDPLSETKCTLKSFTVEKGIYQTSNFRVQPTESIVRFPNITNLCPFGEVFNATRFASVYAWNRKRISNCVADYSVLYNSASFSTFKCYGVSPTKLNDLCFTNVYADSFVIRGDEVRQIAPGQTGKIADYNYKLPDDFTGCVIAWNSNNLDSKVGGNYNYLYRLFRKSNLKPFERDISTEIYQAGSTPCNGVEGFNCYFPLQSYGFQPTNGVGYQPYRVVVLSFELLHAPATVCGPKKSTNLVKNKCVNFNFNGLTGTGVLTESNKKFLPFQQFGRDIADTTDAVRDPQTLEILDITPCSFGGVSVITPGTNTSNQVAVLYQGVNCTEVPVAIHADQLTPTWRVYSTGSNVFQTRAGCLIGAEHVNNSYECDIPIGAGICASYQTQTNSPRRARSVASQSIIAYTMSLGAENSVAYSNNSIAIPTNFTISVTTEILPVSMTKTSVDCTMYICGDSTECSNLLLQYGSFCTQLNRALTGIALEQDKNTQEVFAQVKQIYKTPPIKDFGGFNFSQILPDPSKPSKRSFIEDLLFNKVTLADAGFIKQYGDCLGDIAARDLICAQKFNGLTVLPPLLTDEMIAQYTSALLAGTITSGWTFGAGAALQIPFAMQMAYRFNGIGVTQNVLYENQKLIANQFNSAIGKIQDSLSSTASALGKLQDVVNQNAQALNTLVKQLSSNFGAISSVLNDILSRLDKVEAEVQIDRLITGRLQSLQTYVTQQLIRAAEIRASANLAATKMSECVLGQSKRVDFCGKGYHLMSFPQSAPHGVVFLHVTYVPAQEKNFTTAPAICHDGKAHFPREGVFVSNGTHWFVTQRNFYEPQIITTDNTFVSGNCDVVIGIVNNTVYDPLQPELDSGGGSGGGQIYEGKLTAEGLRFGIVASRFNHALVDRLVEGAIDAIVRHGGREEDITLVRVPGSWEIPVAAGELARKEDIDAVIAIGVLIRGATPHFDYIASEVSKGLADLSLELRKPITFGVITADTLEQAIERAGTKHGNKGWEAALSAIEMANLFKSLR

SEQ ID NO: 7678 - protein, 1307 aa, Artificial Sequence
  SARS-CoV-2/USA/WA-UW31/2020__EPI_ISL_414618 spike protein (1-1147) LumSynth construct
MFVFLVLLPLVSSQCVNLTTRTQLPPAYTNSFTRGVYYPDKVFRSSVLHSTQDLFLPFFSNVTWFHAIHVSGTNGTKRFDNPVLPFNDGVYFASTEKSNIIRGWIFGTTLDSKTQSLLIVNNATNVVIKVCEFQFCNDPFLGVYYHKNNKSWMESEFRVYSSANNCTFEYVSQPFLMDLEGKQGNFKNLREFVFKNIDGYFKIYSKHTPINLVRDLPQGFSALEPLVDLPIGINITRFQTLLALHRSYLTPGDSSSGWTAGAAAYYVGYLQPRTFLLKYNENGTITDAVDCALDPLSETKCTLKSFTVEKGIYQTSNFRVQPTESIVRFPNITNLCPFGEVFNATRFASVYAWNRKRISNCVADYSVLYNSASFSTFKCYGVSPTKLNDLCFTNVYADSFVIRGDEVRQIAPGQTGKIADYNYKLPDDFTGCVIAWNSNNLDSKVGGNYNYLYRLFRKSNLKPFERDISTEIYQAGSTPCNGAEGFNCYFPLQSYGFQPTNGVGYQPYRVVVLSFELLHAPATVCGPKKSTNLVKNKCVNFNFNGLTGTGVLTESNKKFLPFQQFGRDIADTTDAVRDPQTLEILDITPCSFGGVSVITPGTNTSNQVAVLYQDVNCTEVPVAIHADQLTPTWRVYSTGSNVFQTRAGCLIGAEHVNNSYECDIPIGAGICASYQTQTNSPRRARSVASQSIIAYTMSLGAENSVAYSNNSIAIPTNFTISVTTEILPVSMTKTSVDCTMYICGDSTECSNLLLQYGSFCTQLNRALTGIAVEQDKNTQEVFAQVKQIYKTPPIKDFGGFNFSQILPDPSKPSKRSFIEDLLFNKVTLADAGFIKQYGDCLGDIAARDLICAQKFNGLTVLPPLLTDEMIAQYTSALLAGTITSGWTFGAGAALQIPFAMQMAYRFNGIGVTQNVLYENQKLIANQFNSAIGKIQDSLSSTASALGKLQDVVNQNAQALNTLVKQLSSNFGAISSVLNDILSRLDKVEAEVQIDRLITGRLQSLQTYVTQQLIRAAEIRASANLAATKMSECVLGQSKRVDFCGKGYHLMSFPQSAPHGVVFLHVTYVPAQEKNFTTAPAICHDGKAHFPREGVFVSNGTHWFVTQRNFYEPQIITTDNTFVSGNCDVVIGIVNNTVYDPLQPELDSGGGSGGGQIYEGKLTAEGLRFGIVASRFNHALVDRLVEGAIDAIVRHGGREEDITLVRVPGSWEIPVAAGELARKEDIDAVIAIGVLIRGATPHFDYIASEVSKGLADLSLELRKPITFGVITADTLEQAIERAGTKHGNKGWEAALSAIEMANLFKSLR

SEQ ID NO: 7679 - protein, 1307 aa, Artificial Sequence
  SARS-CoV-2/South Korea/SNU01/2020__EPI_ISL_411929 spike protein (1-1147) LumSynth construct
MFVFLVLLPLVSSQCVNLTTRTQLPPAYTNSFTRGVYYPDKVFRSSVLHSTQDLFLPFFSNVTWFHAIHVSGTNGTKRFDNPVLPFNDGVYFASTEKSNIIRGWIFGTTLDSKTQSLLIVNNATNVVIKVCEFQFCNDPFLGVYYHKNNKSWMESEFRVYSSANNCTFEYVSQPFLMDLEGKQGNFKNLREFVFKNIDGYFKIYSKHTPINLVRDLPQGFWALEPLVDLPIGINITRFQTLLALHRSYLTPGDSSSGWTAGAAAYYVGYLQPRTFLLKYNENGTITDAVDCALDPLSETKCTLKSFTVEKGIYQTSNFRVQPTESIVRFPNITNLCPFGEVFNATRFASVYAWNRKRISNCVADYSVLYNSASFSTFKCYGVSPTKLNDLCFTNVYADSFVIRGDEVRQIAPGQTGKIADYNYKLPDDFTGCVIAWNSNNLDSKVGGNYNYLYRLFRKSNLKPFERDISTEIYQAGSTPCNGVEGFNCYFPLQSYGFQPTNGVGYQPYRVVVLSFELLHAPATVCGPKKSTNLVKNKCVNFNFNGLTGTGVLTESNKKFLPFQQFGRDIADTTDAVRDPQTLEILDITPCSFGGVSVITPGTNTSNQVAVLYQDVNCTEVPVAIHADQLTPTWRVYSTGSNVFQTRAGCLIGAEHVNNSYECDIPIGAGICASYQTQTNSPRRARSVASQSIIAYTMSLGAENSVAYSNNSIAIPTNFTISVTTEILPVSMTKTSVDCTMYICGDSTECSNLLLQYGSFCTQLNRALTGIAVEQDKNTQEVFAQVKQIYKTPPIKDFGGFNFSQILPDPSKPSKRSFIEDLLFNKVTLADAGFIKQYGDCLGDIAARDLICAQKFNGLTVLPPLLTDEMIAQYTSALLAGTITSGWTFGAGAALQIPFAMQMAYRFNGIGVTQNVLYENQKLIANQFNSAIGKIQDSLSSTASALGKLQDVVNQNAQALNTLVKQLSSNFGAISSVLNDILSRLDKVEAEVQIDRLITGRLQSLQTYVTQQLIRAAEIRASANLAATKMSECVLGQSKRVDFCGKGYHLMSFPQSAPHGVVFLHVTYVPAQEKNFTTAPAICHDGKAHFPREGVFVSNGTHWFVTQRNFYEPQIITTDNTFVSGNCDVVIGIVNNTVYDPLQPELDSGGGSGGGQIYEGKLTAEGLRFGIVASRFNHALVDRLVEGAIDAIVRHGGREEDITLVRVPGSWEIPVAAGELARKEDIDAVIAIGVLIRGATPHFDYIASEVSKGLADLSLELRKPITFGVITADTLEQAIERAGTKHGNKGWEAALSAIEMANLFKSLR

SEQ ID NO: 7680 - protein, 1307 aa, Artificial Sequence
  SARS-CoV-2/China/WF0004/2020__EPI_ISL_413694 spike protein (1-1147) LumSynth construct
MFVFLVLLPLVSSQCVNLTTRTQLPPAYTNSFTRGVYYPDKVFRSSVLHSTQDLFLPFFSNVTWFHAIHVSGTNGTKRFDNPVLPFNDGVYFASTEKSNIIRGWIFGTTLDSKTQSLLIVNNATNVVIKVCEFQFCNDPFLGVYYHKNNKSWTESEFRVYSSANNCTFEYVSQPFLMDLEGKQGNFKNLREFVFKNIDGYFKIYSKHTPINLVRDLPQGFSALEPLVDLPIGINITRFQTLLALHRSYLTPGDSSSGWTAGAAAYYVGYLQPRTFLLKYNENGTITDAVDCALDPLSETKCTLKSFTVEKGIYQTSNFRVQPTESIVRFPNITNLCPFGEVFNATRFASVYAWNRKRISNCVADYSVLYNSASFSTFKCYGVSPTKLNDLCFTNVYADSFVIRGDEVRQIAPGQTGKIADYNYKLPDDFTGCVIAWNSNNLDSKVGGNYNYLYRLFRKSNLKPFERDISTEIYQAGSTPCNGVEGFNCYFPLQSYGFQPTNGVGYQPYRVVVLSFELLHAPATVCGPKKSTNLVKNKCVNFNFNGLTGTGVLTESNKKFLPFQQFGRDIADTTDAVRDPQTLEILDITPCSFGGVSVITPGTNTSNQVAVLYQDVNCTEVPVAIHADQLTPTWRVYSTGSNVFQTRAGCLIGAEHVNNSYECDIPIGAGICASYQTQTNSPRRARSVASQSIIAYTMSLGAENSVAYSNNSIAIPTNFTISVTTEILPVSMTKTSVDCTMYICGDSTECSNLLLQYGSFCTQLNRALTGIAVEQDKNTQEVFAQVKQIYKTPPIKDFGGFNFSQILPDPSKPSKRSFIEDLLFNKVTLADAGFIKQYGDCLGDIAARDLICAQKFNGLTVLPPLLTDEMIAQYTSALLAGTITSGWTFGAGAALQIPFAMQMAYRFNGIGVTQNVLYENQKLIANQFNSAIGKIQDSLSSTASALGKLQDVVNQNAQALNTLVKQLSSNFGAISSVLNDILSRLDKVEAEVQIDRLITGRLQSLQTYVTQQLIRAAEIRASANLAATKMSECVLGQSKRFDFCGKGYHLMSFPQSAPHGVVFLHVTYVPAQEKNFTTAPAICHDGKAHFPREGVFVSNGTHWFVTQRNFYEPQIITTDNTFVSGNCDVVIGIVNNTVYDPLQPELDSGGGSGGGQIYEGKLTAEGLRFGIVASRFNHALVDRLVEGAIDAIVRHGGREEDITLVRVPGSWEIPVAAGELARKEDIDAVIAIGVLIRGATPHFDYIASEVSKGLADLSLELRKPITFGVITADTLEQAIERAGTKHGNKGWEAALSAIEMANLFKSLR

SEQ ID NO: 7681 - protein, 1307 aa, Artificial Sequence
  SARS-CoV-2/China/WF0028/2020__EPI_ISL_413791 spike protein (1-1147) LumSynth construct
MFVFLVLLPLVSSQCVNLTTRTQLPPAYTNSFTRGVYYPDKVFRSSVLHSTQDLFLPFFSNVTWFHAIHVSGTNGTKRFDNPVLPFNDGVYFASTEKSNIIRGWIFGTTLDSKTQSLLIVNNATNVVIKVCEFQFCNDPFLGVYYHKNNKSWMESEFRVYSSANNCTFEYVSQPFLMDLEGKQGNFKNLREFVFKNIDGYFKIYSKHTPINLVRDLPQGFSALEPLVDLPIGINITRFQTLLALHRSYLTPGDSSSGWTAGAAAYYVGYLQPRTFLLKYNENGTITDAVDCALDPLSETKCTLKSFTVEKGIYQTSNFRVQPTESIVRFPNITNLCPFGEVFNATRFASVYAWNRKRISNCVADYSVLYNSASFSTFKCYGVSPTKLNDLCFTNVYADSFVIRGDEVRQIAPGQTGKIADYNYKLPDDFTGCVIAWNSNNLDSKVGGNYNYLYRLFRKSNLKPFERDISTEIYQAGSTPCNGVEGFNCYFPLQSYGFQPTNGVGYQPYRVVVLSFELLHAPATVCGPKKSTNLVKNKCVNFNFNGLTGTGVLTESNKKFLPFQQFGRDIADTTDAVRDPQTLEILDITPCSFGGVSVITPGTNTSNQVAVLYQDVNCTEVPVAIHADQLTPTWRVYSTGSNVFQTRAGCLIGAEHVNNSYECDIPIGAGICASYQTQTNSPRRARSVASQSIIAYTMSLGAENSVAYSNNSIAIPTNFTISVTTEILPVSMTKTSVDCTMYICGDSTECSNLLLQYGSFCTQLNRALTGIAVEQDKNTQEVFAQVKQIYKTPPIKDFGGFNFSQILPDPSKPSKRSFIEDLLFNKVTLADAGFIKQYGDCLGDIAARDLICAQKFNGLTVLPPLLTDEMIAQYTSALLAGTITSGWTFGAGAALQIPFAMQMAYRFNGIGVTQNVLYENQKLIANQFNSAIGKIQDSLSSTASALGKLQDVVNQNAQALNTLVKQLSSNFGAISSVLNDILSRLDKVEAEVQIDRLITGRLQSLQTYVTQQLIRAAEIRASANLAATKMSECVLGQSKRVDFCGKGYHLMSFPQSAPHGVVFLHVTYVPAQEKNFTTAPAICHDGKAHFPREGVFVSNGTHWFVTQRNFYEPQIITTDNTFVSGNCDVVIGIVNNTVYDPLQPELESGGGSGGGQIYEGKLTAEGLRFGIVASRFNHALVDRLVEGAIDAIVRHGGREEDITLVRVPGSWEIPVAAGELARKEDIDAVIAIGVLIRGATPHFDYIASEVSKGLADLSLELRKPITFGVITADTLEQAIERAGTKHGNKGWEAALSAIEMANLFKSLR

SEQ ID NO: 7682 - protein, 1307 aa, Artificial Sequence
  SARS-CoV-2/2019-nCoV/USA-CruiseA-18/2020__MT159716.1 spike protein (1-1147) LumSynth construct
MFVFLVLLPLVSSQCVNLTTRTQLPPAYTNSFTRGVYYPDKVFRSSVLHSTQDLFLPFFSNVTWFHAIHVSGTNGTKRFDNPVLPFNDGVYFASTEKSNIIRGWIFGTTLDSKTQSLLIVNNATNVVIKVCEFQFCNDPFLGVYYHKNNKSWMESELRVYSSANNCTFEYVSQPFLMDLEGKQGNFKNLREFVFKNIDGYFKIYSKHTPINLVRDLPQGFSALEPLVDLPIGINITRFQTLLALHRSYLTPGDSSSGWTAGAAAYYVGYLQPRTFLLKYNENGTITDAVDCALDPLSETKCTLKSFTVEKGIYQTSNFRVQPTESIVRFPNITNLCPFGEVFNATRFASVYAWNRKRISNCVADYSVLYNSASFSTFKCYGVSPTKLNDLCFTNVYADSFVIRGDEVRQIAPGQTGKIADYNYKLPDDFTGCVIAWNSNNLDSKVGGNYNYLYRLFRKSNLKPFERDISTEIYQAGSTPCNGVEGFNCYFPLQSYGFQPTNGVGYQPYRVVVLSFELLHAPATVCGPKKSTNLVKNKCVNFNFNGLTGTGVLTESNKKFLPFQQFGRDIADTTDAVRDPQTLEILDITPCSFGGVSVITPGTNTSNQVAVLYQDVNCTEVPVAIHADQLTPTWRVYSTGSNVFQTRAGCLIGAEHVNNSYECDIPIGAGICASYQTQTNSPRRARSVASQSIIAYTMSLGAENSVAYSNNSIAIPTNFTISVTTEILPVSMTKTSVDCTMYICGDSTECSNLLLQYGSFCTQLNRALTGIAVEQDKNTQEVFAQVKQIYKTPPIKDFGGFNFSQILPDPSKPSKRSFIEDLLFNKVTLADAGFIKQYGDCLGDIAARDLICAQKFNGLTVLPPLLTDEMIAQYTSALLAGTITSGWTFGAGAALQIPFAMQMAYRFNGIGVTQNVLYENQKLIANQFNSAIGKIQDSLSSTASALGKLQDVVNQNAQALNTLVKQLSSNFGAISSVLNDILSRLDKVEAEVQIDRLITGRLQSLQTYVTQQLIRAAEIRASANLAATKMSECVLGQSKRVDFCGKGYHLMSFPQSAPHGVVFLHVTYVPAQEKNFTTAPAICHDGKAHFPREGVFVSNGTHWFVTQRNFYEPQIITTDNTFVSGNCDVVIGIVNNTVYDPLQPELDSGGGSGGGQIYEGKLTAEGLRFGIVASRFNHALVDRLVEGAIDAIVRHGGREEDITLVRVPGSWEIPVAAGELARKEDIDAVIAIGVLIRGATPHFDYIASEVSKGLADLSLELRKPITFGVITADTLEQAIERAGTKHGNKGWEAALSAIEMANLFKSLR

SEQ ID NO: 7683 - protein, 1307 aa, Artificial Sequence
  SARS-CoV-2/SARS-CoV-2/Yunnan-01/human/2020/CHN__MT049951.1 spike protein (1-1147) LumSynth construct
MFVFLVLLPLVSSQCVNLTTRTQLPPANTNSFTRGVYYPDKVFRSSVLHSTQDLFLPFFSNVTWFHAIHVSGTNGTKRFDNPVLPFNDGVYFASTEKSNIIRGWIFGTTLDSKTQSLLIVNNATNVVIKVCEFQFCNDPFLGVYYHKNNKSWMESEFRVYSSANNCTFEYVSQPFLMDLEGKQGNFKNLREFVFKNIDGYFKIYSKHTPINLVRDLPQGFSALEPLVDLPIGINITRFQTLLALHRSYLTPGDSSSGWTAGAAAYYVGYLQPRTFLLKYNENGTITDAVDCALDPLSETKCTLKSFTVEKGIYQTSNFRVQPTESIVRFPNITNLCPFGEVFNATRFASVYAWNRKRISNCVADYSVLYNSASFSTFKCYGVSPTKLNDLCFTNVYADSFVIRGDEVRQIAPGQTGKIADYNYKLPDDFTGCVIAWNSNNLDSKVGGNYNYLYRLFRKSNLKPFERDISTEIYQAGSTPCNGVEGFNCYFPLQSYGFQPTNGVGYQPYRVVVLSFELLHAPATVCGPKKSTNLVKNKCVNFNFNGLTGTGVLTESNKKFLPFQQFGRDIADTTDAVRDPQTLEILDITPCSFGGVSVITPGTNTSNQVAVLYQDVNCTEVPVAIHADQLTPTWRVYSTGSNVFQTRAGCLIGAEHVNNSYECDIPIGAGICASYQTQTNSPRRARSVASQSIIAYTMSLGAENSVAYSNNSIAIPTNFTISVTTEILPVSMTKTSVDCTMYICGDSTECSNLLLQYGSFCTQLNRALTGIAVEQDKNTQEVFAQVKQIYKTPPIKDFGGFNFSQILPDPSKPSKRSFIEDLLFNKVTLADAGFIKQYGDCLGDIAARDLICAQKFNGLTVLPPLLTDEMIAQYTSALLAGTITSGWTFGAGAALQIPFAMQMAYRFNGIGVTQNVLYENQKLIANQFNSAIGKIQDSLSSTASALGKLQDVVNQNAQALNTLVKQLSSNFGAISSVLNDILSRLDKVEAEVQIDRLITGRLQSLQTYVTQQLIRAAEIRASANLAATKMSECVLGQSKRVDFCGKGYHLMSFPQSAPHGVVFLHVTYVPAQEKNFTTAPAICHDGKAHFPREGVFVSNGTHWFVTQRNFYEPQIITTDNTFVSGNCDVVIGIVNNTVYDPLQPELDSGGGSGGGQIYEGKLTAEGLRFGIVASRFNHALVDRLVEGAIDAIVRHGGREEDITLVRVPGSWEIPVAAGELARKEDIDAVIAIGVLIRGATPHFDYIASEVSKGLADLSLELRKPITFGVITADTLEQAIERAGTKHGNKGWEAALSAIEMANLFKSLR

SEQ ID NO: 7684 - protein, 1307 aa, Artificial Sequence
  SARS-CoV-2/USA/WA-UW292/2020__EPI_ISL_418077 spike protein (1-1147) LumSynth construct
MFVFLVLLPLVSSQCVNLTTRTQLPPAYTNSFTRGVYYPDKVFRSSVLHSTQDLFLPFFSNVTWFHAIHVSGTNGTKRFDNPVLPFNDGVYFASTEKSNIIRGWIFGTTLDSKTQSLLIVNNATNVVIKVCEFQFCNDPFLGVYYHKNNKSWMESEFRVYSSANNCTFEYVSQPFLMDLEGKQGNFKNLREFVFKNIDGYFKIYSKHTPINLVRDLPQGFSALEPLVDLPIGINITRFQTLLALHRSYLTPGDSSSGWTAGAAAYYVGYLQPRTFLLKYNENGTITDAVDCALDPLSETKCTLKSFTVEKGIYQTSNFRVQPTESIVRFPNITNLCPFGEVFNATRFASVYAWNRKRISNCVADYSVLYNSASFSTFKCYGVSPTKLNDLCFTNVYADSFVIRGDEVRQIAPGQTGKIADYNYKLPDDFTGCVIAWNSNNLDSKVGGNYNYLYRLFRKSNLKPFERDISTEIYQASSTPCNGVEGFNCYFPLQSYGFQPTNGVGYQPYRVVVLSFELLHAPATVCGPKKSTNLVKNKCVNFNFNGLTGTGVLTESNKKFLPFQQFGRDIADTTDAVRDPQTLEILDITPCSFGGVSVITPGTNTSNQVAVLYQDVNCTEVPVAIHADQLTPTWRVYSTGSNVFQTRAGCLIGAEHVNNSYECDIPIGAGICASYQTQTNSPRRARSVASQSIIAYTMSLGAENSVAYSNNSIAIPTNFTISVTTEILPVSMTKTSVDCTMYICGDSTECSNLLLQYGSFCTQLNRALTGIAVEQDKNTQEVFAQVKQIYKTPPIKDFGGFNFSQILPDPSKPSKRSFIEDLLFNKVTLADAGFIKQYGDCLGDIAARDLICAQKFNGLTVLPPLLTDEMIAQYTSALLAGTITSGWTFGAGAALQIPFAMQMAYRFNGIGVTQNVLYENQKLIANQFNSAIGKIQDSLSSTASALGKLQDVVNQNAQALNTLVKQLSSNFGAISSVLNDILSRLDKVEAEVQIDRLITGRLQSLQTYVTQQLIRAAEIRASANLAATKMSECVLGQSKRVDFCGKGYHLMSFPQSAPHGVVFLHVTYVPAQEKNFTTAPAICHDGKAHFPREGVFVSNGTHWFVTQRNFYEPQIITTDNTFVSGNCDVVIGIVNNTVYDPLQPELDSGGGSGGGQIYEGKLTAEGLRFGIVASRFNHALVDRLVEGAIDAIVRHGGREEDITLVRVPGSWEIPVAAGELARKEDIDAVIAIGVLIRGATPHFDYIASEVSKGLADLSLELRKPITFGVITADTLEQAIERAGTKHGNKGWEAALSAIEMANLFKSLR

SEQ ID NO: 7685 - protein, 1307 aa, Artificial Sequence
  SARS-CoV-2/Iceland/192/2020__EPI_ISL_417819 spike protein (1-1147) LumSynth construct
MFVFFVLLPLVSSQCVNLTTRTQLPPAYTNSFTRGVYYPDKVFRSSVLHSTQDLFLPFFSNVTWFHAIHVSGTNGTKRFDNPVLPFNDGVYFASTEKSNIIRGWIFGTTLDSKTQSLLIVNNATNVVIKVCEFQFCNDPFLGVYYHKNNKSWMESEFRVYSSANNCTFEYVSQPFLMDLEGKQGNFKNLREFVFKNIDGYFKIYSKHTPINLVRDLPQGFSALEPLVDLPIGINITRFQTLLALHRSYLTPGDSSSGWTAGAAAYYVGYLQPRTFLLKYNENGTITDAVDCALDPLSETKCTLKSFTVEKGIYQTSNFRVQPTESIVRFPNITNLCPFGEVFNATRFASVYAWNRKRISNCVADYSVLYNSASFSTFKCYGVSPTKLNDLCFTNVYADSFVIRGDEVRQIAPGQTGKIADYNYKLPDDFTGCVIAWNSNNLDSKVGGNYNYLYRLFRKSNLKPFERDISTEIYQAGSTPCNGVEGFNCYFPLQSYGFQPTNGVGYQPYRVVVLSFELLHAPATVCGPKKSTNLVKNKCVNFNFNGLTGTGVLTESNKKFLPFQQFGRDIADTTDAVRDPQTLEILDITPCSFGGVSVITPGTNTSNQVAVLYQGVNCTEVPVAIHADQLTPTWRVYSTGSNVFQTRAGCLIGAEHVNNSYECDIPIGAGICASYQTQTNSPRRARSVASQSIIAYTMSLGAENSVAYSNNSIAIPTNFTISVTTEILPVSMTKTSVDCTMYICGDSTECSNLLLQYGSFCTQLNRALTGIAVEQDKNTQEVFAQVKQIYKTPPIKDFGGFNFSQILPDPSKPSKRSFIEDLLFNKVTLADAGFIKQYGDCLGDIAARDLICAQKFNGLTVLPPLLTDEMIAQYTSALLAGTITSGWTFGAGAALQIPFAMQMAYRFNGIGVTQNVLYENQKLIANQFNSAIGKIQDSLSSTASALGKLQDVVNQNAQALNTLVKQLSSNFGAISSVLNDILSRLDKVEAEVQIDRLITGRLQSLQTYVTQQLIRAAEIRASANLAATKMSECVLGQSKRVDFCGKGYHLMSFPQSAPHGVVFLHVTYVPAQEKNFTTAPAICHDGKAHFPREGVFVSNGTHWFVTQRNFYEPQIITTDNTFVSGNCDVVIGIVNNTVYDPLQPELDSGGGSGGGQIYEGKLTAEGLRFGIVASRFNHALVDRLVEGAIDAIVRHGGREEDITLVRVPGSWEIPVAAGELARKEDIDAVIAIGVLIRGATPHFDYIASEVSKGLADLSLELRKPITFGVITADTLEQAIERAGTKHGNKGWEAALSAIEMANLFKSLR

SEQ ID NO: 7686 - protein, 1307 aa, Artificial Sequence
  SARS-CoV-2/Belgium/ULG-6939/2020__EPI_ISL_417020 spike protein (1-1147) LumSynth construct
MFVFLVLLPLVSSQCVNLTTRTQLPPAYTNSFTRGVYYPDKVFRSSVLHSTQDLFLPFFSNVTWFHAIHVSGTNGTKRFDNPVLPFNDGVYFASTEKSNIIRGWIFGTTLDSKTQSLLIVNNATNVVIKVCEFQFCNDPFLGVYYHKNNKSWMESEFRVYSSANNCTFEYVSQPFLMDLEGKQGNFKNLREFVFKNIDGYFKIYSKHTPINLVRDLPQGFSALEPLVDLPIGINITRFQTLLALHRSYLTPGDSSSGWTAGAAAYYVGYLQPRTFLLKYNENGTITDAVDCALDPLSETKCTLKSFTVEKGIYQTSNFRVQPTESIVRFPNITNLCPFGEVFNATRFASVYAWNRKRISNCVADYSVLYNSASFSTFKCYGVSPTKLNDLCFTNVYADSFVIRGDEVRQIAPGQTGKIADYNYKLPDDFTGCVIAWNSNNLDSKVGGNYNYLYRLFRKSNLKPFERDISTEIYQAGSTPCNGVEGFNCYFPLQSYGFQPTNGVGYQPYRVVVLSFELLHAPATVCGPKKSTNLVKNKCVNFNFNGLTGTGVLTESNKKFLPFQQFGRDIADTTDAVRDPQTLEILDITPCSFGGVSVITPGTNTSNQVAVLYQGVNCTEVPVAIHADQLTPTWRVYSTGSNVFQTRAGCLIGAEHVNNSYECDIPIGAGICASYQTQTNSPRRARSVASQSIIAYTMSLGAENSVVYSNNSIAIPTNFTISVTTEILPVSMTKTSVDCTMYICGDSTECSNLLLQYGSFCTQLNRALTGIAVEQDKNTQEVFAQVKQIYKTPPIKDFGGFNFSQILPDPSKPSKRSFIEDLLFNKVTLADAGFIKQYGDCLGDIAARDLICAQKFNGLTVLPPLLTDEMIAQYTSALLAGTITSGWTFGAGAALQIPFAMQMAYRFNGIGVTQNVLYENQKLIANQFNSAIGKIQDSLSSTASALGKLQDVVNQNAQALNTLVKQLSSNFGAISSVLNDILSRLDKVEAEVQIDRLITGRLQSLQTYVTQQLIRAAEIRASANLAATKMSECVLGQSKRVDFCGKGYHLMSFPQSAPHGVVFLHVTYVPAQEKNFTTAPAICHDGKAHFPREGVFVSNGTHWFVTQRNFYEPQIITTDNTFVSGNCDVVIGIVNNTVYDPLQPELDSGGGSGGGQIYEGKLTAEGLRFGIVASRFNHALVDRLVEGAIDAIVRHGGREEDITLVRVPGSWEIPVAAGELARKEDIDAVIAIGVLIRGATPHFDYIASEVSKGLADLSLELRKPITFGVITADTLEQAIERAGTKHGNKGWEAALSAIEMANLFKSLR

SEQ ID NO: 7687 - protein, 1307 aa, Artificial Sequence
  SARS-CoV-2/France/HF2496/2020__EPI_ISL_418231 spike protein (1-1147) LumSynth construct
MFVFLVLLPLVSSQCVNLTTRTQLPPAYTNSFTRGVYYPDKVFRSSVLHSTQDLFLPFFSNVTWFHAIHVSGTNGTKRFDNPVLPFNDGVYFASTEKSNIIRGWIFGTTLDSKTQSLLIVNNATNVVIKVCEFQFCNDPFLGVYYHKNNKSWMESEFRVYSSANNCTFEYVSQPFLMDLEGKQGNFKNLREFVFKNIDGYFKIYSKHTPINLVRDLPQGFSALEPLVDLPIGINITRFQTLLALHRSYLTPGDSSSGWTAGAAAYYVGYLQPRTFLLKYNENGTITDAVDCALDPLSETKCTLKSFTVEKGIYQTSNFRVQPTESIVRFPNITNLCPFGEVFNATRFASVYAWNRKRISNCVADYSVLYNSASFSTFKCYGVSPTKLNDLCFTNVYADSFVIRGDEVRQIAPGQTGKIADYNYKLPDDFTGCVIAWNSNNLDSKVGGNYNYLYRLFRKSNLKPFERDISTEIYQAGSTPCNGVEGFNCYFPLQSYGFQPTNGVGYQPYRVVVLSFELLHAPATVCGPKKSTNLVKNKCVNFNFNGLTGTGVLTESNKKFLPFQQFGRDIADTTDAVRDPQTLEILDITPCSFGGVSVITPGTNTSNQVAVLYQGVNCTEVPVAIHADQLTPTWRVYSTGSNVFQTRAGCLIGAEHVNNSYECDIPIGAGICASYQTQTNSPRRARSVASQSIIAYTMSLGAENSVAYSNNSIAIPTNFTISVTTEILPVSMTKTSVDCTMYICGDSTECSNLLLQYGSFCTQLNRALTGIAVEQDKNTQEVFAQVKQIYKTPPIKDFGGFNFSQILPDPSKPSKRSFIEDLLFNKVTLADAGFIKQYGDCLGDIVARDLICAQKFNGLTVLPPLLTDEMIAQYTSALLAGTITSGWTFGAGAALQIPFAMQMAYRFNGIGVTQNVLYENQKLIANQFNSAIGKIQDSLSSTASALGKLQDVVNQNAQALNTLVKQLSSNFGAISSVLNDILSRLDKVEAEVQIDRLITGRLQSLQTYVTQQLIRAAEIRASANLAATKMSECVLGQSKRVDFCGKGYHLMSFPQSAPHGVVFLHVTYVPAQEKNFTTAPAICHDGKAHFPREGVFVSNGTHWFVTQRNFYEPQIITTDNTFVSGNCDVVIGIVNNTVYDPLQPELDSGGGSGGGQIYEGKLTAEGLRFGIVASRFNHALVDRLVEGAIDAIVRHGGREEDITLVRVPGSWEIPVAAGELARKEDIDAVIAIGVLIRGATPHFDYIASEVSKGLADLSLELRKPITFGVITADTLEQAIERAGTKHGNKGWEAALSAIEMANLFKSLR

SEQ ID NO: 7688 - protein, 1307 aa, Artificial Sequence
  SARS-CoV-2/USA/WA-UW291/2020__EPI_ISL_418076 spike protein (1-1147) LumSynth construct
MFVFLVLLPLVSSQCVNLTTRTQLPPAYTNSFTRGVYYPDKVFRSSVLHSTQDLFLPFFSNVTWFHAIHVSGTNGTKRFDNPVLPFNDGVYFASTEKSNIIRGWIFGTTLDSKTQSLLIVNNATNVVIKVCEFQFCNDPFLGVYYHKNNKSWMESEFRVYSSANNCTFEYVSQPFLMDLEGKQGNFKNLREFVFKNIDGYFKIYSKHTPINLVRDLPQGFSALEPLVDLPIGINITRFQTLLALHRSYLTPGDSSSGWTAGAAAYYVGYLQPRTFLLKYNENGTITDAVDCALDPLSETKCTLKSFTVEKGIYQTSNFRVQPTESIVRFPNITNLCPFGEVFNATRFASVYAWNRKRISNCVADYSVLYNSASFSTFKCYGVSPTKLNDLCFTNVYADSFVIRGDEVRQIAPGQTGKIADYNYKLPDDFTGCVIAWNSNNLDSKVGGNYNYLYRLFRKSNLKPFERDISTEIYQAGSTPCNGVEGFNCYFPLQSYGFQPTNGVGYQPYRVVVLSFELLHAPATVCGPKKSTNLVKNKCVNFNFNGLTGTGVLTESNKKFLPFQQFGRDIADTTDAVRDPQTLEILDITPCSFGGVSVITPGTNTSNQVAVLYQGVNCTEVPVAIHADQLTPTWRVYSTGSNVFQTRAGCLIGAEHVNNSYECDIPIGAGICASYQTQTNSPRRARSVASQSIIAYTMSLGAENSVAYSNNSIAIPTNFTISVTTEILPVSMTKTSVDCTMYICGDSTECSNLLLQYGSFCTQLNRALTGIAVEQDKNTQEVFAQVKQIYKTPPIKDFGGFNFSQILPDPSKPSKRSFIEDLLFNKVTLADAGFIKQYGDCLGDIAARDLICAQKFNGLTVLPPLLTDEMIAQYTSALLAGTITSGWTFGAGAALQIPFAMQMAYRFNGIGVTQNVLYENQKLIANQFNSAIGKIQYSLSSTASALGKLQDVVNQNAQALNTLVKQLSSNFGAISSVLNDILSRLDKVEAEVQIDRLITGRLQSLQTYVTQQLIRAAEIRASANLAATKMSECVLGQSKRVDFCGKGYHLMSFPQSAPHGVVFLHVTYVPAQEKNFTTAPAICHDGKAHFPREGVFVSNGTHWFVTQRNFYEPQIITTDNTFVSGNCDVVIGIVNNTVYDPLQPELDSGGGSGGGQIYEGKLTAEGLRFGIVASRFNHALVDRLVEGAIDAIVRHGGREEDITLVRVPGSWEIPVAAGELARKEDIDAVIAIGVLIRGATPHFDYIASEVSKGLADLSLELRKPITFGVITADTLEQAIERAGTKHGNKGWEAALSAIEMANLFKSLR

SEQ ID NO: 7689 - protein, 1307 aa, Artificial Sequence; identical to SEQ ID NO: 7652
  SARS-CoV-2/Portugal/PT0034/2020__EPI_ISL_418019 spike protein (1-1147) LumSynth construct

SEQ ID NO: 7690 - protein, 1307 aa, Artificial Sequence; identical to SEQ ID NO: 7644
  SARS-CoV-2/Iceland/202/2020__EPI_ISL_417750 spike protein (1-1147) LumSynth construct

SEQ ID NO: 7691 - protein, 1307 aa, Artificial Sequence
  SARS-CoV-2/USA/WA-UW261/2020__EPI_ISL_418046 spike protein (1-1147) LumSynth construct
MFVFLVLLPLVSSQCVNLTTRTQLPPAYTNSFTRGVYYPDKVFRSSVLHSTQDLFLPFFSNVTWFHAIHVSGTNGTKRFDNPVLPFNDGVYFASTEKSNIIRGWIFGTTLDSKTQSLLIVNNATNVVIKVCEFQFCNDPFLGVYYHKNNKSWMESEFRVYSSANNCTFEYVSQPFLMDLEGKQGNFKNLREFVFKNIDGYFKIYSKHTPINLVRDLPQGFSALEPLVDLPIGINITRFQTLLALHRSYLTPGDSSSGWTAGAAAYYVGYLQPRTFLLKYNENGTITDAVDCALDPLSETKCTLKSFTVEKGIYQTSNFRVQPTESIVRFPNITNLCPFGEVFNATRFTSVYAWNRKRISNCVADYSVLYNSASFSTFKCYGVSPTKLNDLCFTNVYADSFVIRGDEVRQIAPGQTGKIADYNYKLPDDFTGCVIAWNSNNLDSKVGGNYNYLYRLFRKSNLKPFERDISTEIYQAGSTPCNGVEGFNCYFPLQSYGFQPTNGVGYQPYRVVVLSFELLHAPATVCGPKKSTNLVKNKCVNFNFNGLTGTGVLTESNKKFLPFQQFGRDIADTTDAVRDPQTLEILDITPCSFGGVSVITPGTNTSNQVAVLYQDVNCTEVPVAIHADQLTPTWRVYSTGSNVFQTRAGCLIGAEHVNNSYECDIPIGAGICASYQTQTNSPRRARSVASQSIIAYTMSLGAENSVAYSNNSIAIPTNFTISVTTEILPVSMTKTSVDCTMYICGDSTECSNLLLQYGSFCTQLNRALTGIAVEQDKNTQEVFAQVKQIYKTPPIKDFGGFNFSQILPDPSKPSKRSFIEDLLFNKVTLADAGFIKQYGDCLGDIAARDLICAQKFNGLTVLPPLLTDEMIAQYTSALLAGTITSGWTFGAGAALQIPFAMQMAYRFNGIGVTQNVLYENQKLIANQFNSAIGKIQDSLSSTASALGKLQDVVNQNAQALNTLVKQLSSNFGAISSVLNDILSRLDKVEAEVQIDRLITGRLQSLQTYVTQQLIRAAEIRASANLAATKMSECVLGQSKRVDFCGKGYHLMSFPQSAPHGVVFLHVTYVPAQEKNFTTAPAICHDGKAHFPREGVFVSNGTHWFVTQRNFYEPQIITTDNTFVSGNCDVVIGIVNNTVYDPLQPELDSGGGSGGGQIYEGKLTAEGLRFGIVASRFNHALVDRLVEGAIDAIVRHGGREEDITLVRVPGSWEIPVAAGELARKEDIDAVIAIGVLIRGATPHFDYIASEVSKGLADLSLELRKPITFGVITADTLEQAIERAGTKHGNKGWEAALSAIEMANLFKSLR

SEQ ID NO: 7692 - protein, 1307 aa, Artificial Sequence
  SARS-CoV-2/Portugal/PT0035/2020__EPI_ISL_418020 spike protein (1-1147) LumSynth construct
MFVFLVLLPLVSSQCVNLTTRTQLPPAYTNSFTRGVYYPDKVFRSSVLHSTQDLFLPFFSNVTWFHAIHVSGTNGTKRFDNPVLPFNDGVYFASTEKSNIIRGWIFGTTLDSKTQSLLIVNNATNVVIKVCEFQFCNDPFLGVYYHKNNKSWMESEFRVYSSANNCTFEYVSQPFLMDLEGKQGNFKNLREFVFKNIDGYFKIYSKHTPINLVRDLPQGFSALEPLVDLPIGINITRFQTLLALHRSYLTPGDSSSGWTAGAAAYYVGYLQPRTFLLKYNENGTITDAVDCALDPLSETKCTLKSFTVEKGIYQTSNFRVQPTESIVRFPNITNLCPFGEVFNATRFASVYAWNRKRISNCVADYSVLYNSASFSTFKCYGVSPTKLNDLCFTNVYADSFVIRGDEVRQIAPGQTGKIADYNYKLPDDFTGCVIAWNSNNLDSKVGGNYNYLYRLFRKSNLKPFERDISTEIYQAGSTPCNGVEGFNCYFPLQSYGFQPTNGVGYQPYRVVVLSFELLHAPATVCGPKKSTNLVKNKCVNFNFNGLTGTGVLTESNKKFLPFQQFGRDIADTTDAVRDPQTLEILDITPCSFGGVSVITPGTNTSNQVAVLYQDVNCTEVPVAIHADQLTPTWRVYSTGSNVFQTRAGCLIGAEHVNNSYECDIPIGAGICASYQTQTNSPRRARSVASQSIIAYTMSLGAENSVAYSNNSIAIPTNFTISVTTEILPVSMTKTSVDCTMYICGDSTECSNLLLQYGSFCTQLNRALTGIAVEQDKNTQEVFAQVKQIYKTPPIKDFGGFNFSQILPDPSKPSKRSFIEDLLFNKVTLADAGFIKQYGDCLGDISARDLICAQKFNGLTVLPPLLTDEMIAQYTSALLAGTITSGWTFGAGAALQIPFAMQMAYRFNGIGVTQNVLYENQKLIANQFNSAIGKIQDSLSSTASALGKLQDVVNQNAQALNTLVKQLSSNFGAISSVLNDILSRLDKVEAEVQIDRLITGRLQSLQTYVTQQLIRAAEIRASANLAATKMSECVLGQSKRVDFCGKGYHLMSFPQSAPHGVVFLHVTYVPAQEKNFTTAPAICHDGKAHFPREGVFVSNGTHWFVTQRNFYEPQIITTDNTFVSGNCDVVIGIVNNTVYDPLQPELDSGGGSGGGQIYEGKLTAEGLRFGIVASRFNHALVDRLVEGAIDAIVRHGGREEDITLVRVPGSWEIPVAAGELARKEDIDAVIAIGVLIRGATPHFDYIASEVSKGLADLSLELRKPITFGVITADTLEQAIERAGTKHGNKGWEAALSAIEMANLFKSLR

SEQ ID NO: 7693 - protein, 1307 aa, Artificial Sequence
  SARS-CoV-2/USA/NY-NYUMC7/2020__EPI_ISL_418192 spike protein (1-1147) LumSynth construct
MFVFLVLLPLVSSQCVNLTTRTQLPPAYTNSFTRGVYYPDKVFRSSVLHSTQDLFLPFFSNVTWFHAIHVSGTNGTKRFDNPVLPFNDGVYFASTEKSNIIRGWIFGTTLDSKTQSLLIVNNATNVVIKVCEFQFCNDPFLGVYHHKNNKSWMESEFRVYSSANNCTFEYVSQPFLMDLEGKQGNFKNLREFVFKNIDGYFKIYSKHTPINLVRDLPQGFSALEPLVDLPIGINITRFQTLLALHRSYLTPGDSSSGWTAGAAAYYVGYLQPRTFLLKYNENGTITDAVDCALDPLSETKCTLKSFTVEKGIYQTSNFRVQPTESIVRFPNITNLCPFGEVFNATRFASVYAWNRKRISNCVADYSVLYNSASFSTFKCYGVSPTKLNDLCFTNVYADSFVIRGDEVRQIAPGQTGKIADYNYKLPDDFTGCVIAWNSNNLDSKVGGNYNYLYRLFRKSNLKPFERDISTEIYQAGSTPCNGVEGFNCYFPLQSYGFQPTNGVGYQPYRVVVLSFELLHAPATVCGPKKSTNLVKNKCVNFNFNGLTGTGVLTESNKKFLPFQQFGRDIADTTDAVRDPQTLEILDITPCSFGGVSVITPGTNTSNQVAVLYQGVNCTEVPVAIHADQLTPTWRVYSTGSNVFQTRAGCLIGAEHVNNSYECDIPIGAGICASYQTQTNSPRRARSVASQSIIAYTMSLGAENSVAYSNNSIAIPTNFTISVTTEILPVSMTKTSVDCTMYICGDSTECSNLLLQYGSFCTQLNRALTGIAVEQDKNTQEVFAQVKQIYKTPPIKDFGGFNFSQILPDPSKPSKRSFIEDLLFNKVTLADAGFIKQYGDCLGDIAARDLICAQKFNGLTVLPPLLTDEMIAQYTSALLAGTITSGWTFGAGAALQIPFAMQMAYRFNGIGVTQNVLYENQKLIANQFNSAIGKIQDSLSSTASALGKLQDVVNQNAQALNTLVKQLSSNFGAISSVLNDILSRLDKVEAEVQIDRLITGRLQSLQTYVTQQLIRAAEIRASANLAATKMSECVLGQSKRVDFCGKGYHLMSFPQSAPHGVVFLHVTYVPAQEKNFTTAPAICHDGKAHFPREGVFVSNGTHWFVTQRNFYEPQIITTDNTFVSGNCDVVIGIVNNTVYDPLQPELDSGGGSGGGQIYEGKLTAEGLRFGIVASRFNHALVDRLVEGAIDAIVRHGGREEDITLVRVPGSWEIPVAAGELARKEDIDAVIAIGVLIRGATPHFDYIASEVSKGLADLSLELRKPITFGVITADTLEQAIERAGTKHGNKGWEAALSAIEMANLFKSLR

SEQ ID NO: 7694 - protein, 1307 aa, Artificial Sequence
  SARS-CoV-2/Iceland/189/2020__EPI_ISL_417709 spike protein (1-1147) LumSynth construct
MFVFLVLLPLVSSQCVNLTTRTQLPPAYTNSFTRGVYYPDKVFRSSVLHSTQDLFLPFFSNVTWFHAIHVSGTNGTKRFDNPVLPFNDGVYFASTEKSNIIRGWIFGTTLDSKTQSLLIVNNATNVVIKVCEFQFCNDPFLGVYYHKNNKSWMESEFRVYSSANNCTFEYVSQPFLMDLEGKQGNFKNLREFVFKNIDGYFKIYSKHTPINLVRDLPQGFSALEPLVDLPIGINITRFQTLLALHRSYLTPGDSSSGWTAGAAAYYVGYLQPRTFLLKYNENGTITDAVDCALDPLSETKCTLKSFTVEKGIYQTSNFRVQPTESIVRFPNITNLCPFGEVFNATRFASVYAWNRKRISNCVADYSVLYNSASFSTFKCYGVSPTKLNDLCFTNVYADSFVIRGDEVRQIAPGQTGKIADYNYKLPDDFTGCVIAWNSNNLDSKVGGNYNYLYRLFRKSNLKPFERDISTEIYQAGSTPCNGVEGFNCYFPLQSYGFQPTNGVGYQPYRVVVLSFELLHAPATVCGPKKSTNLVKNKCVNFNFNGLTGTGVLTESNKKFLPFQQFGRDIADTTDAVRDPQTLEILDITPCSFGGVSVITPGTNTSNQVAVLYQGVNCTEVPVAIHADQLTPTWRVYSTGSNVFQTRAGCLIGAEHVNNSYECDIPIGAGICASYQTQTNSPRRARSVASQSIIAYTMSLGAENSVAYSNNSIAIPTNFTISVTTEILPVSMTKTSVDCTMYICGDSTECSNLLLQYGSFCTQLNRALTGIAVEQDKNTQEVFAQVKQIYKTPPIKDFGGFNFSQILPDPSKPSKRSFIEDLLFNKVTLADAGFTKQYGDCLGDIAARDLICAQKFNGLTVLPPLLTDEMIAQYTSALLAGTITSGWTFGAGAALQIPFAMQMAYRFNGIGVTQNVLYENQKLIANQFNSAIGKIQDSLSSTASALGKLQDVVNQNAQALNTLVKQLSSNFGAISSVLNDILSRLDKVEAEVQIDRLITGRLQSLQTYVTQQLIRAAEIRASANLAATKMSECVLGQSKRVDFCGKGYHLMSFPQSAPHGVVFLHVTYVPAQEKNFTTAPAICHDGKAHFPREGVFVSNGTHWFVTQRNFYEPQIITTDNTFVSGNCDVVIGIVNNTVYDPLQPELDSGGGSGGGQIYEGKLTAEGLRFGIVASRFNHALVDRLVEGAIDAIVRHGGREEDITLVRVPGSWEIPVAAGELARKEDIDAVIAIGVLIRGATPHFDYIASEVSKGLADLSLELRKPITFGVITADTLEQAIERAGTKHGNKGWEAALSAIEMANLFKSLR

SEQ ID NO: 7695 - protein, 1307 aa, Artificial Sequence
  SARS-CoV-2/Australia/NSW56/2020__EPI_ISL_417408 spike protein (1-1147) LumSynth construct
MFVFLVLLPLVSSQCVNLTTRTQLPPAYTNSFTRGVYYPDKVFRSSVLHSTQDLFLPFFSNVTWFHAIHVSGTNGTKRFDNPVLPFNDGVYFASTEKSNIIRGWIFGTTLDSKTQSLLIVNNATNVVIKVCEFQFCNDPFLGVYYHKNNKSWMESEFRVYSSANNCTFEYVSQPFLMDLEGKQGNFKNLREFVFKNIDGYFKIYSKHTPINLVRDLPQGFSALEPLVDLPIGINITRFQTLLALHRSYLTPGDSSSGWTAGAAAYYVGYLQPRTFLLKYNENGTITDAVDCALDPLSETKCTLKSFTVEKGIYQTSNFRVQPTESIVRFPNITNLCPFGEVFNATRFASVYAWNRKRISNCVADYSVLYNSASFSTFKCYGVSPTKLNDLCFTNVYADSFVIRGDEVRQIAPGQTGKIADYNYKLPDDFTGCVIAWNSNNLDSKVGGNYNYLYRLFRKSNLKPFERDISTEIYQAGSTPCNGVEGFNCYFPLQSYGFQPTNGVGYQPYRVVVLSFELLHAPATVCGPKKSTNLVKNKCVNFNFNGLTGTGVLTESNKKFLPFQQFGRDIADTTDAVRDPQTLEILDITPCSFGGVSVITPGTNTSNQVAVLYQDVNCTEVPVAIHADQLTPTWRVYSTGSNVFQTRAGCLIGAEHVNNSYECDIPIGAGICASYQTQTNSPRRARSVASQSIIAYTMSLGAENSVAYSNNSIAIPTNFTISVTTEILPVSMTKTSVDCTMYICGDSTECSNLLLQYGSFCTQLNRALTGIAVEQDKNTQEVFAQVKQIYKTPPIKDFGGFNFSQILPDSSKPSKRSFIEDLLFNKVTLADAGFIKQYGDCLGDIAARDLICAQKFNGLTVLPPLLTDEMIAQYTSALLAGTITSGWTFGAGAALQIPFAMQMAYRFNGIGVTQNVLYENQKLIANQFNSAIGKIQDSLSSTASALGKLQDVVNQNAQALNTLVKQLSSNFGAISSVLNDILSRLDKVEAEVQIDRLITGRLQSLQTYVTQQLIRAAEIRASANLAATKMSECVLGQSKRVDFCGKGYHLMSFPQSAPHGVVFLHVTYVPAQEKNFTTAPAICHDGKAHFPREGVFVSNGTHWFVTQRNFYEPQIITTDNTFVSGNCDVVIGIVNNTVYDPLQPELDSGGGSGGGQIYEGKLTAEGLRFGIVASRFNHALVDRLVEGAIDAIVRHGGREEDITLVRVPGSWEIPVAAGELARKEDIDAVIAIGVLIRGATPHFDYIASEVSKGLADLSLELRKPITFGVITADTLEQAIERAGTKHGNKGWEAALSAIEMANLFKSLR

SEQ ID NO: 7696 - protein, 1307 aa, Artificial Sequence
  SARS-CoV-2/Iceland/280/2020__EPI_ISL_417608 spike protein (1-1147) LumSynth construct
MFVFLVLLPLVSSQCVNLTTRTQLPPAYTNSFTRGVYYPDKVFRSSVLHSTQDLFLPFFSNVTWFHAIHVSGTNGTKRFDNPVLPFNDGVYFASTEKSNIIRGWIFGTTLDSKTQSLLIVNNATNVVIKVCEFQFCNDPFLGVYYHKNNKSWMESEFRVYSSANNCTFEYVSQPFLMDLEGKQGNFKNLREFVFKNIDGYFKIYSKHTPINLVRDLPQGFSALEPLVDLPIGINITRFQTLLALHRSYLTPGDSSSGWTAGAAAYYVGYLQPRTFLLKYNENGTITDAVDCALDPLSETKCTLKSFTVEKGIYQTSNFRVQPTESIVRFPNITNLCPFGEVFNATRFASVYAWNRKRISNCVADYSVLYNSASFSTFKCYGVSPTKLNDLCFTNVYADSFVIRGDEVRQIAPGQTGKIADYNYKLPDDFTGCVIAWNSNNLDSKVGGNYNYLYRLFRKSNLKPFERDISTEIYQAGSTPCNGVEGFNCYFPLQSYGFQPTNGVGYQPYRVVVLSFELLHAPATVCGPKKSTNLVKNKCVNFNFNGLTGTGVLTESNKKFLPFQQFGRDIADTTDAVRDPQTLEILDITPCSFGGVSVITPGTNTSNQVAVLYQGVNCTEVPVAIHADQLTPTWRVYSTGSNVFQTRAGCLIGAEHVNNSYECDIPIGAGICASYHTQTNSPRRARSVASQSIIAYTMSLGAENSVAYSNNSIAIPTNFTISVTTEILPVSMTKTSVDCTMYICGDSTECSNLLLQYGSFCTQLNRALTGIAVEQDKNTQEVFAQVKQIYKTPPIKDFGGFNFSQILPDPSKPSKRSFIEDLLFNKVTLADAGFIKQYGDCLGDIAARDLICAQKFNGLTVLPPLLTDEMIAQYTSALLAGTITSGWTFGAGAALQIPFAMQMAYRFNGIGVTQNVLYENQKLIANQFNSAIGKIQDSLSSTASALGKLQDVVNQNAQALNTLVKQLSSNFGAISSVLNDILSRLDKVEAEVQIDRLITGRLQSLQTYVTQQLIRAAEIRASANLAATKMSECVLGQSKRVDFCGKGYHLMSFPQSAPHGVVFLHVTYVPAQEKNFTTAPAICHDGKAHFPREGVFVSNGTHWFVTQRNFYEPQIITTDNTFVSGNCDVVIGIVNNTVYDPLQPELDSGGGSGGGQIYEGKLTAEGLRFGIVASRFNHALVDRLVEGAIDAIVRHGGREEDITLVRVPGSWEIPVAAGELARKEDIDAVIAIGVLIRGATPHFDYIASEVSKGLADLSLELRKPITFGVITADTLEQAIERAGTKHGNKGWEAALSAIEMANLFKSLR

SEQ ID NO: 7697 - protein, 1307 aa, Artificial Sequence; identical to SEQ ID NO: 7652
  SARS-CoV-2/Iceland/247/2020__EPI_ISL_417575 spike protein (1-1147) LumSynth construct

SEQ ID NO: 7698 - protein, 1307 aa, Artificial Sequence
  SARS-CoV-2/Iceland/238/2020__EPI_ISL_417566 spike protein (1-1147) LumSynth construct
MFVFLVLLPLVSSQCVNLTTRTQLPPAYTNSFTRGVYYPDKVFRSSVLHSTQDLFLPFFSNVTWFHAIHVSGTNGTKRFDNPVLPFNDGVYFASTEKSNIIRGWIFGTTLDSKTQSLLIVNNATNVVIKVCEFQFCNDPFLGVYYHKNNKSWMESEFRVYSSANNCTFEYVSQPFLMDLEGKQGNFKNLREFVFKNIDGYFKIYSKHTPINLVRDLPQGFSALEPLVDLPIGINITRFQTLLALHRSYLTPGDSSSGWTAGAAAYYVGYLQPRTFLLKYNENGTITDAVDCALDPLSETKCTLKSFTVEKGIYQTSNFRVQPTESIVRFPNITNLCPFGEVFNATRFASVYAWNRKRISNCVADYSVLYNSASFSTFKCYGVSPTKLNDLCFTNVYADSFVIRGDEVRQIAPGQTGKIADYNYKLPDDFTGCVIAWNSNNLDSKVGGNYNYLYRLFRKSNLKPFERDISTEIYQAGSTPCNGVEGFNCYFPLQSYGFQPTNGVGYQPYRVVVLSFELLHAPATVCGPKKSTNLVKNKCVNFNFNGLTGTGVLTESNKKFLPFQQFGRDIADTTDAVRDPQTLEILDITPCSFGGVSVITPGTNTSNQVAVLYQGVNCTEVPVAIHADQLTPTWRVYSTGSNVFQTRAGCLIGAEHVNNSYECDIPIGAGICASYQTQTNSPRRARSVASQSIIAYTMSLGAENSVAYSNNSIAIPTNFTISVTTEILPVSMTKTSVDCTMYICGDSTECSNLLLQYGSFCTQLNRALTGIAVEQDKNTQEVFAQVKQIYKTPPIKDFGGFNFSQILPDPSKPSKRSFIEDLLFNKVTLADVGFIKQYGDCLGDIAARDLICAQKFNGLTVLPPLLTDEMIAQYTSALLAGTITSGWTFGAGAALQIPFAMQMAYRFNGIGVTQNVLYENQKLIANQFNSAIGKIQDSLSSTASALGKLQDVVNQNAQALNTLVKQLSSNFGAISSVLNDILSRLDKVEAEVQIDRLITGRLQSLQTYVTQQLIRAAEIRASANLAATKMSECVLGQSKRVDFCGKGYHLMSFPQSAPHGVVFLHVTYVPAQEKNFTTAPAICHDGKAHFPREGVFVSNGTHWFVTQRNFYEPQIITTDNTFVSGNCDVVIGIVNNTVYDPLQPELDSGGGSGGGQIYEGKLTAEGLRFGIVASRFNHALVDRLVEGAIDAIVRHGGREEDITLVRVPGSWEIPVAAGELARKEDIDAVIAIGVLIRGATPHFDYIASEVSKGLADLSLELRKPITFGVITADTLEQAIERAGTKHGNKGWEAALSAIEMANLFKSLR

SEQ ID NO: 7699 - protein, 1307 aa, Artificial Sequence
  SARS-CoV-2/Greece/16/2020__EPI_ISL_418265 spike protein (1-1147) LumSynth construct
MFVFLVLLPLVSSQCVNLTTRTQLPPAYTNSFTRGVYYPDKVFRSSVLHSTQDLFLPFFSNVTWFHAIHVSGTNGTKRFDNPVLPFNDGVYFASTEKSNIIRGWIFGTTLDSKTQSLLIVNNATNVVIKVCEFQFCNDPFLGVYYHKNNKSWMESEFRVYSSANNCTFEYVSQPFLMDLEGKQGNFKNLREFVFKNVDGYFKIYSKHTPINLVRDLPQGFSALEPLVDLPIGINITRFQTLLALHRSYLTPGDSSSGWTAGAAAYYVGYLQPRTFLLKYNENGTITDAVDCALDPLSETKCTLKSFTVEKGIYQTSNFRVQPTESIVRFPNITNLCPFGEVFNATRFASVYAWNRKRISNCVADYSVLYNSASFSTFKCYGVSPTKLNDLCFTNVYADSFVIRGDEVRQIAPGQTGKIADYNYKLPDDFTGCVIAWNSNNLDSKVGGNYNYLYRLFRKSNLKPFERDISTEIYQAGSTPCNGVEGFNCYFPLQSYGFQPTNGVGYQPYRVVVLSFELLHAPATVCGPKKSTNLVKNKCVNFNFNGLTGTGVLTESNKKFLPFQQFGRDIADTTDAVRDPQTLEILDITPCSFGGVSVITPGTNTSNQVAVLYQDVNCTEVPVAIHADQLTPTWRVYSTGSNVFQTRAGCLIGAEHVNNSYECDIPIGAGICASYQTQTNSPRRARSVASQSIIAYTMSLGAENSVAYSNNSIAIPTNFTISVTTEILPVSMTKTSVDCTMYICGDSTECSNLLLQYGSFCTQLNRALTGIAVEQDKNTQEVFAQVKQIYKTPPIKDFGGFNFSQILPDPSKPSKRSFIEDLLFNKVTLADAGFIKQYGDCLGDIAARDLICAQKFNGLTVLPPLLTDEMIAQYTSALLAGTITSGWTFGAGAALQIPFAMQMAYRFNGIGVTQNVLYENQKLIANQFNSAIGKIQDSLSSTASALGKLQDVVNQNAQALNTLVKQLSSNFGAISSVLNDILSRLDKVEAEVQIDRLITGRLQSLQTYVTQQLIRAAEIRASANLAATKMSECVLGQSKRVDFCGKGYHLMSFPQSAPHGVVFLHVTYVPAQEKNFTTAPAICHDGKAHFPREGVFVSNGTHWFVTQRNFYEPQIITTDNTFVSGNCDVVIGIVNNTVYDPLQPELDSGGGSGGGQIYEGKLTAEGLRFGIVASRFNHALVDRLVEGAIDAIVRHGGREEDITLVRVPGSWEIPVAAGELARKEDIDAVIAIGVLIRGATPHFDYIASEVSKGLADLSLELRKPITFGVITADTLEQAIERAGTKHGNKGWEAALSAIEMANLFKSLR

SEQ ID NO: 7700 - protein, 1307 aa, Artificial Sequence
  SARS-CoV-2/Iceland/319/2020__EPI_ISL_417648 spike protein (1-1147) LumSynth construct
MFVFLVLLPLVSSQCVNLTTRTQLPPAYTNSFTRGVYYPDKVFRSSVLHSTQDLFLPFFSNVTWFHAIHVSGTNGTKRFDNPVLPFNDGVYFASTEKSNIIRGWIFGTTLDSKTQSLLIVNNATNVVIKVCEFQFCNDPFLGVYYHKNNKSWMESEFRVYSSANNCTFEYVSQPFLIDLEGKQGNFKNLREFVFKNIDGYFKIYSKHTPINLVRDLPQGFSALEPLVDLPIGINITRFQTLLALHRSYLTPGDSSSGWTAGAAAYYVGYLQPRTFLLKYNENGTITDAVDCALDPLSETKCTLKSFTVEKGIYQTSNFRVQPTESIVRFPNITNLCPFGEVFNATRFASVYAWNRKRISNCVADYSVLYNSASFSTFKCYGVSPTKLNDLCFTNVYADSFVIRGDEVRQIAPGQTGKIADYNYKLPDDFTGCVIAWNSNNLDSKVGGNYNYLYRLFRKSNLKPFERDISTEIYQAGSTPCNGVEGFNCYFPLQSYGFQPTNGVGYQPYRVVVLSFELLHAPATVCGPKKSTNLVKNKCVNFNFNGLTGTGVLTESNKKFLPFQQFGRDIADTTDAVRDPQTLEILDITPCSFGGVSVITPGTNTSNQVAVLYQGVNCTEVPVAIHADQLTPTWRVYSTGSNVFQTRAGCLIGAEHVNNSYECDIPIGAGICASYQTQTNSPRRARSVASQSIIAYTMSLGAENSVAYSNNSIAIPTNFTISVTTEILPVSMTKTSVDCTMYICGDSTECSNLLLQYGSFCTQLNRALTGIAVEQDKNTQEVFAQVKQIYKTPPIKDFGGFNFSQILPDPSKPSKRSFIEDLLFNKVTLADAGFIKQYGDCLGDIAARDLICAQKFNGLTVLPPLLTDEMIAQYTSALLAGTITSGWTFGAGAALQIPFAMQMAYRFNGIGVTQNVLYENQKLIANQFNSAIGKIQDSLSSTASALGKLQDVVNQNAQALNTLVKQLSSNFGAISSVLNDILSRLDKVEAEVQIDRLITGRLQSLQTYVTQQLIRAAEIRASANLAATKMSECVLGQSKRVDFCGKGYHLMSFPQSAPHGVVFLHVTYVPAQEKNFTTAPAICHDGKAHFPREGVFVSNGTHWFVTQRNFYEPQIITTDNTFVSGNCDVVIGIVNNTVYDPLQPELDSGGGSGGGQIYEGKLTAEGLRFGIVASRFNHALVDRLVEGAIDAIVRHGGREEDITLVRVPGSWEIPVAAGELARKEDIDAVIAIGVLIRGATPHFDYIASEVSKGLADLSLELRKPITFGVITADTLEQAIERAGTKHGNKGWEAALSAIEMANLFKSLR

SEQ ID NO: 7701 - protein, 1307 aa, Artificial Sequence
  SARS-CoV-2/Congo/94/2020__EPI_ISL_417947 spike protein (1-1147) LumSynth construct
MFVFLVLLPLVSSQCVNLTTRTQLPPAYTNSFTRGVYYPDKVFRSSVLHSTQDLFLPFFSNVTWFHAIHVSGTNGTKRFDNPVLPFNDGVYFASTEKSNIIRGWIFGTTLDSKTQSLLIVNNATNVVIKVCEFQFCNDPFLGVYYHKNNKSWMESEFRVYSSANNCTFEYVSQPFLMDLEGKQGNFKNLREFVFKNIDGYFKIYSKHTPINLVRDLPQGFSALEPLVDLPIGINITRFQTLLALHRSYLTPGDSSSGWTAGAAAYYVGYLQPRTFLLKYNENGTITDAVDCALDPLSETKCTLKSFTVEKGIYQTSNFRVQPTESIVRFPNITNLCPFGEVFNATRFASVYAWNRKRISNCVADYSVLYNSASFSTFKCYGVSPTKLNDLCFTNVYADSFVIRGDEVRQIAPGQTGKIADYNYKLPDDFTGCVIAWNSNNLDSKVGGNYNYLYRLFRKSNLKPFERDISTEIYQAGSTPCNGVEGFNCYFPLQSYGFQPTNGVGYQPYRVVVLSFELLHAPATVCGPKKSTNLVKNKCVNFNFNGLTGTGVLTESNKKFLPFQQFGRDIADTTDAVRDPQTLEILDITPCSFGGVSVITPGTNTSNQVAVLYQGVNCTEVPVAIHADQLTPTWRVYSTGSNVFQTRAGCLIGAEHVNNSYECDIPIGAGICASYQTQTNSPRRARSVASQSIIAYTMSLGAENSVAYSNNSIAIPTNFTISVTTEILPVSMTKTSVDCTMYICGDSTECSNLLLQYGSFCTQLNRALTGIAVEQDKNTQEVFAQVKQIYKTPPIKDFGGFNFSQILPDPSKPSKRSFIEDILFNKVTLADAGFIKQYGDCLGDIAARDLICAQKFNGLTVLPPLLTDEMIAQYTSALLAGTITSGWTFGAGAALQIPFAMQMAYRFNGIGVTQNVLYENQKLIANQFNSAIGKIQDSLSSTASALGKLQDVVNQNAQALNTLVKQLSSNFGAISSVLNDILSRLDKVEAEVQIDRLITGRLQSLQTYVTQQLIRAAEIRASANLAATKMSECVLGQSKRVDFCGKGYHLMSFPQSAPHGVVFLHVTYVPAQEKNFTTAPAICHDGKAHFPREGVFVSNGTHWFVTQRNFYEPQIITTDNTFVSGNCDVVIGIVNNTVYDPLQPELDSGGGSGGGQIYEGKLTAEGLRFGIVASRFNHALVDRLVEGAIDAIVRHGGREEDITLVRVPGSWEIPVAAGELARKEDIDAVIAIGVLIRGATPHFDYIASEVSKGLADLSLELRKPITFGVITADTLEQAIERAGTKHGNKGWEAALSAIEMANLFKSLR

SEQ ID NO: 7702 - protein, 1307 aa, Artificial Sequence
  SARS-CoV-2/Congo/158/2020__EPI_ISL_417950 spike protein (1-1147) LumSynth construct
MFVFLVLLPLVSSQCVNLTTRTQLPPAYTNSFTRGVYYPDKVFRSSVLHSTQDLFLPFFSNVTWFHAIHVSGTNGTKRFDNPVLPFNDGVYFASTEKSNIIRGWIFGTTLDSKTQSLLIVNNATNVVIKVCEFQFCNDPFLGVYYHKNNKSWMESEFRVYSSANNCTFEYVSQPFLMDLEGKQGNFKNLREFVFKNIDGYFKIYSKHTPINLVRDLPQGFSALEPLVDLPIGINITRFQTLLALHRSYLTPGDSSSGWTAGAAAYYVGYLQPRTFLLKYNENGTITDAVDCALDPLSETKCTLKSFTVEKGIYQTSNFRVQPTESIVRFPNITNLCPFGEVFNATRFASVYAWNRKRISNCVADYSVLYNSASFSTFKCYGVSPTKLNDLCFTNVYADSFVIRGDEVRQIAPGQTGKIADYNYKLPDDFTGCVIAWNSNNLDSKVGGNYNYLYRLFRKSNLKPFERDISTEIYQAGSTPCNGVEGFNCYFPLQSYGFQPTNGVGYQPYRVVVLSFELLHAPATVCGPKKSTNLVKNKCVNFNFNGLTGTGVLTESNKKFLPFQQFGRDIADTTDAVRDPQTLEILDITPCSFGGVSVITPGTNTSNQVAVLYQDVNCTEVPVAIHADQLTPTWRVYSTGSNVFQTRAGCLIGAEHVNNSYECDIPIGAGICASYQTQTNSPRRARSVASQSIIAYTMSLGAENSVAYSNNSIAIPTNFTISVTTEILPVSMTKTSVDCTMYICGDSTECSNLLLQYGSFCTQLNRALTGIAVEQDKNTQEVFAQVKQIYKTPPIKDFGGFNFSQILPDPSKPSKRSFIEDLLFNKVTLADAGFIKQYGDCLGDIAARDLICAQKFNGLTVLPPLLTDEMIAQYTSALLAGTITSGWTFGAGAALQIPFAMQMAYRFNGIGVTQNVLYENQKLIANQFNSAIGKIQDSLSSTASALGKLQDVVNQNAQALNTLVKQLSSNFGAISSVLNDILSRLDKVEAEVQIDRLITGRLQSLQTYVTQQLIRAAEIRASANLAATKMSECVLGQSKRVDFCGKGYHLMSFPQSAPHGVVFLHVTYVPAQEKNFTTAPAICHDGKAHFPREGVFVSNGTHWFVTQRNFYEPQIITTDNTFLSGNCDVVIGIVNNTVYDPLQPELDSGGGSGGGQIYEGKLTAEGLRFGIVASRFNHALVDRLVEGAIDAIVRHGGREEDITLVRVPGSWEIPVAAGELARKEDIDAVIAIGVLIRGATPHFDYIASEVSKGLADLSLELRKPITFGVITADTLEQAIERAGTKHGNKGWEAALSAIEMANLFKSLR

SEQ ID NO: 7703 - protein, 1307 aa, Artificial Sequence
  SARS-CoV-2/USA/UT-00034/2020__EPI_ISL_417977 spike protein (1-1147) LumSynth construct
MFVFLVLLPLVSSQCVNLTTRTQLPPAYTNSFTRGVYYPDKVFRSSVLHSTQDLFLPFFSNVTWFHAIHVSGTNGTKRFDNPVLPFNDGVYFASTEKSNIIRGWIFGTTLDSKTQSLLIVNNATNVVIKVCEFQFCNDPFLGVYYYKNNKSWMESEFRVYSSANNCTFEYVSQPFLMDLEGKQGNFKNLREFVFKNIDGYFKIYSKHTPINLVRDLPQGFSALEPLVDLPIGINITRFQTLLALHRSYLTPGDSSSGWTAGAAAYYVGYLQPRTFLLKYNENGTITDAVDCALDPLSETKCTLKSFTVEKGIYQTSNFRVQPTESIVRFPNITNLCPFGEVFNATRFASVYAWNRKRISNCVADYSVLYNSASFSTFKCYGVSPTKLNDLCFTNVYADSFVIRGDEVRQIAPGQTGKIADYNYKLPDDFTGCVIAWNSNNLDSKVGGNYNYLYRLFRKSNLKPFERDISTEIYQAGSTPCNGVEGFNCYFPLQSYGFQPTNGVGYQPYRVVVLSFELLHAPATVCGPKKSTNLVKNKCVNFNFNGLTGTGVLTESNKKFLPFQQFGRDIADTTDAVRDPQTLEILDITPCSFGGVSVITPGTNTSNQVAVLYQGVNCTEVPVAIHADQLTPTWRVYSTGSNVFQTRAGCLIGAEHVNNSYECDIPIGAGICASYQTQTNSPRRARSVASQSIIAYTMSLGAENSVAYSNNSIAIPTNFTISVTTEILPVSMTKTSVDCTMYICGDSTECSNLLLQYGSFCTQLNRALTGIAVEQDKNTQEVFAQVKQIYKTPPIKDFGGFNFSQILPDPSKPSKRSFIEDLLFNKVTLADAGFIKQYGDCLGDIAARDLICAQKFNGLTVLPPLLTDEMIAQYTSALLAGTITSGWTFGAGAALQIPFAMQMAYRFNGIGVTQNVLYENQKLIANQFNSAIGKIQDSLSSTASALGKLQDVVNQNAQALNTLVKQLSSNFGAISSVLNDILSRLDKVEAEVQIDRLITGRLQSLQTYVTQQLIRAAEIRASANLAATKMSECVLGQSKRVDFCGKGYHLMSFPQSAPHGVVFLHVTYVPAQEKNFTTAPAICHDGKAHFPREGVFVSNGTHWFVTQRNFYEPQIITTDNTFVSGNCDVVIGIVNNTVYDPLQPELDSGGGSGGGQIYEGKLTAEGLRFGIVASRFNHALVDRLVEGAIDAIVRHGGREEDITLVRVPGSWEIPVAAGELARKEDIDAVIAIGVLIRGATPHFDYIASEVSKGLADLSLELRKPITFGVITADTLEQAIERAGTKHGNKGWEAALSAIEMANLFKSLR

SEQ ID NO: 7704 - protein, 1307 aa, Artificial Sequence
  SARS-CoV-2/USA/UT-00033/2020__EPI_ISL_417976 spike protein (1-1147) LumSynth construct
MFVFLVLLPLVSSQCVNLTTRTQLPPAYTNSFTRGVYYPDKVFRSSVLHSTQDLFLPFFSNVTWFHAIHVSGTNGTKRFDNPVLPFNDGVYFASTEKSNIIRGWIFGTTLDSKTQSLLIVNNATNVVIKVCEFQFCNDPFLGVYYHKNNKSWMESEFRVYSSANNCTFEYVSQPFLMDLEGKQGNFKNLREFVFKNIDGYFKIYSKHTPINLVRDLPQGFSALEPLVDLPIGINITRFQTLLALHRSYLTPGDSSSGLTAGAAAYYVGYLQPRTFLLKYNENGTITDAVDCALDPLSETKCTLKSFTVEKGIYQTSNFRVQPTESIVRFPNITNLCPFGEVFNATRFASVYAWNRKRISNCVADYSVLYNSASFSTFKCYGVSPTKLNDLCFTNVYADSFVIRGDEVRQIAPGQTGKIADYNYKLPDDFTGCVIAWNSNNLDSKVGGNYNYLYRLFRKSNLKPFERDISTEIYQAGSTPCNGVEGFNCYFPLQSYGFQPTNGVGYQPYRVVVLSFELLHAPATVCGPKKSTNLVKNKCVNFNFNGLTGTGVLTESNKKFLPFQQFGRDIADTTDAVRDPQTLEILDITPCSFGGVSVITPGTNTSNQVAVLYQGVNCTEVPVAIHADQLTPTWRVYSTGSNVFQTRAGCLIGAEHVNNSYECDIPIGAGICASYQTQTNSPRRARSVASQSIIAYTMSLGAENSVAYSNNSIAIPTNFTISVTTEILPVSMTKTSVDCTMYICGDSTECSNLLLQYGSFCTQLNRALTGIAVEQDKNTQEVFAQVKQIYKTPPIKDFGGFNFSQILPDPSKPSKRSFIEDLLFNKVTLADAGFIKQYGDCLGDIAARDLICAQKFNGLTVLPPLLTDEMIAQYTSALLAGTITSGWTFGAGAALQIPFAMQMAYRFNGIGVTQNVLYENQKLIANQFNSAIGKIQDSLSSTASALGKLQDVVNQNAQALNTLVKQLSSNFGAISSVLNDILSRLDKVEAEVQIDRLITGRLQSLQTYVTQQLIRAAEIRASANLAATKMSECVLGQSKRVDFCGKGYHLMSFPQSAPHGVVFLHVTYVPAQEKNFTTAPAICHDGKAHFPREGVFVSNGTHWFVTQRNFYEPQIITTDNTFVSGNCDVVIGIVNNTVYDPLQPELDSGGGSGGGQIYEGKLTAEGLRFGIVASRFNHALVDRLVEGAIDAIVRHGGREEDITLVRVPGSWEIPVAAGELARKEDIDAVIAIGVLIRGATPHFDYIASEVSKGLADLSLELRKPITFGVITADTLEQAIERAGTKHGNKGWEAALSAIEMANLFKSLR

SEQ ID NO: 7705 - protein, 1307 aa, Artificial Sequence
  SARS-CoV-2/USA/WI-13/2020__EPI_ISL_417516 spike protein (1-1147) LumSynth construct
MFVFLVLLPLVSSQCVNLTTRTQLPPAYTNSFTRGVYYPDKVFRSSVLHSTQDLFLPFFSNVTWFHAIHVSGTNGTKRFDNPVLPFNDGVYFASTEKSNIIRGWIFGTTLDSKTQSLLIVNNATNVVIKVCEFQFCNDPFLGVYYHKNNKSWMESEFRVYSSANNCTFEYVSQPFLMDLEGKQGNFKNLREFVFKNIDGYFKIYSKHTPINLVRDLPQGFSALEPLVDLPIGINITRFQTLLALHRSYLTPGDSSSGWTAGAAAYYVGYLQPRTFLLKYNENGTITDAVDCALDPLSETKCTLKSFTVEKGIYQTSNFRVLPTESIVRFPNITNLCPFGEVFNATRFASVYAWNRKRISNCVADYSVLYNSASFSTFKCYGVSPTKLNDLCFTNVYADSFVIRGDEVRQIAPGQTGKIADYNYKLPDDFTGCVIAWNSNNLDSKVGGNYNYLYRLFRKSNLKPFERDISTEIYQAGSTPCNGVEGFNCYFPLQSYGFQPTNGVGYQPYRVVVLSFELLHAPATVCGPKKSTNLVKNKCVNFNFNGLTGTGVLTESNKKFLPFQQFGRDIADTTDAVRDPQTLEILDITPCSFGGVSVITPGTNTSNQVAVLYQGVNCTEVPVAIHADQLTPTWRVYSTGSNVFQTRAGCLIGAEHVNNSYECDIPIGAGICASYQTQTNSPRRARSVASQSIIAYTMSLGAENSVAYSNNSIAIPTNFTISVTTEILPVSMTKTSVDCTMYICGDSTECSNLLLQYGSFCTQLNRALTGIAVEQDKNTQEVFAQVKQIYKTPPIKDFGGFNFSQILPDPSKPSKRSFIEDLLFNKVTLADAGFIKQYGDCLGDIAARDLICAQKFNGLTVLPPLLTDEMIAQYTSALLAGTITSGWTFGAGAALQIPFAMQMAYRFNGIGVTQNVLYENQKLIANQFNSAIGKIQDSLSSTASALGKLQDVVNQNAQALNTLVKQLSSNFGAISSVLNDILSRLDKVEAEVQIDRLITGRLQSLQTYVTQQLIRAAEIRASANLAATKMSECVLGQSKRVDFCGKGYHLMSFPQSAPHGVVFLHVTYVPAQEKNFTTAPAICHDGKAHFPREGVFVSNGTHWFVTQRNFYEPQIITTDNTFVSGNCDVVIGIVNNTVYDPLQPELDSGGGSGGGQIYEGKLTAEGLRFGIVASRFNHALVDRLVEGAIDAIVRHGGREEDITLVRVPGSWEIPVAAGELARKEDIDAVIAIGVLIRGATPHFDYIASEVSKGLADLSLELRKPITFGVITADTLEQAIERAGTKHGNKGWEAALSAIEMANLFKSLR

SEQ ID NO: 7706 - protein, 1306 aa, Artificial Sequence
  SARS-CoV-2/India/1-27/2020__EPI_ISL_413522 spike protein (1-1146) LumSynth construct
MFVFLVLLPLVSSQCVNLTTRTQLPPAYTNSFTRGVYYPDKVFRSSVLHSTQDLFLPFFSNVTWFHAIHVSGTNGTKRFDNPVLPFNDGVYFASTEKSNIIRGWIFGTTLDSKTQSLLIVNNATNVVIKVCEFQFCNDPFLGVYHKNNKSWMESEFRVYSSANNCTFEYVSQPFLMDLEGKQGNFKNLREFVFKNIDGYFKIYSKHTPINLVRDLPQGFSALEPLVDLPIGINITRFQTLLALHRSYLTPGDSSSGWTAGAAAYYVGYLQPRTFLLKYNENGTITDAVDCALDPLSETKCTLKSFTVEKGIYQTSNFRVQPTESIVRFPNITNLCPFGEVFNATRFASVYAWNRKRISNCVADYSVLYNSASFSTFKCYGVSPTKLNDLCFTNVYADSFVIRGDEVIQIAPGQTGKIADYNYKLPDDFTGCVIAWNSNNLDSKVGGNYNYLYRLFRKSNLKPFERDISTEIYQAGSTPCNGVEGFNCYFPLQSYGFQPTNGVGYQPYRVVVLSFELLHAPATVCGPKKSTNLVKNKCVNFNFNGLTGTGVLTESNKKFLPFQQFGRDIADTTDAVRDPQTLEILDITPCSFGGVSVITPGTNTSNQVAVLYQDVNCTEVPVAIHADQLTPTWRVYSTGSNVFQTRAGCLIGAEHVNNSYECDIPIGAGICASYQTQTNSPRRARSVASQSIIAYTMSLGAENSVAYSNNSIAIPTNFTISVTTEILPVSMTKTSVDCTMYICGDSTECSNLLLQYGSFCTQLNRALTGIAVEQDKNTQEVFAQVKQIYKTPPIKDFGGFNFSQILPDPSKPSKRSFIEDLLFNKVTLADAGFIKQYGDCLGDIAARDLICAQKFNGLTVLPPLLTDEMIAQYTSALLAGTITSGWTFGAGAALQIPFAMQMAYRFNGIGVTQNVLYENQKLIANQFNSAIGKIQDSLSSTASALGKLQDVVNQNAQALNTLVKQLSSNFGAISSVLNDILSRLDKVEAEVQIDRLITGRLQSLQTYVTQQLIRAAEIRASANLAATKMSECVLGQSKRVDFCGKGYHLMSFPQSAPHGVVFLHVTYVPAQEKNFTTAPAICHDGKAHFPREGVFVSNGTHWFVTQRNFYEPQIITTDNTFVSGNCDVVIGIVNNTVYDPLQPELDSGGGSGGGQIYEGKLTAEGLRFGIVASRFNHALVDRLVEGAIDAIVRHGGREEDITLVRVPGSWEIPVAAGELARKEDIDAVIAIGVLIRGATPHFDYIASEVSKGLADLSLELRKPITFGVITADTLEQAIERAGTKHGNKGWEAALSAIEMANLFKSLR

SEQ ID NO: 7707 - protein, 1301 aa, Artificial Sequence
  SARS-CoV-2/pangolin/Guangxi/P4L/2017__EPI_ISL_410538 spike protein (1-1141) LumSynth construct
MFVFLFVLPLVSSQCVNLTTRTGIPPGYTNSSTRGVYYPDKVFRSSILHLTQDLFLPFFSNVTWFNTINYQGGFKKFDNPVLPFNDGVYFASTEKSNIIRGWIFGTTLDARTQSLLIVNNATNVVIKVCEFQFCTDPFLGVYYHNNNKTWVENEFRVYSSANNCTFEYISQPFLMDLEGKQGNFKNLREFVFKNVDGYFKIYSKHTPIDLVRDLPRGFAALEPLVDLPIGINITRFQTLLALHRSYLTPGNLESGWTTGAAAYYVGYLQQRTFLLSYNQNGTITDAVDCSLDPLSETKCTLKSLTVEKGIYQTSNFRVQPTISIVRFPNITNLCPFGEVFNASKFASVYAWNRKRISNCVADYSVLYNSTSFSTFKCYGVSPTKLNDLCFTNVYADSFVVKGDEVRQIAPGQTGVIADYNYKLPDDFTGCVIAWNSVKQDALTGGNYGYLYRLFRKSKLKPFERDISTEIYQAGSTPCNGQVGLNCYYPLERYGFHPTTGVNYQPFRVVVLSFELLNGPATVCGPKLSTTLVKDKCVNFNFNGLTGTGVLTTSKKQFLPFQQFGRDISDTTDAVRDPQTLEILDITPCSFGGVSVITPGTNTSNQVAVLYQDVNCTEVPMAIHAEQLTPAWRVYSAGANVFQTRAGCLVGAEHVNNSYECDIPVGAGICASYHSMSSLRSVNQRSIIAYTMSLGAENSVAYSNNSIAIPTNFTISVTTEILPVSMTKTSVDCTMYICGDSIECSNLLLQYGSFCTQLNRALTGIAVEQDKNTQEVFAQVKQIYKTPPIKDFGGFNFSQILPDPSKPSKRSFIEDLLFNKVTLADAGFIKQYGDCLGDIAARDLICAQKFNGLTVLPPLLTDEMIAQYTSALLAGTITSGWTFGAGAALQIPFAMQMAYRFNGIGVTQNVLYENQKLIANQFNSAIGKIQDSLSSTASALGKLQDVVNQNAQALNTLVKQLSSNFGAISSVLNDILSRLDKVEAEVQIDRLITGRLQSLQTYVTQQLIRAAEIRASANLAATKMSECVLGQSKRVDFCGKGYHLMSFPQSAPHGVVFLHVTYVPAQEKNFTTAPAICHEGKAHFPREGVFVSNGTHWFITQRNFYEPQIITTDNTFVSGSCDVVIGIVNNTVYDPLQPELDSGGGSGGGQIYEGKLTAEGLRFGIVASRFNHALVDRLVEGAIDAIVRHGGREEDITLVRVPGSWEIPVAAGELARKEDIDAVIAIGVLIRGATPHFDYIASEVSKGLADLSLELRKPITFGVITADTLEQAIERAGTKHGNKGWEAALSAIEMANLFKSLR

SEQ ID NO: 7708 - protein, 1301 aa, Artificial Sequence
  SARS-CoV-2/pangolin/Guangxi/P5L/2017__EPI_ISL_410540 spike protein (1-1141) LumSynth construct
MFVFLFVLPLVSSQCVNLTTRTGIPPGYTNSSTRGVYYPDKVFRSSILHLTQDLFLPFFSNVTWFNTINYQGGFKKFDNPVLPFNDGVYFASTEKSNIIRGWIFGTTLDARTQSLLIVNNATNVVIKVCEFQFCTDPFLGVYYHNNNKTWVENEFRVYSSANNCTFEYISQPFLMDLEGKQGNFKNLREFVFKNVDGYFKIYSKHTPIDLVRDLPRGFAALEPLVDLPIGINITRFQTLLALHRSYLTPGKLESGWTTGAAAYYVGYLQQRTFLLSYNQNGTITDAVDCSLDPLSETKCTLKSLTVEKGIYQTSNFRVQPTISIVRFPNITNLCPFGEVFNASKFASVYAWNRKRISNCVADYSVLYNSTSFSTFKCYGVSPTKLNDLCFTNVYADSFVVKGDEVRQIAPGQTGVIADYNYKLPDDFTGCVIAWNSVKQDALTGGNYGYLYRLFRKSKLKPFERDISTEIYQAGSTPCNGQVGLNCYYPLERYGFHPTTGVNYQPFRVVVLSFELLNGPATVCGPKLSTTLVKDKCVNFNFNGLTGTGVLTTSKKQFLPFQQFGRDISDTTDAVRDPQTLEILDITPCSFGGVSVITPGTNTSNQVAVLYQDVNCTEVPMAIHAEQLTPAWRVYSAGANVFQTRAGCLVGAEHVNNSYECDIPVGAGICASYHSMSSFRSVNQRSIIAYTMSLGAENSVAYSNNSIAIPTNFTISVTTEILPVSMTKTSVDCTMYICGDSIECSNLLLQYGSFCTQLNRALTGIAVEQDKNTQEVFAQVKQIYKTPPIKDFGGFNFSQILPDPSKPSKRSFIEDLLFNKVTLADAGFIKQYGDCLGDIAARDLICAQKFNGLTVLPPLLTDEMIAQYTSALLAGTITSGWTFGAGAALQIPFAMQMAYRFNGIGVTQNVLYENQKLIANQFNSAIGKIQDSLSSTASALGKLQDVVNQNAQALNTLVKQLSSNFGAISSVLNDILSRLDKVEAEVQIDRLITGRLQSLQTYVTQQLIRAAEIRASANLAATKMSECVLGQSKRVDFCGKGYHLMSFPQSAPHGVVFLHVTYVPAQEKNFTTAPAICHEGKAHFPREGVFVSNGTHWFITQRNFYEPQIITTDNTFVSGSCDVVIGIVNNTVYDPLQPELDSGGGSGGGQIYEGKLTAEGLRFGIVASRFNHALVDRLVEGAIDAIVRHGGREEDITLVRVPGSWEIPVAAGELARKEDIDAVIAIGVLIRGATPHFDYIASEVSKGLADLSLELRKPITFGVITADTLEQAIERAGTKHGNKGWEAALSAIEMANLFKSLR

SEQ ID NO: 7709 - protein, 1301 aa, Artificial Sequence
  SARS-CoV-2/pangolin/Guangxi/P5E/2017__EPI_ISL_410541 spike protein (1-1141) LumSynth construct
MFVFLFVLPLVSSQCVNLTTRTGIPPGYTNSSTRGVYYPDKVFRSSILHLTQDLFLPFFSNVTWFNTITYQGGSKKFDNPVLPFNDGVYFASTEKSNIIRGWIFGTTLDARTQSLLIVNNATNVVIKVCEFQFCTDPFLGVYYHNNNKTWVENEFRVYSSANNCTFEYISQPFLMDLEGKQGNFKNLREFVFKNVDGYFKIYSKHTPIDLVRDLPRGFAALEPLVDLPIGINITRFQTLLALHRSYLTPGKLESGWTTGAAAYYVGYLQQRTFLLSYNQNGTITDAVDCSLDPLSETKCTLKSLTVEKGIYQTSNFRVQPTISIVRFPNITNLCPFGEVFNASKFASVYAWNRKRISNCVADYSVLYNSTSFSTFKCYGVSPTKLNDLCFTNVYADSFVVKGDEVRQIAPGQTGVIADYNYKLPDDFTGCVIAWNSVKQDALTGDNYGYLYRLFRKSKLKPFERDISTEIYQAGSTPCNGQVGLNCYYPLERYGFHPTTGVNYQPFRVVVLSFELLNGPATVCGPKLSTTLVKDKCVNFNFNGLTGTGVLTTSKKQFLPFQQFGRDISDTTDAVRDPQTLEILDITPCSFGGVSVITPGTNTSNQVAVLYQDVNCTEVPMAIHAEQLTPAWRVYSAGANVFQTRAGCLVGAEHVNNSYECDIPVGAGICASYHSMSSFRSVNQRSIIAYTMSLGAENSVAYSNNSIAIPTNFTISVTTEILPVSMTKTSVDCTMYICGDSIECSNLLLQYGSFCTQLNRALTGIAVEQDKNTQEVFAQVKQIYKTPPIKDFGGFNFSQILPDPSKPSKRSFIEDLLFNKVTLADAGFIKQYGDCLGDIAARDLICAQKFNGLTVLPPLLTDEMIAQYTSALLAGTITSGWTFGAGAALQIPFAMQMAYRFNGIGVTQNVLYENQKLIANQFNSAIGKIQDSLSSTASALGKLQDVVNQNAQALNTLVKQLSSNFGAISSVLNDILSRLDKVEAEVQIDRLITGRLQSLQTYVTQQLIRAAEIRASANLAATKMSECVLGQSKRVDFCGKGYHLMSFPQSAPHGVVFLHVTYVPAQEKNFTTAPAICHEGKAHFPREGVFVSNGTHWFITQRNFYEPQIITTDNTFVSGSCDVVIGIVNNTVYDPLQPELDSGGGSGGGQIYEGKLTAEGLRFGIVASRFNHALVDRLVEGAIDAIVRHGGREEDITLVRVPGSWEIPVAAGELARKEDIDAVIAIGVLIRGATPHFDYIASEVSKGLADLSLELRKPITFGVITADTLEQAIERAGTKHGNKGWEAALSAIEMANLFKSLR

SEQ ID NO: 7710 - protein, 1299 aa, Artificial Sequence
  SARS-CoV-2/pangolin/Guangxi/P1E/2017__EPI_ISL_410539 spike protein (1-1139) LumSynth construct
MFVFLFVLPLVSSQCVNLTTRTGIQPGYTNSSTRGVYYPDKVFRSSILHLTQDLFLPFFSNVTWFNTINYQGGFKKFDNPVLPFNDGVYFASTEKSNIIRGWIFGTTLDARTQSLLIVNNATNVVIKVCEFQFCTDPFLGVYYHNNNKTWVENEFRVYSSANNCTFEYISQPFLMDLEGKQGNFKNLREFVFKNVDGYFKIYSKHTPIDLVRDLPRGFAALEPLVDLPIGINITRFQTLLALHRSYLTPGKLESGWTTGAAAYYVGYLQQRTFLLSYNQNGTITDAVDCSLDPLSETKCTLKSLTVEKGIYQTSNFRVQPTISIVRFPNITNLCPFGEVFNASKFASVYAWNRKRISNCVADYSVLYNSTSFSTFKCYGVSPTKLNDLCFTNVYADSFVVKGDEVRQIAPGQTGVIADYNYKLPDDFTGCVIAWNSVKQDALTGGNYLYRLFRKSKLKPFERDISTEIYQAGSTPCNGQVGLNCYYPLERYGFHPTTGVNYQPFRVVVLSFELLNGPATVCGPKLSTTLVKDKCVNFNFNGLTGTGVLTTSKKQFLPFQQFGRDISDTTDAVRDPQTLEILDITPCSFGGVSVITPGTNTSNQVAVLYQDVNCTEVPMAIHAEQLTPAWRVYSAGANVFQTRAGCLVGAEHVNNSYECDIPVGAGICASYHSMSSLRSVNQRSIIAYTMSLGAENSVAYSNNSIAIPTNFTISVTTEILPVSMTKTSVDCTMYICGDSIECSNLLLQYGSFCTQLNRALTGIAVEQDKNTQEVFAQVKQIYKTPPIKDFGGFNFSQILPDPSKPSKRSFIEDLLFNKVTLADAGFIKQYGDCLGDIAARDLICAQKFNGLTVLPPLLTDEMIAQYTSALLAGTITSGWTFGAGAALQIPFAMQMAYRFNGIGVTQNVLYENQKLIANQFNSAIGKIQDSLSSTASALGKLQDVVNQNAQALNTLVKQLSSNFGAISSVLNDILSRLDKVEAEVQIDRLITGRLQSLQTYVTQQLIRAAEIRASANLAATKMSECVLGQSKRVDFCGKGYHLMSFPQSAPHGVVFLHVTYVPAQEKNFTTAPAICHEGKAHFPREGVFVSNGTHWFITQRNFYEPQIITTDNTFVSGSCDVVIGIVNNTVYDPLQPELDSGGGSGGGQIYEGKLTAEGLRFGIVASRFNHALVDRLVEGAIDAIVRHGGREEDITLVRVPGSWEIPVAAGELARKEDIDAVIAIGVLIRGATPHFDYIASEVSKGLADLSLELRKPITFGVITADTLEQAIERAGTKHGNKGWEAALSAIEMANLFKSLR

SEQ ID NO: 7711 - protein, 1307 aa, Artificial Sequence
  SARS-CoV-2/Wuhan/WIV05/2019__EPI_ISL_402128 spike protein (1-1147)(K986P_V987P) LumSynth construct
MFVFLVLLPLVSSQCVNLTTRTQLPPAYTNSFTRGVYYPDKVFRSSVLHSTQDLFLPFFSNVTWFHAIHVSGTNGTKRFDNPVLPFNDGVYFASTEKSNIIRGWIFGTTLDSKTQSLLIVNNATNVVIKVCEFQFCNDPFLGVYYHKNNKSWMESEFRVYSSANNCTFEYVSQPFLMDLEGKQGNFKNLREFVFKNIDGYFKIYSKHTPINLVRDLPQGFSALEPLVDLPIGINITRFQTLLALHRSYLTPGDSSSGWTAGAAAYYVGYLQPRTFLLKYNENGTITDAVDCALDPLSETKCTLKSFTVEKGIYQTSNFRVQPTESIVRFPNITNLCPFGEVFNATRFASVYAWNRKRISNCVADYSVLYNSASFSTFKCYGVSPTKLNDLCFTNVYADSFVIRGDEVRQIAPGQTGKIADYNYKLPDDFTGCVIAWNSNNLDSKVGGNYNYLYRLFRKSNLKPFERDISTEIYQAGSTPCNGVEGFNCYFPLQSYGFQPTNGVGYQPYRVVVLSFELLHAPATVCGPKKSTNLVKNKCVNFNFNGLTGTGVLTESNKKFLPFQQFGRDIADTTDAVRDPQTLEILDITPCSFGGVSVITPGTNTSNQVAVLYQDVNCTEVPVAIHADQLTPTWRVYSTGSNVFQTRAGCLIGAEHVNNSYECDIPIGAGICASYQTQTNSPRRARSVASQSIIAYTMSLGAENSVAYSNNSIAIPTNFTISVTTEILPVSMTKTSVDCTMYICGDSTECSNLLLQYGSFCTQLNRALTGIAVEQDKNTQEVFAQVKQIYKTPPIKDFGGFNFSQILPDPSKPSKRSFIEDLLFNKVTLADAGFIKQYGDCLGDIAARDLICAQKFNGLTVLPPLLTDEMIAQYTSALLAGTITSGWTFGAGAALQIPFAMQMAYRFNGIGVTQNVLYENQKLIANQFNSAIGKIQDSLSSTASALGKLQDVVNQNAQALNTLVKQLSSNFGAISSVLNDILSRLDPPEAEVQIDRLITGRLQSLQTYVTQQLIRAAEIRASANLAATKMSECVLGQSKRVDFCGKGYHLMSFPQSAPHGVVFLHVTYVPAQEKNFTTAPAICHDGKAHFPREGVFVSNGTHWFVTQRNFYEPQIITTDNTFVSGNCDVVIGIVNNTVYDPLQPELDSGGGSGGGQIYEGKLTAEGLRFGIVASRFNHALVDRLVEGAIDAIVRHGGREEDITLVRVPGSWEIPVAAGELARKEDIDAVIAIGVLIRGATPHFDYIASEVSKGLADLSLELRKPITFGVITADTLEQAIERAGTKHGNKGWEAALSAIEMANLFKSLR

SEQ ID NO: 7712 - protein, 1303 aa, Artificial Sequence
  SARS-CoV-2/bat/Yunnan/RaTG13/2013__EPI_ISL_402131 spike protein (1-1143)(K982P_V983P) LumSynth construct
MFVFLVLLPLVSSQCVNLTTRTQLPPAYTNSSTRGVYYPDKVFRSSVLHLTQDLFLPFFSNVTWFHAIHVSGTNGIKRFDNPVLPFNDGVYFASTEKSNIIRGWIFGTTLDSKTQSLLIVNNATNVVIKVCEFQFCNDPFLGVYYHKNNKSWMESEFRVYSSANNCTFEYVSQPFLMDLEGKQGNFKNLREFVFKNIDGYFKIYSKHTPINLVRDLPPGFSALEPLVDLPIGINITRFQTLLALHRSYLTPGDSSSGWTAGAAAYYVGYLQPRTFLLKYNENGTITDAVDCALDPLSETKCTLKSFTVEKGIYQTSNFRVQPTDSIVRFPNITNLCPFGEVFNATTFASVYAWNRKRISNCVADYSVLYNSTSFSTFKCYGVSPTKLNDLCFTNVYADSFVITGDEVRQIAPGQTGKIADYNYKLPDDFTGCVIAWNSKHIDAKEGGNFNYLYRLFRKANLKPFERDISTEIYQAGSKPCNGQTGLNCYYPLYRYGFYPTDGVGHQPYRVVVLSFELLNAPATVCGPKKSTNLVKNKCVNFNFNGLTGTGVLTESNKKFLPFQQFGRDIADTTDAVRDPQTLEILDITPCSFGGVSVITPGTNASNQVAVLYQDVNCTEVPVAIHADQLTPTWRVYSTGSNVFQTRAGCLIGAEHVNNSYECDIPIGAGICASYQTQTNSRSVASQSIIAYTMSLGAENSVAYSNNSIAIPTNFTISVTTEILPVSMTKTSVDCTMYICGDSTECSNLLLQYGSFCTQLNRALTGIAVEQDKNTQEVFAQVKQIYKTPPIKDFGGFNFSQILPDPSKPSKRSFIEDLLFNKVTLADAGFIKQYGDCLGDIAARDLICAQKFNGLTVLPPLLTDEMIAQYTSALLAGTITSGWTFGAGAALQIPFAMQMAYRFNGIGVTQNVLYENQKLIANQFNSAIGKIQDSLSSTASALGKLQDVVNQNAQALNTLVKQLSSNFGAISSVLNDILSRLDPPEAEVQIDRLITGRLQSLQTYVTQQLIRAAEIRASANLAATKMSECVLGQSKRVDFCGKGYHLMSFPQSAPHGVVFLHVTYVPAQEKNFTTAPAICHDGKAHFPREGVFVSNGTHWFVTQRNFYEPQIITTDNTFVSGSCDVVIGIVNNTVYDPLQPELDSGGGSGGGQIYEGKLTAEGLRFGIVASRFNHALVDRLVEGAIDAIVRHGGREEDITLVRVPGSWEIPVAAGELARKEDIDAVIAIGVLIRGATPHFDYIASEVSKGLADLSLELRKPITFGVITADTLEQAIERAGTKHGNKGWEAALSAIEMANLFKSLR

SEQ ID NO: 7713 - protein, 1307 aa, Artificial Sequence
  SARS-CoV-2/Wuhan/HBCDC-HB-01/2019__EPI_ISL_402132 spike protein (1-1147)(K986P_V987P) LumSynth construct
MFVFLVLLPLVSSQCVNLTTRTQLPPAYTNSITRGVYYPDKVFRSSVLHSTQDLFLPFFSNVTWFHAIHVSGTNGTKRFDNPVLPFNDGVYFASTEKSNIIRGWIFGTTLDSKTQSLLIVNNATNVVIKVCEFQFCNDPFLGVYYHKNNKSWMESEFRVYSSANNCTFEYVSQPFLMDLEGKQGNFKNLREFVFKNIDGYFKIYSKHTPINLVRDLPQGFSALEPLVDLPIGINITRFQTLLALHRSYLTPGDSSSGWTAGAAAYYVGYLQPRTFLLKYNENGTITDAVDCALDPLSETKCTLKSFTVEKGIYQTSNFRVQPTESIVRFPNITNLCPFGEVFNATRFASVYAWNRKRISNCVADYSVLYNSASFSTFKCYGVSPTKLNDLCFTNVYADSFVIRGDEVRQIAPGQTGKIADYNYKLPDDFTGCVIAWNSNNLDSKVGGNYNYLYRLFRKSNLKPFERDISTEIYQAGSTPCNGVEGFNCYFPLQSYGFQPTNGVGYQPYRVVVLSFELLHAPATVCGPKKSTNLVKNKCVNFNFNGLTGTGVLTESNKKFLPFQQFGRDIADTTDAVRDPQTLEILDITPCSFGGVSVITPGTNTSNQVAVLYQDVNCTEVPVAIHADQLTPTWRVYSTGSNVFQTRAGCLIGAEHVNNSYECDIPIGAGICASYQTQTNSPRRARSVASQSIIAYTMSLGAENSVAYSNNSIAIPTNFTISVTTEILPVSMTKTSVDCTMYICGDSTECSNLLLQYGSFCTQLNRALTGIAVEQDKNTQEVFAQVKQIYKTPPIKDFGGFNFSQILPDPSKPSKRSFIEDLLFNKVTLADAGFIKQYGDCLGDIAARDLICAQKFNGLTVLPPLLTDEMIAQYTSALLAGTITSGWTFGAGAALQIPFAMQMAYRFNGIGVTQNVLYENQKLIANQFNSAIGKIQDSLSSTASALGKLQDVVNQNAQALNTLVKQLSSNFGAISSVLNDILSRLDPPEAEVQIDRLITGRLQSLQTYVTQQLIRAAEIRASANLAATKMSECVLGQSKRVDFCGKGYHLMSFPQSAPHGVVFLHVTYVPAQEKNFTTAPAICHDGKAHFPREGVFVSNGTHWFVTQRNFYEPQIITTDNTFVSGNCDVVIGIVNNTVYDPLQPELDSGGGSGGGQIYEGKLTAEGLRFGIVASRFNHALVDRLVEGAIDAIVRHGGREEDITLVRVPGSWEIPVAAGELARKEDIDAVIAIGVLIRGATPHFDYIASEVSKGLADLSLELRKPITFGVITADTLEQAIERAGTKHGNKGWEAALSAIEMANLFKSLR

SEQ ID NO: 7714 - protein, 1307 aa, Artificial Sequence
  SARS-CoV-2/Guangdong/20SF028/2020__EPI_ISL_403936 spike protein (1-1147)(K986P_V987P) LumSynth construct
MFVFLVLLPLVSSQCVNLTTRTQLPPAYTNSFTRGVYYPDKVFRSSVLYSTQDLFLPFFSNVTWFHAIHVSGTNGTKRFDNPVLPFNDGVYFASTEKSNIIRGWIFGTTLDSKTQSLLIVNNATNVVIKVCEFQFCNDPFLGVYYHKNNKSWMESEFRVYSSANNCTFEYVSQPFLMDLEGKQGNFKNLREFVFKNIDGYFKIYSKHTPINLVRDLPQGFSALEPLVDLPIGINITRFQTLLALHRSYLTPGDSSSGWTAGAAAYYVGYLQPRTFLLKYNENGTITDAVDCALDPLSETKCTLKSFTVEKGIYQTSNFRVQPTESIVRFPNITNLCPFGEVFNATRFASVYAWNRKRISNCVADYSVLYNSASFSTFKCYGVSPTKLNDLCFTNVYADSFVIRGDEVRQIAPGQTGKIADYNYKLPDDFTGCVIAWNSNNLDSKVGGNYNYLYRLFRKSNLKPFERDISTEIYQAGSTPCNGVEGFNCYFPLQSYGFQPTNGVGYQPYRVVVLSFELLHAPATVCGPKKSTNLVKNKCVNFNFNGLTGTGVLTESNKKFLPFQQFGRDIADTTDAVRDPQTLEILDITPCSFGGVSVITPGTNTSNQVAVLYQDVNCTEVPVAIHADQLTPTWRVYSTGSNVFQTRAGCLIGAEHVNNSYECDIPIGAGICASYQTQTNSPRRARSVASQSIIAYTMSLGAENSVAYSNNSIAIPTNFTISVTTEILPVSMTKTSVDCTMYICGDSTECSNLLLQYGSFCTQLNRALTGIAVEQDKNTQEVFAQVKQIYKTPPIKDFGGFNFSQILPDPSKPSKRSFIEDLLFNKVTLADAGFIKQYGDCLGDIAARDLICAQKFNGLTVLPPLLTDEMIAQYTSALLAGTITSGWTFGAGAALQIPFAMQMAYRFNGIGVTQNVLYENQKLIANQFNSAIGKIQDSLSSTASALGKLQDVVNQNAQALNTLVKQLSSNFGAISSVLNDILSRLDPPEAEVQIDRLITGRLQSLQTYVTQQLIRAAEIRASANLAATKMSECVLGQSKRVDFCGKGYHLMSFPQSAPHGVVFLHVTYVPAQEKNFTTAPAICHDGKAHFPREGVFVSNGTHWFVTQRNFYEPQIITTDNTFVSGNCDVVIGIVNNTVYDPLQPELDSGGGSGGGQIYEGKLTAEGLRFGIVASRFNHALVDRLVEGAIDAIVRHGGREEDITLVRVPGSWEIPVAAGELARKEDIDAVIAIGVLIRGATPHFDYIASEVSKGLADLSLELRKPITFGVITADTLEQAIERAGTKHGNKGWEAALSAIEMANLFKSLR

SEQ ID NO: 7715 - protein, 1307 aa, Artificial Sequence
  SARS-CoV-2/Shenzhen/SZTH-001/2020__EPI_ISL_406592 spike protein (1-1147)(K986P_V987P) LumSynth construct
MFVFLVLLPLVSSQCVNLTTRTQLPPAYTNSFTRGVYYPDKVFRSSVLHSTQDLFLPFFSNVTWFHAIHVSGTNGTKRFDNPVLPFNDGVYFASTEKSNIIRGWIFGTTLDSKTQSLLIVNNATNVVIKVCEFQFCNDPFLGVYYHKNNKSWMESEFRVYSSANNCTFEYVSQPFLMDLEGKQGNFKNLREFVFKNIDGYFKIYSKHTPINLVRDLPQGFSALEPLVDLPIGINITRFQTLLALHRSYLTPGDSSSGWTAGAAAYYVGYLQPRTFLLKYNENGTITDAVDCALDPLSETKCTLKSFTVEKGIYQTSNFRVQPTESIVRFPNITNLCPFGEVFNATRFASVYAWNRKRISNCVADYSVLYNSASFSTFKCYGVSPTKLNDLCFTNVYADSFVIRGDEVRQIAPGQTGKIADYNYKLPDDFTGCVIAWNSNNLDSKVGGNYNYLYRLFRKSNLKPFERDISTEIYQAGSTPCNGVEGFNCYFPLQSYGFQPTNGVGYQPYRVVVLSFELLHAPATVCGPKKSTNLVKNKCVNFNFNGLTGTGVLTESNKKFLPFQQFGRDIADTTDAVRDPQTLEILDITPCSFGGVSVITPGTNTSNQVAVLYQDVNCTEVPVAIHADQLTPTWRVYSTGSNVFQTRAGCLIGAEHVNNSYECDIPIGAGICASYQTQTNSPRRARSVASQSIIAYTMSLGAENSVAYSNNSIAIPTNFTISVTTEILPVSMTKTSVDCTMYICGDSTECSNLLLQYGSFCTQLNRALTGIAVEQDKNTQEVFAQVKQIYKTPPIKDFGGFNFSQILPDPSKPSKRSFIEDLLFNKVTLADAGFIKQYGDCLGDIAARDLICAQKFNGLTVLPPLLTDEMIAQYTSALLAGTITSGWTFGAGAALQIPFAMQMAYRFNGIGVTQNVLYENQKLIANQFNSAIGKIQDSLSSTASALGKLQDVVNQNAQALNTLVKQLSSNFGAISSVLNDILSRLDPPEAEVQIDRLITGRLQSLQTYVTQQLIRAAEIRASANLAATKMSECVLGQSKRVDFCGKGYHLMSFPQSAPHGVVFLHVTYVPAQEKNFTTAPAICHDGKAHFPREGVFVSNGTHWFVTQRNFYEPQIITTDNTFVSGNCDVLIGIVNNTVYDPLQPELDSGGGSGGGQIYEGKLTAEGLRFGIVASRFNHALVDRLVEGAIDAIVRHGGREEDITLVRVPGSWEIPVAAGELARKEDIDAVIAIGVLIRGATPHFDYIASEVSKGLADLSLELRKPITFGVITADTLEQAIERAGTKHGNKGWEAALSAIEMANLFKSLR

SEQ ID NO: 7716 - protein, 1307 aa, Artificial Sequence
  SARS-CoV-2/Shenzhen/SZTH-004/2020__EPI_ISL_406595 spike protein (1-1147)(K986P_V987P) LumSynth construct
MFVFLVLLPLVSSQCVNLTTRTQLPPAYTNSFTRGVYYPDKVFRSSVLHSTQDLFLPFFSNVTWFHAIHVSGTNGTKRFDNPVLPFNDGVYFASTEKSNIIRGWIFGTTLDSKTQSLLIVNNATNVVIKVCEFQFCNDPFLGVYYHKNNKSWMESEFRVYSSANNCTFEYVSQPFLMDLEGKQGNFKNLREFVFKNIDGYFKIYSKHTPINLVRDLPQGFSALEPLVDLPIGINITRFQTLLALHRSYLTPGDSSSGWTAGAAAYYVGYLQPRTFLLKYNENGTITDAVDCALDPLSETKCTLKSFTVEKGIYQTSNFRVQPTESIVRFPNITNLCPFGEVFNATRFASVYAWDRKRISNCVAYYSVLYNSASFSTFKCYGVSPTKLNDLCFTNVYADSFVIRGDEVRQIAPGQTGKIADYNYKLPDDFTGCVIAWNSNNLDSKVGGNYNYLYRLFRKSNLKPFERDISTEIYQAGSTPCNGVEGFNCYFPLQSYGFQPTNGVGYQPYRVVVLSFELLHAPATVCGPKKSTNLVKNKCVNFNFNGLTGTGVLTESNKKFLPFQQFGRDIADTTDAVRDPQTLEILDITPCSFGGVSVITPGTNTSNQVAVLYQDVNCTEVPVAIHADQLTPTWRVYSTGSNVFQTRAGCLIGAEHVNNSYECDIPIGAGICASYQTQTNSPRRARSVASQSIIAYTMSLGAENSVAYSNNSIAIPTNFTISVTTEILPVSMTKTSVDCTMYICGDSTECSNLLLQYGSFCTQLNRALTGIAVEQDKNTQEVFAQVKQIYKTPPIKDFGGFNFSQILPDPSKPSKRSFIEDLLFNKVTLADAGFIKQYGDCLGDIAARDLICAQKFNGLTVLPPLLTDEMIAQYTSALLAGTITSGWTFGAGAALQIPFAMQMAYRFNGIGVTQNVLYENQKLIANQFNSAIGKIQDSLSSTASALGKLQDVVNQNAQALNTLVKQLSSNFGAISSVLNDILSRLDPPEAEVQIDRLITGRLQSLQTYVTQQLIRAAEIRASANLAATKMSECVLGQSKRVDFCGKGYHLMSFPQSAPHGVVFLHVTYVPAQEKNFTTAPAICHDGKAHFPREGVFVSNGTHWFVTQRNFYEPQIITTDNTFVSGNCDVVIGIVNNTVYDPLQPELDSGGGSGGGQIYEGKLTAEGLRFGIVASRFNHALVDRLVEGAIDAIVRHGGREEDITLVRVPGSWEIPVAAGELARKEDIDAVIAIGVLIRGATPHFDYIASEVSKGLADLSLELRKPITFGVITADTLEQAIERAGTKHGNKGWEAALSAIEMANLFKSLR

SEQ ID NO: 7717 - protein, 1307 aa, Artificial Sequence
  SARS-CoV-2/France/IDF0372/2020__EPI_ISL_406596 spike protein (1-1147)(K986P_V987P) LumSynth construct
MFVFLVLLPLVSSQCVNLTTRTQLPPAYTNSFTRGVYYPDKVFRSSVLHSTQDLFLPFFSNVTWFHAIHVSGTNGTKRFDNPVLPFNDGVYFASTEKSNIIRGWIFGTTLDSKTQSLLIVNNATNVVIKVCEFQFCNDPFLGVYYHKNNKSWMESEFRVYSSANNCTFEYVSQPFLMDLEGKQGNFKNLREFVFKNIDGYFKIYSKHTPINLVRDLPQGFSALEPLVDLPIGINITRFQTLLALHRSYLTPGDSSSGWTAGAAAYYVGYLQPRTFLLKYNENGTITDAVDCALDPLSETKCTLKSFTVEKGIYQTSNFRVQPTESIVRFPNITNLCPFGEVFNATRFASVYAWNRKRISNCVADYSFLYNSASFSTFKCYGVSPTKLNDLCFTNVYADSFVIRGDEVRQIAPGQTGKIADYNYKLPDDFTGCVIAWNSNNLDSKVGGNYNYLYRLFRKSNLKPFERDISTEIYQAGSTPCNGVEGFNCYFPLQSYGFQPTNGVGYQPYRVVVLSFELLHAPATVCGPKKSTNLVKNKCVNFNFNGLTGTGVLTESNKKFLPFQQFGRDIADTTDAVRDPQTLEILDITPCSFGGVSVITPGTNTSNQVAVLYQDVNCTEVPVAIHADQLTPTWRVYSTGSNVFQTRAGCLIGAEHVNNSYECDIPIGAGICASYQTQTNSPRRARSVASQSIIAYTMSLGAENSVAYSNNSIAIPTNFTISVTTEILPVSMTKTSVDCTMYICGDSTECSNLLLQYGSFCTQLNRALTGIAVEQDKNTQEVFAQVKQIYKTPPIKDFGGFNFSQILPDPSKPSKRSFIEDLLFNKVTLADAGFIKQYGDCLGDIAARDLICAQKFNGLTVLPPLLTDEMIAQYTSALLAGTITSGWTFGAGAALQIPFAMQMAYRFNGIGVTQNVLYENQKLIANQFNSAIGKIQDSLSSTASALGKLQDVVNQNAQALNTLVKQLSSNFGAISSVLNDILSRLDPPEAEVQIDRLITGRLQSLQTYVTQQLIRAAEIRASANLAATKMSECVLGQSKRVDFCGKGYHLMSFPQSAPHGVVFLHVTYVPAQEKNFTTAPAICHDGKAHFPREGVFVSNGTHWFVTQRNFYEPQIITTDNTFVSGNCDVVIGIVNNTVYDPLQPELDSGGGSGGGQIYEGKLTAEGLRFGIVASRFNHALVDRLVEGAIDAIVRHGGREEDITLVRVPGSWEIPVAAGELARKEDIDAVIAIGVLIRGATPHFDYIASEVSKGLADLSLELRKPITFGVITADTLEQAIERAGTKHGNKGWEAALSAIEMANLFKSLR

SEQ ID NO: 7718 - protein, 1307 aa, Artificial Sequence
  SARS-CoV-2/Australia/VIC01/2020__EPI_ISL_406844 spike protein (1-1147)(K986P_V987P) LumSynth construct
MFVFLVLLPLVSSQCVNLTTRTQLPPAYTNSFTRGVYYPDKVFRSSVLHSTQDLFLPFFSNVTWFHAIHVSGTNGTKRFDNPVLPFNDGVYFASTEKSNIIRGWIFGTTLDSKTQSLLIVNNATNVVIKVCEFQFCNDPFLGVYYHKNNKSWMESEFRVYSSANNCTFEYVSQPFLMDLEGKQGNFKNLREFVFKNIDGYFKIYSKHTPINLVRDLPQGFSALEPLVDLPIGINITRFQTLLALHRRYLTPGDSSSGWTAGAAAYYVGYLQPRTFLLKYNENGTITDAVDCALDPLSETKCTLKSFTVEKGIYQTSNFRVQPTESIVRFPNITNLCPFGEVFNATRFASVYAWNRKRISNCVADYSVLYNSASFSTFKCYGVSPTKLNDLCFTNVYADSFVIRGDEVRQIAPGQTGKIADYNYKLPDDFTGCVIAWNSNNLDSKVGGNYNYLYRLFRKSNLKPFERDISTEIYQAGSTPCNGVEGFNCYFPLQSYGFQPTNGVGYQPYRVVVLSFELLHAPATVCGPKKSTNLVKNKCVNFNFNGLTGTGVLTESNKKFLPFQQFGRDIADTTDAVRDPQTLEILDITPCSFGGVSVITPGTNTSNQVAVLYQDVNCTEVPVAIHADQLTPTWRVYSTGSNVFQTRAGCLIGAEHVNNSYECDIPIGAGICASYQTQTNSPRRARSVASQSIIAYTMSLGAENSVAYSNNSIAIPTNFTISVTTEILPVSMTKTSVDCTMYICGDSTECSNLLLQYGSFCTQLNRALTGIAVEQDKNTQEVFAQVKQIYKTPPIKDFGGFNFSQILPDPSKPSKRSFIEDLLFNKVTLADAGFIKQYGDCLGDIAARDLICAQKFNGLTVLPPLLTDEMIAQYTSALLAGTITSGWTFGAGAALQIPFAMQMAYRFNGIGVTQNVLYENQKLIANQFNSAIGKIQDSLSSTASALGKLQDVVNQNAQALNTLVKQLSSNFGAISSVLNDILSRLDPPEAEVQIDRLITGRLQSLQTYVTQQLIRAAEIRASANLAATKMSECVLGQSKRVDFCGKGYHLMSFPQSAPHGVVFLHVTYVPAQEKNFTTAPAICHDGKAHFPREGVFVSNGTHWFVTQRNFYEPQIITTDNTFVSGNCDVVIGIVNNTVYDPLQPELDSGGGSGGGQIYEGKLTAEGLRFGIVASRFNHALVDRLVEGAIDAIVRHGGREEDITLVRVPGSWEIPVAAGELARKEDIDAVIAIGVLIRGATPHFDYIASEVSKGLADLSLELRKPITFGVITADTLEQAIERAGTKHGNKGWEAALSAIEMANLFKSLR

SEQ ID NO: 7719 - protein, 1307 aa, Artificial Sequence
  SARS-CoV-2/Germany/BavPat1/2020__EPI_ISL_406862 spike protein (1-1147)(K986P_V987P) LumSynth construct
MFVFLVLLPLVSSQCVNLTTRTQLPPAYTNSFTRGVYYPDKVFRSSVLHSTQDLFLPFFSNVTWFHAIHVSGTNGTKRFDNPVLPFNDGVYFASTEKSNIIRGWIFGTTLDSKTQSLLIVNNATNVVIKVCEFQFCNDPFLGVYYHKNNKSWMESEFRVYSSANNCTFEYVSQPFLMDLEGKQGNFKNLREFVFKNIDGYFKIYSKHTPINLVRDLPQGFSALEPLVDLPIGINITRFQTLLALHRSYLTPGDSSSGWTAGAAAYYVGYLQPRTFLLKYNENGTITDAVDCALDPLSETKCTLKSFTVEKGIYQTSNFRVQPTESIVRFPNITNLCPFGEVFNATRFASVYAWNRKRISNCVADYSVLYNSASFSTFKCYGVSPTKLNDLCFTNVYADSFVIRGDEVRQIAPGQTGKIADYNYKLPDDFTGCVIAWNSNNLDSKVGGNYNYLYRLFRKSNLKPFERDISTEIYQAGSTPCNGVEGFNCYFPLQSYGFQPTNGVGYQPYRVVVLSFELLHAPATVCGPKKSTNLVKNKCVNFNFNGLTGTGVLTESNKKFLPFQQFGRDIADTTDAVRDPQTLEILDITPCSFGGVSVITPGTNTSNQVAVLYQGVNCTEVPVAIHADQLTPTWRVYSTGSNVFQTRAGCLIGAEHVNNSYECDIPIGAGICASYQTQTNSPRRARSVASQSIIAYTMSLGAENSVAYSNNSIAIPTNFTISVTTEILPVSMTKTSVDCTMYICGDSTECSNLLLQYGSFCTQLNRALTGIAVEQDKNTQEVFAQVKQIYKTPPIKDFGGFNFSQILPDPSKPSKRSFIEDLLFNKVTLADAGFIKQYGDCLGDIAARDLICAQKFNGLTVLPPLLTDEMIAQYTSALLAGTITSGWTFGAGAALQIPFAMQMAYRFNGIGVTQNVLYENQKLIANQFNSAIGKIQDSLSSTASALGKLQDVVNQNAQALNTLVKQLSSNFGAISSVLNDILSRLDPPEAEVQIDRLITGRLQSLQTYVTQQLIRAAEIRASANLAATKMSECVLGQSKRVDFCGKGYHLMSFPQSAPHGVVFLHVTYVPAQEKNFTTAPAICHDGKAHFPREGVFVSNGTHWFVTQRNFYEPQIITTDNTFVSGNCDVVIGIVNNTVYDPLQPELDSGGGSGGGQIYEGKLTAEGLRFGIVASRFNHALVDRLVEGAIDAIVRHGGREEDITLVRVPGSWEIPVAAGELARKEDIDAVIAIGVLIRGATPHFDYIASEVSKGLADLSLELRKPITFGVITADTLEQAIERAGTKHGNKGWEAALSAIEMANLFKSLR

SEQ ID NO: 7720 - protein, 1307 aa, Artificial Sequence
  SARS-CoV-2/Wuhan/HBCDC-HB-02/2020__EPI_ISL_412978 spike protein (1-1147)(K986P_V987P) LumSynth construct
MFVFLVLLPLVSSQCVNLTTRTQLPPAYTNSFTRGVYYPDKVFRSSVLHSTQDLFLPFFSNVTWFHAIHVSGTNGTKRFDNPVLPFNDGVYFASTEKSNIIRGWIFGTTLDSKTQSLLIVNNATNVVIKVCEFQFCNDPFLGVYYHKNNKSWMESEFRVYSSANNCTFEYVSQPFLMDLEGKQGNFKNLREFVFKNIDGYFKIYSKHTPINLVRDLPQGFSALEPLVDLPIGINITRFQTLLALHRSYLTPGDSSSGWTAGAAAYYVGYLQPRTFLLKYNENGTITDAVDCALDPLSETKCTLKSFTVEKGIYQTSNFRVQPTESIVRFPNITNLCPFGEVFNATRFASVYAWNRKRISNCVADYSVLYNSASFSTFKCYGVSPTKLNDLCFTNVYADSFVIRGDEVRQIAPGQTGKIADYNYKLPDDFTGCVIAWNSNNLDSKVGGNYNYLYRLFRKSNLKPFERDISTEIYQAGSTPCNGVEGFNCYFPLQSYGFQPTNGVGYQPYRVVVLSFELLHAPATVCGPKKSTNLVKNKCVNFNFNGLTGTGVLTESNKKFLPFQQFGRDIADTTDAVRDPQTLEILDITPCSFGGVSVITPGTNTSNQVAVLYQDVNCTEVPVAIHADQLTPTWRVYSTGSNVFQTRAGCLIGAEHVNNSYECDIPIGAGICASYQTQTNSPRRARSVASQSIIAYTMSLGAENSVAYSNNSIAIPTNFTISVTTEILPVSMTKTSVDCTMYICGDSTECSNFLLQYGSFCTQLNRALTGIAVEQDKNTQEVFAQVKQIYKTPPIKDFGGFNFSQILPDPSKPSKRSFIEDLLFNKVTLADAGFIKQYGDCLGDIAARDLICAQKFNGLTVLPPLLTDEMIAQYTSALLAGTITSGWTFGAGAALQIPFAMQMAYRFNGIGVTQNVLYENQKLIANQFNSAIGKIQDSLSSTASALGKLQDVVNQNAQALNTLVKQLSSNFGAISSVLNDILSRLDPPEAEVQIDRLITGRLQSLQTYVTQQLIRAAEIRASANLAATKMSECVLGQSKRVDFCGKGYHLMSFPQSAPHGVVFLHVTYVPAQEKNFTTAPAICHDGKAHFPREGVFVSNGTHWFVTQRNFYEPQIITTDNTFVSGNCDVVIGIVNNTVYDPLQPELDSGGGSGGGQIYEGKLTAEGLRFGIVASRFNHALVDRLVEGAIDAIVRHGGREEDITLVRVPGSWEIPVAAGELARKEDIDAVIAIGVLIRGATPHFDYIASEVSKGLADLSLELRKPITFGVITADTLEQAIERAGTKHGNKGWEAALSAIEMANLFKSLR

SEQ ID NO: 7721 - protein, 1307 aa, Artificial Sequence
  SARS-CoV-2/Australia/QLD02/2020__EPI_ISL_407896 spike protein (1-1147)(K986P_V987P) LumSynth construct
MFVFLVLLPLVSSQCVNLTTRTQLPPAYTNSFTRGVYYPDKVFRSSVLHSTQDLFLPFFSNVTWFHAIHVSGTNGTKRFDNPVLPFNDGVYFASTEKSNIIRGWIFGTTLDSKTQSLLIVNNATNVVIKVCEFQFCNDPFLGVYYHKNNKSWMESEFRVYSSANNCTFEYVSQPFLMDLEGKQGNFKNLREFVFKNIDGYFKIYSKHTPINLVRDLPQGFSALEPLVDLPIGINITRFQTLLALHRSYLTPGDSSSGWTAGAAAYYVGYLQPRTFLLKYNENGTITDAVDCALDPLSETKCTLKSFTVEKGIYQTSNFRVQPTESIVRFPNITNLCPFGEVFNATRFASVYAWNRKRISNCVADYSVLYNSASFSTFKCYGVSPTKLNDLCFTNVYADSFVIRGDEVRQIAPGQTGKIADYNYKLPDDFTGCVIAWNSNNLDSKVGGNYNYLYRLFRKSNLKPFERDISTEIYQAGSTPCNGVEGFNCYFPLQSYGFQPTNGVGYQPYRVVVLSFELLHAPATVCGPKKSTNLVKNKCVNFNFNGLTGTGVLTESNKKFLPFQQFGRDIADTTDAVRDPQTLEILDITPCSFGGVSVITPGTNTSNQVAVLYQDVNCTEVPVAIHADQLTPTWRVYSTGSNVFQTRAGCLIGAEHVNNSYECDIPIGAGICASYQTQTNSPRRARSVASQSIIAYTMSLGAENSVAYSNNSIAIPTNFTISVTTEILPVSMTKTSVDCTMYICGDSTECSNLLLQYGSFCTQLNRALTGIAVEQDKNTQEVFAQVKQIYKTPPIKDFGGFNFSQILPDPSKPSKRSFIEDLLFNKVTLADAGFIKQYGDCLGDIAARDLICAQKFNGLTVLPPLLTDEMIAQYTSALLAGTITSGWTFGAGAALQIPFAMQMAYRFNGIGVTQNVLYENQKLIANQFNSAIGKIQDSLSSTASALGKLQDVVNQNAQALNTLVKQLSSNFGAISSVLNDILSRLDPPEAEVQIDRLITGRLQSLQTYVTQQLIRAAEIRASANLAATKMSECVLGQSKRVDFCGKGYHLMSFPQSAPHGVVFLHVTYVPAQEKNFTTAPAICHDGKAHFPREGVFVSNGTHWFVTQRNFYEPQIITTDNTFVSGNCDVVIGIVNNTVYDPLQLELDSGGGSGGGQIYEGKLTAEGLRFGIVASRFNHALVDRLVEGAIDAIVRHGGREEDITLVRVPGSWEIPVAAGELARKEDIDAVIAIGVLIRGATPHFDYIASEVSKGLADLSLELRKPITFGVITADTLEQAIERAGTKHGNKGWEAALSAIEMANLFKSLR

SEQ ID NO: 7722 - protein, 1307 aa, Artificial Sequence
  SARS-CoV-2/India/1-31/2020__EPI_ISL_413523 spike protein (1-1147)(K986P_V987P) LumSynth construct
MFVFLVLLPLVSSQCVNLTTRTQLPPAYTNSFTRGVYYPDKVFRSSVLHSTQDLFLPFFSNVTWFHAIHVSGTNGTKRFDNPVLPFNDGVYFASTEKSNIIRGWIFGTTLDSKTQSLLIVNNATNVVIKVCEFQFCNDPFLGVYYHKNNKSWMESEFRVYSSANNCTFEYVSQPFLMDLEGKQGNFKNLREFVFKNIDGYFKIYSKHTPINLVRDLPQGFSALEPLVDLPIGINITRFQTLLALHRSYLTPGDSSSGWTAGAAAYYVGYLQPRTFLLKYNENGTITDAVDCALDPLSETKCTLKSFTVEKGIYQTSNFRVQPTESIVRFPNITNLCPFGEVFNATRFASVYAWNRKRISNCVADYSVLYNSASFSTFKCYGVSPTKLNDLCFTNVYADSFVIRGDEVRQIAPGQTGKIADYNYKLPDDFTGCVIAWNSNNLDSKVGGNYNYLYRLFRKSNLKPFERDISTEIYQAGSTPCNGVEGFNCYFPLQSYGFQPTNGVGYQPYRVVVLSFELLHAPATVCGPKKSTNLVKNKCVNFNFNGLTGTGVLTESNKKFLPFQQFGRDIADTTDAVRDPQTLEILDITPCSFGGVSVITPGTNTSNQVAVLYQDVNCTEVPVAIHADQLTPTWRVYSTGSNVFQTRAGCLIGAEHVNNSYECDIPIGAGICASYQTQTNSPRRARSVASQSIIAYTMSLGAENSVAYSNNSIAIPTNFTISVTTEILPVSMTKTSVDCTMYICGDSTECSNLLLQYGSFCTQLNRALTGIAVEQDKNTQEVFAQVKQIYKTPPIKDFGGFNFSQILPDPSKPSKRSFIEDLLFNKVTLADAGFIKQYGDCLGDIAARDLICAQKFNGLTVLPPLLTDEMIAQYTSALLAGTITSGWTFGAGAALQIPFAMQMAYRFNGIGVTQNVLYENQKLIANQFNSVIGKIQDSLSSTASALGKLQDVVNQNAQALNTLVKQLSSNFGAISSVLNDILSRLDPPEAEVQIDRLITGRLQSLQTYVTQQLIRAAEIRASANLAATKMSECVLGQSKRVDFCGKGYHLMSFPQSAPHGVVFLHVTYVPAQEKNFTTAPAICHDGKAHFPREGVFVSNGTHWFVTQRNFYEPQIITTDNTFVSGNCDVVIGIVNNTVYDPLQPELDSGGGSGGGQIYEGKLTAEGLRFGIVASRFNHALVDRLVEGAIDAIVRHGGREEDITLVRVPGSWEIPVAAGELARKEDIDAVIAIGVLIRGATPHFDYIASEVSKGLADLSLELRKPITFGVITADTLEQAIERAGTKHGNKGWEAALSAIEMANLFKSLR

SEQ ID NO: 7723 - protein, 1307 aa, Artificial Sequence
  SARS-CoV-2/Guangdong/GD2020087-P0008/2020__EPI_ISL_413863 spike protein (1-1147)(K986P_V987P) LumSynth construct
MFVFLVLLPLVSSQCVNLTTRTQLPPAYTNSFTRGVYYPDKVFRSSVLHSTQDLFLPFFSNVTWFHAIHVSGTNGTKRFDNPVLPFNDGVYFASTEKSNIIRGWIFGTTLDSKTQSLLIVNNATNVVIKVCEFQFCNDPFLGVYYHKNNKSWMESEFRVYSSANNCTFEYVSQPFLMDLEGKQGNFKNLREFVFKNIDGYFKIYSKHTPINLVRDLPQGFSALEPLVDLPIGINITRFQTLLALHRSYLTPGDSSSGWTAGAAAYYVGYLQPRTFLLKYNENGTITDAVDCALDPLSETKCTLKSFTVEKGIYQTSNFRVQPTESIVRFPNITNLCPFGEVFNATRFASVYAWNRKRISNCVADYSVLYNSASFSTFKCYGVSPTKLNDLCFTNVYADSFVIRGDEVREIAPGQTGKIADYNYKLPDDFTGCVIAWNSNNLDSKVGGNYNYLYRLFRKSNLKPFERDISTEIYQAGSTPCNGVEGFNCYFPLQSYGFQPTNGVGYQPYRVVVLSFELLHAPATVCGPKKSTNLVKNKCVNFNFNGLTGTGVLTESNKKFLPFQQFGRDIADTTDAVRDPQTLEILDITPCSFGGVSVITPGTNTSNQVAVLYQDVNCTEVPVAIHADQLTPTWRVYSTGSNVFQTRAGCLIGAEHVNNSYECDIPIGAGICASYQTQTNSPRRARSVASQSIIAYTMSLGAENSVAYSNNSIAIPTNFTISVTTEILPVSMTKTSVDCTMYICGDSTECSNLLLQYGSFCTQLNRALTGIAVEQDKNTQEVFAQVKQIYKTPPIKDFGGFNFSQILPDPSKPSKRSFIEDLLFNKVTLADAGFIKQYGDCLGDIAARDLICAQKFNGLTVLPPLLTDEMIAQYTSALLAGTITSGWTFGAGAALQIPFAMQMAYRFNGIGVTQNVLYENQKLIANQFNSAIGKIQDSLSSTASALGKLQDVVNQNAQALNTLVKQLSSNFGAISSVLNDILSRLDPPEAEVQIDRLITGRLQSLQTYVTQQLIRAAEIRASANLAATKMSECVLGQSKRVDFCGKGYHLMSFPQSAPHGVVFLHVTYVPAQEKNFTTAPAICHDGKAHFPREGVFVSNGTHWFVTQRNFYEPQIITTDNTFVSGNCDVVIGIVNNTVYDPLQPELDSGGGSGGGQIYEGKLTAEGLRFGIVASRFNHALVDRLVEGAIDAIVRHGGREEDITLVRVPGSWEIPVAAGELARKEDIDAVIAIGVLIRGATPHFDYIASEVSKGLADLSLELRKPITFGVITADTLEQAIERAGTKHGNKGWEAALSAIEMANLFKSLR

SEQ ID NO: 7724 - protein, 1307 aa, Artificial Sequence
  SARS-CoV-2/Sweden/01/2020__EPI_ISL_411951 spike protein (1-1147)(K986P_V987P) LumSynth construct
MFVFLVLLPLVSSQCVNLTTRTQLPPAYTNSFTRGVYYPDKVFRSSVLHSTQDLFLPFFSNVTWFHAIHVSGTNGTKRFDNPVLPFNDGVYFASTEKSNIIRGWIFGTTLDSKTQSLLIVNNATNVVIKVCEFQFCNDPFLGVYYHKNNKSWMESEFRVYSSANNCTFEYVSQPFLMDLEGKQGNFKNLREFVFKNIDGYFKIYSKHTPINLVRDLPQGFSALEPLVDLPIGINITRFQTLLALHRSYLTPGDSSSGWTAGAAAYYVGYLQPRTFLLKYNENGTITDAVDCALDPLSETKCTLKSFTVEKGIYQTSNFRVQPTESIVRFPNITNLCPFGEVFNATRFASVYAWNRKRISNCVADYSVLYNSASFSTFKCYGVSPTKLNDLCFTNVYADSFVIRGDEVRQIAPGQTGKIADYNYKLPDDFTGCVIAWNSNNLDSKVGGNYNYLYRLFRKSNLKPFERDISTEIYQAGSTPCNGVEGFNCYFPLQSYGFQPTNGVGYQPYRVVVLSFELLHAPATVCGPKKSTNLVKNKCVNFNFNGLTGTGVLTESNKKFLPFQQFGRDIADTTDAVRDPQTLEILDITPCSFGGVSVITPGTNTSNQVAVLYQDVNCTEVPVAIHADQLTPTWRVYSTGSNVFQTRAGCLIGAEHVNNSYECDIPIGAGICASYQTQTNSPRRARSVASQSIIAYTMSLGAENSVAYSNNSIAIPTNFTISVTTEILPVSMTKTSVDCTMYICGDSTECSNLLLQYGSFCTQLNRALTGIAVEQDKNTQEVFAQVKQIYKTPPIKDCGGFNFSQILPDPSKPSKRSFIEDLLFNKVTLADAGFIKQYGDCLGDIAARDLICAQKFNGLTVLPPLLTDEMIAQYTSALLAGTITSGWTFGAGAALQIPFAMQMAYRFNGIGVTQNVLYENQKLIANQFNSAIGKIQDSLSSTASALGKLQDVVNQNAQALNTLVKQLSSNFGAISSVLNDILSRLDPPEAEVQIDRLITGRLQSLQTYVTQQLIRAAEIRASANLAATKMSECVLGQSKRVDFCGKGYHLMSFPQSAPHGVVFLHVTYVPAQEKNFTTAPAICHDGKAHFPREGVFVSNGTHWFVTQRNFYEPQIITTDNTFVSGNCDVVIGIVNNTVYDPLQPELDSGGGSGGGQIYEGKLTAEGLRFGIVASRFNHALVDRLVEGAIDAIVRHGGREEDITLVRVPGSWEIPVAAGELARKEDIDAVIAIGVLIRGATPHFDYIASEVSKGLADLSLELRKPITFGVITADTLEQAIERAGTKHGNKGWEAALSAIEMANLFKSLR

SEQ ID NO: 7725 - protein, 1307 aa, Artificial Sequence
  SARS-CoV-2/Tianmen/HBCDC-HB-07/2020__EPI_ISL_412983 spike protein (1-1147)(K986P_V987P) LumSynth construct
MFVFLVLLPLVSSQCVNLTTRTQLPPAYTNSFTRGVYYPDKVFRSSVLHSTQDLFLPFFSNVTWFHAIHVSGTNGTKRFDNPVLPFNDGVYFASTEKSNIIRGWIFGTTLDSKTQSLLIVNNATNVVIKVCEFQFCNDPFLGVYYHKNNKSWMESEFRVYSSANNCTFEYVSQPFLMDLEGKQGNFKNLREFVFKNIDGYFKIYSKHTPINLVRDLPQGFSALEPLVDLPIGINITRFQTLLALHRSYLTPGDSSSGWTAGAAAYYVGYLQPRTFLLKYNENGTITDAVDCALDPLSETKCTLKSFTVEKGIYQTSNFRVQPTESIVRFPNITNLCPFGEVFNATRFASVYAWNRKRISNCVADYSVLYNSASFSTFKCYGVSPTKLNDLCFTNVYADSFVIRGDEVRQIAPGQTGKIADYNYKLPDDFTGCVIAWNSNNLDSKVGGNYNYLYRLFRKSNLKPFERDISTEIYQAGSTPCNGVEGFNCYFPLQSYGFQPTNGVGYQPYRVVVLSFELLHAPATVCGPKKSTNLVKNKCVNFNFNGLTGTGVLTESNKKFLPFQQFGRDIADTTDAVRDPQTLEILDITPCSFGGVSVITPGTNTSNQVAVLYQDLNCTEVPVAIHADQLTPTWRVYSTGSNVFQTRAGCLIGAEHVNNSYECDIPIGAGICASYQTQTNSPRRARSVASQSIIAYTMSLGAENSVAYSNNSIAIPTNFTISVTTEILPVSMTKTSVDCTMYICGDSTECSNLLLQYGSFCTQLNRALTGIAVEQDKNTQEVFAQVKQIYKTPPIKDFGGFNFSQILPDPSKPSKRSFIEDLLFNKVTLADAGFIKQYGDCLGDIAARDLICAQKFNGLTVLPPLLTDEMIAQYTSALLAGTITSGWTFGAGAALQIPFAMQMAYRFNGIGVTQNVLYENQKLIANQFNSAIGKIQDSLSSTASALGKLQDVVNQNAQALNTLVKQLSSNFGAISSVLNDILSRLDPPEAEVQIDRLITGRLQSLQTYVTQQLIRAAEIRASANLAATKMSECVLGQSKRVDFCGKGYHLMSFPQSAPHGVVFLHVTYVPAQEKNFTTAPAICHDGKAHFPREGVFVSNGTHWFVTQRNFYEPQIITTDNTFVSGNCDVVIGIVNNTVYDPLQPELDSGGGSGGGQIYEGKLTAEGLRFGIVASRFNHALVDRLVEGAIDAIVRHGGREEDITLVRVPGSWEIPVAAGELARKEDIDAVIAIGVLIRGATPHFDYIASEVSKGLADLSLELRKPITFGVITADTLEQAIERAGTKHGNKGWEAALSAIEMANLFKSLR

SEQ ID NO: 7726 - protein, 1307 aa, Artificial Sequence
  SARS-CoV-2/Hong Kong/case42_VM20002493/2020__EPI_ISL_414527 spike protein (1-1147)(K986P_V987P) LumSynth construct
MFVFLVLLPLVSSQCVNLTTRTQLPPAYTNSFTRGVYYPDKVFRSSVLHSTQDLFLPFFSNVTWFHAIHVSGTNGTKRFDNPVLPFNDGVYFASTEKSNIIRGWIFGTTLDSKTQSLLIVNNATNVVIKVCEFQFCNDPFLGVYYHKNNKSWMESEFRVYSSANNCTFEYVSQPFLMDLEGKQGNFKNLREFVFKNIDGYFKIYSKHTPINLVRDLPQGFSALEPLVDLPIGINITRFQTLLALHRSYLTPGDSSSGWTAGAAAYYVGYLQPRTFLLKYNENGTITDAVDCALDPLSETKCTLKSFTVEKGIYQTSNFRVQPTESIVRFPNITNLCPFGEVFNATRFASVYAWNRKRISNCVADYSVLYNSASFSTFKCYGVSPTKLNDLCFTNVYADSFVIRGDEVRQIAPGQTGKIADYNYKLPDDFTGCVIAWNSNNLDSKVGGNYNYLYRLFRKSNLKPFERDISTEIYQAGSTPCNGVEGFNCYFPLQSYGFQPTNGVGYQPYRVVVLSFELLHAPATVCGPKKSTNLVKNKCVNFNFNGLTGTGVLTESNKKFLPFQQFGRDIADTTDAVRDPQTLEILDITPCSFGGVSVITPGTNTSNQVAVLYQDVNCTEVPVAIHADQLTPTWRVYSTGSNVFQTRAGCLIGAEHVNNSYECDIPIGAGICASYQTQTNSPRRARSVASQSIIAYTMSLGAENSVAYSNNSIAIPTNFAISVTTEILPVSMTKTSVDCTMYICGDSTECSNLLLQYGSFCTQLNRALTGIAVEQDKNTQEVFAQVKQIYKTPPIKDFGGFNFSQILPDPSKPSKRSFIEDLLFNKVTLADAGFIKQYGDCLGDIAARDLICAQKFNGLTVLPPLLTDEMIAQYTSALLAGTITSGWTFGAGAALQIPFAMQMAYRFNGIGVTQNVLYENQKLIANQFNSAIGKIQDSLSSTASALGKLQDVVNQNAQALNTLVKQLSSNFGAISSVLNDILSRLDPPEAEVQIDRLITGRLQSLQTYVTQQLIRAAEIRASANLAATKMSECVLGQSKRVDFCGKGYHLMSFPQSAPHGVVFLHVTYVPAQEKNFTTAPAICHDGKAHFPREGVFVSNGTHWFVTQRNFYEPQIITTDNTFVSGNCDVVIGIVNNTVYDPLQPELDSGGGSGGGQIYEGKLTAEGLRFGIVASRFNHALVDRLVEGAIDAIVRHGGREEDITLVRVPGSWEIPVAAGELARKEDIDAVIAIGVLIRGATPHFDYIASEVSKGLADLSLELRKPITFGVITADTLEQAIERAGTKHGNKGWEAALSAIEMANLFKSLR

SEQ ID NO: 7727 - protein, 1307 aa, Artificial Sequence
  SARS-CoV-2/USA/CruiseA-23/2020__EPI_ISL_414482 spike protein (1-1147)(K986P_V987P) LumSynth construct
MFVFLVLLPLVSSQCVNLTTRTQLPPAYTNSFTRGVYYPDKVFRSSVLHSTQDLFLPFFSNVTWFHAIHVSGTNGTKRFDNPVLPFNDGVYFASTEKSNIIRGWIFGTTLDSKTQSLLIVNNATNVVIKVCEFQFCNDPFLGVYYHKNNKSWMESEFRVYSSANNCTFEYVSQPFLMDLEVKQGNFKNLREFVFKNIDGYFKIYSKHTPINLVRDLPQGFSALEPLVDLPIGINITRFQTLLALHRSYLTPGDSSSGWTAGAAAYYVGYLQPRTFLLKYNENGTITDAVDCALDPLSETKCTLKSFTVEKGIYQTSNFRVQPTESIVRFPNITNLCPFGEVFNATRFASVYAWNRKRISNCVADYSVLYNSASFSTFKCYGVSPTKLNDLCFTNVYADSFVIRGDEVRQIAPGQTGKIADYNYKLPDDFTGCVIAWNSNNLDSKVGGNYNYLYRLFRKSNLKPFERDISTEIYQAGSTPCNGVEGFNCYFPLQSYGFQPTNGVGYQPYRVVVLSFELLHAPATVCGPKKSTNLVKNKCVNFNFNGLTGTGVLTESNKKFLPFQQFGRDIADTTDAVRDPQTLEILDITPCSFGGVSVITPGTNTSNQVAVLYQDVNCTEVPVAIHADQLTPTWRVYSTGSNVFQTRAGCLIGAEHVNNSYECDIPIGAGICASYQTQTNSPRRARSVASQSIIAYTMSLGAENSVAYSNNSIAIPTNFTISVTTEILPVSMTKTSVDCTMYICGDSTECSNLLLQYGSFCTQLNRALTGIAVEQDKNTQEVFAQVKQIYKTPPIKDFGGFNFSQILPDPSKPSKRSFIEDLLFNKVTLADAGFIKQYGDCLGDIAARDLICAQKFNGLTVLPPLLTDEMIAQYTSALLAGTITSGWTFGAGAALQIPFAMQMAYRFNGIGVTQNVLYENQKLIANQFNSAIGKIQDSLSSTASALGKLQDVVNQNAQALNTLVKQLSSNFGAISSVLNDILSRLDPPEAEVQIDRLITGRLQSLQTYVTQQLIRAAEIRASANLAATKMSECVLGQSKRVDFCGKGYHLMSFPQSAPHGVVFLHVTYVPAQEKNFTTAPAICHDGKAHFPREGVFVSNGTHWFVTQRNFYEPQIITTDNTFVSGNCDVVIGIVNNTVYDPLQPELDSGGGSGGGQIYEGKLTAEGLRFGIVASRFNHALVDRLVEGAIDAIVRHGGREEDITLVRVPGSWEIPVAAGELARKEDIDAVIAIGVLIRGATPHFDYIASEVSKGLADLSLELRKPITFGVITADTLEQAIERAGTKHGNKGWEAALSAIEMANLFKSLR

SEQ ID NO: 7728 - protein, 1307 aa, Artificial Sequence
  SARS-CoV-2/Hong Kong/case85_VM20002868/2020__EPI_ISL_414519 spike protein (1-1147)(K986P_V987P) LumSynth construct
MFVFLVLVPLVSSQCVNLTTRTQLPPAYTNSFTRGVYYPDKVFRSSVLHSTQDLFLPFFSNVTWFHAIHVSGTNGTKRFDNPVLPFNDGVYFASTEKSNIIRGWIFGTTLDSKTQSLLIVNNATNVVIKVCEFQFCNDPFLGVYYHKNNKSWMESEFRVYSSANNCTFEYVSQPFLMDLEGKQGNFKNLREFVFKNIDGYFKIYSKHTPINLVRDLPQGFSALEPLVDLPIGINITRFQTLLALHRSYLTPGDSSSGWTAGAAAYYVGYLQPRTFLLKYNENGTITDAVDCALDPLSETKCTLKSFTVEKGIYQTSNFRVQPTESIVRFPNITNLCPFGEVFNATRFASVYAWNRKRISNCVADYSVLYNSASFSTFKCYGVSPTKLNDLCFTNVYADSFVIRGDEVRQIAPGQTGKIADYNYKLPDDFTGCVIAWNSNNLDSKVGGNYNYLYRLFRKSNLKPFERDISTEIYQAGSTPCNGVEGFNCYFPLQSYGFQPTNGVGYQPYRVVVLSFELLHAPATVCGPKKSTNLVKNKCVNFNFNGLTGTGVLTESNKKFLPFQQFGRDIADTTDAVRDPQTLEILDITPCSFGGVSVITPGTNTSNQVAVLYQDVNCTEVPVAIHADQLTPTWRVYSTGSNVFQTRAGCLIGAEHVNNSYECDIPIGAGICASYQTQTNSPRRARSVASQSIIAYTMSLGAENSVAYSNNSIAIPTNFTISVTTEILPVSMTKTSVDCTMYICGDSTECSNLLLQYGSFCTQLNRALTGIAVEQDKNTQEVFAQVKQIYKTPPIKDFGGFNFSQILPDPSKPSKRSFIEDLLFNKVTLADAGFIKQYGDCLGDIAARDLICAQKFNGLTVLPPLLTDEMIAQYTSALLAGTITSGWTFGAGAALQIPFAMQMAYRFNGIGVTQNVLYENQKLIANQFNSAIGKIQDSLSSTASALGKLQDVVNQNAQALNTLVKQLSSNFGAISSVLNDILSRLDPPEAEVQIDRLITGRLQSLQTYVTQQLIRAAEIRASANLAATKMSECVLGQSKRVDFCGKGYHLMSFPQSAPHGVVFLHVTYVPAQEKNFTTAPAICHDGKAHFPREGVFVSNGTHWFVTQRNFYEPQIITTDNTFVSGNCDVVIGIVNNTVYDPLQPELDSGGGSGGGQIYEGKLTAEGLRFGIVASRFNHALVDRLVEGAIDAIVRHGGREEDITLVRVPGSWEIPVAAGELARKEDIDAVIAIGVLIRGATPHFDYIASEVSKGLADLSLELRKPITFGVITADTLEQAIERAGTKHGNKGWEAALSAIEMANLFKSLR

SEQ ID NO: 7729 - protein, 1307 aa, Artificial Sequence; identical to SEQ ID NO: 7719
  SARS-CoV-2/England/200990660/2020__EPI_ISL_414523 spike protein (1-1147)(K986P_V987P) LumSynth construct

SEQ ID NO: 7730 - protein, 1307 aa, Artificial Sequence
  SARS-CoV-2/Australia/NSW09/2020__EPI_ISL_413595 spike protein (1-1147)(K986P_V987P) LumSynth construct
MFVFLVLLPLVSSQCVNLTTRTQLPPAYTNSFTRGVYYPDKVFRSSVLHSTQDLFLPFFSNVTWFHAIHVSGTNGTKRFDNPVLPFNDGVYFASTEKSNIIRGWIFGTTLDSKTQSLLIVNNATNVVIKVCEFQFCNDPFLGVYYHKNNKSWMESEFRVYSSANNCTFEYVSQPFLMDLEGKQGNFKNLREFVFKNIDGYFKIYSKHTPINLVRDLPQGFSALEPLVDLPIGINITRFQTLLALHRSYLTPGDSSSGWTAGAAAYYVGYLQPRTFLLKYNENGTITDAVDCALDPLSETKCTLKSFTVEKGIYQTSNFRVQPTESIVRFPNITNLCPFGEVFNATRFASVYAWNRKRISNCVADYSVLYNSASFSTFKCYGVSPTKLNDLCFTNVYADSFVIRGDEVRQIAPGQTGKIADYNYKLPDDFTGCVIAWNSNNLDSKVGGNYNYLYRLFRKSNLKPFERDISTEIYQAGSTPCNGVEGFNCYFPLQSYGFQPTNGVGYQPYRVVVLSFELLHAPATVCGPKKSTNLVKNKCVNFNFNGLTGTGVLTESNKKFLPFQQFGRDIADTTDAVRDPQTLEILDITPCSFGGVSVITPGTNTSNQVAVLYQDVNCTEVPVAIHADQLTPTWRVYSTGSNVFQTRAGCLIGAEHVNNSYECDIPIGAGICASYQTQTNSPRRARSVASQSIIAYTMSLGAENSVAYSNNSIAIPTNFTISVTTEILPVSMTKTSVDCTMYICGDSTECSNLLLQYGSFCTQLNRALTGIAVEQDKNTQEVFAQVKQIYKTPPIKDFGGFNFSQILPDPSKPSKRSFIEDLLFNKVTLADAGFIKQYGDCLGDIAARDLICAQKFNGLTVLPPLLTDEMIAQYTSALLAGTITSGWTFGAGAALQIPFAMQMAYRFNGIGVTQNVLYENQKLIANQFNSAIGKIQDSLSFTASALGKLQDVVNQNAQALNTLVKQLSSNFGAISSVLNDILSRLDPPEAEVQIDRLITGRLQSLQTYVTQQLIRAAEIRASANLAATKMSECVLGQSKRVDFCGKGYHLMSFPQSAPHGVVFLHVTYVPAQEKNFTTAPAICHDGKAHFPREGVFVSNGTHWFVTQRNFYEPQIITTDNTFVSGNCDVVIGIVNNTVYDPLQPELDSGGGSGGGQIYEGKLTAEGLRFGIVASRFNHALVDRLVEGAIDAIVRHGGREEDITLVRVPGSWEIPVAAGELARKEDIDAVIAIGVLIRGATPHFDYIASEVSKGLADLSLELRKPITFGVITADTLEQAIERAGTKHGNKGWEAALSAIEMANLFKSLR

SEQ ID NO: 7731 - protein, 1307 aa, Artificial Sequence; identical to SEQ ID NO: 7711
  SARS-CoV-2/Australia/NSW10/2020__EPI_ISL_413596 spike protein (1-1147)(K986P_V987P) LumSynth construct

SEQ ID NO: 7732 - protein, 1307 aa, Artificial Sequence
  SARS-CoV-2/Switzerland/1000477797/2020__EPI_ISL_413023 spike protein (1-1147)(K986P_V987P) LumSynth construct
MFVFLVLLPLVSSQCVNLTTRTQLPPAYTNSFTRGVYYPDKVFRSSVLHSTQDLFLPFFSNVTWFHAIHVSGTNGTKRFDNPVLPFNDGVYFASTEKSNIIRGWIFGTTLDSKTQSLLIVNNATNVVIKVCEFQFCNDPFLGVYYHKNNKSWMESEFRVYSSANNCTFEYVSQPFLMDLEGKQGNFKNLREFVFKNIDGYFNIYSKHTPINLVRDLPQGFSALEPLVDLPIGINITRFQTLLALHRSYLTPGDSSSGWTAGAAAYYVGYLQPRTFLLKYNENGTITDAVDCALDPLSETKCTLKSFTVEKGIYQTSNFRVQPTESIVRFPNITNLCPFGEVFNATRFASVYAWNRKRISNCVADYSVLYNSASFSTFKCYGVSPTKLNDLCFTNVYADSFVIRGDEVRQIAPGQTGKIADYNYKLPDDFTGCVIAWNSNNLDSKVGGNYNYLYRLFRKSNLKPFERDISTEIYQAGSTPCNGVEGFNCYFPLQSYGFQPTNGVGYQPYRVVVLSFELLHAPATVCGPKKSTNLVKNKCVNFNFNGLTGTGVLTESNKKFLPFQQFGRDIADTTDAVRDPQTLEILDITPCSFGGVSVITPGTNTSNQVAVLYQGVNCTEVPVAIHADQLTPTWRVYSTGSNVFQTRAGCLIGAEHVNNSYECDIPIGAGICASYQTQTNSPRRARSVASQSIIAYTMSLGAENSVAYSNNSIAIPTNFTISVTTEILPVSMTKTSVDCTMYICGDSTECSNLLLQYGSFCTQLNRALTGIAVEQDKNTQEVFAQVKQIYKTPPIKDFGGFNFSQILPDPSKPSKRSFIEDLLFNKVTLADAGFIKQYGDCLGDIAARDLICAQKFNGLTVLPPLLTDEMIAQYTSALLAGTITSGWTFGAGAALQIPFAMQMAYRFNGIGVTQNVLYENQKLIANQFNSAIGKIQDSLSSTASALGKLQDVVNQNAQALNTLVKQLSSNFGAISSVLNDILSRLDPPEAEVQIDRLITGRLQSLQTYVTQQLIRAAEIRASANLAATKMSECVLGQSKRVDFCGKGYHLMSFPQSAPHGVVFLHVTYVPAQEKNFTTAPAICHDGKAHFPREGVFVSNGTHWFVTQRNFYEPQIITTDNTFVSGNCDVVIGIVNNTVYDPLQPELDSGGGSGGGQIYEGKLTAEGLRFGIVASRFNHALVDRLVEGAIDAIVRHGGREEDITLVRVPGSWEIPVAAGELARKEDIDAVIAIGVLIRGATPHFDYIASEVSKGLADLSLELRKPITFGVITADTLEQAIERAGTKHGNKGWEAALSAIEMANLFKSLR

SEQ ID NO: 7733 - protein, 1307 aa, Artificial Sequence
  SARS-CoV-2/Belgium/BA-02291/2020__EPI_ISL_415159 spike protein (1-1147)(K986P_V987P) LumSynth construct
MFVFLVLLPLVSSQCVNLTTRTQLPPAYTNSFTRGVYYPDKVFRSSVLHSTQDLFLPFFSNVTWFHAIHVSGTNGTKRFDNPVLPFNDGVYFASTEKSNIIRGWIFGTTLDSKTQSLLIVNNATNVVIKVCEFQFCNDPFLGVYYHKNNKSWMESEFRVYSSANNCTFEYVSQPFLMDLEGKQGNFKNLREFVFKNIDGYFKIYSKHTPINLVRDLPQGFSALEPLVDLPIGINITRFQTLLALHRSYLTPGDSSSGWTAGAAAYYVGYLQPRTFLLKYNENGTITDAVDCALDPLSETKCTLKSFTVEKGIYQTSNFRVQPTESIVRFPNITNLCPFGEVFNATRFASVYAWNRKRISNCVADYSVLYNSASFSTFKCYGVSPTKLNDLCFTNVYADSFVIRGDEVRQIAPGQTGKIADYNYKLPDDFTGCVIAWNSNNLDSKVGGNYNYLYRLFRRSNLKPFERDISTEIYQAGSTPCNGVEGFNCYFPLQSYGFQPTNGVGYQPYRVVVLSFELLPAPATVCGPKKSTNLVKNKCVNFNFNGLTGTGVLTESNKKFLPFQQFGRDIADTTDAVRDPQTLEILDITPCSFGGVSVITPGTNTSNQVAVLYQGVNCTEVPVAIHADQLTPTWRVYSTGSNVFQTRAGCLIGAEHVNNSYECDIPIGAGICASYQTQTNSPRRARSVASQSIIAYTMSLGAENSVAYSNNSIAIPTNFTISVTTEILPVSMTKTSVDCTMYICGDSTECSNLLLQYGSFCTQLNRALTGIAVEQDKNTQEVFAQVKQIYKTPPIKDFGGFNFSQILPDPSKPSKRSFIEDLLFNKVTLADAGFIKQYGDCLGDIAARDLICAQKFNGLTVLPPLLTDEMIAQYTSALLAGTITSGWTFGAGAALQIPFAMQMAYRFNGIGVTQNVLYENQKLIANQFNSAIGKIQDSLSSAAPALGKLQDVVNQNAQALNTLVKQLSSNFGAISSVLNDILSRLDPPEAEVQIDRLITGRLQSLQTYVTQQLIRAAEIRASANLAATKMSECVLGQSKRVDFCGKGYHLMSFPQSAPHGVVFLHVTYVPAQEKNFTTAPAICHDGKAHFPREGVFVSNGTHWFVTQRNFYEPQIITTDNTFVSGNCDVVIGIVNNTVYDPLQPELDSGGGSGGGQIYEGKLTAEGLRFGIVASRFNHALVDRLVEGAIDAIVRHGGREEDITLVRVPGSWEIPVAAGELARKEDIDAVIAIGVLIRGATPHFDYIASEVSKGLADLSLELRKPITFGVITADTLEQAIERAGTKHGNKGWEAALSAIEMANLFKSLR

SEQ ID NO: 7734 - protein, 1307 aa, Artificial Sequence
  SARS-CoV-2/USA/WA8-UW5/2020__EPI_ISL_413486 spike protein (1-1147)(K986P_V987P) LumSynth construct
MFVFLVLLPLVSSQCVNLTTRTQLPPAYTNSFTRGVYYPDKVFRSSVLHSTQDLFLPFFSNVTWFHAIHVSGTNGTKRFDNPVLPFNDGVYFASTEKSNIIRGWIFGTTLDSKTQSLLIVNNATNVVIKVCEFQFCNDPFLGVYYHKNNKSWMESEFRVYSSANNCTFEYVSQPFLMDLEGKQGNFKNLREFVFKNIDGYFKIYSKHTPINLVRDLPQGFSALEPLVDLPIGINITRFQTLLALHRSYLTPGDSSSGWTAGAAAYYVGYLQPRTFLLKYNENGTITDAVDCALDPLSETKCTLKSFTVEKGIYQTSNFRVQPTESIVRFPNITNLCPFGEVFNATRFASVYAWNRKRISNCVADYSVLYNSASFSTFKCYGVSPTKLNDLCFTNVYADSFVIRGDEVRQIAPGQTGKIADYNYKLPDDFTGCVIAWNSNNLDSKVGGNYNYLYRLFRKSNLKPFERDISTEIYQAGSTPCNGVEGFNCYFPLQSYGFQPTNGVGYQPYRVVVLSFELLHAPATVCGPKKSTNLVKNKCVNFNFNGLTGTGVLTESNKKFLPFQQFGRDIADTTDAVRDPQTLEILDITPCSFGGVSVITPGTNTSNQVAVLYQDVNCTEVPVAIHADQLTPTWRVYSTGSNVFQTRAGCLIGAEYVNNSYECDIPIGAGICASYQTQTNSPRRARSVASQSIIAYTMSLGAENSVAYSNNSIAIPTNFTISVTTEILPVSMTKTSVDCTMYICGDSTECSNLLLQYGSFCTQLNRALTGIAVEQDKNTQEVFAQVKQIYKTPPIKDFGGFNFSQILPDPSKPSKRSFIEDLLFNKVTLADAGFIKQYGDCLGDIAARDLICAQKFNGLTVLPPLLTDEMIAQYTSALLAGTITSGWTFGAGAALQIPFAMQMAYRFNGIGVTQNVLYENQKLIANQFNSAIGKIQDSLSSTASALGKLQDVVNQNAQALNTLVKQLSSNFGAISSVLNDILSRLDPPEAEVQIDRLITGRLQSLQTYVTQQLIRAAEIRASANLAATKMSECVLGQSKRVDFCGKGYHLMSFPQSAPHGVVFLHVTYVPAQEKNFTTAPAICHDGKAHFPREGVFVSNGTHWFVTQRNFYEPQIITTDNTFVSGNCDVVIGIVNNTVYDPLQPELDSGGGSGGGQIYEGKLTAEGLRFGIVASRFNHALVDRLVEGAIDAIVRHGGREEDITLVRVPGSWEIPVAAGELARKEDIDAVIAIGVLIRGATPHFDYIASEVSKGLADLSLELRKPITFGVITADTLEQAIERAGTKHGNKGWEAALSAIEMANLFKSLR

SEQ ID NO: 7735 - protein, 1307 aa, Artificial Sequence
  SARS-CoV-2/England/20102000506/2020__EPI_ISL_415147 spike protein (1-1147)(K986P_V987P) LumSynth construct
MFVFLVLLPLVSSQCVNLTTRTQLPPAYTNSFTRGVYYPDKVFRSSVLHSTQDLFLPFFSNVTWFHAIHVSGTNGTKRFDNPVLPFNDGVYFASTEKSNIIRGWIFGTTLDSKTQSLLIVNNATNVVIKVCEFQFCNDPFLGVYYHKNNKSWMESEFRVYSSANNCTFEYVSQPFLMDLEGKQGNFKNLREFVFKNIDGYFKIYSKHTPINLVRDLPQGFSALEPLVDLPIGINITRFQTLLALHRSYLTPGDSSSGWTAGAAAYYVGYLQPRTFLLKYNENGTITDAVDCALDPLSETKCTLKSFTVEKGIYQTSNFRVQPTESIVRFPNITNLCPFGEVFNATRFASVYAWNRKRISNCVADYSVLYNSASFSTFKCYGVSPTKLNDLCFTNVYADSFVIRGDEVRQIAPGQTGKIADYNYKLPDDFTGCVIAWNSNNLDSKVGGNYNYLYRLFRKSNLKPFERDISTEIYQAGSTPCNGVEGFNCYFPLQSYGFQPTNGVGYQPYRVVVLSFELLHAPATVCGPKKSTNLVKNKCVNFNFNGLTGTGVLTESNKKFLPFQQFGRDIADTTDAVRDPQTLEILDITPCSFGGVSVITPGTNTSNQVAVLYQGVNCTEVPVAIHADQLTPTWRVYSTGSNVFQTRAGCLIGAEHVNNSYECDIPIGAGICASYQTQTNSPRRARSVASQSIIAYTMSLGAENSVAYSNNSIAIPTNFTISVTTEILPVSMTKTSVDCTMYICGDSTECSNLLLQYGSFCTQLNRALTGIAVEQDKNTQEVFAQVKQIYKTPPIKDFGGFNFSQILPDPSKPSKRSFIEDLLFNKVTLADAGFIKQYGYCLGDIAARDLICAQKFNGLTVLPPLLTDEMIAQYTSALLAGTITSGWTFGAGAALQIPFAMQMAYRFNGIGVTQNVLYENQKLIANQFNSAIGKIQDSLSSTASALGKLQDVVNQNAQALNTLVKQLSSNFGAISSVLNDILSRLDPPEAEVQIDRLITGRLQSLQTYVTQQLIRAAEIRASANLAATKMSECVLGQSKRVDFCGKGYHLMSFPQSAPHGVVFLHVTYVPAQEKNFTTAPAICHDGKAHFPREGVFVSNGTHWFVTQRNFYEPQIITTDNTFVSGNCDVVIGIVNNTVYDPLQPELDSGGGSGGGQIYEGKLTAEGLRFGIVASRFNHALVDRLVEGAIDAIVRHGGREEDITLVRVPGSWEIPVAAGELARKEDIDAVIAIGVLIRGATPHFDYIASEVSKGLADLSLELRKPITFGVITADTLEQAIERAGTKHGNKGWEAALSAIEMANLFKSLR

SEQ ID NO: 7736 - protein, 1307 aa, Artificial Sequence
  SARS-CoV-2/Belgium/VAG-03013/2020__EPI_ISL_415155 spike protein (1-1147)(K986P_V987P) LumSynth construct
MFVFLVLLPLVSSQCVNLTTRTQLPPAYTNSFTRGVYYPDKVFRSSVLHSTQDLFLPFFSNVTWFHAIHVSGTNGTKRFDNPVLPFNDGVYFASTEKSNIIRGWIFGTTLDSKTQSLLIVNNATNVVIKVCEFQFCNDPFLGVYYHKNNKSWMESEFRVYSSANNCTFEYVSQPFLMDLEGKQGNFKNLREFVFKNIDGYFKIYSKHTPINLVRDLPQGFSALEPLVDLPIGINITRFQTLLALHRSYLTPGDSSSGWTAGAAAYYVGYLQPRTFLLKYNENGTITDAVDCALDPLSETKCTLKSFTVEKGIYQTSNFRVQPTESIVRFPNITNLCPFGEVFNATRFASVYAWNRKRISNCVADYSVLYNSASFSTFKCYGVSPTKLNDLCFTNVYADSFVIRGDEVRQIAPGQTGKIADYNYKLPDDFTGCVIAWNSNNLDSKVGGNYNYLYRLFRKSNLKPFERDISTEIYQAGSTPCNGVEGFNCYFPLQSYGFQPTNGVGYQPYRVVVLSFELLHAPATVCGPKKSTNLVKNKCVNFNFNGLTGTGVLTESNKKFLPFQQFGRDIADTTDAVRDPQTLEILDITPCSFGGVSVITPGTNTSNQVAVLYQGVNCTEVPVAIHADQLTPTWRVYSTGSNVFQTRAGCLIGAEHVNNSYECDIPIGAGICASYQTQTNSPRRARSVASQSIIAYTMSLGAENSVAYSNNSIAIPTNFTISVTTEILPVSMTKTSVDCTMYICGDSTECSNLLLQYGSFCTQLNRALTGIAVEQDKNTQEVFAQVKQIYKTPPIKDFGGFNFSQILPDPSKPSKRSFIEDLLFNKVTLADAGFIKQYGDCLGDIAARDLICAQKFNGLTVLPPLLTDEMIAQYTSALLAGTITSGWTFGAGAALQIPFAMQMAYRFNGIGVTQNVLYENQKLIANQFNSAIGKIQDSLSSTATALGKLQDVVNQNAQALNTLVKQLSSNFGAISSVLNDILSRLDPPEAEVQIDRLITGRLQSLQTYVTQQLIRAAEIRASANLAATKMSECVLGQSKRVDFCGKGYHLMSFPQSAPHGVVFLHVTYVPAQEKNFTTAPAICHDGKAHFPREGVFVSNGTHWFVTQRNFYEPQIITTDNTFVSGNCDVVIGIVNNTVYDPLQPELDSGGGSGGGQIYEGKLTAEGLRFGIVASRFNHALVDRLVEGAIDAIVRHGGREEDITLVRVPGSWEIPVAAGELARKEDIDAVIAIGVLIRGATPHFDYIASEVSKGLADLSLELRKPITFGVITADTLEQAIERAGTKHGNKGWEAALSAIEMANLFKSLR

SEQ ID NO: 7737 - protein, 1307 aa, Artificial Sequence
  SARS-CoV-2/Belgium/BC-03016/2020__EPI_ISL_415157 spike protein (1-1147)(K986P_V987P) LumSynth construct
MFVFLVLLPLVSSQCVNLTTRTQLPPAYTNSFTRGVYYPDKVFRSSVLHSTQDLFLPFFSNVTWFHAIHVSGTNGTKRFDNPVLPFNDGVYFASTEKSNIIRGWIFGTTLDSKTQSLLIVNNATNVVIKVCEFQFCNDPFLGVYYHKNNKSWMESEFRVYSSANNCTFEYVSQPFLMDLEGKQGNFKNLREFVFKNIDGYFKIYSKHTPINLVRDLPQGFSALEPLVDLPIGINITRFQTLLALHRSYLTPGDSSSGWTAGAAAYYVGYLQPRTFLLKYNENGTITDAVDCALDPLSETKCTLKSFTVEKGIYQTSNFRVQPTESIVRFPNITNLCPFGEVFNATRFASVYAWNRKRISNCVADYSVLYNSASFSTFKCYGVSPTKLNDLCFTNVYADSFVIRGDEVRQIAPGQTGKIADYNYKLPDDFTGCVIAWNSNNLDSKVGGNYNYLYRLFRKSNLKPFERDISTEIYQAGSTPCNGVEGFNCYFPLQSYGFQPTNGVGYQPYRVVVLSFELLHAPATVCGPKKSTNLVKNKCVNFNFNGLTGTGVLTESNKKFLPFQQFGRDIADTTDAVRDPQTLEILDITPCSFGGVSVITPGTNTSNQVAVLYQGVNCTEVPVAIHADQLTPTWRVYSTGSNVFQTRAGCLIGAEHVNNSYECDIPIGAGICASYQTQTNSPRRARSVASQSIIAYTMSLGAENSVAYSNNSIAIPTNFTISVTTEILPVSMTKTSVDCTMYICGDSTECSNLLLQYGSFCTQLNRALTGIAVEQDKNTQEVFAQVKQIYKTPPIKDFGGFNFSQILPDPSKPSKRSFIEDLLFNKVTLADAGFIKQYGDCLGDIAARDLICAQKFNGLTVLPPLLTDEMIAQYTSALLAGTITSGWTFGAGAALQIPFAMQMAYRFNGIGVTQNVLYENQKLIANQFNSAIGKIQDSLSSTAPALGKLQDVVNQNAQALNTLVKQLSSNFGAISSVLNDILSRLDPPEAEVQIDRLITGRLQSLQTYVTQQLIRAAEIRASANLAATKMSECVLGQSKRVDFCGKGYHLMSFPQSAPHGVVFLHVTYVPAQEKNFTTAPAICHDGKAHFPREGVFVSNGTHWFVTQRNFYEPQIITTDNTFVSGNCDVVIGIVNNTVYDPLQPELDSGGGSGGGQIYEGKLTAEGLRFGIVASRFNHALVDRLVEGAIDAIVRHGGREEDITLVRVPGSWEIPVAAGELARKEDIDAVIAIGVLIRGATPHFDYIASEVSKGLADLSLELRKPITFGVITADTLEQAIERAGTKHGNKGWEAALSAIEMANLFKSLR

SEQ ID NO: 7738 - protein, 1307 aa, Artificial Sequence
  SARS-CoV-2/Germany/BavPat3/2020__EPI_ISL_414521 spike protein (1-1147)(K986P_V987P) LumSynth construct
MFVFLVLLPLVSSQCVNLTTRTQLPPAYTNSFTRGVYYPDKVFRSSVLHSTQDLFLPFFSNVTWFHAIHVSGTNGTKRFDNPVLPFNDGVYFASTEKSNIIRGWIFGTTLDSKTQSLLIVNNATNVVIKVCEFQFCNDPFLGVYYHKNNKSWMESEFRVYSSANNCTFEYVSQPFLMDLEGKQGNFKNLREFVFKNIDGYFKIYSKHTPINLVRDLPQGFSALEPLVDLPIGINITRFQTLLALHRSYLTPGDSSSGWTAGAAAYYVGYLQPRTFLLKYNENGTITDAVDCALDPLSETKCTLKSFTVEKGIYQTSNFRVQPTESIVRFPNITNLCPFGEVFNATRFASVYAWNRKRISNCVADYSVLYNSASFSTFKCYGVSPTKLNDLCFTNVYADSFVIRGDEVRQIAPGQTGKIADYNYKLPDDFTGCVIAWNSNNLDSKVGGNYNYLYRLFRKSNLKPFERDISTEIYQAGSTPCNGVEGFNCYFPLQSYGFQPTNGVGYQPYRVVVLSFELLHAPATVCGPKKSTNLVKNKCVNFNFNGLTGTGVLTESNKKFLPFQQFGRDIADTTDAVRDPQTLEILDITPCSFGGVSVITPGTNTSNQVAVLYQDVNCTEVPVAIHADQLTPTWRVYSTGSNVFQTRAGCLIGAEHVNNSYECDIPIGAGICASYQTQTNSPRRARSVASQSIIAYTMSLGAENSVAYSNNSIAIPTNFTISVTTEILPVSMTKTSVDCTMYICGDSTECSNLLLQYGSFCTQLNRALTGIAVEQDKNTQQVFAQVKQIYKTPPIKDFGGFNFSQILPDPSKPSKRSFIEDLLFNKVTLADAGFIKQYGDCLGDIAARDLICAQKFNGLTVLPPLLTDEMIAQYTSALLAGTITSGWTFGAGAALQIPFAMQMAYRFNGIGVTQNVLYENQKLIANQFNSAIGKIQDSLSSTASALGKLQDVVNQNAQALNTLVKQLSSNFGAISSVLNDILSRLDPPEAEVQIDRLITGRLQSLQTYVTQQLIRAAEIRASANLAATKMSECVLGQSKRVDFCGKGYHLMSFPQSAPHGVVFLHVTYVPAQEKNFTTAPAICHDGKAHFPREGVFVSNGTHWFVTQRNFYEPQIITTDNTFVSGNCDVVIGIVNNTVYDPLQPELDSGGGSGGGQIYEGKLTAEGLRFGIVASRFNHALVDRLVEGAIDAIVRHGGREEDITLVRVPGSWEIPVAAGELARKEDIDAVIAIGVLIRGATPHFDYIASEVSKGLADLSLELRKPITFGVITADTLEQAIERAGTKHGNKGWEAALSAIEMANLFKSLR

SEQ ID NO: 7739 - protein, 1307 aa, Artificial Sequence
  SARS-CoV-2/France/HF1805/2020__EPI_ISL_414628 spike protein (1-1147)(K986P_V987P) LumSynth construct
MFVFLVLLPLVSSQCVNLTTRTQLPPAYTNSFTRGVYYPDKVFRSSVLHSTQDLFLPFFSNVTWFHAIHVSGTNGTKRFDNPVLPFNDGVYFASTEKSNIIRGWIFGTTLDSKTQSLLIVNNATNVVIKVCEFQFCNDPFLGVYYHKNNKSWMESEFRVYSSANNCTFEYVSQPFLMDLEGKQGNFKNLREFVFKNIDGYFKIYSKHTPINLVRDLPQGFSALEPLVDLPIGINITRFQTLLALHRSYLTPGDSSSGWTAGAAAYYVGYLQPRTFLLKYNENGTITDAVDCALDPLSETKCTLKSFTVEKGIYQTSNFRVQPTESIVRFPNITNLCPFGEVFNATRFASVYAWNRKRISNCVADYSVLYNSASFSTFKCYGVSPTKLNDLCFTNVYADSFVIRGDEVRQIAPGQTGKIADYNYKLPDDFTGCVIAWNSNNLDSKVGGNYNYLYRLFRKSNLKPFERDISTEIYQAGSTPCNGVEGFNCYFPLQSYGFQPTNGVGYQPYRVVVLSFELLHAPATVCGPKKSTNLVKNKCVNFNFNGLTGTGVLTESNKKFLPFQQFGRDIADTTDAVRDPQTLEILDITPCSFGGVSVITPGTNTSNQVAVLYQGVNCTEVPVAIHADQLTPTWRVYSTGSNVFQTRAGCLIGAEHVNNSYECDIPIGAGICASYQTQTNSPRRARSVASQSIIAYTMSLGAENSVAYSNNSIAIPTNFTISVTTEILPVSMTKTSVDCTMYICGDSTECSNLLLQYGSFCTQLNRALTGIAVEQDKNTQEVFAQVKQIYKTPPIKDFGGFNFSQILPDPSKPSKRSFIEDLLFNKVTLADAGFIKQYGDCLGDIAARDLICAQKFNGLTVLPPLLTDEMIAQYTSALLAGTITSGWTFGAGAALQIPFAMQMAYRFNGIGVTQNVLYENQKLIANQFNSAIGKIQDSLSSTASALGKLQDVVNQNAQALNTLVKQLSSNFGAISSVLNDILSRLDPPEAEVQIDRLITGRLQSLQTYVTQQLIRAAEIRASANLAATKMSECVLGQSKRVDFCGKGYHLMSFPQSAPHGVVFLHVTYVPAQEKNFTTAPAICHDGKAHFPREGVFVSNGTHWFVTQRNFYEPQIITTDNTFVSGNCDVVIGVVNNTVYDPLQPELDSGGGSGGGQIYEGKLTAEGLRFGIVASRFNHALVDRLVEGAIDAIVRHGGREEDITLVRVPGSWEIPVAAGELARKEDIDAVIAIGVLIRGATPHFDYIASEVSKGLADLSLELRKPITFGVITADTLEQAIERAGTKHGNKGWEAALSAIEMANLFKSLR

SEQ ID NO: 7740 - protein, 1307 aa, Artificial Sequence
  SARS-CoV-2/Netherlands/ZuidHolland_9/2020__EPI_ISL_414445 spike protein (1-1147)(K986P_V987P) LumSynth construct
MFVFLVLLPLVSSQCVNLTTRTQLPPAYTNSFTRGVYYPDKVFRSSVLHSTQDLFLPFFSNVTWFHAIHVSGTNGTKRFDNPVLPFNDGVYFASTEKSNIIRGWIFGTTLDSKTQSLLIVNNATNVVIKVCEFQFCNDPFLGVYYHKNNKSWMESEFRVYSSANNCTFEYVSQPFLMDLEGKQGNFKNLREFVFKNIDGYFKIYSKHTPINLVRDLPQGFSALEPLVDLPIGINITRFQTLLALHRSYLTPGDSSSGWTAGAAAYYVGYLQPRTFLLKYNENGTITDAVDCALDPLSETKCTLKSFTVEKGIYQTSNFRVQPTESIVRFPNITNLCPFGEVFNATRFASVYAWNRKRISNCVADYSVLYNSASFSTFKCYGVSPTKLNDLCFTNVYADSFVIRGDEVRQIAPGQTGKIADYNYKLPDDFTGCVIAWNSNNLDSKVGGNYNYLYRLFRKSNLKPFERDISTEIYQAGSTPCNGVEGFNCYFPLQSYGFQPTNGVGYQPYRVVVLSFELLHAPATVCGPKKSTNLVKNKCVNFNFNGLTGTGVLTESNKKFLPFQQFGRDIADTTDAVRDPQTLEILDITPCSFGGVSVITPGTNTSNQVAVLYQGVNCTEVPVAIHADQLTPTWRVYSTGSNVFQTRAGCLIGAEHVNNSYECDIPIGAGICASYQTQTNSPRRARSVASQSIIAYTMSLGAENSVAYSNNSIAIPTNFTISVTTEILPVSMTKTSVDCTMYICGDSTECSNLLLQYGSFCTQLNRALTGIAVEQDKNTQEVFAQVKQIYKTPPIKDFGGFNFSQILPDPSKPSKRSFIEDLLFNKVTLADAGFIKQYGDCLGDIAARDLICVQKFNGLTVLPPLLTDEMIAQYTSALLAGTITSGWTFGAGAALQIPFAMQMAYRFNGIGVTQNVLYENQKLIANQFNSAIGKIQDSLSSTASALGKLQDVVNQNAQALNTLVKQLSSNFGAISSVLNDILSRLDPPEAEVQIDRLITGRLQSLQTYVTQQLIRAAEIRASANLAATKMSECVLGQSKRVDFCGKGYHLMSFPQSAPHGVVFLHVTYVPAQEKNFTTAPAICHDGKAHFPREGVFVSNGTHWFVTQRNFYEPQIITTDNTFVSGNCDVVIGIVNNTVYDPLQPELDSGGGSGGGQIYEGKLTAEGLRFGIVASRFNHALVDRLVEGAIDAIVRHGGREEDITLVRVPGSWEIPVAAGELARKEDIDAVIAIGVLIRGATPHFDYIASEVSKGLADLSLELRKPITFGVITADTLEQAIERAGTKHGNKGWEAALSAIEMANLFKSLR

SEQ ID NO: 7741 - protein, 1307 aa, Artificial Sequence
  SARS-CoV-2/Finland/FIN03032020A/2020__EPI_ISL_413602 spike protein (1-1147)(K986P_V987P) LumSynth construct
MFVFLVLLPLVSSQCVNLTTRTQLPPAYTNSFTRGVYYPDKVFRSSVLHSTQDLFLPFFSNVTWFHAIHVSGTNGTKRFDNPVLPFNDGVYFASTEKSNIIRGWIFGTTLDSKTQSLLIVNNATNVVIKVCEFQFCNDPFLGVYYHKNNKSWMESEFRVYSSANNCTFEYVSQPFLMDLEGKQGNFKNLREFVFKNIDGYFKIYSKHTPINLVRDLPQGFSALEPLVDLPIGINITRFQTLLALHRSYLTPGDSSSGWTAGAAAYYVGYLQPRTFLLKYNENGTITDAVDCALDPLSETKCTLKSFTVEKGIYQTSNFRVQPTESIVRFPNITNLCPFGEVFNATRFASVYAWNRKRISNCVADYSVLYNSASFSTFKCYGVSPTKLNDLCFTNVYADSFVIRGDEVRQIAPGQTGKIADYNYKLPDDFTGCVISWNSNNLDSKVGGNYNYLYRLFRKSNLKPFERDISTEIYQAGSTPCNGVEGFNCYFPLQSYGFQPTNGVGYQPYRVVVLSFELLHAPATVCGPKKSTNLVKNKCVNFNFNGLTGTGVLTESNKKFLPFQQFGRDIADTTDAVRDPQTLEILDITPCSFGGVSVITPGTNTSNQVAVLYQGVNCTEVPVAIHADQLTPTWRVYSTGSNVFQTRAGCLIGAEHVNNSYECDIPIGAGICASYQTQTNSPRRARSVASQSIIAYTMSLGAENSVAYSNNSIAIPTNFTISVTTEILPVSMTKTSVDCTMYICGDSTECSNLLLQYGSFCTQLNRALTGIAVEQDKNTQEVFAQVKQIYKTPPIKDFGGFNFSQILPDPSKPSKRSFIEDLLFNKVTLADAGFIKQYGDCLGDIAARDLICAQKFNGLTVLPPLLTDEMIAQYTSALLAGTITSGWTFGAGAALQIPFAMQMAYRFNGIGVTQNVLYENQKLIANQFNSAIGKIQDSLSSTASALGKLQDVVNQNAQALNTLVKQLSSNFGAISSVLNDILSRLDPPEAEVQIDRLITGRLQSLQTYVTQQLIRAAEIRASANLAATKMSECVLGQSKRVDFCGKGYHLMSFPQSAPHGVVFLHVTYVPAQEKNFTTAPAICHDGKAHFPREGVFVSNGTHWFVTQRNFYEPQIITTDNTFVSGNCDVVIGIVNNTVYDPLQPELDSGGGSGGGQIYEGKLTAEGLRFGIVASRFNHALVDRLVEGAIDAIVRHGGREEDITLVRVPGSWEIPVAAGELARKEDIDAVIAIGVLIRGATPHFDYIASEVSKGLADLSLELRKPITFGVITADTLEQAIERAGTKHGNKGWEAALSAIEMANLFKSLR

SEQ ID NO: 7742 - protein, 1307 aa, Artificial Sequence
  SARS-CoV-2/France/GE1977/2020__EPI_ISL_414632 spike protein (1-1147)(K986P_V987P) LumSynth construct
MFVFLVLLPLVSSQCVNLTTRTQLPPAYTNSFTRGVYYPDKVFRSSVLHSTQDLFLPFFSNVTWFHAIHVSGTNGTKRFDNPVLPFNDGVYFASTEKSNIIRGWIFGTTLDSKTQSLLIVNNATNVVIKVCEFQFCNDPFLGVYYHKNNKSWMESEFRVYSSANNCTFEYVSQPFLMDLEGKQGNFKNLREFVFKNIDGYFKIYSKHTPINLVRDLPQGFSALEPLVDLPIGINITRFQTLLALHRSYLTPGDSSSGWTAGAAAYYVGYLQPRTFLLKYNENGTITDAVDCALDPLSETKCTLKSFTVEKGIYQTSNFRVQPTESIVRFPNITNLCPFGEVFNATRFASVYAWNRKRISNCVADYSVLYNSASFSTFKCYGVSPTKLNDLCFTNVYADSFVIRGDEVRQIAPGQTGKIADYNYKLPDDFTGCVIAWNSNNLDSKVGGNYNYLYRLFRKSNLKPFERDISTEIYQAGSTPCNGVEGFNCYFPLQSYGFQPTNGVGYQPYRVVVLSFELLHAPATVCGPKKSTNLVKNKCVNFNFNGLTGTGVLTESNKKFLPFQQFGRDIADTTDAVRDPQTLEILDITPCSFGGVSVITPGTNTSNQVAVLYQGVNCTEVPVAIHADQLTPTWRVYSTGSNVFQTRAGCLIGAEHVNNSYECDIPIGAGICASYQTQTNSPRRARSVASQSIIAYTMSLGAENSVAYSNNSIAIPTNFTISVTTEILPVSMTKTSVDCTMYICGDSTECSNLLLQYGSFCTQLNRALTGIAVEQDKNTQEVFAQVKQIYKTPPIKDFGGFNFSQILPDPSKPSKRSFIEDLLFNKVTLADAGFIKQYGDCLGDIAARDLICAQKFNGLTVLPPLLTDEMIAQYTSALLAGTITSGWTFGAGAALQIPFAMQMAYRFNGIGVTQNVLYENQKLIANQFNSAIGKIQDSLFSTASALGKLQDVVNQNAQALNTLVKQLSSNFGAISSVLNDILSRLDPPEAEVQIDRLITGRLQSLQTYVTQQLIRAAEIRASANLAATKMSECVLGQSKRVDFCGKGYHLMSFPQSAPHGVVFLHVTYVPAQEKNFTTAPAICHDGKAHFPREGVFVSNGTHWFVTQRNFYEPQIITTDNTFVSGNCDVVIGIVNNTVYDPLQPELDSGGGSGGGQIYEGKLTAEGLRFGIVASRFNHALVDRLVEGAIDAIVRHGGREEDITLVRVPGSWEIPVAAGELARKEDIDAVIAIGVLIRGATPHFDYIASEVSKGLADLSLELRKPITFGVITADTLEQAIERAGTKHGNKGWEAALSAIEMANLFKSLR

SEQ ID NO: 7743 - protein, 1307 aa, Artificial Sequence
  SARS-CoV-2/Finland/FIN-313/2020__EPI_ISL_414641 spike protein (1-1147)(K986P_V987P) LumSynth construct
MFVFLVLLPLVSSQCVNLTTRTQLPPAYTNSFTRGVYYPDKVFRSSVLHSTQDLFLPFFSNVTWFHAIHVSGTNGTKRFDNPVLPFNDGVYFASTEKSNIIRGWIFGTTLDSKTQSLLIVNNATNVVIKVCEFQFCNDPFLGVYYHKNNKSWMESEFRVYSSANNCTFEYVSQPFLMDLEGKQGNFKNLREFVFKNIDGYFKIYSKHTPINLVRDLPQGFSALEPLVDLPIGINITRFKTLLALHRSYLTPGDSSSGWTAGAAAYYVGYLQPRTFLLKYNENGTITDAVDCALDPLSETKCTLKSFTVEKGIYQTSNFRVQPTESIVRFPNITNLCPFGEVFNATRFASVYAWNRKRISNCVADYSVLYNSASFSTFKCYGVSPTKLNDLCFTNVYADSFVIRGDEVRQIAPGQTGKIADYNYKLPDDFTGCVIAWNSNNLDSKVGGNYNYLYRLFRKSNLKPFERDISTEIYQAGSTPCNGVEGFNCYFPLQSYGFQPTNGVGYQPYRVVVLSFELLHAPATVCGPKKSTNLVKNKCVNFNFNGLTGTGVLTESNKKFLPFQQFGRDIADTTDAVRDPQTLEILDITPCSFGGVSVITPGTNTSNQVAVLYQGVNCTEVPVAIHADQLTPTWRVYSTGSNVFQTRAGCLIGAEHVNNSYECDIPIGAGICASYQTQTNSPRRARSVASQSIIAYTMSLGAENSVAYSNNSIAIPTNFTISVTTEILPVSMTKTSVDCTMYICGDSTECSNLLLQYGSFCTQLNRALTGIAVEQDKNTQEVFAQVKQIYKTPPIKDFGGFNFSQILPDPSKPSKRSFIEDLLFNKVTLADAGFIKQYGDCLGDIAARDLICAQKFNGLTVLPPLLTDEMIAQYTSALLAGTITSGWTFGAGAALQIPFAMQMAYRFNGIGVTQNVLYENQKLIANQFNSAIGKIQDSLSSTASALGKLQDVVNQNAQALNTLVKQLSSNFGAISSVLNDILSRLDPPEAEVQIDRLITGRLQSLQTYVTQQLIRAAEIRASANLAATKMSECVLGQSKRVDFCGKGYHLMSFPQSAPHGVVFLHVTYVPAQEKNFTTAPAICHDGKAHFPREGVFVSNGTHWFVTQRNFYEPQIITTDNTFVSGNCDVVIGIVNNTVYDPLQPELDSGGGSGGGQIYEGKLTAEGLRFGIVASRFNHALVDRLVEGAIDAIVRHGGREEDITLVRVPGSWEIPVAAGELARKEDIDAVIAIGVLIRGATPHFDYIASEVSKGLADLSLELRKPITFGVITADTLEQAIERAGTKHGNKGWEAALSAIEMANLFKSLR

SEQ ID NO: 7744 - protein, 1307 aa, Artificial Sequence
  SARS-CoV-2/Netherlands/ZuidHolland_2/2020__EPI_ISL_414556 spike protein (1-1147)(K986P_V987P) LumSynth construct
MFVFLVLLPLVSSQCVNLTTRTQLPPAYTNSFTRGVYYPDKVFRSSVLHSTQDLFLPFFSNVTWFHAIHVSGTNGTKRFDNPVLPFNDGVYFASTEKSNIIRGWIFGTTLDSKTQSLLIVNNATNVVIKVCEFQFCNDPFLGVYYHKNNKSWMESEFRVYSSANNCTFEYVSQPFLMDLEGKQGNFKNLREFVFKNIDGYFKIYSKHTPINLVRDLPQGFSALEPLVDLPIGINITRFQTLLALHRSYLTPGDSSSGWTAGAAAYYVGYLQPRTFLLKYNENGTITDAVDCALDPLSETKCTLKSFTVEKGIYQTSNFRVQPTESIVRFPNITNLCPFGEVFNATRFASVYAWNRKRISNCVADYSVLYNSASFSTFKCYGVSPTKLNDLCFTNVYADSFVIRGDEVRQIAPGQTGKIADYNYKLPDDFTGCVIAWNSNNLDSKVGGNYNYLYRLFRKSNLKPFERDISTEIYQAGSTPCNGVEGFNCYFPLQSYGFQPTNGVGYQPYRVVVLSFELLHAPATVCGPKKSTNLVKNKCVNFNFNGLTGTGVLTESNKKFLPFQQFGRDIADTTDAVRDPQTLEILDITPCSFGGVSVITPGTNTSNQVAVLYQGVNCTEVPVAIHADQLTPTWRVYSTGSNVFQTRAGCLIGAEHVNNSYECDIPIGAGICASYQTQTNSPRRARSVASQSIIAYTMSLGAENSVAYSNNSIAIPTNFTISVTTEILPVSMTKTSVDCTMYICGDSTECSNLLLQYGSFCTQLNRALTGIALEQDKNTQEVFAQVKQIYKTPPIKDFGGFNFSQILPDPSKPSKRSFIEDLLFNKVTLADAGFIKQYGDCLGDIAARDLICAQKFNGLTVLPPLLTDEMIAQYTSALLAGTITSGWTFGAGAALQIPFAMQMAYRFNGIGVTQNVLYENQKLIANQFNSAIGKIQDSLSSTASALGKLQDVVNQNAQALNTLVKQLSSNFGAISSVLNDILSRLDPPEAEVQIDRLITGRLQSLQTYVTQQLIRAAEIRASANLAATKMSECVLGQSKRVDFCGKGYHLMSFPQSAPHGVVFLHVTYVPAQEKNFTTAPAICHDGKAHFPREGVFVSNGTHWFVTQRNFYEPQIITTDNTFVSGNCDVVIGIVNNTVYDPLQPELDSGGGSGGGQIYEGKLTAEGLRFGIVASRFNHALVDRLVEGAIDAIVRHGGREEDITLVRVPGSWEIPVAAGELARKEDIDAVIAIGVLIRGATPHFDYIASEVSKGLADLSLELRKPITFGVITADTLEQAIERAGTKHGNKGWEAALSAIEMANLFKSLR

SEQ ID NO: 7745 - protein, 1307 aa, Artificial Sequence
  SARS-CoV-2/USA/WA-UW31/2020__EPI_ISL_414618 spike protein (1-1147)(K986P_V987P) LumSynth construct
MFVFLVLLPLVSSQCVNLTTRTQLPPAYTNSFTRGVYYPDKVFRSSVLHSTQDLFLPFFSNVTWFHAIHVSGTNGTKRFDNPVLPFNDGVYFASTEKSNIIRGWIFGTTLDSKTQSLLIVNNATNVVIKVCEFQFCNDPFLGVYYHKNNKSWMESEFRVYSSANNCTFEYVSQPFLMDLEGKQGNFKNLREFVFKNIDGYFKIYSKHTPINLVRDLPQGFSALEPLVDLPIGINITRFQTLLALHRSYLTPGDSSSGWTAGAAAYYVGYLQPRTFLLKYNENGTITDAVDCALDPLSETKCTLKSFTVEKGIYQTSNFRVQPTESIVRFPNITNLCPFGEVFNATRFASVYAWNRKRISNCVADYSVLYNSASFSTFKCYGVSPTKLNDLCFTNVYADSFVIRGDEVRQIAPGQTGKIADYNYKLPDDFTGCVIAWNSNNLDSKVGGNYNYLYRLFRKSNLKPFERDISTEIYQAGSTPCNGAEGFNCYFPLQSYGFQPTNGVGYQPYRVVVLSFELLHAPATVCGPKKSTNLVKNKCVNFNFNGLTGTGVLTESNKKFLPFQQFGRDIADTTDAVRDPQTLEILDITPCSFGGVSVITPGTNTSNQVAVLYQDVNCTEVPVAIHADQLTPTWRVYSTGSNVFQTRAGCLIGAEHVNNSYECDIPIGAGICASYQTQTNSPRRARSVASQSIIAYTMSLGAENSVAYSNNSIAIPTNFTISVTTEILPVSMTKTSVDCTMYICGDSTECSNLLLQYGSFCTQLNRALTGIAVEQDKNTQEVFAQVKQIYKTPPIKDFGGFNFSQILPDPSKPSKRSFIEDLLFNKVTLADAGFIKQYGDCLGDIAARDLICAQKFNGLTVLPPLLTDEMIAQYTSALLAGTITSGWTFGAGAALQIPFAMQMAYRFNGIGVTQNVLYENQKLIANQFNSAIGKIQDSLSSTASALGKLQDVVNQNAQALNTLVKQLSSNFGAISSVLNDILSRLDPPEAEVQIDRLITGRLQSLQTYVTQQLIRAAEIRASANLAATKMSECVLGQSKRVDFCGKGYHLMSFPQSAPHGVVFLHVTYVPAQEKNFTTAPAICHDGKAHFPREGVFVSNGTHWFVTQRNFYEPQIITTDNTFVSGNCDVVIGIVNNTVYDPLQPELDSGGGSGGGQIYEGKLTAEGLRFGIVASRFNHALVDRLVEGAIDAIVRHGGREEDITLVRVPGSWEIPVAAGELARKEDIDAVIAIGVLIRGATPHFDYIASEVSKGLADLSLELRKPITFGVITADTLEQAIERAGTKHGNKGWEAALSAIEMANLFKSLR

SEQ ID NO: 7746 - protein, 1307 aa, Artificial Sequence
  SARS-CoV-2/South Korea/SNU01/2020__EPI_ISL_411929 spike protein (1-1147)(K986P_V987P) LumSynth construct
MFVFLVLLPLVSSQCVNLTTRTQLPPAYTNSFTRGVYYPDKVFRSSVLHSTQDLFLPFFSNVTWFHAIHVSGTNGTKRFDNPVLPFNDGVYFASTEKSNIIRGWIFGTTLDSKTQSLLIVNNATNVVIKVCEFQFCNDPFLGVYYHKNNKSWMESEFRVYSSANNCTFEYVSQPFLMDLEGKQGNFKNLREFVFKNIDGYFKIYSKHTPINLVRDLPQGFWALEPLVDLPIGINITRFQTLLALHRSYLTPGDSSSGWTAGAAAYYVGYLQPRTFLLKYNENGTITDAVDCALDPLSETKCTLKSFTVEKGIYQTSNFRVQPTESIVRFPNITNLCPFGEVFNATRFASVYAWNRKRISNCVADYSVLYNSASFSTFKCYGVSPTKLNDLCFTNVYADSFVIRGDEVRQIAPGQTGKIADYNYKLPDDFTGCVIAWNSNNLDSKVGGNYNYLYRLFRKSNLKPFERDISTEIYQAGSTPCNGVEGFNCYFPLQSYGFQPTNGVGYQPYRVVVLSFELLHAPATVCGPKKSTNLVKNKCVNFNFNGLTGTGVLTESNKKFLPFQQFGRDIADTTDAVRDPQTLEILDITPCSFGGVSVITPGTNTSNQVAVLYQDVNCTEVPVAIHADQLTPTWRVYSTGSNVFQTRAGCLIGAEHVNNSYECDIPIGAGICASYQTQTNSPRRARSVASQSIIAYTMSLGAENSVAYSNNSIAIPTNFTISVTTEILPVSMTKTSVDCTMYICGDSTECSNLLLQYGSFCTQLNRALTGIAVEQDKNTQEVFAQVKQIYKTPPIKDFGGFNFSQILPDPSKPSKRSFIEDLLFNKVTLADAGFIKQYGDCLGDIAARDLICAQKFNGLTVLPPLLTDEMIAQYTSALLAGTITSGWTFGAGAALQIPFAMQMAYRFNGIGVTQNVLYENQKLIANQFNSAIGKIQDSLSSTASALGKLQDVVNQNAQALNTLVKQLSSNFGAISSVLNDILSRLDPPEAEVQIDRLITGRLQSLQTYVTQQLIRAAEIRASANLAATKMSECVLGQSKRVDFCGKGYHLMSFPQSAPHGVVFLHVTYVPAQEKNFTTAPAICHDGKAHFPREGVFVSNGTHWFVTQRNFYEPQIITTDNTFVSGNCDVVIGIVNNTVYDPLQPELDSGGGSGGGQIYEGKLTAEGLRFGIVASRFNHALVDRLVEGAIDAIVRHGGREEDITLVRVPGSWEIPVAAGELARKEDIDAVIAIGVLIRGATPHFDYIASEVSKGLADLSLELRKPITFGVITADTLEQAIERAGTKHGNKGWEAALSAIEMANLFKSLR

SEQ ID NO: 7747 - protein, 1307 aa, Artificial Sequence
  SARS-CoV-2/China/WF0004/2020__EPI_ISL_413694 spike protein (1-1147)(K986P_V987P) LumSynth construct
MFVFLVLLPLVSSQCVNLTTRTQLPPAYTNSFTRGVYYPDKVFRSSVLHSTQDLFLPFFSNVTWFHAIHVSGTNGTKRFDNPVLPFNDGVYFASTEKSNIIRGWIFGTTLDSKTQSLLIVNNATNVVIKVCEFQFCNDPFLGVYYHKNNKSWTESEFRVYSSANNCTFEYVSQPFLMDLEGKQGNFKNLREFVFKNIDGYFKIYSKHTPINLVRDLPQGFSALEPLVDLPIGINITRFQTLLALHRSYLTPGDSSSGWTAGAAAYYVGYLQPRTFLLKYNENGTITDAVDCALDPLSETKCTLKSFTVEKGIYQTSNFRVQPTESIVRFPNITNLCPFGEVFNATRFASVYAWNRKRISNCVADYSVLYNSASFSTFKCYGVSPTKLNDLCFTNVYADSFVIRGDEVRQIAPGQTGKIADYNYKLPDDFTGCVIAWNSNNLDSKVGGNYNYLYRLFRKSNLKPFERDISTEIYQAGSTPCNGVEGFNCYFPLQSYGFQPTNGVGYQPYRVVVLSFELLHAPATVCGPKKSTNLVKNKCVNFNFNGLTGTGVLTESNKKFLPFQQFGRDIADTTDAVRDPQTLEILDITPCSFGGVSVITPGTNTSNQVAVLYQDVNCTEVPVAIHADQLTPTWRVYSTGSNVFQTRAGCLIGAEHVNNSYECDIPIGAGICASYQTQTNSPRRARSVASQSIIAYTMSLGAENSVAYSNNSIAIPTNFTISVTTEILPVSMTKTSVDCTMYICGDSTECSNLLLQYGSFCTQLNRALTGIAVEQDKNTQEVFAQVKQIYKTPPIKDFGGFNFSQILPDPSKPSKRSFIEDLLFNKVTLADAGFIKQYGDCLGDIAARDLICAQKFNGLTVLPPLLTDEMIAQYTSALLAGTITSGWTFGAGAALQIPFAMQMAYRFNGIGVTQNVLYENQKLIANQFNSAIGKIQDSLSSTASALGKLQDVVNQNAQALNTLVKQLSSNFGAISSVLNDILSRLDPPEAEVQIDRLITGRLQSLQTYVTQQLIRAAEIRASANLAATKMSECVLGQSKRFDFCGKGYHLMSFPQSAPHGVVFLHVTYVPAQEKNFTTAPAICHDGKAHFPREGVFVSNGTHWFVTQRNFYEPQIITTDNTFVSGNCDVVIGIVNNTVYDPLQPELDSGGGSGGGQIYEGKLTAEGLRFGIVASRFNHALVDRLVEGAIDAIVRHGGREEDITLVRVPGSWEIPVAAGELARKEDIDAVIAIGVLIRGATPHFDYIASEVSKGLADLSLELRKPITFGVITADTLEQAIERAGTKHGNKGWEAALSAIEMANLFKSLR

SEQ ID NO: 7748 - protein, 1307 aa, Artificial Sequence
  SARS-CoV-2/China/WF0028/2020__EPI_ISL_413791 spike protein (1-1147)(K986P_V987P) LumSynth construct
MFVFLVLLPLVSSQCVNLTTRTQLPPAYTNSFTRGVYYPDKVFRSSVLHSTQDLFLPFFSNVTWFHAIHVSGTNGTKRFDNPVLPFNDGVYFASTEKSNIIRGWIFGTTLDSKTQSLLIVNNATNVVIKVCEFQFCNDPFLGVYYHKNNKSWMESEFRVYSSANNCTFEYVSQPFLMDLEGKQGNFKNLREFVFKNIDGYFKIYSKHTPINLVRDLPQGFSALEPLVDLPIGINITRFQTLLALHRSYLTPGDSSSGWTAGAAAYYVGYLQPRTFLLKYNENGTITDAVDCALDPLSETKCTLKSFTVEKGIYQTSNFRVQPTESIVRFPNITNLCPFGEVFNATRFASVYAWNRKRISNCVADYSVLYNSASFSTFKCYGVSPTKLNDLCFTNVYADSFVIRGDEVRQIAPGQTGKIADYNYKLPDDFTGCVIAWNSNNLDSKVGGNYNYLYRLFRKSNLKPFERDISTEIYQAGSTPCNGVEGFNCYFPLQSYGFQPTNGVGYQPYRVVVLSFELLHAPATVCGPKKSTNLVKNKCVNFNFNGLTGTGVLTESNKKFLPFQQFGRDIADTTDAVRDPQTLEILDITPCSFGGVSVITPGTNTSNQVAVLYQDVNCTEVPVAIHADQLTPTWRVYSTGSNVFQTRAGCLIGAEHVNNSYECDIPIGAGICASYQTQTNSPRRARSVASQSIIAYTMSLGAENSVAYSNNSIAIPTNFTISVTTEILPVSMTKTSVDCTMYICGDSTECSNLLLQYGSFCTQLNRALTGIAVEQDKNTQEVFAQVKQIYKTPPIKDFGGFNFSQILPDPSKPSKRSFIEDLLFNKVTLADAGFIKQYGDCLGDIAARDLICAQKFNGLTVLPPLLTDEMIAQYTSALLAGTITSGWTFGAGAALQIPFAMQMAYRFNGIGVTQNVLYENQKLIANQFNSAIGKIQDSLSSTASALGKLQDVVNQNAQALNTLVKQLSSNFGAISSVLNDILSRLDPPEAEVQIDRLITGRLQSLQTYVTQQLIRAAEIRASANLAATKMSECVLGQSKRVDFCGKGYHLMSFPQSAPHGVVFLHVTYVPAQEKNFTTAPAICHDGKAHFPREGVFVSNGTHWFVTQRNFYEPQIITTDNTFVSGNCDVVIGIVNNTVYDPLQPELESGGGSGGGQIYEGKLTAEGLRFGIVASRFNHALVDRLVEGAIDAIVRHGGREEDITLVRVPGSWEIPVAAGELARKEDIDAVIAIGVLIRGATPHFDYIASEVSKGLADLSLELRKPITFGVITADTLEQAIERAGTKHGNKGWEAALSAIEMANLFKSLR

SEQ ID NO: 7749 - protein, 1307 aa, Artificial Sequence
  SARS-CoV-2/2019-nCoV/USA-CruiseA-18/2020__MT159716.1 spike protein (1-1147)(K986P_V987P) LumSynth construct
MFVFLVLLPLVSSQCVNLTTRTQLPPAYTNSFTRGVYYPDKVFRSSVLHSTQDLFLPFFSNVTWFHAIHVSGTNGTKRFDNPVLPFNDGVYFASTEKSNIIRGWIFGTTLDSKTQSLLIVNNATNVVIKVCEFQFCNDPFLGVYYHKNNKSWMESELRVYSSANNCTFEYVSQPFLMDLEGKQGNFKNLREFVFKNIDGYFKIYSKHTPINLVRDLPQGFSALEPLVDLPIGINITRFQTLLALHRSYLTPGDSSSGWTAGAAAYYVGYLQPRTFLLKYNENGTITDAVDCALDPLSETKCTLKSFTVEKGIYQTSNFRVQPTESIVRFPNITNLCPFGEVFNATRFASVYAWNRKRISNCVADYSVLYNSASFSTFKCYGVSPTKLNDLCFTNVYADSFVIRGDEVRQIAPGQTGKIADYNYKLPDDFTGCVIAWNSNNLDSKVGGNYNYLYRLFRKSNLKPFERDISTEIYQAGSTPCNGVEGFNCYFPLQSYGFQPTNGVGYQPYRVVVLSFELLHAPATVCGPKKSTNLVKNKCVNFNFNGLTGTGVLTESNKKFLPFQQFGRDIADTTDAVRDPQTLEILDITPCSFGGVSVITPGTNTSNQVAVLYQDVNCTEVPVAIHADQLTPTWRVYSTGSNVFQTRAGCLIGAEHVNNSYECDIPIGAGICASYQTQTNSPRRARSVASQSIIAYTMSLGAENSVAYSNNSIAIPTNFTISVTTEILPVSMTKTSVDCTMYICGDSTECSNLLLQYGSFCTQLNRALTGIAVEQDKNTQEVFAQVKQIYKTPPIKDFGGFNFSQILPDPSKPSKRSFIEDLLFNKVTLADAGFIKQYGDCLGDIAARDLICAQKFNGLTVLPPLLTDEMIAQYTSALLAGTITSGWTFGAGAALQIPFAMQMAYRFNGIGVTQNVLYENQKLIANQFNSAIGKIQDSLSSTASALGKLQDVVNQNAQALNTLVKQLSSNFGAISSVLNDILSRLDPPEAEVQIDRLITGRLQSLQTYVTQQLIRAAEIRASANLAATKMSECVLGQSKRVDFCGKGYHLMSFPQSAPHGVVFLHVTYVPAQEKNFTTAPAICHDGKAHFPREGVFVSNGTHWFVTQRNFYEPQIITTDNTFVSGNCDVVIGIVNNTVYDPLQPELDSGGGSGGGQIYEGKLTAEGLRFGIVASRFNHALVDRLVEGAIDAIVRHGGREEDITLVRVPGSWEIPVAAGELARKEDIDAVIAIGVLIRGATPHFDYIASEVSKGLADLSLELRKPITFGVITADTLEQAIERAGTKHGNKGWEAALSAIEMANLFKSLR

SEQ ID NO: 7750 - protein, 1307 aa, Artificial Sequence
  SARS-CoV-2/SARS-CoV-2/Yunnan-01/human/2020/CHN__MT049951.1 spike protein (1-1147)(K986P_V987P) LumSynth construct
MFVFLVLLPLVSSQCVNLTTRTQLPPANTNSFTRGVYYPDKVFRSSVLHSTQDLFLPFFSNVTWFHAIHVSGTNGTKRFDNPVLPFNDGVYFASTEKSNIIRGWIFGTTLDSKTQSLLIVNNATNVVIKVCEFQFCNDPFLGVYYHKNNKSWMESEFRVYSSANNCTFEYVSQPFLMDLEGKQGNFKNLREFVFKNIDGYFKIYSKHTPINLVRDLPQGFSALEPLVDLPIGINITRFQTLLALHRSYLTPGDSSSGWTAGAAAYYVGYLQPRTFLLKYNENGTITDAVDCALDPLSETKCTLKSFTVEKGIYQTSNFRVQPTESIVRFPNITNLCPFGEVFNATRFASVYAWNRKRISNCVADYSVLYNSASFSTFKCYGVSPTKLNDLCFTNVYADSFVIRGDEVRQIAPGQTGKIADYNYKLPDDFTGCVIAWNSNNLDSKVGGNYNYLYRLFRKSNLKPFERDISTEIYQAGSTPCNGVEGFNCYFPLQSYGFQPTNGVGYQPYRVVVLSFELLHAPATVCGPKKSTNLVKNKCVNFNFNGLTGTGVLTESNKKFLPFQQFGRDIADTTDAVRDPQTLEILDITPCSFGGVSVITPGTNTSNQVAVLYQDVNCTEVPVAIHADQLTPTWRVYSTGSNVFQTRAGCLIGAEHVNNSYECDIPIGAGICASYQTQTNSPRRARSVASQSIIAYTMSLGAENSVAYSNNSIAIPTNFTISVTTEILPVSMTKTSVDCTMYICGDSTECSNLLLQYGSFCTQLNRALTGIAVEQDKNTQEVFAQVKQIYKTPPIKDFGGFNFSQILPDPSKPSKRSFIEDLLFNKVTLADAGFIKQYGDCLGDIAARDLICAQKFNGLTVLPPLLTDEMIAQYTSALLAGTITSGWTFGAGAALQIPFAMQMAYRFNGIGVTQNVLYENQKLIANQFNSAIGKIQDSLSSTASALGKLQDVVNQNAQALNTLVKQLSSNFGAISSVLNDILSRLDPPEAEVQIDRLITGRLQSLQTYVTQQLIRAAEIRASANLAATKMSECVLGQSKRVDFCGKGYHLMSFPQSAPHGVVFLHVTYVPAQEKNFTTAPAICHDGKAHFPREGVFVSNGTHWFVTQRNFYEPQIITTDNTFVSGNCDVVIGIVNNTVYDPLQPELDSGGGSGGGQIYEGKLTAEGLRFGIVASRFNHALVDRLVEGAIDAIVRHGGREEDITLVRVPGSWEIPVAAGELARKEDIDAVIAIGVLIRGATPHFDYIASEVSKGLADLSLELRKPITFGVITADTLEQAIERAGTKHGNKGWEAALSAIEMANLFKSLR

SEQ ID NO: 7751 - protein, 1307 aa, Artificial Sequence
  SARS-CoV-2/USA/WA-UW292/2020__EPI_ISL_418077 spike protein (1-1147)(K986P_V987P) LumSynth construct
MFVFLVLLPLVSSQCVNLTTRTQLPPAYTNSFTRGVYYPDKVFRSSVLHSTQDLFLPFFSNVTWFHAIHVSGTNGTKRFDNPVLPFNDGVYFASTEKSNIIRGWIFGTTLDSKTQSLLIVNNATNVVIKVCEFQFCNDPFLGVYYHKNNKSWMESEFRVYSSANNCTFEYVSQPFLMDLEGKQGNFKNLREFVFKNIDGYFKIYSKHTPINLVRDLPQGFSALEPLVDLPIGINITRFQTLLALHRSYLTPGDSSSGWTAGAAAYYVGYLQPRTFLLKYNENGTITDAVDCALDPLSETKCTLKSFTVEKGIYQTSNFRVQPTESIVRFPNITNLCPFGEVFNATRFASVYAWNRKRISNCVADYSVLYNSASFSTFKCYGVSPTKLNDLCFTNVYADSFVIRGDEVRQIAPGQTGKIADYNYKLPDDFTGCVIAWNSNNLDSKVGGNYNYLYRLFRKSNLKPFERDISTEIYQASSTPCNGVEGFNCYFPLQSYGFQPTNGVGYQPYRVVVLSFELLHAPATVCGPKKSTNLVKNKCVNFNFNGLTGTGVLTESNKKFLPFQQFGRDIADTTDAVRDPQTLEILDITPCSFGGVSVITPGTNTSNQVAVLYQDVNCTEVPVAIHADQLTPTWRVYSTGSNVFQTRAGCLIGAEHVNNSYECDIPIGAGICASYQTQTNSPRRARSVASQSIIAYTMSLGAENSVAYSNNSIAIPTNFTISVTTEILPVSMTKTSVDCTMYICGDSTECSNLLLQYGSFCTQLNRALTGIAVEQDKNTQEVFAQVKQIYKTPPIKDFGGFNFSQILPDPSKPSKRSFIEDLLFNKVTLADAGFIKQYGDCLGDIAARDLICAQKFNGLTVLPPLLTDEMIAQYTSALLAGTITSGWTFGAGAALQIPFAMQMAYRFNGIGVTQNVLYENQKLIANQFNSAIGKIQDSLSSTASALGKLQDVVNQNAQALNTLVKQLSSNFGAISSVLNDILSRLDPPEAEVQIDRLITGRLQSLQTYVTQQLIRAAEIRASANLAATKMSECVLGQSKRVDFCGKGYHLMSFPQSAPHGVVFLHVTYVPAQEKNFTTAPAICHDGKAHFPREGVFVSNGTHWFVTQRNFYEPQIITTDNTFVSGNCDVVIGIVNNTVYDPLQPELDSGGGSGGGQIYEGKLTAEGLRFGIVASRFNHALVDRLVEGAIDAIVRHGGREEDITLVRVPGSWEIPVAAGELARKEDIDAVIAIGVLIRGATPHFDYIASEVSKGLADLSLELRKPITFGVITADTLEQAIERAGTKHGNKGWEAALSAIEMANLFKSLR

SEQ ID NO: 7752 - protein, 1307 aa, Artificial Sequence
  SARS-CoV-2/Iceland/192/2020__EPI_ISL_417819 spike protein (1-1147)(K986P_V987P) LumSynth construct
MFVFFVLLPLVSSQCVNLTTRTQLPPAYTNSFTRGVYYPDKVFRSSVLHSTQDLFLPFFSNVTWFHAIHVSGTNGTKRFDNPVLPFNDGVYFASTEKSNIIRGWIFGTTLDSKTQSLLIVNNATNVVIKVCEFQFCNDPFLGVYYHKNNKSWMESEFRVYSSANNCTFEYVSQPFLMDLEGKQGNFKNLREFVFKNIDGYFKIYSKHTPINLVRDLPQGFSALEPLVDLPIGINITRFQTLLALHRSYLTPGDSSSGWTAGAAAYYVGYLQPRTFLLKYNENGTITDAVDCALDPLSETKCTLKSFTVEKGIYQTSNFRVQPTESIVRFPNITNLCPFGEVFNATRFASVYAWNRKRISNCVADYSVLYNSASFSTFKCYGVSPTKLNDLCFTNVYADSFVIRGDEVRQIAPGQTGKIADYNYKLPDDFTGCVIAWNSNNLDSKVGGNYNYLYRLFRKSNLKPFERDISTEIYQAGSTPCNGVEGFNCYFPLQSYGFQPTNGVGYQPYRVVVLSFELLHAPATVCGPKKSTNLVKNKCVNFNFNGLTGTGVLTESNKKFLPFQQFGRDIADTTDAVRDPQTLEILDITPCSFGGVSVITPGTNTSNQVAVLYQGVNCTEVPVAIHADQLTPTWRVYSTGSNVFQTRAGCLIGAEHVNNSYECDIPIGAGICASYQTQTNSPRRARSVASQSIIAYTMSLGAENSVAYSNNSIAIPTNFTISVTTEILPVSMTKTSVDCTMYICGDSTECSNLLLQYGSFCTQLNRALTGIAVEQDKNTQEVFAQVKQIYKTPPIKDFGGFNFSQILPDPSKPSKRSFIEDLLFNKVTLADAGFIKQYGDCLGDIAARDLICAQKFNGLTVLPPLLTDEMIAQYTSALLAGTITSGWTFGAGAALQIPFAMQMAYRFNGIGVTQNVLYENQKLIANQFNSAIGKIQDSLSSTASALGKLQDVVNQNAQALNTLVKQLSSNFGAISSVLNDILSRLDPPEAEVQIDRLITGRLQSLQTYVTQQLIRAAEIRASANLAATKMSECVLGQSKRVDFCGKGYHLMSFPQSAPHGVVFLHVTYVPAQEKNFTTAPAICHDGKAHFPREGVFVSNGTHWFVTQRNFYEPQIITTDNTFVSGNCDVVIGIVNNTVYDPLQPELDSGGGSGGGQIYEGKLTAEGLRFGIVASRFNHALVDRLVEGAIDAIVRHGGREEDITLVRVPGSWEIPVAAGELARKEDIDAVIAIGVLIRGATPHFDYIASEVSKGLADLSLELRKPITFGVITADTLEQAIERAGTKHGNKGWEAALSAIEMANLFKSLR

SEQ ID NO: 7753 - protein, 1307 aa, Artificial Sequence
  SARS-CoV-2/Belgium/ULG-6939/2020__EPI_ISL_417020 spike protein (1-1147)(K986P_V987P) LumSynth construct
MFVFLVLLPLVSSQCVNLTTRTQLPPAYTNSFTRGVYYPDKVFRSSVLHSTQDLFLPFFSNVTWFHAIHVSGTNGTKRFDNPVLPFNDGVYFASTEKSNIIRGWIFGTTLDSKTQSLLIVNNATNVVIKVCEFQFCNDPFLGVYYHKNNKSWMESEFRVYSSANNCTFEYVSQPFLMDLEGKQGNFKNLREFVFKNIDGYFKIYSKHTPINLVRDLPQGFSALEPLVDLPIGINITRFQTLLALHRSYLTPGDSSSGWTAGAAAYYVGYLQPRTFLLKYNENGTITDAVDCALDPLSETKCTLKSFTVEKGIYQTSNFRVQPTESIVRFPNITNLCPFGEVFNATRFASVYAWNRKRISNCVADYSVLYNSASFSTFKCYGVSPTKLNDLCFTNVYADSFVIRGDEVRQIAPGQTGKIADYNYKLPDDFTGCVIAWNSNNLDSKVGGNYNYLYRLFRKSNLKPFERDISTEIYQAGSTPCNGVEGFNCYFPLQSYGFQPTNGVGYQPYRVVVLSFELLHAPATVCGPKKSTNLVKNKCVNFNFNGLTGTGVLTESNKKFLPFQQFGRDIADTTDAVRDPQTLEILDITPCSFGGVSVITPGTNTSNQVAVLYQGVNCTEVPVAIHADQLTPTWRVYSTGSNVFQTRAGCLIGAEHVNNSYECDIPIGAGICASYQTQTNSPRRARSVASQSIIAYTMSLGAENSVVYSNNSIAIPTNFTISVTTEILPVSMTKTSVDCTMYICGDSTECSNLLLQYGSFCTQLNRALTGIAVEQDKNTQEVFAQVKQIYKTPPIKDFGGFNFSQILPDPSKPSKRSFIEDLLFNKVTLADAGFIKQYGDCLGDIAARDLICAQKFNGLTVLPPLLTDEMIAQYTSALLAGTITSGWTFGAGAALQIPFAMQMAYRFNGIGVTQNVLYENQKLIANQFNSAIGKIQDSLSSTASALGKLQDVVNQNAQALNTLVKQLSSNFGAISSVLNDILSRLDPPEAEVQIDRLITGRLQSLQTYVTQQLIRAAEIRASANLAATKMSECVLGQSKRVDFCGKGYHLMSFPQSAPHGVVFLHVTYVPAQEKNFTTAPAICHDGKAHFPREGVFVSNGTHWFVTQRNFYEPQIITTDNTFVSGNCDVVIGIVNNTVYDPLQPELDSGGGSGGGQIYEGKLTAEGLRFGIVASRFNHALVDRLVEGAIDAIVRHGGREEDITLVRVPGSWEIPVAAGELARKEDIDAVIAIGVLIRGATPHFDYIASEVSKGLADLSLELRKPITFGVITADTLEQAIERAGTKHGNKGWEAALSAIEMANLFKSLR

SEQ ID NO: 7754 - protein, 1307 aa, Artificial Sequence
  SARS-CoV-2/France/HF2496/2020__EPI_ISL_418231 spike protein (1-1147)(K986P_V987P) LumSynth construct
MFVFLVLLPLVSSQCVNLTTRTQLPPAYTNSFTRGVYYPDKVFRSSVLHSTQDLFLPFFSNVTWFHAIHVSGTNGTKRFDNPVLPFNDGVYFASTEKSNIIRGWIFGTTLDSKTQSLLIVNNATNVVIKVCEFQFCNDPFLGVYYHKNNKSWMESEFRVYSSANNCTFEYVSQPFLMDLEGKQGNFKNLREFVFKNIDGYFKIYSKHTPINLVRDLPQGFSALEPLVDLPIGINITRFQTLLALHRSYLTPGDSSSGWTAGAAAYYVGYLQPRTFLLKYNENGTITDAVDCALDPLSETKCTLKSFTVEKGIYQTSNFRVQPTESIVRFPNITNLCPFGEVFNATRFASVYAWNRKRISNCVADYSVLYNSASFSTFKCYGVSPTKLNDLCFTNVYADSFVIRGDEVRQIAPGQTGKIADYNYKLPDDFTGCVIAWNSNNLDSKVGGNYNYLYRLFRKSNLKPFERDISTEIYQAGSTPCNGVEGFNCYFPLQSYGFQPTNGVGYQPYRVVVLSFELLHAPATVCGPKKSTNLVKNKCVNFNFNGLTGTGVLTESNKKFLPFQQFGRDIADTTDAVRDPQTLEILDITPCSFGGVSVITPGTNTSNQVAVLYQGVNCTEVPVAIHADQLTPTWRVYSTGSNVFQTRAGCLIGAEHVNNSYECDIPIGAGICASYQTQTNSPRRARSVASQSIIAYTMSLGAENSVAYSNNSIAIPTNFTISVTTEILPVSMTKTSVDCTMYICGDSTECSNLLLQYGSFCTQLNRALTGIAVEQDKNTQEVFAQVKQIYKTPPIKDFGGFNFSQILPDPSKPSKRSFIEDLLFNKVTLADAGFIKQYGDCLGDIVARDLICAQKFNGLTVLPPLLTDEMIAQYTSALLAGTITSGWTFGAGAALQIPFAMQMAYRFNGIGVTQNVLYENQKLIANQFNSAIGKIQDSLSSTASALGKLQDVVNQNAQALNTLVKQLSSNFGAISSVLNDILSRLDPPEAEVQIDRLITGRLQSLQTYVTQQLIRAAEIRASANLAATKMSECVLGQSKRVDFCGKGYHLMSFPQSAPHGVVFLHVTYVPAQEKNFTTAPAICHDGKAHFPREGVFVSNGTHWFVTQRNFYEPQIITTDNTFVSGNCDVVIGIVNNTVYDPLQPELDSGGGSGGGQIYEGKLTAEGLRFGIVASRFNHALVDRLVEGAIDAIVRHGGREEDITLVRVPGSWEIPVAAGELARKEDIDAVIAIGVLIRGATPHFDYIASEVSKGLADLSLELRKPITFGVITADTLEQAIERAGTKHGNKGWEAALSAIEMANLFKSLR

SEQ ID NO: 7755 - protein, 1307 aa, Artificial Sequence
  SARS-CoV-2/USA/WA-UW291/2020__EPI_ISL_418076 spike protein (1-1147)(K986P_V987P) LumSynth construct
MFVFLVLLPLVSSQCVNLTTRTQLPPAYTNSFTRGVYYPDKVFRSSVLHSTQDLFLPFFSNVTWFHAIHVSGTNGTKRFDNPVLPFNDGVYFASTEKSNIIRGWIFGTTLDSKTQSLLIVNNATNVVIKVCEFQFCNDPFLGVYYHKNNKSWMESEFRVYSSANNCTFEYVSQPFLMDLEGKQGNFKNLREFVFKNIDGYFKIYSKHTPINLVRDLPQGFSALEPLVDLPIGINITRFQTLLALHRSYLTPGDSSSGWTAGAAAYYVGYLQPRTFLLKYNENGTITDAVDCALDPLSETKCTLKSFTVEKGIYQTSNFRVQPTESIVRFPNITNLCPFGEVFNATRFASVYAWNRKRISNCVADYSVLYNSASFSTFKCYGVSPTKLNDLCFTNVYADSFVIRGDEVRQIAPGQTGKIADYNYKLPDDFTGCVIAWNSNNLDSKVGGNYNYLYRLFRKSNLKPFERDISTEIYQAGSTPCNGVEGFNCYFPLQSYGFQPTNGVGYQPYRVVVLSFELLHAPATVCGPKKSTNLVKNKCVNFNFNGLTGTGVLTESNKKFLPFQQFGRDIADTTDAVRDPQTLEILDITPCSFGGVSVITPGTNTSNQVAVLYQGVNCTEVPVAIHADQLTPTWRVYSTGSNVFQTRAGCLIGAEHVNNSYECDIPIGAGICASYQTQTNSPRRARSVASQSIIAYTMSLGAENSVAYSNNSIAIPTNFTISVTTEILPVSMTKTSVDCTMYICGDSTECSNLLLQYGSFCTQLNRALTGIAVEQDKNTQEVFAQVKQIYKTPPIKDFGGFNFSQILPDPSKPSKRSFIEDLLFNKVTLADAGFIKQYGDCLGDIAARDLICAQKFNGLTVLPPLLTDEMIAQYTSALLAGTITSGWTFGAGAALQIPFAMQMAYRFNGIGVTQNVLYENQKLIANQFNSAIGKIQYSLSSTASALGKLQDVVNQNAQALNTLVKQLSSNFGAISSVLNDILSRLDPPEAEVQIDRLITGRLQSLQTYVTQQLIRAAEIRASANLAATKMSECVLGQSKRVDFCGKGYHLMSFPQSAPHGVVFLHVTYVPAQEKNFTTAPAICHDGKAHFPREGVFVSNGTHWFVTQRNFYEPQIITTDNTFVSGNCDVVIGIVNNTVYDPLQPELDSGGGSGGGQIYEGKLTAEGLRFGIVASRFNHALVDRLVEGAIDAIVRHGGREEDITLVRVPGSWEIPVAAGELARKEDIDAVIAIGVLIRGATPHFDYIASEVSKGLADLSLELRKPITFGVITADTLEQAIERAGTKHGNKGWEAALSAIEMANLFKSLR

SEQ ID NO: 7756 - protein, 1307 aa, Artificial Sequence; identical to SEQ ID NO: 7719
  SARS-CoV-2/Portugal/PT0034/2020__EPI_ISL_418019 spike protein (1-1147)(K986P_V987P) LumSynth construct

SEQ ID NO: 7757 - protein, 1307 aa, Artificial Sequence; identical to SEQ ID NO: 7711
  SARS-CoV-2/Iceland/202/2020__EPI_ISL_417750 spike protein (1-1147)(K986P_V987P) LumSynth construct

SEQ ID NO: 7758 - protein, 1307 aa, Artificial Sequence
  SARS-CoV-2/USA/WA-UW261/2020__EPI_ISL_418046 spike protein (1-1147)(K986P_V987P) LumSynth construct
MFVFLVLLPLVSSQCVNLTTRTQLPPAYTNSFTRGVYYPDKVFRSSVLHSTQDLFLPFFSNVTWFHAIHVSGTNGTKRFDNPVLPFNDGVYFASTEKSNIIRGWIFGTTLDSKTQSLLIVNNATNVVIKVCEFQFCNDPFLGVYYHKNNKSWMESEFRVYSSANNCTFEYVSQPFLMDLEGKQGNFKNLREFVFKNIDGYFKIYSKHTPINLVRDLPQGFSALEPLVDLPIGINITRFQTLLALHRSYLTPGDSSSGWTAGAAAYYVGYLQPRTFLLKYNENGTITDAVDCALDPLSETKCTLKSFTVEKGIYQTSNFRVQPTESIVRFPNITNLCPFGEVFNATRFTSVYAWNRKRISNCVADYSVLYNSASFSTFKCYGVSPTKLNDLCFTNVYADSFVIRGDEVRQIAPGQTGKIADYNYKLPDDFTGCVIAWNSNNLDSKVGGNYNYLYRLFRKSNLKPFERDISTEIYQAGSTPCNGVEGFNCYFPLQSYGFQPTNGVGYQPYRVVVLSFELLHAPATVCGPKKSTNLVKNKCVNFNFNGLTGTGVLTESNKKFLPFQQFGRDIADTTDAVRDPQTLEILDITPCSFGGVSVITPGTNTSNQVAVLYQDVNCTEVPVAIHADQLTPTWRVYSTGSNVFQTRAGCLIGAEHVNNSYECDIPIGAGICASYQTQTNSPRRARSVASQSIIAYTMSLGAENSVAYSNNSIAIPTNFTISVTTEILPVSMTKTSVDCTMYICGDSTECSNLLLQYGSFCTQLNRALTGIAVEQDKNTQEVFAQVKQIYKTPPIKDFGGFNFSQILPDPSKPSKRSFIEDLLFNKVTLADAGFIKQYGDCLGDIAARDLICAQKFNGLTVLPPLLTDEMIAQYTSALLAGTITSGWTFGAGAALQIPFAMQMAYRFNGIGVTQNVLYENQKLIANQFNSAIGKIQDSLSSTASALGKLQDVVNQNAQALNTLVKQLSSNFGAISSVLNDILSRLDPPEAEVQIDRLITGRLQSLQTYVTQQLIRAAEIRASANLAATKMSECVLGQSKRVDFCGKGYHLMSFPQSAPHGVVFLHVTYVPAQEKNFTTAPAICHDGKAHFPREGVFVSNGTHWFVTQRNFYEPQIITTDNTFVSGNCDVVIGIVNNTVYDPLQPELDSGGGSGGGQIYEGKLTAEGLRFGIVASRFNHALVDRLVEGAIDAIVRHGGREEDITLVRVPGSWEIPVAAGELARKEDIDAVIAIGVLIRGATPHFDYIASEVSKGLADLSLELRKPITFGVITADTLEQAIERAGTKHGNKGWEAALSAIEMANLFKSLR

SEQ ID NO: 7759 - protein, 1307 aa, Artificial Sequence
  SARS-CoV-2/Portugal/PT0035/2020__EPI_ISL_418020 spike protein (1-1147)(K986P_V987P) LumSynth construct
MFVFLVLLPLVSSQCVNLTTRTQLPPAYTNSFTRGVYYPDKVFRSSVLHSTQDLFLPFFSNVTWFHAIHVSGTNGTKRFDNPVLPFNDGVYFASTEKSNIIRGWIFGTTLDSKTQSLLIVNNATNVVIKVCEFQFCNDPFLGVYYHKNNKSWMESEFRVYSSANNCTFEYVSQPFLMDLEGKQGNFKNLREFVFKNIDGYFKIYSKHTPINLVRDLPQGFSALEPLVDLPIGINITRFQTLLALHRSYLTPGDSSSGWTAGAAAYYVGYLQPRTFLLKYNENGTITDAVDCALDPLSETKCTLKSFTVEKGIYQTSNFRVQPTESIVRFPNITNLCPFGEVFNATRFASVYAWNRKRISNCVADYSVLYNSASFSTFKCYGVSPTKLNDLCFTNVYADSFVIRGDEVRQIAPGQTGKIADYNYKLPDDFTGCVIAWNSNNLDSKVGGNYNYLYRLFRKSNLKPFERDISTEIYQAGSTPCNGVEGFNCYFPLQSYGFQPTNGVGYQPYRVVVLSFELLHAPATVCGPKKSTNLVKNKCVNFNFNGLTGTGVLTESNKKFLPFQQFGRDIADTTDAVRDPQTLEILDITPCSFGGVSVITPGTNTSNQVAVLYQDVNCTEVPVAIHADQLTPTWRVYSTGSNVFQTRAGCLIGAEHVNNSYECDIPIGAGICASYQTQTNSPRRARSVASQSIIAYTMSLGAENSVAYSNNSIAIPTNFTISVTTEILPVSMTKTSVDCTMYICGDSTECSNLLLQYGSFCTQLNRALTGIAVEQDKNTQEVFAQVKQIYKTPPIKDFGGFNFSQILPDPSKPSKRSFIEDLLFNKVTLADAGFIKQYGDCLGDISARDLICAQKFNGLTVLPPLLTDEMIAQYTSALLAGTITSGWTFGAGAALQIPFAMQMAYRFNGIGVTQNVLYENQKLIANQFNSAIGKIQDSLSSTASALGKLQDVVNQNAQALNTLVKQLSSNFGAISSVLNDILSRLDPPEAEVQIDRLITGRLQSLQTYVTQQLIRAAEIRASANLAATKMSECVLGQSKRVDFCGKGYHLMSFPQSAPHGVVFLHVTYVPAQEKNFTTAPAICHDGKAHFPREGVFVSNGTHWFVTQRNFYEPQIITTDNTFVSGNCDVVIGIVNNTVYDPLQPELDSGGGSGGGQIYEGKLTAEGLRFGIVASRFNHALVDRLVEGAIDAIVRHGGREEDITLVRVPGSWEIPVAAGELARKEDIDAVIAIGVLIRGATPHFDYIASEVSKGLADLSLELRKPITFGVITADTLEQAIERAGTKHGNKGWEAALSAIEMANLFKSLR

SEQ ID NO: 7760 - protein, 1307 aa, Artificial Sequence
  SARS-CoV-2/USA/NY-NYUMC7/2020__EPI_ISL_418192 spike protein (1-1147)(K986P_V987P) LumSynth construct
MFVFLVLLPLVSSQCVNLTTRTQLPPAYTNSFTRGVYYPDKVFRSSVLHSTQDLFLPFFSNVTWFHAIHVSGTNGTKRFDNPVLPFNDGVYFASTEKSNIIRGWIFGTTLDSKTQSLLIVNNATNVVIKVCEFQFCNDPFLGVYHHKNNKSWMESEFRVYSSANNCTFEYVSQPFLMDLEGKQGNFKNLREFVFKNIDGYFKIYSKHTPINLVRDLPQGFSALEPLVDLPIGINITRFQTLLALHRSYLTPGDSSSGWTAGAAAYYVGYLQPRTFLLKYNENGTITDAVDCALDPLSETKCTLKSFTVEKGIYQTSNFRVQPTESIVRFPNITNLCPFGEVFNATRFASVYAWNRKRISNCVADYSVLYNSASFSTFKCYGVSPTKLNDLCFTNVYADSFVIRGDEVRQIAPGQTGKIADYNYKLPDDFTGCVIAWNSNNLDSKVGGNYNYLYRLFRKSNLKPFERDISTEIYQAGSTPCNGVEGFNCYFPLQSYGFQPTNGVGYQPYRVVVLSFELLHAPATVCGPKKSTNLVKNKCVNFNFNGLTGTGVLTESNKKFLPFQQFGRDIADTTDAVRDPQTLEILDITPCSFGGVSVITPGTNTSNQVAVLYQGVNCTEVPVAIHADQLTPTWRVYSTGSNVFQTRAGCLIGAEHVNNSYECDIPIGAGICASYQTQTNSPRRARSVASQSIIAYTMSLGAENSVAYSNNSIAIPTNFTISVTTEILPVSMTKTSVDCTMYICGDSTECSNLLLQYGSFCTQLNRALTGIAVEQDKNTQEVFAQVKQIYKTPPIKDFGGFNFSQILPDPSKPSKRSFIEDLLFNKVTLADAGFIKQYGDCLGDIAARDLICAQKFNGLTVLPPLLTDEMIAQYTSALLAGTITSGWTFGAGAALQIPFAMQMAYRFNGIGVTQNVLYENQKLIANQFNSAIGKIQDSLSSTASALGKLQDVVNQNAQALNTLVKQLSSNFGAISSVLNDILSRLDPPEAEVQIDRLITGRLQSLQTYVTQQLIRAAEIRASANLAATKMSECVLGQSKRVDFCGKGYHLMSFPQSAPHGVVFLHVTYVPAQEKNFTTAPAICHDGKAHFPREGVFVSNGTHWFVTQRNFYEPQIITTDNTFVSGNCDVVIGIVNNTVYDPLQPELDSGGGSGGGQIYEGKLTAEGLRFGIVASRFNHALVDRLVEGAIDAIVRHGGREEDITLVRVPGSWEIPVAAGELARKEDIDAVIAIGVLIRGATPHFDYIASEVSKGLADLSLELRKPITFGVITADTLEQAIERAGTKHGNKGWEAALSAIEMANLFKSLR

SEQ ID NO: 7761 - protein, 1307 aa, Artificial Sequence
  SARS-CoV-2/Iceland/189/2020__EPI_ISL_417709 spike protein (1-1147)(K986P_V987P) LumSynth construct
MFVFLVLLPLVSSQCVNLTTRTQLPPAYTNSFTRGVYYPDKVFRSSVLHSTQDLFLPFFSNVTWFHAIHVSGTNGTKRFDNPVLPFNDGVYFASTEKSNIIRGWIFGTTLDSKTQSLLIVNNATNVVIKVCEFQFCNDPFLGVYYHKNNKSWMESEFRVYSSANNCTFEYVSQPFLMDLEGKQGNFKNLREFVFKNIDGYFKIYSKHTPINLVRDLPQGFSALEPLVDLPIGINITRFQTLLALHRSYLTPGDSSSGWTAGAAAYYVGYLQPRTFLLKYNENGTITDAVDCALDPLSETKCTLKSFTVEKGIYQTSNFRVQPTESIVRFPNITNLCPFGEVFNATRFASVYAWNRKRISNCVADYSVLYNSASFSTFKCYGVSPTKLNDLCFTNVYADSFVIRGDEVRQIAPGQTGKIADYNYKLPDDFTGCVIAWNSNNLDSKVGGNYNYLYRLFRKSNLKPFERDISTEIYQAGSTPCNGVEGFNCYFPLQSYGFQPTNGVGYQPYRVVVLSFELLHAPATVCGPKKSTNLVKNKCVNFNFNGLTGTGVLTESNKKFLPFQQFGRDIADTTDAVRDPQTLEILDITPCSFGGVSVITPGTNTSNQVAVLYQGVNCTEVPVAIHADQLTPTWRVYSTGSNVFQTRAGCLIGAEHVNNSYECDIPIGAGICASYQTQTNSPRRARSVASQSIIAYTMSLGAENSVAYSNNSIAIPTNFTISVTTEILPVSMTKTSVDCTMYICGDSTECSNLLLQYGSFCTQLNRALTGIAVEQDKNTQEVFAQVKQIYKTPPIKDFGGFNFSQILPDPSKPSKRSFIEDLLFNKVTLADAGFTKQYGDCLGDIAARDLICAQKFNGLTVLPPLLTDEMIAQYTSALLAGTITSGWTFGAGAALQIPFAMQMAYRFNGIGVTQNVLYENQKLIANQFNSAIGKIQDSLSSTASALGKLQDVVNQNAQALNTLVKQLSSNFGAISSVLNDILSRLDPPEAEVQIDRLITGRLQSLQTYVTQQLIRAAEIRASANLAATKMSECVLGQSKRVDFCGKGYHLMSFPQSAPHGVVFLHVTYVPAQEKNFTTAPAICHDGKAHFPREGVFVSNGTHWFVTQRNFYEPQIITTDNTFVSGNCDVVIGIVNNTVYDPLQPELDSGGGSGGGQIYEGKLTAEGLRFGIVASRFNHALVDRLVEGAIDAIVRHGGREEDITLVRVPGSWEIPVAAGELARKEDIDAVIAIGVLIRGATPHFDYIASEVSKGLADLSLELRKPITFGVITADTLEQAIERAGTKHGNKGWEAALSAIEMANLFKSLR

SEQ ID NO: 7762 - protein, 1307 aa, Artificial Sequence
  SARS-CoV-2/Australia/NSW56/2020__EPI_ISL_417408 spike protein (1-1147)(K986P_V987P) LumSynth construct
MFVFLVLLPLVSSQCVNLTTRTQLPPAYTNSFTRGVYYPDKVFRSSVLHSTQDLFLPFFSNVTWFHAIHVSGTNGTKRFDNPVLPFNDGVYFASTEKSNIIRGWIFGTTLDSKTQSLLIVNNATNVVIKVCEFQFCNDPFLGVYYHKNNKSWMESEFRVYSSANNCTFEYVSQPFLMDLEGKQGNFKNLREFVFKNIDGYFKIYSKHTPINLVRDLPQGFSALEPLVDLPIGINITRFQTLLALHRSYLTPGDSSSGWTAGAAAYYVGYLQPRTFLLKYNENGTITDAVDCALDPLSETKCTLKSFTVEKGIYQTSNFRVQPTESIVRFPNITNLCPFGEVFNATRFASVYAWNRKRISNCVADYSVLYNSASFSTFKCYGVSPTKLNDLCFTNVYADSFVIRGDEVRQIAPGQTGKIADYNYKLPDDFTGCVIAWNSNNLDSKVGGNYNYLYRLFRKSNLKPFERDISTEIYQAGSTPCNGVEGFNCYFPLQSYGFQPTNGVGYQPYRVVVLSFELLHAPATVCGPKKSTNLVKNKCVNFNFNGLTGTGVLTESNKKFLPFQQFGRDIADTTDAVRDPQTLEILDITPCSFGGVSVITPGTNTSNQVAVLYQDVNCTEVPVAIHADQLTPTWRVYSTGSNVFQTRAGCLIGAEHVNNSYECDIPIGAGICASYQTQTNSPRRARSVASQSIIAYTMSLGAENSVAYSNNSIAIPTNFTISVTTEILPVSMTKTSVDCTMYICGDSTECSNLLLQYGSFCTQLNRALTGIAVEQDKNTQEVFAQVKQIYKTPPIKDFGGFNFSQILPDSSKPSKRSFIEDLLFNKVTLADAGFIKQYGDCLGDIAARDLICAQKFNGLTVLPPLLTDEMIAQYTSALLAGTITSGWTFGAGAALQIPFAMQMAYRFNGIGVTQNVLYENQKLIANQFNSAIGKIQDSLSSTASALGKLQDVVNQNAQALNTLVKQLSSNFGAISSVLNDILSRLDPPEAEVQIDRLITGRLQSLQTYVTQQLIRAAEIRASANLAATKMSECVLGQSKRVDFCGKGYHLMSFPQSAPHGVVFLHVTYVPAQEKNFTTAPAICHDGKAHFPREGVFVSNGTHWFVTQRNFYEPQIITTDNTFVSGNCDVVIGIVNNTVYDPLQPELDSGGGSGGGQIYEGKLTAEGLRFGIVASRFNHALVDRLVEGAIDAIVRHGGREEDITLVRVPGSWEIPVAAGELARKEDIDAVIAIGVLIRGATPHFDYIASEVSKGLADLSLELRKPITFGVITADTLEQAIERAGTKHGNKGWEAALSAIEMANLFKSLR

SEQ ID NO: 7763 - protein, 1307 aa, Artificial Sequence
  SARS-CoV-2/Iceland/280/2020__EPI_ISL_417608 spike protein (1-1147)(K986P_V987P) LumSynth construct
MFVFLVLLPLVSSQCVNLTTRTQLPPAYTNSFTRGVYYPDKVFRSSVLHSTQDLFLPFFSNVTWFHAIHVSGTNGTKRFDNPVLPFNDGVYFASTEKSNIIRGWIFGTTLDSKTQSLLIVNNATNVVIKVCEFQFCNDPFLGVYYHKNNKSWMESEFRVYSSANNCTFEYVSQPFLMDLEGKQGNFKNLREFVFKNIDGYFKIYSKHTPINLVRDLPQGFSALEPLVDLPIGINITRFQTLLALHRSYLTPGDSSSGWTAGAAAYYVGYLQPRTFLLKYNENGTITDAVDCALDPLSETKCTLKSFTVEKGIYQTSNFRVQPTESIVRFPNITNLCPFGEVFNATRFASVYAWNRKRISNCVADYSVLYNSASFSTFKCYGVSPTKLNDLCFTNVYADSFVIRGDEVRQIAPGQTGKIADYNYKLPDDFTGCVIAWNSNNLDSKVGGNYNYLYRLFRKSNLKPFERDISTEIYQAGSTPCNGVEGFNCYFPLQSYGFQPTNGVGYQPYRVVVLSFELLHAPATVCGPKKSTNLVKNKCVNFNFNGLTGTGVLTESNKKFLPFQQFGRDIADTTDAVRDPQTLEILDITPCSFGGVSVITPGTNTSNQVAVLYQGVNCTEVPVAIHADQLTPTWRVYSTGSNVFQTRAGCLIGAEHVNNSYECDIPIGAGICASYHTQTNSPRRARSVASQSIIAYTMSLGAENSVAYSNNSIAIPTNFTISVTTEILPVSMTKTSVDCTMYICGDSTECSNLLLQYGSFCTQLNRALTGIAVEQDKNTQEVFAQVKQIYKTPPIKDFGGFNFSQILPDPSKPSKRSFIEDLLFNKVTLADAGFIKQYGDCLGDIAARDLICAQKFNGLTVLPPLLTDEMIAQYTSALLAGTITSGWTFGAGAALQIPFAMQMAYRFNGIGVTQNVLYENQKLIANQFNSAIGKIQDSLSSTASALGKLQDVVNQNAQALNTLVKQLSSNFGAISSVLNDILSRLDPPEAEVQIDRLITGRLQSLQTYVTQQLIRAAEIRASANLAATKMSECVLGQSKRVDFCGKGYHLMSFPQSAPHGVVFLHVTYVPAQEKNFTTAPAICHDGKAHFPREGVFVSNGTHWFVTQRNFYEPQIITTDNTFVSGNCDVVIGIVNNTVYDPLQPELDSGGGSGGGQIYEGKLTAEGLRFGIVASRFNHALVDRLVEGAIDAIVRHGGREEDITLVRVPGSWEIPVAAGELARKEDIDAVIAIGVLIRGATPHFDYIASEVSKGLADLSLELRKPITFGVITADTLEQAIERAGTKHGNKGWEAALSAIEMANLFKSLR

SEQ ID NO: 7764 - protein, 1307 aa, Artificial Sequence; identical to SEQ ID NO: 7719
  SARS-CoV-2/Iceland/247/2020__EPI_ISL_417575 spike protein (1-1147)(K986P_V987P) LumSynth construct

SEQ ID NO: 7765 - protein, 1307 aa, Artificial Sequence
  SARS-CoV-2/Iceland/238/2020__EPI_ISL_417566 spike protein (1-1147)(K986P_V987P) LumSynth construct
MFVFLVLLPLVSSQCVNLTTRTQLPPAYTNSFTRGVYYPDKVFRSSVLHSTQDLFLPFFSNVTWFHAIHVSGTNGTKRFDNPVLPFNDGVYFASTEKSNIIRGWIFGTTLDSKTQSLLIVNNATNVVIKVCEFQFCNDPFLGVYYHKNNKSWMESEFRVYSSANNCTFEYVSQPFLMDLEGKQGNFKNLREFVFKNIDGYFKIYSKHTPINLVRDLPQGFSALEPLVDLPIGINITRFQTLLALHRSYLTPGDSSSGWTAGAAAYYVGYLQPRTFLLKYNENGTITDAVDCALDPLSETKCTLKSFTVEKGIYQTSNFRVQPTESIVRFPNITNLCPFGEVFNATRFASVYAWNRKRISNCVADYSVLYNSASFSTFKCYGVSPTKLNDLCFTNVYADSFVIRGDEVRQIAPGQTGKIADYNYKLPDDFTGCVIAWNSNNLDSKVGGNYNYLYRLFRKSNLKPFERDISTEIYQAGSTPCNGVEGFNCYFPLQSYGFQPTNGVGYQPYRVVVLSFELLHAPATVCGPKKSTNLVKNKCVNFNFNGLTGTGVLTESNKKFLPFQQFGRDIADTTDAVRDPQTLEILDITPCSFGGVSVITPGTNTSNQVAVLYQGVNCTEVPVAIHADQLTPTWRVYSTGSNVFQTRAGCLIGAEHVNNSYECDIPIGAGICASYQTQTNSPRRARSVASQSIIAYTMSLGAENSVAYSNNSIAIPTNFTISVTTEILPVSMTKTSVDCTMYICGDSTECSNLLLQYGSFCTQLNRALTGIAVEQDKNTQEVFAQVKQIYKTPPIKDFGGFNFSQILPDPSKPSKRSFIEDLLFNKVTLADVGFIKQYGDCLGDIAARDLICAQKFNGLTVLPPLLTDEMIAQYTSALLAGTITSGWTFGAGAALQIPFAMQMAYRFNGIGVTQNVLYENQKLIANQFNSAIGKIQDSLSSTASALGKLQDVVNQNAQALNTLVKQLSSNFGAISSVLNDILSRLDPPEAEVQIDRLITGRLQSLQTYVTQQLIRAAEIRASANLAATKMSECVLGQSKRVDFCGKGYHLMSFPQSAPHGVVFLHVTYVPAQEKNFTTAPAICHDGKAHFPREGVFVSNGTHWFVTQRNFYEPQIITTDNTFVSGNCDVVIGIVNNTVYDPLQPELDSGGGSGGGQIYEGKLTAEGLRFGIVASRFNHALVDRLVEGAIDAIVRHGGREEDITLVRVPGSWEIPVAAGELARKEDIDAVIAIGVLIRGATPHFDYIASEVSKGLADLSLELRKPITFGVITADTLEQAIERAGTKHGNKGWEAALSAIEMANLFKSLR

SEQ ID NO: 7766 - protein, 1307 aa, Artificial Sequence
  SARS-CoV-2/Greece/16/2020__EPI_ISL_418265 spike protein (1-1147)(K986P_V987P) LumSynth construct
MFVFLVLLPLVSSQCVNLTTRTQLPPAYTNSFTRGVYYPDKVFRSSVLHSTQDLFLPFFSNVTWFHAIHVSGTNGTKRFDNPVLPFNDGVYFASTEKSNIIRGWIFGTTLDSKTQSLLIVNNATNVVIKVCEFQFCNDPFLGVYYHKNNKSWMESEFRVYSSANNCTFEYVSQPFLMDLEGKQGNFKNLREFVFKNVDGYFKIYSKHTPINLVRDLPQGFSALEPLVDLPIGINITRFQTLLALHRSYLTPGDSSSGWTAGAAAYYVGYLQPRTFLLKYNENGTITDAVDCALDPLSETKCTLKSFTVEKGIYQTSNFRVQPTESIVRFPNITNLCPFGEVFNATRFASVYAWNRKRISNCVADYSVLYNSASFSTFKCYGVSPTKLNDLCFTNVYADSFVIRGDEVRQIAPGQTGKIADYNYKLPDDFTGCVIAWNSNNLDSKVGGNYNYLYRLFRKSNLKPFERDISTEIYQAGSTPCNGVEGFNCYFPLQSYGFQPTNGVGYQPYRVVVLSFELLHAPATVCGPKKSTNLVKNKCVNFNFNGLTGTGVLTESNKKFLPFQQFGRDIADTTDAVRDPQTLEILDITPCSFGGVSVITPGTNTSNQVAVLYQDVNCTEVPVAIHADQLTPTWRVYSTGSNVFQTRAGCLIGAEHVNNSYECDIPIGAGICASYQTQTNSPRRARSVASQSIIAYTMSLGAENSVAYSNNSIAIPTNFTISVTTEILPVSMTKTSVDCTMYICGDSTECSNLLLQYGSFCTQLNRALTGIAVEQDKNTQEVFAQVKQIYKTPPIKDFGGFNFSQILPDPSKPSKRSFIEDLLFNKVTLADAGFIKQYGDCLGDIAARDLICAQKFNGLTVLPPLLTDEMIAQYTSALLAGTITSGWTFGAGAALQIPFAMQMAYRFNGIGVTQNVLYENQKLIANQFNSAIGKIQDSLSSTASALGKLQDVVNQNAQALNTLVKQLSSNFGAISSVLNDILSRLDPPEAEVQIDRLITGRLQSLQTYVTQQLIRAAEIRASANLAATKMSECVLGQSKRVDFCGKGYHLMSFPQSAPHGVVFLHVTYVPAQEKNFTTAPAICHDGKAHFPREGVFVSNGTHWFVTQRNFYEPQIITTDNTFVSGNCDVVIGIVNNTVYDPLQPELDSGGGSGGGQIYEGKLTAEGLRFGIVASRFNHALVDRLVEGAIDAIVRHGGREEDITLVRVPGSWEIPVAAGELARKEDIDAVIAIGVLIRGATPHFDYIASEVSKGLADLSLELRKPITFGVITADTLEQAIERAGTKHGNKGWEAALSAIEMANLFKSLR

SEQ ID NO: 7767 - protein, 1307 aa, Artificial Sequence
  SARS-CoV-2/Iceland/319/2020__EPI_ISL_417648 spike protein (1-1147)(K986P_V987P) LumSynth construct
MFVFLVLLPLVSSQCVNLTTRTQLPPAYTNSFTRGVYYPDKVFRSSVLHSTQDLFLPFFSNVTWFHAIHVSGTNGTKRFDNPVLPFNDGVYFASTEKSNIIRGWIFGTTLDSKTQSLLIVNNATNVVIKVCEFQFCNDPFLGVYYHKNNKSWMESEFRVYSSANNCTFEYVSQPFLIDLEGKQGNFKNLREFVFKNIDGYFKIYSKHTPINLVRDLPQGFSALEPLVDLPIGINITRFQTLLALHRSYLTPGDSSSGWTAGAAAYYVGYLQPRTFLLKYNENGTITDAVDCALDPLSETKCTLKSFTVEKGIYQTSNFRVQPTESIVRFPNITNLCPFGEVFNATRFASVYAWNRKRISNCVADYSVLYNSASFSTFKCYGVSPTKLNDLCFTNVYADSFVIRGDEVRQIAPGQTGKIADYNYKLPDDFTGCVIAWNSNNLDSKVGGNYNYLYRLFRKSNLKPFERDISTEIYQAGSTPCNGVEGFNCYFPLQSYGFQPTNGVGYQPYRVVVLSFELLHAPATVCGPKKSTNLVKNKCVNFNFNGLTGTGVLTESNKKFLPFQQFGRDIADTTDAVRDPQTLEILDITPCSFGGVSVITPGTNTSNQVAVLYQGVNCTEVPVAIHADQLTPTWRVYSTGSNVFQTRAGCLIGAEHVNNSYECDIPIGAGICASYQTQTNSPRRARSVASQSIIAYTMSLGAENSVAYSNNSIAIPTNFTISVTTEILPVSMTKTSVDCTMYICGDSTECSNLLLQYGSFCTQLNRALTGIAVEQDKNTQEVFAQVKQIYKTPPIKDFGGFNFSQILPDPSKPSKRSFIEDLLFNKVTLADAGFIKQYGDCLGDIAARDLICAQKFNGLTVLPPLLTDEMIAQYTSALLAGTITSGWTFGAGAALQIPFAMQMAYRFNGIGVTQNVLYENQKLIANQFNSAIGKIQDSLSSTASALGKLQDVVNQNAQALNTLVKQLSSNFGAISSVLNDILSRLDPPEAEVQIDRLITGRLQSLQTYVTQQLIRAAEIRASANLAATKMSECVLGQSKRVDFCGKGYHLMSFPQSAPHGVVFLHVTYVPAQEKNFTTAPAICHDGKAHFPREGVFVSNGTHWFVTQRNFYEPQIITTDNTFVSGNCDVVIGIVNNTVYDPLQPELDSGGGSGGGQIYEGKLTAEGLRFGIVASRFNHALVDRLVEGAIDAIVRHGGREEDITLVRVPGSWEIPVAAGELARKEDIDAVIAIGVLIRGATPHFDYIASEVSKGLADLSLELRKPITFGVITADTLEQAIERAGTKHGNKGWEAALSAIEMANLFKSLR

SEQ ID NO: 7768 - protein, 1307 aa, Artificial Sequence
  SARS-CoV-2/Congo/94/2020__EPI_ISL_417947 spike protein (1-1147)(K986P_V987P) LumSynth construct
MFVFLVLLPLVSSQCVNLTTRTQLPPAYTNSFTRGVYYPDKVFRSSVLHSTQDLFLPFFSNVTWFHAIHVSGTNGTKRFDNPVLPFNDGVYFASTEKSNIIRGWIFGTTLDSKTQSLLIVNNATNVVIKVCEFQFCNDPFLGVYYHKNNKSWMESEFRVYSSANNCTFEYVSQPFLMDLEGKQGNFKNLREFVFKNIDGYFKIYSKHTPINLVRDLPQGFSALEPLVDLPIGINITRFQTLLALHRSYLTPGDSSSGWTAGAAAYYVGYLQPRTFLLKYNENGTITDAVDCALDPLSETKCTLKSFTVEKGIYQTSNFRVQPTESIVRFPNITNLCPFGEVFNATRFASVYAWNRKRISNCVADYSVLYNSASFSTFKCYGVSPTKLNDLCFTNVYADSFVIRGDEVRQIAPGQTGKIADYNYKLPDDFTGCVIAWNSNNLDSKVGGNYNYLYRLFRKSNLKPFERDISTEIYQAGSTPCNGVEGFNCYFPLQSYGFQPTNGVGYQPYRVVVLSFELLHAPATVCGPKKSTNLVKNKCVNFNFNGLTGTGVLTESNKKFLPFQQFGRDIADTTDAVRDPQTLEILDITPCSFGGVSVITPGTNTSNQVAVLYQGVNCTEVPVAIHADQLTPTWRVYSTGSNVFQTRAGCLIGAEHVNNSYECDIPIGAGICASYQTQTNSPRRARSVASQSIIAYTMSLGAENSVAYSNNSIAIPTNFTISVTTEILPVSMTKTSVDCTMYICGDSTECSNLLLQYGSFCTQLNRALTGIAVEQDKNTQEVFAQVKQIYKTPPIKDFGGFNFSQILPDPSKPSKRSFIEDILFNKVTLADAGFIKQYGDCLGDIAARDLICAQKFNGLTVLPPLLTDEMIAQYTSALLAGTITSGWTFGAGAALQIPFAMQMAYRFNGIGVTQNVLYENQKLIANQFNSAIGKIQDSLSSTASALGKLQDVVNQNAQALNTLVKQLSSNFGAISSVLNDILSRLDPPEAEVQIDRLITGRLQSLQTYVTQQLIRAAEIRASANLAATKMSECVLGQSKRVDFCGKGYHLMSFPQSAPHGVVFLHVTYVPAQEKNFTTAPAICHDGKAHFPREGVFVSNGTHWFVTQRNFYEPQIITTDNTFVSGNCDVVIGIVNNTVYDPLQPELDSGGGSGGGQIYEGKLTAEGLRFGIVASRFNHALVDRLVEGAIDAIVRHGGREEDITLVRVPGSWEIPVAAGELARKEDIDAVIAIGVLIRGATPHFDYIASEVSKGLADLSLELRKPITFGVITADTLEQAIERAGTKHGNKGWEAALSAIEMANLFKSLR

SEQ ID NO: 7769 - protein, 1307 aa, Artificial Sequence
  SARS-CoV-2/Congo/158/2020__EPI_ISL_417950 spike protein (1-1147)(K986P_V987P) LumSynth construct
MFVFLVLLPLVSSQCVNLTTRTQLPPAYTNSFTRGVYYPDKVFRSSVLHSTQDLFLPFFSNVTWFHAIHVSGTNGTKRFDNPVLPFNDGVYFASTEKSNIIRGWIFGTTLDSKTQSLLIVNNATNVVIKVCEFQFCNDPFLGVYYHKNNKSWMESEFRVYSSANNCTFEYVSQPFLMDLEGKQGNFKNLREFVFKNIDGYFKIYSKHTPINLVRDLPQGFSALEPLVDLPIGINITRFQTLLALHRSYLTPGDSSSGWTAGAAAYYVGYLQPRTFLLKYNENGTITDAVDCALDPLSETKCTLKSFTVEKGIYQTSNFRVQPTESIVRFPNITNLCPFGEVFNATRFASVYAWNRKRISNCVADYSVLYNSASFSTFKCYGVSPTKLNDLCFTNVYADSFVIRGDEVRQIAPGQTGKIADYNYKLPDDFTGCVIAWNSNNLDSKVGGNYNYLYRLFRKSNLKPFERDISTEIYQAGSTPCNGVEGFNCYFPLQSYGFQPTNGVGYQPYRVVVLSFELLHAPATVCGPKKSTNLVKNKCVNFNFNGLTGTGVLTESNKKFLPFQQFGRDIADTTDAVRDPQTLEILDITPCSFGGVSVITPGTNTSNQVAVLYQDVNCTEVPVAIHADQLTPTWRVYSTGSNVFQTRAGCLIGAEHVNNSYECDIPIGAGICASYQTQTNSPRRARSVASQSIIAYTMSLGAENSVAYSNNSIAIPTNFTISVTTEILPVSMTKTSVDCTMYICGDSTECSNLLLQYGSFCTQLNRALTGIAVEQDKNTQEVFAQVKQIYKTPPIKDFGGFNFSQILPDPSKPSKRSFIEDLLFNKVTLADAGFIKQYGDCLGDIAARDLICAQKFNGLTVLPPLLTDEMIAQYTSALLAGTITSGWTFGAGAALQIPFAMQMAYRFNGIGVTQNVLYENQKLIANQFNSAIGKIQDSLSSTASALGKLQDVVNQNAQALNTLVKQLSSNFGAISSVLNDILSRLDPPEAEVQIDRLITGRLQSLQTYVTQQLIRAAEIRASANLAATKMSECVLGQSKRVDFCGKGYHLMSFPQSAPHGVVFLHVTYVPAQEKNFTTAPAICHDGKAHFPREGVFVSNGTHWFVTQRNFYEPQIITTDNTFLSGNCDVVIGIVNNTVYDPLQPELDSGGGSGGGQIYEGKLTAEGLRFGIVASRFNHALVDRLVEGAIDAIVRHGGREEDITLVRVPGSWEIPVAAGELARKEDIDAVIAIGVLIRGATPHFDYIASEVSKGLADLSLELRKPITFGVITADTLEQAIERAGTKHGNKGWEAALSAIEMANLFKSLR

SEQ ID NO: 7770 - protein, 1307 aa, Artificial Sequence
  SARS-CoV-2/USA/UT-00034/2020__EPI_ISL_417977 spike protein (1-1147)(K986P_V987P) LumSynth construct
MFVFLVLLPLVSSQCVNLTTRTQLPPAYTNSFTRGVYYPDKVFRSSVLHSTQDLFLPFFSNVTWFHAIHVSGTNGTKRFDNPVLPFNDGVYFASTEKSNIIRGWIFGTTLDSKTQSLLIVNNATNVVIKVCEFQFCNDPFLGVYYYKNNKSWMESEFRVYSSANNCTFEYVSQPFLMDLEGKQGNFKNLREFVFKNIDGYFKIYSKHTPINLVRDLPQGFSALEPLVDLPIGINITRFQTLLALHRSYLTPGDSSSGWTAGAAAYYVGYLQPRTFLLKYNENGTITDAVDCALDPLSETKCTLKSFTVEKGIYQTSNFRVQPTESIVRFPNITNLCPFGEVFNATRFASVYAWNRKRISNCVADYSVLYNSASFSTFKCYGVSPTKLNDLCFTNVYADSFVIRGDEVRQIAPGQTGKIADYNYKLPDDFTGCVIAWNSNNLDSKVGGNYNYLYRLFRKSNLKPFERDISTEIYQAGSTPCNGVEGFNCYFPLQSYGFQPTNGVGYQPYRVVVLSFELLHAPATVCGPKKSTNLVKNKCVNFNFNGLTGTGVLTESNKKFLPFQQFGRDIADTTDAVRDPQTLEILDITPCSFGGVSVITPGTNTSNQVAVLYQGVNCTEVPVAIHADQLTPTWRVYSTGSNVFQTRAGCLIGAEHVNNSYECDIPIGAGICASYQTQTNSPRRARSVASQSIIAYTMSLGAENSVAYSNNSIAIPTNFTISVTTEILPVSMTKTSVDCTMYICGDSTECSNLLLQYGSFCTQLNRALTGIAVEQDKNTQEVFAQVKQIYKTPPIKDFGGFNFSQILPDPSKPSKRSFIEDLLFNKVTLADAGFIKQYGDCLGDIAARDLICAQKFNGLTVLPPLLTDEMIAQYTSALLAGTITSGWTFGAGAALQIPFAMQMAYRFNGIGVTQNVLYENQKLIANQFNSAIGKIQDSLSSTASALGKLQDVVNQNAQALNTLVKQLSSNFGAISSVLNDILSRLDPPEAEVQIDRLITGRLQSLQTYVTQQLIRAAEIRASANLAATKMSECVLGQSKRVDFCGKGYHLMSFPQSAPHGVVFLHVTYVPAQEKNFTTAPAICHDGKAHFPREGVFVSNGTHWFVTQRNFYEPQIITTDNTFVSGNCDVVIGIVNNTVYDPLQPELDSGGGSGGGQIYEGKLTAEGLRFGIVASRFNHALVDRLVEGAIDAIVRHGGREEDITLVRVPGSWEIPVAAGELARKEDIDAVIAIGVLIRGATPHFDYIASEVSKGLADLSLELRKPITFGVITADTLEQAIERAGTKHGNKGWEAALSAIEMANLFKSLR

SEQ ID NO: 7771 - protein, 1307 aa, Artificial Sequence
  SARS-CoV-2/USA/UT-00033/2020__EPI_ISL_417976 spike protein (1-1147)(K986P_V987P) LumSynth construct
MFVFLVLLPLVSSQCVNLTTRTQLPPAYTNSFTRGVYYPDKVFRSSVLHSTQDLFLPFFSNVTWFHAIHVSGTNGTKRFDNPVLPFNDGVYFASTEKSNIIRGWIFGTTLDSKTQSLLIVNNATNVVIKVCEFQFCNDPFLGVYYHKNNKSWMESEFRVYSSANNCTFEYVSQPFLMDLEGKQGNFKNLREFVFKNIDGYFKIYSKHTPINLVRDLPQGFSALEPLVDLPIGINITRFQTLLALHRSYLTPGDSSSGLTAGAAAYYVGYLQPRTFLLKYNENGTITDAVDCALDPLSETKCTLKSFTVEKGIYQTSNFRVQPTESIVRFPNITNLCPFGEVFNATRFASVYAWNRKRISNCVADYSVLYNSASFSTFKCYGVSPTKLNDLCFTNVYADSFVIRGDEVRQIAPGQTGKIADYNYKLPDDFTGCVIAWNSNNLDSKVGGNYNYLYRLFRKSNLKPFERDISTEIYQAGSTPCNGVEGFNCYFPLQSYGFQPTNGVGYQPYRVVVLSFELLHAPATVCGPKKSTNLVKNKCVNFNFNGLTGTGVLTESNKKFLPFQQFGRDIADTTDAVRDPQTLEILDITPCSFGGVSVITPGTNTSNQVAVLYQGVNCTEVPVAIHADQLTPTWRVYSTGSNVFQTRAGCLIGAEHVNNSYECDIPIGAGICASYQTQTNSPRRARSVASQSIIAYTMSLGAENSVAYSNNSIAIPTNFTISVTTEILPVSMTKTSVDCTMYICGDSTECSNLLLQYGSFCTQLNRALTGIAVEQDKNTQEVFAQVKQIYKTPPIKDFGGFNFSQILPDPSKPSKRSFIEDLLFNKVTLADAGFIKQYGDCLGDIAARDLICAQKFNGLTVLPPLLTDEMIAQYTSALLAGTITSGWTFGAGAALQIPFAMQMAYRFNGIGVTQNVLYENQKLIANQFNSAIGKIQDSLSSTASALGKLQDVVNQNAQALNTLVKQLSSNFGAISSVLNDILSRLDPPEAEVQIDRLITGRLQSLQTYVTQQLIRAAEIRASANLAATKMSECVLGQSKRVDFCGKGYHLMSFPQSAPHGVVFLHVTYVPAQEKNFTTAPAICHDGKAHFPREGVFVSNGTHWFVTQRNFYEPQIITTDNTFVSGNCDVVIGIVNNTVYDPLQPELDSGGGSGGGQIYEGKLTAEGLRFGIVASRFNHALVDRLVEGAIDAIVRHGGREEDITLVRVPGSWEIPVAAGELARKEDIDAVIAIGVLIRGATPHFDYIASEVSKGLADLSLELRKPITFGVITADTLEQAIERAGTKHGNKGWEAALSAIEMANLFKSLR

SEQ ID NO: 7772 - protein, 1307 aa, Artificial Sequence
  SARS-CoV-2/USA/WI-13/2020__EPI_ISL_417516 spike protein (1-1147)(K986P_V987P) LumSynth construct
MFVFLVLLPLVSSQCVNLTTRTQLPPAYTNSFTRGVYYPDKVFRSSVLHSTQDLFLPFFSNVTWFHAIHVSGTNGTKRFDNPVLPFNDGVYFASTEKSNIIRGWIFGTTLDSKTQSLLIVNNATNVVIKVCEFQFCNDPFLGVYYHKNNKSWMESEFRVYSSANNCTFEYVSQPFLMDLEGKQGNFKNLREFVFKNIDGYFKIYSKHTPINLVRDLPQGFSALEPLVDLPIGINITRFQTLLALHRSYLTPGDSSSGWTAGAAAYYVGYLQPRTFLLKYNENGTITDAVDCALDPLSETKCTLKSFTVEKGIYQTSNFRVLPTESIVRFPNITNLCPFGEVFNATRFASVYAWNRKRISNCVADYSVLYNSASFSTFKCYGVSPTKLNDLCFTNVYADSFVIRGDEVRQIAPGQTGKIADYNYKLPDDFTGCVIAWNSNNLDSKVGGNYNYLYRLFRKSNLKPFERDISTEIYQAGSTPCNGVEGFNCYFPLQSYGFQPTNGVGYQPYRVVVLSFELLHAPATVCGPKKSTNLVKNKCVNFNFNGLTGTGVLTESNKKFLPFQQFGRDIADTTDAVRDPQTLEILDITPCSFGGVSVITPGTNTSNQVAVLYQGVNCTEVPVAIHADQLTPTWRVYSTGSNVFQTRAGCLIGAEHVNNSYECDIPIGAGICASYQTQTNSPRRARSVASQSIIAYTMSLGAENSVAYSNNSIAIPTNFTISVTTEILPVSMTKTSVDCTMYICGDSTECSNLLLQYGSFCTQLNRALTGIAVEQDKNTQEVFAQVKQIYKTPPIKDFGGFNFSQILPDPSKPSKRSFIEDLLFNKVTLADAGFIKQYGDCLGDIAARDLICAQKFNGLTVLPPLLTDEMIAQYTSALLAGTITSGWTFGAGAALQIPFAMQMAYRFNGIGVTQNVLYENQKLIANQFNSAIGKIQDSLSSTASALGKLQDVVNQNAQALNTLVKQLSSNFGAISSVLNDILSRLDPPEAEVQIDRLITGRLQSLQTYVTQQLIRAAEIRASANLAATKMSECVLGQSKRVDFCGKGYHLMSFPQSAPHGVVFLHVTYVPAQEKNFTTAPAICHDGKAHFPREGVFVSNGTHWFVTQRNFYEPQIITTDNTFVSGNCDVVIGIVNNTVYDPLQPELDSGGGSGGGQIYEGKLTAEGLRFGIVASRFNHALVDRLVEGAIDAIVRHGGREEDITLVRVPGSWEIPVAAGELARKEDIDAVIAIGVLIRGATPHFDYIASEVSKGLADLSLELRKPITFGVITADTLEQAIERAGTKHGNKGWEAALSAIEMANLFKSLR

SEQ ID NO: 7773 - protein, 1306 aa, Artificial Sequence
  SARS-CoV-2/India/1-27/2020__EPI_ISL_413522 spike protein (1-1146)(K985P_V986P) LumSynth construct
MFVFLVLLPLVSSQCVNLTTRTQLPPAYTNSFTRGVYYPDKVFRSSVLHSTQDLFLPFFSNVTWFHAIHVSGTNGTKRFDNPVLPFNDGVYFASTEKSNIIRGWIFGTTLDSKTQSLLIVNNATNVVIKVCEFQFCNDPFLGVYHKNNKSWMESEFRVYSSANNCTFEYVSQPFLMDLEGKQGNFKNLREFVFKNIDGYFKIYSKHTPINLVRDLPQGFSALEPLVDLPIGINITRFQTLLALHRSYLTPGDSSSGWTAGAAAYYVGYLQPRTFLLKYNENGTITDAVDCALDPLSETKCTLKSFTVEKGIYQTSNFRVQPTESIVRFPNITNLCPFGEVFNATRFASVYAWNRKRISNCVADYSVLYNSASFSTFKCYGVSPTKLNDLCFTNVYADSFVIRGDEVIQIAPGQTGKIADYNYKLPDDFTGCVIAWNSNNLDSKVGGNYNYLYRLFRKSNLKPFERDISTEIYQAGSTPCNGVEGFNCYFPLQSYGFQPTNGVGYQPYRVVVLSFELLHAPATVCGPKKSTNLVKNKCVNFNFNGLTGTGVLTESNKKFLPFQQFGRDIADTTDAVRDPQTLEILDITPCSFGGVSVITPGTNTSNQVAVLYQDVNCTEVPVAIHADQLTPTWRVYSTGSNVFQTRAGCLIGAEHVNNSYECDIPIGAGICASYQTQTNSPRRARSVASQSIIAYTMSLGAENSVAYSNNSIAIPTNFTISVTTEILPVSMTKTSVDCTMYICGDSTECSNLLLQYGSFCTQLNRALTGIAVEQDKNTQEVFAQVKQIYKTPPIKDFGGFNFSQILPDPSKPSKRSFIEDLLFNKVTLADAGFIKQYGDCLGDIAARDLICAQKFNGLTVLPPLLTDEMIAQYTSALLAGTITSGWTFGAGAALQIPFAMQMAYRFNGIGVTQNVLYENQKLIANQFNSAIGKIQDSLSSTASALGKLQDVVNQNAQALNTLVKQLSSNFGAISSVLNDILSRLDPPEAEVQIDRLITGRLQSLQTYVTQQLIRAAEIRASANLAATKMSECVLGQSKRVDFCGKGYHLMSFPQSAPHGVVFLHVTYVPAQEKNFTTAPAICHDGKAHFPREGVFVSNGTHWFVTQRNFYEPQIITTDNTFVSGNCDVVIGIVNNTVYDPLQPELDSGGGSGGGQIYEGKLTAEGLRFGIVASRFNHALVDRLVEGAIDAIVRHGGREEDITLVRVPGSWEIPVAAGELARKEDIDAVIAIGVLIRGATPHFDYIASEVSKGLADLSLELRKPITFGVITADTLEQAIERAGTKHGNKGWEAALSAIEMANLFKSLR

SEQ ID NO: 7774 - protein, 1301 aa, Artificial Sequence
  SARS-CoV-2/pangolin/Guangxi/P4L/2017__EPI_ISL_410538 spike protein (1-1141)(K980P_V981P) LumSynth construct
MFVFLFVLPLVSSQCVNLTTRTGIPPGYTNSSTRGVYYPDKVFRSSILHLTQDLFLPFFSNVTWFNTINYQGGFKKFDNPVLPFNDGVYFASTEKSNIIRGWIFGTTLDARTQSLLIVNNATNVVIKVCEFQFCTDPFLGVYYHNNNKTWVENEFRVYSSANNCTFEYISQPFLMDLEGKQGNFKNLREFVFKNVDGYFKIYSKHTPIDLVRDLPRGFAALEPLVDLPIGINITRFQTLLALHRSYLTPGNLESGWTTGAAAYYVGYLQQRTFLLSYNQNGTITDAVDCSLDPLSETKCTLKSLTVEKGIYQTSNFRVQPTISIVRFPNITNLCPFGEVFNASKFASVYAWNRKRISNCVADYSVLYNSTSFSTFKCYGVSPTKLNDLCFTNVYADSFVVKGDEVRQIAPGQTGVIADYNYKLPDDFTGCVIAWNSVKQDALTGGNYGYLYRLFRKSKLKPFERDISTEIYQAGSTPCNGQVGLNCYYPLERYGFHPTTGVNYQPFRVVVLSFELLNGPATVCGPKLSTTLVKDKCVNFNFNGLTGTGVLTTSKKQFLPFQQFGRDISDTTDAVRDPQTLEILDITPCSFGGVSVITPGTNTSNQVAVLYQDVNCTEVPMAIHAEQLTPAWRVYSAGANVFQTRAGCLVGAEHVNNSYECDIPVGAGICASYHSMSSLRSVNQRSIIAYTMSLGAENSVAYSNNSIAIPTNFTISVTTEILPVSMTKTSVDCTMYICGDSIECSNLLLQYGSFCTQLNRALTGIAVEQDKNTQEVFAQVKQIYKTPPIKDFGGFNFSQILPDPSKPSKRSFIEDLLFNKVTLADAGFIKQYGDCLGDIAARDLICAQKFNGLTVLPPLLTDEMIAQYTSALLAGTITSGWTFGAGAALQIPFAMQMAYRFNGIGVTQNVLYENQKLIANQFNSAIGKIQDSLSSTASALGKLQDVVNQNAQALNTLVKQLSSNFGAISSVLNDILSRLDPPEAEVQIDRLITGRLQSLQTYVTQQLIRAAEIRASANLAATKMSECVLGQSKRVDFCGKGYHLMSFPQSAPHGVVFLHVTYVPAQEKNFTTAPAICHEGKAHFPREGVFVSNGTHWFITQRNFYEPQIITTDNTFVSGSCDVVIGIVNNTVYDPLQPELDSGGGSGGGQIYEGKLTAEGLRFGIVASRFNHALVDRLVEGAIDAIVRHGGREEDITLVRVPGSWEIPVAAGELARKEDIDAVIAIGVLIRGATPHFDYIASEVSKGLADLSLELRKPITFGVITADTLEQAIERAGTKHGNKGWEAALSAIEMANLFKSLR

SEQ ID NO: 7775 - protein, 1301 aa, Artificial Sequence
  SARS-CoV-2/pangolin/Guangxi/P5L/2017__EPI_ISL_410540 spike protein (1-1141)(K980P_V981P) LumSynth construct
MFVFLFVLPLVSSQCVNLTTRTGIPPGYTNSSTRGVYYPDKVFRSSILHLTQDLFLPFFSNVTWFNTINYQGGFKKFDNPVLPFNDGVYFASTEKSNIIRGWIFGTTLDARTQSLLIVNNATNVVIKVCEFQFCTDPFLGVYYHNNNKTWVENEFRVYSSANNCTFEYISQPFLMDLEGKQGNFKNLREFVFKNVDGYFKIYSKHTPIDLVRDLPRGFAALEPLVDLPIGINITRFQTLLALHRSYLTPGKLESGWTTGAAAYYVGYLQQRTFLLSYNQNGTITDAVDCSLDPLSETKCTLKSLTVEKGIYQTSNFRVQPTISIVRFPNITNLCPFGEVFNASKFASVYAWNRKRISNCVADYSVLYNSTSFSTFKCYGVSPTKLNDLCFTNVYADSFVVKGDEVRQIAPGQTGVIADYNYKLPDDFTGCVIAWNSVKQDALTGGNYGYLYRLFRKSKLKPFERDISTEIYQAGSTPCNGQVGLNCYYPLERYGFHPTTGVNYQPFRVVVLSFELLNGPATVCGPKLSTTLVKDKCVNFNFNGLTGTGVLTTSKKQFLPFQQFGRDISDTTDAVRDPQTLEILDITPCSFGGVSVITPGTNTSNQVAVLYQDVNCTEVPMAIHAEQLTPAWRVYSAGANVFQTRAGCLVGAEHVNNSYECDIPVGAGICASYHSMSSFRSVNQRSIIAYTMSLGAENSVAYSNNSIAIPTNFTISVTTEILPVSMTKTSVDCTMYICGDSIECSNLLLQYGSFCTQLNRALTGIAVEQDKNTQEVFAQVKQIYKTPPIKDFGGFNFSQILPDPSKPSKRSFIEDLLFNKVTLADAGFIKQYGDCLGDIAARDLICAQKFNGLTVLPPLLTDEMIAQYTSALLAGTITSGWTFGAGAALQIPFAMQMAYRFNGIGVTQNVLYENQKLIANQFNSAIGKIQDSLSSTASALGKLQDVVNQNAQALNTLVKQLSSNFGAISSVLNDILSRLDPPEAEVQIDRLITGRLQSLQTYVTQQLIRAAEIRASANLAATKMSECVLGQSKRVDFCGKGYHLMSFPQSAPHGVVFLHVTYVPAQEKNFTTAPAICHEGKAHFPREGVFVSNGTHWFITQRNFYEPQIITTDNTFVSGSCDVVIGIVNNTVYDPLQPELDSGGGSGGGQIYEGKLTAEGLRFGIVASRFNHALVDRLVEGAIDAIVRHGGREEDITLVRVPGSWEIPVAAGELARKEDIDAVIAIGVLIRGATPHFDYIASEVSKGLADLSLELRKPITFGVITADTLEQAIERAGTKHGNKGWEAALSAIEMANLFKSLR

SEQ ID NO: 7776 - protein, 1301 aa, Artificial Sequence
  SARS-CoV-2/pangolin/Guangxi/P5E/2017__EPI_ISL_410541 spike protein (1-1141)(K980P_V981P) LumSynth construct
MFVFLFVLPLVSSQCVNLTTRTGIPPGYTNSSTRGVYYPDKVFRSSILHLTQDLFLPFFSNVTWFNTITYQGGSKKFDNPVLPFNDGVYFASTEKSNIIRGWIFGTTLDARTQSLLIVNNATNVVIKVCEFQFCTDPFLGVYYHNNNKTWVENEFRVYSSANNCTFEYISQPFLMDLEGKQGNFKNLREFVFKNVDGYFKIYSKHTPIDLVRDLPRGFAALEPLVDLPIGINITRFQTLLALHRSYLTPGKLESGWTTGAAAYYVGYLQQRTFLLSYNQNGTITDAVDCSLDPLSETKCTLKSLTVEKGIYQTSNFRVQPTISIVRFPNITNLCPFGEVFNASKFASVYAWNRKRISNCVADYSVLYNSTSFSTFKCYGVSPTKLNDLCFTNVYADSFVVKGDEVRQIAPGQTGVIADYNYKLPDDFTGCVIAWNSVKQDALTGDNYGYLYRLFRKSKLKPFERDISTEIYQAGSTPCNGQVGLNCYYPLERYGFHPTTGVNYQPFRVVVLSFELLNGPATVCGPKLSTTLVKDKCVNFNFNGLTGTGVLTTSKKQFLPFQQFGRDISDTTDAVRDPQTLEILDITPCSFGGVSVITPGTNTSNQVAVLYQDVNCTEVPMAIHAEQLTPAWRVYSAGANVFQTRAGCLVGAEHVNNSYECDIPVGAGICASYHSMSSFRSVNQRSIIAYTMSLGAENSVAYSNNSIAIPTNFTISVTTEILPVSMTKTSVDCTMYICGDSIECSNLLLQYGSFCTQLNRALTGIAVEQDKNTQEVFAQVKQIYKTPPIKDFGGFNFSQILPDPSKPSKRSFIEDLLFNKVTLADAGFIKQYGDCLGDIAARDLICAQKFNGLTVLPPLLTDEMIAQYTSALLAGTITSGWTFGAGAALQIPFAMQMAYRFNGIGVTQNVLYENQKLIANQFNSAIGKIQDSLSSTASALGKLQDVVNQNAQALNTLVKQLSSNFGAISSVLNDILSRLDPPEAEVQIDRLITGRLQSLQTYVTQQLIRAAEIRASANLAATKMSECVLGQSKRVDFCGKGYHLMSFPQSAPHGVVFLHVTYVPAQEKNFTTAPAICHEGKAHFPREGVFVSNGTHWFITQRNFYEPQIITTDNTFVSGSCDVVIGIVNNTVYDPLQPELDSGGGSGGGQIYEGKLTAEGLRFGIVASRFNHALVDRLVEGAIDAIVRHGGREEDITLVRVPGSWEIPVAAGELARKEDIDAVIAIGVLIRGATPHFDYIASEVSKGLADLSLELRKPITFGVITADTLEQAIERAGTKHGNKGWEAALSAIEMANLFKSLR

SEQ ID NO: 7777 - protein, 1299 aa, Artificial Sequence
  SARS-CoV-2/pangolin/Guangxi/P1E/2017__EPI_ISL_410539 spike protein (1-1139)(K978P_V979P) LumSynth construct
MFVFLFVLPLVSSQCVNLTTRTGIQPGYTNSSTRGVYYPDKVFRSSILHLTQDLFLPFFSNVTWFNTINYQGGFKKFDNPVLPFNDGVYFASTEKSNIIRGWIFGTTLDARTQSLLIVNNATNVVIKVCEFQFCTDPFLGVYYHNNNKTWVENEFRVYSSANNCTFEYISQPFLMDLEGKQGNFKNLREFVFKNVDGYFKIYSKHTPIDLVRDLPRGFAALEPLVDLPIGINITRFQTLLALHRSYLTPGKLESGWTTGAAAYYVGYLQQRTFLLSYNQNGTITDAVDCSLDPLSETKCTLKSLTVEKGIYQTSNFRVQPTISIVRFPNITNLCPFGEVFNASKFASVYAWNRKRISNCVADYSVLYNSTSFSTFKCYGVSPTKLNDLCFTNVYADSFVVKGDEVRQIAPGQTGVIADYNYKLPDDFTGCVIAWNSVKQDALTGGNYLYRLFRKSKLKPFERDISTEIYQAGSTPCNGQVGLNCYYPLERYGFHPTTGVNYQPFRVVVLSFELLNGPATVCGPKLSTTLVKDKCVNFNFNGLTGTGVLTTSKKQFLPFQQFGRDISDTTDAVRDPQTLEILDITPCSFGGVSVITPGTNTSNQVAVLYQDVNCTEVPMAIHAEQLTPAWRVYSAGANVFQTRAGCLVGAEHVNNSYECDIPVGAGICASYHSMSSLRSVNQRSIIAYTMSLGAENSVAYSNNSIAIPTNFTISVTTEILPVSMTKTSVDCTMYICGDSIECSNLLLQYGSFCTQLNRALTGIAVEQDKNTQEVFAQVKQIYKTPPIKDFGGFNFSQILPDPSKPSKRSFIEDLLFNKVTLADAGFIKQYGDCLGDIAARDLICAQKFNGLTVLPPLLTDEMIAQYTSALLAGTITSGWTFGAGAALQIPFAMQMAYRFNGIGVTQNVLYENQKLIANQFNSAIGKIQDSLSSTASALGKLQDVVNQNAQALNTLVKQLSSNFGAISSVLNDILSRLDPPEAEVQIDRLITGRLQSLQTYVTQQLIRAAEIRASANLAATKMSECVLGQSKRVDFCGKGYHLMSFPQSAPHGVVFLHVTYVPAQEKNFTTAPAICHEGKAHFPREGVFVSNGTHWFITQRNFYEPQIITTDNTFVSGSCDVVIGIVNNTVYDPLQPELDSGGGSGGGQIYEGKLTAEGLRFGIVASRFNHALVDRLVEGAIDAIVRHGGREEDITLVRVPGSWEIPVAAGELARKEDIDAVIAIGVLIRGATPHFDYIASEVSKGLADLSLELRKPITFGVITADTLEQAIERAGTKHGNKGWEAALSAIEMANLFKSLR

SEQ ID NO: 7778 - protein, 1307 aa, Artificial Sequence
  SARS-CoV-2/Wuhan/WIV05/2019__EPI_ISL_402128 spike protein (1-1147)(K986P_V987P_T887W_A1020W) LumSynth construct
MFVFLVLLPLVSSQCVNLTTRTQLPPAYTNSFTRGVYYPDKVFRSSVLHSTQDLFLPFFSNVTWFHAIHVSGTNGTKRFDNPVLPFNDGVYFASTEKSNIIRGWIFGTTLDSKTQSLLIVNNATNVVIKVCEFQFCNDPFLGVYYHKNNKSWMESEFRVYSSANNCTFEYVSQPFLMDLEGKQGNFKNLREFVFKNIDGYFKIYSKHTPINLVRDLPQGFSALEPLVDLPIGINITRFQTLLALHRSYLTPGDSSSGWTAGAAAYYVGYLQPRTFLLKYNENGTITDAVDCALDPLSETKCTLKSFTVEKGIYQTSNFRVQPTESIVRFPNITNLCPFGEVFNATRFASVYAWNRKRISNCVADYSVLYNSASFSTFKCYGVSPTKLNDLCFTNVYADSFVIRGDEVRQIAPGQTGKIADYNYKLPDDFTGCVIAWNSNNLDSKVGGNYNYLYRLFRKSNLKPFERDISTEIYQAGSTPCNGVEGFNCYFPLQSYGFQPTNGVGYQPYRVVVLSFELLHAPATVCGPKKSTNLVKNKCVNFNFNGLTGTGVLTESNKKFLPFQQFGRDIADTTDAVRDPQTLEILDITPCSFGGVSVITPGTNTSNQVAVLYQDVNCTEVPVAIHADQLTPTWRVYSTGSNVFQTRAGCLIGAEHVNNSYECDIPIGAGICASYQTQTNSPRRARSVASQSIIAYTMSLGAENSVAYSNNSIAIPTNFTISVTTEILPVSMTKTSVDCTMYICGDSTECSNLLLQYGSFCTQLNRALTGIAVEQDKNTQEVFAQVKQIYKTPPIKDFGGFNFSQILPDPSKPSKRSFIEDLLFNKVTLADAGFIKQYGDCLGDIAARDLICAQKFNGLTVLPPLLTDEMIAQYTSALLAGTITSGWWFGAGAALQIPFAMQMAYRFNGIGVTQNVLYENQKLIANQFNSAIGKIQDSLSSTASALGKLQDVVNQNAQALNTLVKQLSSNFGAISSVLNDILSRLDPPEAEVQIDRLITGRLQSLQTYVTQQLIRAAEIRWSANLAATKMSECVLGQSKRVDFCGKGYHLMSFPQSAPHGVVFLHVTYVPAQEKNFTTAPAICHDGKAHFPREGVFVSNGTHWFVTQRNFYEPQIITTDNTFVSGNCDVVIGIVNNTVYDPLQPELDSGGGSGGGQIYEGKLTAEGLRFGIVASRFNHALVDRLVEGAIDAIVRHGGREEDITLVRVPGSWEIPVAAGELARKEDIDAVIAIGVLIRGATPHFDYIASEVSKGLADLSLELRKPITFGVITADTLEQAIERAGTKHGNKGWEAALSAIEMANLFKSLR

SEQ ID NO: 7779 - protein, 1303 aa, Artificial Sequence
  SARS-CoV-2/bat/Yunnan/RaTG13/2013__EPI_ISL_402131 spike protein (1-1143)(K982P_V983P_T883W_A1016W) LumSynth construct
MFVFLVLLPLVSSQCVNLTTRTQLPPAYTNSSTRGVYYPDKVFRSSVLHLTQDLFLPFFSNVTWFHAIHVSGTNGIKRFDNPVLPFNDGVYFASTEKSNIIRGWIFGTTLDSKTQSLLIVNNATNVVIKVCEFQFCNDPFLGVYYHKNNKSWMESEFRVYSSANNCTFEYVSQPFLMDLEGKQGNFKNLREFVFKNIDGYFKIYSKHTPINLVRDLPPGFSALEPLVDLPIGINITRFQTLLALHRSYLTPGDSSSGWTAGAAAYYVGYLQPRTFLLKYNENGTITDAVDCALDPLSETKCTLKSFTVEKGIYQTSNFRVQPTDSIVRFPNITNLCPFGEVFNATTFASVYAWNRKRISNCVADYSVLYNSTSFSTFKCYGVSPTKLNDLCFTNVYADSFVITGDEVRQIAPGQTGKIADYNYKLPDDFTGCVIAWNSKHIDAKEGGNFNYLYRLFRKANLKPFERDISTEIYQAGSKPCNGQTGLNCYYPLYRYGFYPTDGVGHQPYRVVVLSFELLNAPATVCGPKKSTNLVKNKCVNFNFNGLTGTGVLTESNKKFLPFQQFGRDIADTTDAVRDPQTLEILDITPCSFGGVSVITPGTNASNQVAVLYQDVNCTEVPVAIHADQLTPTWRVYSTGSNVFQTRAGCLIGAEHVNNSYECDIPIGAGICASYQTQTNSRSVASQSIIAYTMSLGAENSVAYSNNSIAIPTNFTISVTTEILPVSMTKTSVDCTMYICGDSTECSNLLLQYGSFCTQLNRALTGIAVEQDKNTQEVFAQVKQIYKTPPIKDFGGFNFSQILPDPSKPSKRSFIEDLLFNKVTLADAGFIKQYGDCLGDIAARDLICAQKFNGLTVLPPLLTDEMIAQYTSALLAGTITSGWWFGAGAALQIPFAMQMAYRFNGIGVTQNVLYENQKLIANQFNSAIGKIQDSLSSTASALGKLQDVVNQNAQALNTLVKQLSSNFGAISSVLNDILSRLDPPEAEVQIDRLITGRLQSLQTYVTQQLIRAAEIRWSANLAATKMSECVLGQSKRVDFCGKGYHLMSFPQSAPHGVVFLHVTYVPAQEKNFTTAPAICHDGKAHFPREGVFVSNGTHWFVTQRNFYEPQIITTDNTFVSGSCDVVIGIVNNTVYDPLQPELDSGGGSGGGQIYEGKLTAEGLRFGIVASRFNHALVDRLVEGAIDAIVRHGGREEDITLVRVPGSWEIPVAAGELARKEDIDAVIAIGVLIRGATPHFDYIASEVSKGLADLSLELRKPITFGVITADTLEQAIERAGTKHGNKGWEAALSAIEMANLFKSLR

SEQ ID NO: 7780 - protein, 1307 aa, Artificial Sequence
  SARS-CoV-2/Wuhan/HBCDC-HB-01/2019__EPI_ISL_402132 spike protein (1-1147)(K986P_V987P_T887W_A1020W) LumSynth construct
MFVFLVLLPLVSSQCVNLTTRTQLPPAYTNSITRGVYYPDKVFRSSVLHSTQDLFLPFFSNVTWFHAIHVSGTNGTKRFDNPVLPFNDGVYFASTEKSNIIRGWIFGTTLDSKTQSLLIVNNATNVVIKVCEFQFCNDPFLGVYYHKNNKSWMESEFRVYSSANNCTFEYVSQPFLMDLEGKQGNFKNLREFVFKNIDGYFKIYSKHTPINLVRDLPQGFSALEPLVDLPIGINITRFQTLLALHRSYLTPGDSSSGWTAGAAAYYVGYLQPRTFLLKYNENGTITDAVDCALDPLSETKCTLKSFTVEKGIYQTSNFRVQPTESIVRFPNITNLCPFGEVFNATRFASVYAWNRKRISNCVADYSVLYNSASFSTFKCYGVSPTKLNDLCFTNVYADSFVIRGDEVRQIAPGQTGKIADYNYKLPDDFTGCVIAWNSNNLDSKVGGNYNYLYRLFRKSNLKPFERDISTEIYQAGSTPCNGVEGFNCYFPLQSYGFQPTNGVGYQPYRVVVLSFELLHAPATVCGPKKSTNLVKNKCVNFNFNGLTGTGVLTESNKKFLPFQQFGRDIADTTDAVRDPQTLEILDITPCSFGGVSVITPGTNTSNQVAVLYQDVNCTEVPVAIHADQLTPTWRVYSTGSNVFQTRAGCLIGAEHVNNSYECDIPIGAGICASYQTQTNSPRRARSVASQSIIAYTMSLGAENSVAYSNNSIAIPTNFTISVTTEILPVSMTKTSVDCTMYICGDSTECSNLLLQYGSFCTQLNRALTGIAVEQDKNTQEVFAQVKQIYKTPPIKDFGGFNFSQILPDPSKPSKRSFIEDLLFNKVTLADAGFIKQYGDCLGDIAARDLICAQKFNGLTVLPPLLTDEMIAQYTSALLAGTITSGWWFGAGAALQIPFAMQMAYRFNGIGVTQNVLYENQKLIANQFNSAIGKIQDSLSSTASALGKLQDVVNQNAQALNTLVKQLSSNFGAISSVLNDILSRLDPPEAEVQIDRLITGRLQSLQTYVTQQLIRAAEIRWSANLAATKMSECVLGQSKRVDFCGKGYHLMSFPQSAPHGVVFLHVTYVPAQEKNFTTAPAICHDGKAHFPREGVFVSNGTHWFVTQRNFYEPQIITTDNTFVSGNCDVVIGIVNNTVYDPLQPELDSGGGSGGGQIYEGKLTAEGLRFGIVASRFNHALVDRLVEGAIDAIVRHGGREEDITLVRVPGSWEIPVAAGELARKEDIDAVIAIGVLIRGATPHFDYIASEVSKGLADLSLELRKPITFGVITADTLEQAIERAGTKHGNKGWEAALSAIEMANLFKSLR

SEQ ID NO: 7781 - protein, 1307 aa, Artificial Sequence
  SARS-CoV-2/Guangdong/20SF028/2020__EPI_ISL_403936 spike protein (1-1147)(K986P_V987P_T887W_A1020W) LumSynth construct
MFVFLVLLPLVSSQCVNLTTRTQLPPAYTNSFTRGVYYPDKVFRSSVLYSTQDLFLPFFSNVTWFHAIHVSGTNGTKRFDNPVLPFNDGVYFASTEKSNIIRGWIFGTTLDSKTQSLLIVNNATNVVIKVCEFQFCNDPFLGVYYHKNNKSWMESEFRVYSSANNCTFEYVSQPFLMDLEGKQGNFKNLREFVFKNIDGYFKIYSKHTPINLVRDLPQGFSALEPLVDLPIGINITRFQTLLALHRSYLTPGDSSSGWTAGAAAYYVGYLQPRTFLLKYNENGTITDAVDCALDPLSETKCTLKSFTVEKGIYQTSNFRVQPTESIVRFPNITNLCPFGEVFNATRFASVYAWNRKRISNCVADYSVLYNSASFSTFKCYGVSPTKLNDLCFTNVYADSFVIRGDEVRQIAPGQTGKIADYNYKLPDDFTGCVIAWNSNNLDSKVGGNYNYLYRLFRKSNLKPFERDISTEIYQAGSTPCNGVEGFNCYFPLQSYGFQPTNGVGYQPYRVVVLSFELLHAPATVCGPKKSTNLVKNKCVNFNFNGLTGTGVLTESNKKFLPFQQFGRDIADTTDAVRDPQTLEILDITPCSFGGVSVITPGTNTSNQVAVLYQDVNCTEVPVAIHADQLTPTWRVYSTGSNVFQTRAGCLIGAEHVNNSYECDIPIGAGICASYQTQTNSPRRARSVASQSIIAYTMSLGAENSVAYSNNSIAIPTNFTISVTTEILPVSMTKTSVDCTMYICGDSTECSNLLLQYGSFCTQLNRALTGIAVEQDKNTQEVFAQVKQIYKTPPIKDFGGFNFSQILPDPSKPSKRSFIEDLLFNKVTLADAGFIKQYGDCLGDIAARDLICAQKFNGLTVLPPLLTDEMIAQYTSALLAGTITSGWWFGAGAALQIPFAMQMAYRFNGIGVTQNVLYENQKLIANQFNSAIGKIQDSLSSTASALGKLQDVVNQNAQALNTLVKQLSSNFGAISSVLNDILSRLDPPEAEVQIDRLITGRLQSLQTYVTQQLIRAAEIRWSANLAATKMSECVLGQSKRVDFCGKGYHLMSFPQSAPHGVVFLHVTYVPAQEKNFTTAPAICHDGKAHFPREGVFVSNGTHWFVTQRNFYEPQIITTDNTFVSGNCDVVIGIVNNTVYDPLQPELDSGGGSGGGQIYEGKLTAEGLRFGIVASRFNHALVDRLVEGAIDAIVRHGGREEDITLVRVPGSWEIPVAAGELARKEDIDAVIAIGVLIRGATPHFDYIASEVSKGLADLSLELRKPITFGVITADTLEQAIERAGTKHGNKGWEAALSAIEMANLFKSLR

SEQ ID NO: 7782 - protein, 1307 aa, Artificial Sequence
  SARS-CoV-2/Shenzhen/SZTH-001/2020__EPI_ISL_406592 spike protein (1-1147)(K986P_V987P_T887W_A1020W) LumSynth construct
MFVFLVLLPLVSSQCVNLTTRTQLPPAYTNSFTRGVYYPDKVFRSSVLHSTQDLFLPFFSNVTWFHAIHVSGTNGTKRFDNPVLPFNDGVYFASTEKSNIIRGWIFGTTLDSKTQSLLIVNNATNVVIKVCEFQFCNDPFLGVYYHKNNKSWMESEFRVYSSANNCTFEYVSQPFLMDLEGKQGNFKNLREFVFKNIDGYFKIYSKHTPINLVRDLPQGFSALEPLVDLPIGINITRFQTLLALHRSYLTPGDSSSGWTAGAAAYYVGYLQPRTFLLKYNENGTITDAVDCALDPLSETKCTLKSFTVEKGIYQTSNFRVQPTESIVRFPNITNLCPFGEVFNATRFASVYAWNRKRISNCVADYSVLYNSASFSTFKCYGVSPTKLNDLCFTNVYADSFVIRGDEVRQIAPGQTGKIADYNYKLPDDFTGCVIAWNSNNLDSKVGGNYNYLYRLFRKSNLKPFERDISTEIYQAGSTPCNGVEGFNCYFPLQSYGFQPTNGVGYQPYRVVVLSFELLHAPATVCGPKKSTNLVKNKCVNFNFNGLTGTGVLTESNKKFLPFQQFGRDIADTTDAVRDPQTLEILDITPCSFGGVSVITPGTNTSNQVAVLYQDVNCTEVPVAIHADQLTPTWRVYSTGSNVFQTRAGCLIGAEHVNNSYECDIPIGAGICASYQTQTNSPRRARSVASQSIIAYTMSLGAENSVAYSNNSIAIPTNFTISVTTEILPVSMTKTSVDCTMYICGDSTECSNLLLQYGSFCTQLNRALTGIAVEQDKNTQEVFAQVKQIYKTPPIKDFGGFNFSQILPDPSKPSKRSFIEDLLFNKVTLADAGFIKQYGDCLGDIAARDLICAQKFNGLTVLPPLLTDEMIAQYTSALLAGTITSGWWFGAGAALQIPFAMQMAYRFNGIGVTQNVLYENQKLIANQFNSAIGKIQDSLSSTASALGKLQDVVNQNAQALNTLVKQLSSNFGAISSVLNDILSRLDPPEAEVQIDRLITGRLQSLQTYVTQQLIRAAEIRWSANLAATKMSECVLGQSKRVDFCGKGYHLMSFPQSAPHGVVFLHVTYVPAQEKNFTTAPAICHDGKAHFPREGVFVSNGTHWFVTQRNFYEPQIITTDNTFVSGNCDVLIGIVNNTVYDPLQPELDSGGGSGGGQIYEGKLTAEGLRFGIVASRFNHALVDRLVEGAIDAIVRHGGREEDITLVRVPGSWEIPVAAGELARKEDIDAVIAIGVLIRGATPHFDYIASEVSKGLADLSLELRKPITFGVITADTLEQAIERAGTKHGNKGWEAALSAIEMANLFKSLR

SEQ ID NO: 7783 - protein, 1307 aa, Artificial Sequence
  SARS-CoV-2/Shenzhen/SZTH-004/2020__EPI_ISL_406595 spike protein (1-1147)(K986P_V987P_T887W_A1020W) LumSynth construct
MFVFLVLLPLVSSQCVNLTTRTQLPPAYTNSFTRGVYYPDKVFRSSVLHSTQDLFLPFFSNVTWFHAIHVSGTNGTKRFDNPVLPFNDGVYFASTEKSNIIRGWIFGTTLDSKTQSLLIVNNATNVVIKVCEFQFCNDPFLGVYYHKNNKSWMESEFRVYSSANNCTFEYVSQPFLMDLEGKQGNFKNLREFVFKNIDGYFKIYSKHTPINLVRDLPQGFSALEPLVDLPIGINITRFQTLLALHRSYLTPGDSSSGWTAGAAAYYVGYLQPRTFLLKYNENGTITDAVDCALDPLSETKCTLKSFTVEKGIYQTSNFRVQPTESIVRFPNITNLCPFGEVFNATRFASVYAWDRKRISNCVAYYSVLYNSASFSTFKCYGVSPTKLNDLCFTNVYADSFVIRGDEVRQIAPGQTGKIADYNYKLPDDFTGCVIAWNSNNLDSKVGGNYNYLYRLFRKSNLKPFERDISTEIYQAGSTPCNGVEGFNCYFPLQSYGFQPTNGVGYQPYRVVVLSFELLHAPATVCGPKKSTNLVKNKCVNFNFNGLTGTGVLTESNKKFLPFQQFGRDIADTTDAVRDPQTLEILDITPCSFGGVSVITPGTNTSNQVAVLYQDVNCTEVPVAIHADQLTPTWRVYSTGSNVFQTRAGCLIGAEHVNNSYECDIPIGAGICASYQTQTNSPRRARSVASQSIIAYTMSLGAENSVAYSNNSIAIPTNFTISVTTEILPVSMTKTSVDCTMYICGDSTECSNLLLQYGSFCTQLNRALTGIAVEQDKNTQEVFAQVKQIYKTPPIKDFGGFNFSQILPDPSKPSKRSFIEDLLFNKVTLADAGFIKQYGDCLGDIAARDLICAQKFNGLTVLPPLLTDEMIAQYTSALLAGTITSGWWFGAGAALQIPFAMQMAYRFNGIGVTQNVLYENQKLIANQFNSAIGKIQDSLSSTASALGKLQDVVNQNAQALNTLVKQLSSNFGAISSVLNDILSRLDPPEAEVQIDRLITGRLQSLQTYVTQQLIRAAEIRWSANLAATKMSECVLGQSKRVDFCGKGYHLMSFPQSAPHGVVFLHVTYVPAQEKNFTTAPAICHDGKAHFPREGVFVSNGTHWFVTQRNFYEPQIITTDNTFVSGNCDVVIGIVNNTVYDPLQPELDSGGGSGGGQIYEGKLTAEGLRFGIVASRFNHALVDRLVEGAIDAIVRHGGREEDITLVRVPGSWEIPVAAGELARKEDIDAVIAIGVLIRGATPHFDYIASEVSKGLADLSLELRKPITFGVITADTLEQAIERAGTKHGNKGWEAALSAIEMANLFKSLR

SEQ ID NO: 7784 - protein, 1307 aa, Artificial Sequence
  SARS-CoV-2/France/IDF0372/2020__EPI_ISL_406596 spike protein (1-1147)(K986P_V987P_T887W_A1020W) LumSynth construct
MFVFLVLLPLVSSQCVNLTTRTQLPPAYTNSFTRGVYYPDKVFRSSVLHSTQDLFLPFFSNVTWFHAIHVSGTNGTKRFDNPVLPFNDGVYFASTEKSNIIRGWIFGTTLDSKTQSLLIVNNATNVVIKVCEFQFCNDPFLGVYYHKNNKSWMESEFRVYSSANNCTFEYVSQPFLMDLEGKQGNFKNLREFVFKNIDGYFKIYSKHTPINLVRDLPQGFSALEPLVDLPIGINITRFQTLLALHRSYLTPGDSSSGWTAGAAAYYVGYLQPRTFLLKYNENGTITDAVDCALDPLSETKCTLKSFTVEKGIYQTSNFRVQPTESIVRFPNITNLCPFGEVFNATRFASVYAWNRKRISNCVADYSFLYNSASFSTFKCYGVSPTKLNDLCFTNVYADSFVIRGDEVRQIAPGQTGKIADYNYKLPDDFTGCVIAWNSNNLDSKVGGNYNYLYRLFRKSNLKPFERDISTEIYQAGSTPCNGVEGFNCYFPLQSYGFQPTNGVGYQPYRVVVLSFELLHAPATVCGPKKSTNLVKNKCVNFNFNGLTGTGVLTESNKKFLPFQQFGRDIADTTDAVRDPQTLEILDITPCSFGGVSVITPGTNTSNQVAVLYQDVNCTEVPVAIHADQLTPTWRVYSTGSNVFQTRAGCLIGAEHVNNSYECDIPIGAGICASYQTQTNSPRRARSVASQSIIAYTMSLGAENSVAYSNNSIAIPTNFTISVTTEILPVSMTKTSVDCTMYICGDSTECSNLLLQYGSFCTQLNRALTGIAVEQDKNTQEVFAQVKQIYKTPPIKDFGGFNFSQILPDPSKPSKRSFIEDLLFNKVTLADAGFIKQYGDCLGDIAARDLICAQKFNGLTVLPPLLTDEMIAQYTSALLAGTITSGWWFGAGAALQIPFAMQMAYRFNGIGVTQNVLYENQKLIANQFNSAIGKIQDSLSSTASALGKLQDVVNQNAQALNTLVKQLSSNFGAISSVLNDILSRLDPPEAEVQIDRLITGRLQSLQTYVTQQLIRAAEIRWSANLAATKMSECVLGQSKRVDFCGKGYHLMSFPQSAPHGVVFLHVTYVPAQEKNFTTAPAICHDGKAHFPREGVFVSNGTHWFVTQRNFYEPQIITTDNTFVSGNCDVVIGIVNNTVYDPLQPELDSGGGSGGGQIYEGKLTAEGLRFGIVASRFNHALVDRLVEGAIDAIVRHGGREEDITLVRVPGSWEIPVAAGELARKEDIDAVIAIGVLIRGATPHFDYIASEVSKGLADLSLELRKPITFGVITADTLEQAIERAGTKHGNKGWEAALSAIEMANLFKSLR

SEQ ID NO: 7785 - protein, 1307 aa, Artificial Sequence
  SARS-CoV-2/Australia/VIC01/2020__EPI_ISL_406844 spike protein (1-1147)(K986P_V987P_T887W_A1020W) LumSynth construct
MFVFLVLLPLVSSQCVNLTTRTQLPPAYTNSFTRGVYYPDKVFRSSVLHSTQDLFLPFFSNVTWFHAIHVSGTNGTKRFDNPVLPFNDGVYFASTEKSNIIRGWIFGTTLDSKTQSLLIVNNATNVVIKVCEFQFCNDPFLGVYYHKNNKSWMESEFRVYSSANNCTFEYVSQPFLMDLEGKQGNFKNLREFVFKNIDGYFKIYSKHTPINLVRDLPQGFSALEPLVDLPIGINITRFQTLLALHRRYLTPGDSSSGWTAGAAAYYVGYLQPRTFLLKYNENGTITDAVDCALDPLSETKCTLKSFTVEKGIYQTSNFRVQPTESIVRFPNITNLCPFGEVFNATRFASVYAWNRKRISNCVADYSVLYNSASFSTFKCYGVSPTKLNDLCFTNVYADSFVIRGDEVRQIAPGQTGKIADYNYKLPDDFTGCVIAWNSNNLDSKVGGNYNYLYRLFRKSNLKPFERDISTEIYQAGSTPCNGVEGFNCYFPLQSYGFQPTNGVGYQPYRVVVLSFELLHAPATVCGPKKSTNLVKNKCVNFNFNGLTGTGVLTESNKKFLPFQQFGRDIADTTDAVRDPQTLEILDITPCSFGGVSVITPGTNTSNQVAVLYQDVNCTEVPVAIHADQLTPTWRVYSTGSNVFQTRAGCLIGAEHVNNSYECDIPIGAGICASYQTQTNSPRRARSVASQSIIAYTMSLGAENSVAYSNNSIAIPTNFTISVTTEILPVSMTKTSVDCTMYICGDSTECSNLLLQYGSFCTQLNRALTGIAVEQDKNTQEVFAQVKQIYKTPPIKDFGGFNFSQILPDPSKPSKRSFIEDLLFNKVTLADAGFIKQYGDCLGDIAARDLICAQKFNGLTVLPPLLTDEMIAQYTSALLAGTITSGWWFGAGAALQIPFAMQMAYRFNGIGVTQNVLYENQKLIANQFNSAIGKIQDSLSSTASALGKLQDVVNQNAQALNTLVKQLSSNFGAISSVLNDILSRLDPPEAEVQIDRLITGRLQSLQTYVTQQLIRAAEIRWSANLAATKMSECVLGQSKRVDFCGKGYHLMSFPQSAPHGVVFLHVTYVPAQEKNFTTAPAICHDGKAHFPREGVFVSNGTHWFVTQRNFYEPQIITTDNTFVSGNCDVVIGIVNNTVYDPLQPELDSGGGSGGGQIYEGKLTAEGLRFGIVASRFNHALVDRLVEGAIDAIVRHGGREEDITLVRVPGSWEIPVAAGELARKEDIDAVIAIGVLIRGATPHFDYIASEVSKGLADLSLELRKPITFGVITADTLEQAIERAGTKHGNKGWEAALSAIEMANLFKSLR

SEQ ID NO: 7786 - protein, 1307 aa, Artificial Sequence
  SARS-CoV-2/Germany/BavPat1/2020__EPI_ISL_406862 spike protein (1-1147)(K986P_V987P_T887W_A1020W) LumSynth construct
MFVFLVLLPLVSSQCVNLTTRTQLPPAYTNSFTRGVYYPDKVFRSSVLHSTQDLFLPFFSNVTWFHAIHVSGTNGTKRFDNPVLPFNDGVYFASTEKSNIIRGWIFGTTLDSKTQSLLIVNNATNVVIKVCEFQFCNDPFLGVYYHKNNKSWMESEFRVYSSANNCTFEYVSQPFLMDLEGKQGNFKNLREFVFKNIDGYFKIYSKHTPINLVRDLPQGFSALEPLVDLPIGINITRFQTLLALHRSYLTPGDSSSGWTAGAAAYYVGYLQPRTFLLKYNENGTITDAVDCALDPLSETKCTLKSFTVEKGIYQTSNFRVQPTESIVRFPNITNLCPFGEVFNATRFASVYAWNRKRISNCVADYSVLYNSASFSTFKCYGVSPTKLNDLCFTNVYADSFVIRGDEVRQIAPGQTGKIADYNYKLPDDFTGCVIAWNSNNLDSKVGGNYNYLYRLFRKSNLKPFERDISTEIYQAGSTPCNGVEGFNCYFPLQSYGFQPTNGVGYQPYRVVVLSFELLHAPATVCGPKKSTNLVKNKCVNFNFNGLTGTGVLTESNKKFLPFQQFGRDIADTTDAVRDPQTLEILDITPCSFGGVSVITPGTNTSNQVAVLYQGVNCTEVPVAIHADQLTPTWRVYSTGSNVFQTRAGCLIGAEHVNNSYECDIPIGAGICASYQTQTNSPRRARSVASQSIIAYTMSLGAENSVAYSNNSIAIPTNFTISVTTEILPVSMTKTSVDCTMYICGDSTECSNLLLQYGSFCTQLNRALTGIAVEQDKNTQEVFAQVKQIYKTPPIKDFGGFNFSQILPDPSKPSKRSFIEDLLFNKVTLADAGFIKQYGDCLGDIAARDLICAQKFNGLTVLPPLLTDEMIAQYTSALLAGTITSGWWFGAGAALQIPFAMQMAYRFNGIGVTQNVLYENQKLIANQFNSAIGKIQDSLSSTASALGKLQDVVNQNAQALNTLVKQLSSNFGAISSVLNDILSRLDPPEAEVQIDRLITGRLQSLQTYVTQQLIRAAEIRWSANLAATKMSECVLGQSKRVDFCGKGYHLMSFPQSAPHGVVFLHVTYVPAQEKNFTTAPAICHDGKAHFPREGVFVSNGTHWFVTQRNFYEPQIITTDNTFVSGNCDVVIGIVNNTVYDPLQPELDSGGGSGGGQIYEGKLTAEGLRFGIVASRFNHALVDRLVEGAIDAIVRHGGREEDITLVRVPGSWEIPVAAGELARKEDIDAVIAIGVLIRGATPHFDYIASEVSKGLADLSLELRKPITFGVITADTLEQAIERAGTKHGNKGWEAALSAIEMANLFKSLR

SEQ ID NO: 7787 - protein, 1307 aa, Artificial Sequence
  SARS-CoV-2/Wuhan/HBCDC-HB-02/2020__EPI_ISL_412978 spike protein (1-1147)(K986P_V987P_T887W_A1020W) LumSynth construct
MFVFLVLLPLVSSQCVNLTTRTQLPPAYTNSFTRGVYYPDKVFRSSVLHSTQDLFLPFFSNVTWFHAIHVSGTNGTKRFDNPVLPFNDGVYFASTEKSNIIRGWIFGTTLDSKTQSLLIVNNATNVVIKVCEFQFCNDPFLGVYYHKNNKSWMESEFRVYSSANNCTFEYVSQPFLMDLEGKQGNFKNLREFVFKNIDGYFKIYSKHTPINLVRDLPQGFSALEPLVDLPIGINITRFQTLLALHRSYLTPGDSSSGWTAGAAAYYVGYLQPRTFLLKYNENGTITDAVDCALDPLSETKCTLKSFTVEKGIYQTSNFRVQPTESIVRFPNITNLCPFGEVFNATRFASVYAWNRKRISNCVADYSVLYNSASFSTFKCYGVSPTKLNDLCFTNVYADSFVIRGDEVRQIAPGQTGKIADYNYKLPDDFTGCVIAWNSNNLDSKVGGNYNYLYRLFRKSNLKPFERDISTEIYQAGSTPCNGVEGFNCYFPLQSYGFQPTNGVGYQPYRVVVLSFELLHAPATVCGPKKSTNLVKNKCVNFNFNGLTGTGVLTESNKKFLPFQQFGRDIADTTDAVRDPQTLEILDITPCSFGGVSVITPGTNTSNQVAVLYQDVNCTEVPVAIHADQLTPTWRVYSTGSNVFQTRAGCLIGAEHVNNSYECDIPIGAGICASYQTQTNSPRRARSVASQSIIAYTMSLGAENSVAYSNNSIAIPTNFTISVTTEILPVSMTKTSVDCTMYICGDSTECSNFLLQYGSFCTQLNRALTGIAVEQDKNTQEVFAQVKQIYKTPPIKDFGGFNFSQILPDPSKPSKRSFIEDLLFNKVTLADAGFIKQYGDCLGDIAARDLICAQKFNGLTVLPPLLTDEMIAQYTSALLAGTITSGWWFGAGAALQIPFAMQMAYRFNGIGVTQNVLYENQKLIANQFNSAIGKIQDSLSSTASALGKLQDVVNQNAQALNTLVKQLSSNFGAISSVLNDILSRLDPPEAEVQIDRLITGRLQSLQTYVTQQLIRAAEIRWSANLAATKMSECVLGQSKRVDFCGKGYHLMSFPQSAPHGVVFLHVTYVPAQEKNFTTAPAICHDGKAHFPREGVFVSNGTHWFVTQRNFYEPQIITTDNTFVSGNCDVVIGIVNNTVYDPLQPELDSGGGSGGGQIYEGKLTAEGLRFGIVASRFNHALVDRLVEGAIDAIVRHGGREEDITLVRVPGSWEIPVAAGELARKEDIDAVIAIGVLIRGATPHFDYIASEVSKGLADLSLELRKPITFGVITADTLEQAIERAGTKHGNKGWEAALSAIEMANLFKSLR

SEQ ID NO: 7788 - protein, 1307 aa, Artificial Sequence
  SARS-CoV-2/Australia/QLD02/2020__EPI_ISL_407896 spike protein (1-1147)(K986P_V987P_T887W_A1020W) LumSynth construct
MFVFLVLLPLVSSQCVNLTTRTQLPPAYTNSFTRGVYYPDKVFRSSVLHSTQDLFLPFFSNVTWFHAIHVSGTNGTKRFDNPVLPFNDGVYFASTEKSNIIRGWIFGTTLDSKTQSLLIVNNATNVVIKVCEFQFCNDPFLGVYYHKNNKSWMESEFRVYSSANNCTFEYVSQPFLMDLEGKQGNFKNLREFVFKNIDGYFKIYSKHTPINLVRDLPQGFSALEPLVDLPIGINITRFQTLLALHRSYLTPGDSSSGWTAGAAAYYVGYLQPRTFLLKYNENGTITDAVDCALDPLSETKCTLKSFTVEKGIYQTSNFRVQPTESIVRFPNITNLCPFGEVFNATRFASVYAWNRKRISNCVADYSVLYNSASFSTFKCYGVSPTKLNDLCFTNVYADSFVIRGDEVRQIAPGQTGKIADYNYKLPDDFTGCVIAWNSNNLDSKVGGNYNYLYRLFRKSNLKPFERDISTEIYQAGSTPCNGVEGFNCYFPLQSYGFQPTNGVGYQPYRVVVLSFELLHAPATVCGPKKSTNLVKNKCVNFNFNGLTGTGVLTESNKKFLPFQQFGRDIADTTDAVRDPQTLEILDITPCSFGGVSVITPGTNTSNQVAVLYQDVNCTEVPVAIHADQLTPTWRVYSTGSNVFQTRAGCLIGAEHVNNSYECDIPIGAGICASYQTQTNSPRRARSVASQSIIAYTMSLGAENSVAYSNNSIAIPTNFTISVTTEILPVSMTKTSVDCTMYICGDSTECSNLLLQYGSFCTQLNRALTGIAVEQDKNTQEVFAQVKQIYKTPPIKDFGGFNFSQILPDPSKPSKRSFIEDLLFNKVTLADAGFIKQYGDCLGDIAARDLICAQKFNGLTVLPPLLTDEMIAQYTSALLAGTITSGWWFGAGAALQIPFAMQMAYRFNGIGVTQNVLYENQKLIANQFNSAIGKIQDSLSSTASALGKLQDVVNQNAQALNTLVKQLSSNFGAISSVLNDILSRLDPPEAEVQIDRLITGRLQSLQTYVTQQLIRAAEIRWSANLAATKMSECVLGQSKRVDFCGKGYHLMSFPQSAPHGVVFLHVTYVPAQEKNFTTAPAICHDGKAHFPREGVFVSNGTHWFVTQRNFYEPQIITTDNTFVSGNCDVVIGIVNNTVYDPLQLELDSGGGSGGGQIYEGKLTAEGLRFGIVASRFNHALVDRLVEGAIDAIVRHGGREEDITLVRVPGSWEIPVAAGELARKEDIDAVIAIGVLIRGATPHFDYIASEVSKGLADLSLELRKPITFGVITADTLEQAIERAGTKHGNKGWEAALSAIEMANLFKSLR

SEQ ID NO: 7789 - protein, 1307 aa, Artificial Sequence
  SARS-CoV-2/India/1-31/2020__EPI_ISL_413523 spike protein (1-1147)(K986P_V987P_T887W_A1020W) LumSynth construct
MFVFLVLLPLVSSQCVNLTTRTQLPPAYTNSFTRGVYYPDKVFRSSVLHSTQDLFLPFFSNVTWFHAIHVSGTNGTKRFDNPVLPFNDGVYFASTEKSNIIRGWIFGTTLDSKTQSLLIVNNATNVVIKVCEFQFCNDPFLGVYYHKNNKSWMESEFRVYSSANNCTFEYVSQPFLMDLEGKQGNFKNLREFVFKNIDGYFKIYSKHTPINLVRDLPQGFSALEPLVDLPIGINITRFQTLLALHRSYLTPGDSSSGWTAGAAAYYVGYLQPRTFLLKYNENGTITDAVDCALDPLSETKCTLKSFTVEKGIYQTSNFRVQPTESIVRFPNITNLCPFGEVFNATRFASVYAWNRKRISNCVADYSVLYNSASFSTFKCYGVSPTKLNDLCFTNVYADSFVIRGDEVRQIAPGQTGKIADYNYKLPDDFTGCVIAWNSNNLDSKVGGNYNYLYRLFRKSNLKPFERDISTEIYQAGSTPCNGVEGFNCYFPLQSYGFQPTNGVGYQPYRVVVLSFELLHAPATVCGPKKSTNLVKNKCVNFNFNGLTGTGVLTESNKKFLPFQQFGRDIADTTDAVRDPQTLEILDITPCSFGGVSVITPGTNTSNQVAVLYQDVNCTEVPVAIHADQLTPTWRVYSTGSNVFQTRAGCLIGAEHVNNSYECDIPIGAGICASYQTQTNSPRRARSVASQSIIAYTMSLGAENSVAYSNNSIAIPTNFTISVTTEILPVSMTKTSVDCTMYICGDSTECSNLLLQYGSFCTQLNRALTGIAVEQDKNTQEVFAQVKQIYKTPPIKDFGGFNFSQILPDPSKPSKRSFIEDLLFNKVTLADAGFIKQYGDCLGDIAARDLICAQKFNGLTVLPPLLTDEMIAQYTSALLAGTITSGWWFGAGAALQIPFAMQMAYRFNGIGVTQNVLYENQKLIANQFNSVIGKIQDSLSSTASALGKLQDVVNQNAQALNTLVKQLSSNFGAISSVLNDILSRLDPPEAEVQIDRLITGRLQSLQTYVTQQLIRAAEIRWSANLAATKMSECVLGQSKRVDFCGKGYHLMSFPQSAPHGVVFLHVTYVPAQEKNFTTAPAICHDGKAHFPREGVFVSNGTHWFVTQRNFYEPQIITTDNTFVSGNCDVVIGIVNNTVYDPLQPELDSGGGSGGGQIYEGKLTAEGLRFGIVASRFNHALVDRLVEGAIDAIVRHGGREEDITLVRVPGSWEIPVAAGELARKEDIDAVIAIGVLIRGATPHFDYIASEVSKGLADLSLELRKPITFGVITADTLEQAIERAGTKHGNKGWEAALSAIEMANLFKSLR

SEQ ID NO: 7790 - protein, 1307 aa, Artificial Sequence
  SARS-CoV-2/Guangdong/GD2020087-P0008/2020__EPI_ISL_413863 spike protein (1-1147)(K986P_V987P_T887W_A1020W) LumSynth construct
MFVFLVLLPLVSSQCVNLTTRTQLPPAYTNSFTRGVYYPDKVFRSSVLHSTQDLFLPFFSNVTWFHAIHVSGTNGTKRFDNPVLPFNDGVYFASTEKSNIIRGWIFGTTLDSKTQSLLIVNNATNVVIKVCEFQFCNDPFLGVYYHKNNKSWMESEFRVYSSANNCTFEYVSQPFLMDLEGKQGNFKNLREFVFKNIDGYFKIYSKHTPINLVRDLPQGFSALEPLVDLPIGINITRFQTLLALHRSYLTPGDSSSGWTAGAAAYYVGYLQPRTFLLKYNENGTITDAVDCALDPLSETKCTLKSFTVEKGIYQTSNFRVQPTESIVRFPNITNLCPFGEVFNATRFASVYAWNRKRISNCVADYSVLYNSASFSTFKCYGVSPTKLNDLCFTNVYADSFVIRGDEVREIAPGQTGKIADYNYKLPDDFTGCVIAWNSNNLDSKVGGNYNYLYRLFRKSNLKPFERDISTEIYQAGSTPCNGVEGFNCYFPLQSYGFQPTNGVGYQPYRVVVLSFELLHAPATVCGPKKSTNLVKNKCVNFNFNGLTGTGVLTESNKKFLPFQQFGRDIADTTDAVRDPQTLEILDITPCSFGGVSVITPGTNTSNQVAVLYQDVNCTEVPVAIHADQLTPTWRVYSTGSNVFQTRAGCLIGAEHVNNSYECDIPIGAGICASYQTQTNSPRRARSVASQSIIAYTMSLGAENSVAYSNNSIAIPTNFTISVTTEILPVSMTKTSVDCTMYICGDSTECSNLLLQYGSFCTQLNRALTGIAVEQDKNTQEVFAQVKQIYKTPPIKDFGGFNFSQILPDPSKPSKRSFIEDLLFNKVTLADAGFIKQYGDCLGDIAARDLICAQKFNGLTVLPPLLTDEMIAQYTSALLAGTITSGWWFGAGAALQIPFAMQMAYRFNGIGVTQNVLYENQKLIANQFNSAIGKIQDSLSSTASALGKLQDVVNQNAQALNTLVKQLSSNFGAISSVLNDILSRLDPPEAEVQIDRLITGRLQSLQTYVTQQLIRAAEIRWSANLAATKMSECVLGQSKRVDFCGKGYHLMSFPQSAPHGVVFLHVTYVPAQEKNFTTAPAICHDGKAHFPREGVFVSNGTHWFVTQRNFYEPQIITTDNTFVSGNCDVVIGIVNNTVYDPLQPELDSGGGSGGGQIYEGKLTAEGLRFGIVASRFNHALVDRLVEGAIDAIVRHGGREEDITLVRVPGSWEIPVAAGELARKEDIDAVIAIGVLIRGATPHFDYIASEVSKGLADLSLELRKPITFGVITADTLEQAIERAGTKHGNKGWEAALSAIEMANLFKSLR

SEQ ID NO: 7791 - protein, 1307 aa, Artificial Sequence
  SARS-CoV-2/Sweden/01/2020__EPI_ISL_411951 spike protein (1-1147)(K986P_V987P_T887W_A1020W) LumSynth construct
MFVFLVLLPLVSSQCVNLTTRTQLPPAYTNSFTRGVYYPDKVFRSSVLHSTQDLFLPFFSNVTWFHAIHVSGTNGTKRFDNPVLPFNDGVYFASTEKSNIIRGWIFGTTLDSKTQSLLIVNNATNVVIKVCEFQFCNDPFLGVYYHKNNKSWMESEFRVYSSANNCTFEYVSQPFLMDLEGKQGNFKNLREFVFKNIDGYFKIYSKHTPINLVRDLPQGFSALEPLVDLPIGINITRFQTLLALHRSYLTPGDSSSGWTAGAAAYYVGYLQPRTFLLKYNENGTITDAVDCALDPLSETKCTLKSFTVEKGIYQTSNFRVQPTESIVRFPNITNLCPFGEVFNATRFASVYAWNRKRISNCVADYSVLYNSASFSTFKCYGVSPTKLNDLCFTNVYADSFVIRGDEVRQIAPGQTGKIADYNYKLPDDFTGCVIAWNSNNLDSKVGGNYNYLYRLFRKSNLKPFERDISTEIYQAGSTPCNGVEGFNCYFPLQSYGFQPTNGVGYQPYRVVVLSFELLHAPATVCGPKKSTNLVKNKCVNFNFNGLTGTGVLTESNKKFLPFQQFGRDIADTTDAVRDPQTLEILDITPCSFGGVSVITPGTNTSNQVAVLYQDVNCTEVPVAIHADQLTPTWRVYSTGSNVFQTRAGCLIGAEHVNNSYECDIPIGAGICASYQTQTNSPRRARSVASQSIIAYTMSLGAENSVAYSNNSIAIPTNFTISVTTEILPVSMTKTSVDCTMYICGDSTECSNLLLQYGSFCTQLNRALTGIAVEQDKNTQEVFAQVKQIYKTPPIKDCGGFNFSQILPDPSKPSKRSFIEDLLFNKVTLADAGFIKQYGDCLGDIAARDLICAQKFNGLTVLPPLLTDEMIAQYTSALLAGTITSGWWFGAGAALQIPFAMQMAYRFNGIGVTQNVLYENQKLIANQFNSAIGKIQDSLSSTASALGKLQDVVNQNAQALNTLVKQLSSNFGAISSVLNDILSRLDPPEAEVQIDRLITGRLQSLQTYVTQQLIRAAEIRWSANLAATKMSECVLGQSKRVDFCGKGYHLMSFPQSAPHGVVFLHVTYVPAQEKNFTTAPAICHDGKAHFPREGVFVSNGTHWFVTQRNFYEPQIITTDNTFVSGNCDVVIGIVNNTVYDPLQPELDSGGGSGGGQIYEGKLTAEGLRFGIVASRFNHALVDRLVEGAIDAIVRHGGREEDITLVRVPGSWEIPVAAGELARKEDIDAVIAIGVLIRGATPHFDYIASEVSKGLADLSLELRKPITFGVITADTLEQAIERAGTKHGNKGWEAALSAIEMANLFKSLR

SEQ ID NO: 7792 - protein, 1307 aa, Artificial Sequence
  SARS-CoV-2/Tianmen/HBCDC-HB-07/2020__EPI_ISL_412983 spike protein (1-1147)(K986P_V987P_T887W_A1020W) LumSynth construct
MFVFLVLLPLVSSQCVNLTTRTQLPPAYTNSFTRGVYYPDKVFRSSVLHSTQDLFLPFFSNVTWFHAIHVSGTNGTKRFDNPVLPFNDGVYFASTEKSNIIRGWIFGTTLDSKTQSLLIVNNATNVVIKVCEFQFCNDPFLGVYYHKNNKSWMESEFRVYSSANNCTFEYVSQPFLMDLEGKQGNFKNLREFVFKNIDGYFKIYSKHTPINLVRDLPQGFSALEPLVDLPIGINITRFQTLLALHRSYLTPGDSSSGWTAGAAAYYVGYLQPRTFLLKYNENGTITDAVDCALDPLSETKCTLKSFTVEKGIYQTSNFRVQPTESIVRFPNITNLCPFGEVFNATRFASVYAWNRKRISNCVADYSVLYNSASFSTFKCYGVSPTKLNDLCFTNVYADSFVIRGDEVRQIAPGQTGKIADYNYKLPDDFTGCVIAWNSNNLDSKVGGNYNYLYRLFRKSNLKPFERDISTEIYQAGSTPCNGVEGFNCYFPLQSYGFQPTNGVGYQPYRVVVLSFELLHAPATVCGPKKSTNLVKNKCVNFNFNGLTGTGVLTESNKKFLPFQQFGRDIADTTDAVRDPQTLEILDITPCSFGGVSVITPGTNTSNQVAVLYQDLNCTEVPVAIHADQLTPTWRVYSTGSNVFQTRAGCLIGAEHVNNSYECDIPIGAGICASYQTQTNSPRRARSVASQSIIAYTMSLGAENSVAYSNNSIAIPTNFTISVTTEILPVSMTKTSVDCTMYICGDSTECSNLLLQYGSFCTQLNRALTGIAVEQDKNTQEVFAQVKQIYKTPPIKDFGGFNFSQILPDPSKPSKRSFIEDLLFNKVTLADAGFIKQYGDCLGDIAARDLICAQKFNGLTVLPPLLTDEMIAQYTSALLAGTITSGWWFGAGAALQIPFAMQMAYRFNGIGVTQNVLYENQKLIANQFNSAIGKIQDSLSSTASALGKLQDVVNQNAQALNTLVKQLSSNFGAISSVLNDILSRLDPPEAEVQIDRLITGRLQSLQTYVTQQLIRAAEIRWSANLAATKMSECVLGQSKRVDFCGKGYHLMSFPQSAPHGVVFLHVTYVPAQEKNFTTAPAICHDGKAHFPREGVFVSNGTHWFVTQRNFYEPQIITTDNTFVSGNCDVVIGIVNNTVYDPLQPELDSGGGSGGGQIYEGKLTAEGLRFGIVASRFNHALVDRLVEGAIDAIVRHGGREEDITLVRVPGSWEIPVAAGELARKEDIDAVIAIGVLIRGATPHFDYIASEVSKGLADLSLELRKPITFGVITADTLEQAIERAGTKHGNKGWEAALSAIEMANLFKSLR

SEQ ID NO: 7793 - protein, 1307 aa, Artificial Sequence
  SARS-CoV-2/Hong Kong/case42_VM20002493/2020__EPI_ISL_414527 spike protein (1-1147)(K986P_V987P_T887W_A1020W) LumSynth construct
MFVFLVLLPLVSSQCVNLTTRTQLPPAYTNSFTRGVYYPDKVFRSSVLHSTQDLFLPFFSNVTWFHAIHVSGTNGTKRFDNPVLPFNDGVYFASTEKSNIIRGWIFGTTLDSKTQSLLIVNNATNVVIKVCEFQFCNDPFLGVYYHKNNKSWMESEFRVYSSANNCTFEYVSQPFLMDLEGKQGNFKNLREFVFKNIDGYFKIYSKHTPINLVRDLPQGFSALEPLVDLPIGINITRFQTLLALHRSYLTPGDSSSGWTAGAAAYYVGYLQPRTFLLKYNENGTITDAVDCALDPLSETKCTLKSFTVEKGIYQTSNFRVQPTESIVRFPNITNLCPFGEVFNATRFASVYAWNRKRISNCVADYSVLYNSASFSTFKCYGVSPTKLNDLCFTNVYADSFVIRGDEVRQIAPGQTGKIADYNYKLPDDFTGCVIAWNSNNLDSKVGGNYNYLYRLFRKSNLKPFERDISTEIYQAGSTPCNGVEGFNCYFPLQSYGFQPTNGVGYQPYRVVVLSFELLHAPATVCGPKKSTNLVKNKCVNFNFNGLTGTGVLTESNKKFLPFQQFGRDIADTTDAVRDPQTLEILDITPCSFGGVSVITPGTNTSNQVAVLYQDVNCTEVPVAIHADQLTPTWRVYSTGSNVFQTRAGCLIGAEHVNNSYECDIPIGAGICASYQTQTNSPRRARSVASQSIIAYTMSLGAENSVAYSNNSIAIPTNFAISVTTEILPVSMTKTSVDCTMYICGDSTECSNLLLQYGSFCTQLNRALTGIAVEQDKNTQEVFAQVKQIYKTPPIKDFGGFNFSQILPDPSKPSKRSFIEDLLFNKVTLADAGFIKQYGDCLGDIAARDLICAQKFNGLTVLPPLLTDEMIAQYTSALLAGTITSGWWFGAGAALQIPFAMQMAYRFNGIGVTQNVLYENQKLIANQFNSAIGKIQDSLSSTASALGKLQDVVNQNAQALNTLVKQLSSNFGAISSVLNDILSRLDPPEAEVQIDRLITGRLQSLQTYVTQQLIRAAEIRWSANLAATKMSECVLGQSKRVDFCGKGYHLMSFPQSAPHGVVFLHVTYVPAQEKNFTTAPAICHDGKAHFPREGVFVSNGTHWFVTQRNFYEPQIITTDNTFVSGNCDVVIGIVNNTVYDPLQPELDSGGGSGGGQIYEGKLTAEGLRFGIVASRFNHALVDRLVEGAIDAIVRHGGREEDITLVRVPGSWEIPVAAGELARKEDIDAVIAIGVLIRGATPHFDYIASEVSKGLADLSLELRKPITFGVITADTLEQAIERAGTKHGNKGWEAALSAIEMANLFKSLR

SEQ ID NO: 7794 - protein, 1307 aa, Artificial Sequence
  SARS-CoV-2/USA/CruiseA-23/2020__EPI_ISL_414482 spike protein (1-1147)(K986P_V987P_T887W_A1020W) LumSynth construct
MFVFLVLLPLVSSQCVNLTTRTQLPPAYTNSFTRGVYYPDKVFRSSVLHSTQDLFLPFFSNVTWFHAIHVSGTNGTKRFDNPVLPFNDGVYFASTEKSNIIRGWIFGTTLDSKTQSLLIVNNATNVVIKVCEFQFCNDPFLGVYYHKNNKSWMESEFRVYSSANNCTFEYVSQPFLMDLEVKQGNFKNLREFVFKNIDGYFKIYSKHTPINLVRDLPQGFSALEPLVDLPIGINITRFQTLLALHRSYLTPGDSSSGWTAGAAAYYVGYLQPRTFLLKYNENGTITDAVDCALDPLSETKCTLKSFTVEKGIYQTSNFRVQPTESIVRFPNITNLCPFGEVFNATRFASVYAWNRKRISNCVADYSVLYNSASFSTFKCYGVSPTKLNDLCFTNVYADSFVIRGDEVRQIAPGQTGKIADYNYKLPDDFTGCVIAWNSNNLDSKVGGNYNYLYRLFRKSNLKPFERDISTEIYQAGSTPCNGVEGFNCYFPLQSYGFQPTNGVGYQPYRVVVLSFELLHAPATVCGPKKSTNLVKNKCVNFNFNGLTGTGVLTESNKKFLPFQQFGRDIADTTDAVRDPQTLEILDITPCSFGGVSVITPGTNTSNQVAVLYQDVNCTEVPVAIHADQLTPTWRVYSTGSNVFQTRAGCLIGAEHVNNSYECDIPIGAGICASYQTQTNSPRRARSVASQSIIAYTMSLGAENSVAYSNNSIAIPTNFTISVTTEILPVSMTKTSVDCTMYICGDSTECSNLLLQYGSFCTQLNRALTGIAVEQDKNTQEVFAQVKQIYKTPPIKDFGGFNFSQILPDPSKPSKRSFIEDLLFNKVTLADAGFIKQYGDCLGDIAARDLICAQKFNGLTVLPPLLTDEMIAQYTSALLAGTITSGWWFGAGAALQIPFAMQMAYRFNGIGVTQNVLYENQKLIANQFNSAIGKIQDSLSSTASALGKLQDVVNQNAQALNTLVKQLSSNFGAISSVLNDILSRLDPPEAEVQIDRLITGRLQSLQTYVTQQLIRAAEIRWSANLAATKMSECVLGQSKRVDFCGKGYHLMSFPQSAPHGVVFLHVTYVPAQEKNFTTAPAICHDGKAHFPREGVFVSNGTHWFVTQRNFYEPQIITTDNTFVSGNCDVVIGIVNNTVYDPLQPELDSGGGSGGGQIYEGKLTAEGLRFGIVASRFNHALVDRLVEGAIDAIVRHGGREEDITLVRVPGSWEIPVAAGELARKEDIDAVIAIGVLIRGATPHFDYIASEVSKGLADLSLELRKPITFGVITADTLEQAIERAGTKHGNKGWEAALSAIEMANLFKSLR

SEQ ID NO: 7795 - protein, 1307 aa, Artificial Sequence
  SARS-CoV-2/Hong Kong/case85_VM20002868/2020__EPI_ISL_414519 spike protein (1-1147)(K986P_V987P_T887W_A1020W) LumSynth construct
MFVFLVLVPLVSSQCVNLTTRTQLPPAYTNSFTRGVYYPDKVFRSSVLHSTQDLFLPFFSNVTWFHAIHVSGTNGTKRFDNPVLPFNDGVYFASTEKSNIIRGWIFGTTLDSKTQSLLIVNNATNVVIKVCEFQFCNDPFLGVYYHKNNKSWMESEFRVYSSANNCTFEYVSQPFLMDLEGKQGNFKNLREFVFKNIDGYFKIYSKHTPINLVRDLPQGFSALEPLVDLPIGINITRFQTLLALHRSYLTPGDSSSGWTAGAAAYYVGYLQPRTFLLKYNENGTITDAVDCALDPLSETKCTLKSFTVEKGIYQTSNFRVQPTESIVRFPNITNLCPFGEVFNATRFASVYAWNRKRISNCVADYSVLYNSASFSTFKCYGVSPTKLNDLCFTNVYADSFVIRGDEVRQIAPGQTGKIADYNYKLPDDFTGCVIAWNSNNLDSKVGGNYNYLYRLFRKSNLKPFERDISTEIYQAGSTPCNGVEGFNCYFPLQSYGFQPTNGVGYQPYRVVVLSFELLHAPATVCGPKKSTNLVKNKCVNFNFNGLTGTGVLTESNKKFLPFQQFGRDIADTTDAVRDPQTLEILDITPCSFGGVSVITPGTNTSNQVAVLYQDVNCTEVPVAIHADQLTPTWRVYSTGSNVFQTRAGCLIGAEHVNNSYECDIPIGAGICASYQTQTNSPRRARSVASQSIIAYTMSLGAENSVAYSNNSIAIPTNFTISVTTEILPVSMTKTSVDCTMYICGDSTECSNLLLQYGSFCTQLNRALTGIAVEQDKNTQEVFAQVKQIYKTPPIKDFGGFNFSQILPDPSKPSKRSFIEDLLFNKVTLADAGFIKQYGDCLGDIAARDLICAQKFNGLTVLPPLLTDEMIAQYTSALLAGTITSGWWFGAGAALQIPFAMQMAYRFNGIGVTQNVLYENQKLIANQFNSAIGKIQDSLSSTASALGKLQDVVNQNAQALNTLVKQLSSNFGAISSVLNDILSRLDPPEAEVQIDRLITGRLQSLQTYVTQQLIRAAEIRWSANLAATKMSECVLGQSKRVDFCGKGYHLMSFPQSAPHGVVFLHVTYVPAQEKNFTTAPAICHDGKAHFPREGVFVSNGTHWFVTQRNFYEPQIITTDNTFVSGNCDVVIGIVNNTVYDPLQPELDSGGGSGGGQIYEGKLTAEGLRFGIVASRFNHALVDRLVEGAIDAIVRHGGREEDITLVRVPGSWEIPVAAGELARKEDIDAVIAIGVLIRGATPHFDYIASEVSKGLADLSLELRKPITFGVITADTLEQAIERAGTKHGNKGWEAALSAIEMANLFKSLR

SEQ ID NO: 7796 - protein, 1307 aa, Artificial Sequence; identical to SEQ ID NO: 7786
  SARS-CoV-2/England/200990660/2020__EPI_ISL_414523 spike protein (1-1147)(K986P_V987P_T887W_A1020W) LumSynth construct

SEQ ID NO: 7797 - protein, 1307 aa, Artificial Sequence
  SARS-CoV-2/Australia/NSW09/2020__EPI_ISL_413595 spike protein (1-1147)(K986P_V987P_T887W_A1020W) LumSynth construct
MFVFLVLLPLVSSQCVNLTTRTQLPPAYTNSFTRGVYYPDKVFRSSVLHSTQDLFLPFFSNVTWFHAIHVSGTNGTKRFDNPVLPFNDGVYFASTEKSNIIRGWIFGTTLDSKTQSLLIVNNATNVVIKVCEFQFCNDPFLGVYYHKNNKSWMESEFRVYSSANNCTFEYVSQPFLMDLEGKQGNFKNLREFVFKNIDGYFKIYSKHTPINLVRDLPQGFSALEPLVDLPIGINITRFQTLLALHRSYLTPGDSSSGWTAGAAAYYVGYLQPRTFLLKYNENGTITDAVDCALDPLSETKCTLKSFTVEKGIYQTSNFRVQPTESIVRFPNITNLCPFGEVFNATRFASVYAWNRKRISNCVADYSVLYNSASFSTFKCYGVSPTKLNDLCFTNVYADSFVIRGDEVRQIAPGQTGKIADYNYKLPDDFTGCVIAWNSNNLDSKVGGNYNYLYRLFRKSNLKPFERDISTEIYQAGSTPCNGVEGFNCYFPLQSYGFQPTNGVGYQPYRVVVLSFELLHAPATVCGPKKSTNLVKNKCVNFNFNGLTGTGVLTESNKKFLPFQQFGRDIADTTDAVRDPQTLEILDITPCSFGGVSVITPGTNTSNQVAVLYQDVNCTEVPVAIHADQLTPTWRVYSTGSNVFQTRAGCLIGAEHVNNSYECDIPIGAGICASYQTQTNSPRRARSVASQSIIAYTMSLGAENSVAYSNNSIAIPTNFTISVTTEILPVSMTKTSVDCTMYICGDSTECSNLLLQYGSFCTQLNRALTGIAVEQDKNTQEVFAQVKQIYKTPPIKDFGGFNFSQILPDPSKPSKRSFIEDLLFNKVTLADAGFIKQYGDCLGDIAARDLICAQKFNGLTVLPPLLTDEMIAQYTSALLAGTITSGWWFGAGAALQIPFAMQMAYRFNGIGVTQNVLYENQKLIANQFNSAIGKIQDSLSFTASALGKLQDVVNQNAQALNTLVKQLSSNFGAISSVLNDILSRLDPPEAEVQIDRLITGRLQSLQTYVTQQLIRAAEIRWSANLAATKMSECVLGQSKRVDFCGKGYHLMSFPQSAPHGVVFLHVTYVPAQEKNFTTAPAICHDGKAHFPREGVFVSNGTHWFVTQRNFYEPQIITTDNTFVSGNCDVVIGIVNNTVYDPLQPELDSGGGSGGGQIYEGKLTAEGLRFGIVASRFNHALVDRLVEGAIDAIVRHGGREEDITLVRVPGSWEIPVAAGELARKEDIDAVIAIGVLIRGATPHFDYIASEVSKGLADLSLELRKPITFGVITADTLEQAIERAGTKHGNKGWEAALSAIEMANLFKSLR

SEQ ID NO: 7798 - protein, 1307 aa, Artificial Sequence; identical to SEQ ID NO: 7778
  SARS-CoV-2/Australia/NSW10/2020__EPI_ISL_413596 spike protein (1-1147)(K986P_V987P_T887W_A1020W) LumSynth construct

SEQ ID NO: 7799 - protein, 1307 aa, Artificial Sequence
  SARS-CoV-2/Switzerland/1000477797/2020__EPI_ISL_413023 spike protein (1-1147)(K986P_V987P_T887W_A1020W) LumSynth construct
MFVFLVLLPLVSSQCVNLTTRTQLPPAYTNSFTRGVYYPDKVFRSSVLHSTQDLFLPFFSNVTWFHAIHVSGTNGTKRFDNPVLPFNDGVYFASTEKSNIIRGWIFGTTLDSKTQSLLIVNNATNVVIKVCEFQFCNDPFLGVYYHKNNKSWMESEFRVYSSANNCTFEYVSQPFLMDLEGKQGNFKNLREFVFKNIDGYFNIYSKHTPINLVRDLPQGFSALEPLVDLPIGINITRFQTLLALHRSYLTPGDSSSGWTAGAAAYYVGYLQPRTFLLKYNENGTITDAVDCALDPLSETKCTLKSFTVEKGIYQTSNFRVQPTESIVRFPNITNLCPFGEVFNATRFASVYAWNRKRISNCVADYSVLYNSASFSTFKCYGVSPTKLNDLCFTNVYADSFVIRGDEVRQIAPGQTGKIADYNYKLPDDFTGCVIAWNSNNLDSKVGGNYNYLYRLFRKSNLKPFERDISTEIYQAGSTPCNGVEGFNCYFPLQSYGFQPTNGVGYQPYRVVVLSFELLHAPATVCGPKKSTNLVKNKCVNFNFNGLTGTGVLTESNKKFLPFQQFGRDIADTTDAVRDPQTLEILDITPCSFGGVSVITPGTNTSNQVAVLYQGVNCTEVPVAIHADQLTPTWRVYSTGSNVFQTRAGCLIGAEHVNNSYECDIPIGAGICASYQTQTNSPRRARSVASQSIIAYTMSLGAENSVAYSNNSIAIPTNFTISVTTEILPVSMTKTSVDCTMYICGDSTECSNLLLQYGSFCTQLNRALTGIAVEQDKNTQEVFAQVKQIYKTPPIKDFGGFNFSQILPDPSKPSKRSFIEDLLFNKVTLADAGFIKQYGDCLGDIAARDLICAQKFNGLTVLPPLLTDEMIAQYTSALLAGTITSGWWFGAGAALQIPFAMQMAYRFNGIGVTQNVLYENQKLIANQFNSAIGKIQDSLSSTASALGKLQDVVNQNAQALNTLVKQLSSNFGAISSVLNDILSRLDPPEAEVQIDRLITGRLQSLQTYVTQQLIRAAEIRWSANLAATKMSECVLGQSKRVDFCGKGYHLMSFPQSAPHGVVFLHVTYVPAQEKNFTTAPAICHDGKAHFPREGVFVSNGTHWFVTQRNFYEPQIITTDNTFVSGNCDVVIGIVNNTVYDPLQPELDSGGGSGGGQIYEGKLTAEGLRFGIVASRFNHALVDRLVEGAIDAIVRHGGREEDITLVRVPGSWEIPVAAGELARKEDIDAVIAIGVLIRGATPHFDYIASEVSKGLADLSLELRKPITFGVITADTLEQAIERAGTKHGNKGWEAALSAIEMANLFKSLR

SEQ ID NO: 7800 - protein, 1307 aa, Artificial Sequence
  SARS-CoV-2/Belgium/BA-02291/2020__EPI_ISL_415159 spike protein (1-1147)(K986P_V987P_T887W_A1020W) LumSynth construct
MFVFLVLLPLVSSQCVNLTTRTQLPPAYTNSFTRGVYYPDKVFRSSVLHSTQDLFLPFFSNVTWFHAIHVSGTNGTKRFDNPVLPFNDGVYFASTEKSNIIRGWIFGTTLDSKTQSLLIVNNATNVVIKVCEFQFCNDPFLGVYYHKNNKSWMESEFRVYSSANNCTFEYVSQPFLMDLEGKQGNFKNLREFVFKNIDGYFKIYSKHTPINLVRDLPQGFSALEPLVDLPIGINITRFQTLLALHRSYLTPGDSSSGWTAGAAAYYVGYLQPRTFLLKYNENGTITDAVDCALDPLSETKCTLKSFTVEKGIYQTSNFRVQPTESIVRFPNITNLCPFGEVFNATRFASVYAWNRKRISNCVADYSVLYNSASFSTFKCYGVSPTKLNDLCFTNVYADSFVIRGDEVRQIAPGQTGKIADYNYKLPDDFTGCVIAWNSNNLDSKVGGNYNYLYRLFRRSNLKPFERDISTEIYQAGSTPCNGVEGFNCYFPLQSYGFQPTNGVGYQPYRVVVLSFELLPAPATVCGPKKSTNLVKNKCVNFNFNGLTGTGVLTESNKKFLPFQQFGRDIADTTDAVRDPQTLEILDITPCSFGGVSVITPGTNTSNQVAVLYQGVNCTEVPVAIHADQLTPTWRVYSTGSNVFQTRAGCLIGAEHVNNSYECDIPIGAGICASYQTQTNSPRRARSVASQSIIAYTMSLGAENSVAYSNNSIAIPTNFTISVTTEILPVSMTKTSVDCTMYICGDSTECSNLLLQYGSFCTQLNRALTGIAVEQDKNTQEVFAQVKQIYKTPPIKDFGGFNFSQILPDPSKPSKRSFIEDLLFNKVTLADAGFIKQYGDCLGDIAARDLICAQKFNGLTVLPPLLTDEMIAQYTSALLAGTITSGWWFGAGAALQIPFAMQMAYRFNGIGVTQNVLYENQKLIANQFNSAIGKIQDSLSSAAPALGKLQDVVNQNAQALNTLVKQLSSNFGAISSVLNDILSRLDPPEAEVQIDRLITGRLQSLQTYVTQQLIRAAEIRWSANLAATKMSECVLGQSKRVDFCGKGYHLMSFPQSAPHGVVFLHVTYVPAQEKNFTTAPAICHDGKAHFPREGVFVSNGTHWFVTQRNFYEPQIITTDNTFVSGNCDVVIGIVNNTVYDPLQPELDSGGGSGGGQIYEGKLTAEGLRFGIVASRFNHALVDRLVEGAIDAIVRHGGREEDITLVRVPGSWEIPVAAGELARKEDIDAVIAIGVLIRGATPHFDYIASEVSKGLADLSLELRKPITFGVITADTLEQAIERAGTKHGNKGWEAALSAIEMANLFKSLR

SEQ ID NO: 7801 - protein, 1307 aa, Artificial Sequence
  SARS-CoV-2/USA/WA8-UW5/2020__EPI_ISL_413486 spike protein (1-1147)(K986P_V987P_T887W_A1020W) LumSynth construct
MFVFLVLLPLVSSQCVNLTTRTQLPPAYTNSFTRGVYYPDKVFRSSVLHSTQDLFLPFFSNVTWFHAIHVSGTNGTKRFDNPVLPFNDGVYFASTEKSNIIRGWIFGTTLDSKTQSLLIVNNATNVVIKVCEFQFCNDPFLGVYYHKNNKSWMESEFRVYSSANNCTFEYVSQPFLMDLEGKQGNFKNLREFVFKNIDGYFKIYSKHTPINLVRDLPQGFSALEPLVDLPIGINITRFQTLLALHRSYLTPGDSSSGWTAGAAAYYVGYLQPRTFLLKYNENGTITDAVDCALDPLSETKCTLKSFTVEKGIYQTSNFRVQPTESIVRFPNITNLCPFGEVFNATRFASVYAWNRKRISNCVADYSVLYNSASFSTFKCYGVSPTKLNDLCFTNVYADSFVIRGDEVRQIAPGQTGKIADYNYKLPDDFTGCVIAWNSNNLDSKVGGNYNYLYRLFRKSNLKPFERDISTEIYQAGSTPCNGVEGFNCYFPLQSYGFQPTNGVGYQPYRVVVLSFELLHAPATVCGPKKSTNLVKNKCVNFNFNGLTGTGVLTESNKKFLPFQQFGRDIADTTDAVRDPQTLEILDITPCSFGGVSVITPGTNTSNQVAVLYQDVNCTEVPVAIHADQLTPTWRVYSTGSNVFQTRAGCLIGAEYVNNSYECDIPIGAGICASYQTQTNSPRRARSVASQSIIAYTMSLGAENSVAYSNNSIAIPTNFTISVTTEILPVSMTKTSVDCTMYICGDSTECSNLLLQYGSFCTQLNRALTGIAVEQDKNTQEVFAQVKQIYKTPPIKDFGGFNFSQILPDPSKPSKRSFIEDLLFNKVTLADAGFIKQYGDCLGDIAARDLICAQKFNGLTVLPPLLTDEMIAQYTSALLAGTITSGWWFGAGAALQIPFAMQMAYRFNGIGVTQNVLYENQKLIANQFNSAIGKIQDSLSSTASALGKLQDVVNQNAQALNTLVKQLSSNFGAISSVLNDILSRLDPPEAEVQIDRLITGRLQSLQTYVTQQLIRAAEIRWSANLAATKMSECVLGQSKRVDFCGKGYHLMSFPQSAPHGVVFLHVTYVPAQEKNFTTAPAICHDGKAHFPREGVFVSNGTHWFVTQRNFYEPQIITTDNTFVSGNCDVVIGIVNNTVYDPLQPELDSGGGSGGGQIYEGKLTAEGLRFGIVASRFNHALVDRLVEGAIDAIVRHGGREEDITLVRVPGSWEIPVAAGELARKEDIDAVIAIGVLIRGATPHFDYIASEVSKGLADLSLELRKPITFGVITADTLEQAIERAGTKHGNKGWEAALSAIEMANLFKSLR

SEQ ID NO: 7802 - protein, 1307 aa, Artificial Sequence
  SARS-CoV-2/England/20102000506/2020__EPI_ISL_415147 spike protein (1-1147)(K986P_V987P_T887W_A1020W) LumSynth construct
MFVFLVLLPLVSSQCVNLTTRTQLPPAYTNSFTRGVYYPDKVFRSSVLHSTQDLFLPFFSNVTWFHAIHVSGTNGTKRFDNPVLPFNDGVYFASTEKSNIIRGWIFGTTLDSKTQSLLIVNNATNVVIKVCEFQFCNDPFLGVYYHKNNKSWMESEFRVYSSANNCTFEYVSQPFLMDLEGKQGNFKNLREFVFKNIDGYFKIYSKHTPINLVRDLPQGFSALEPLVDLPIGINITRFQTLLALHRSYLTPGDSSSGWTAGAAAYYVGYLQPRTFLLKYNENGTITDAVDCALDPLSETKCTLKSFTVEKGIYQTSNFRVQPTESIVRFPNITNLCPFGEVFNATRFASVYAWNRKRISNCVADYSVLYNSASFSTFKCYGVSPTKLNDLCFTNVYADSFVIRGDEVRQIAPGQTGKIADYNYKLPDDFTGCVIAWNSNNLDSKVGGNYNYLYRLFRKSNLKPFERDISTEIYQAGSTPCNGVEGFNCYFPLQSYGFQPTNGVGYQPYRVVVLSFELLHAPATVCGPKKSTNLVKNKCVNFNFNGLTGTGVLTESNKKFLPFQQFGRDIADTTDAVRDPQTLEILDITPCSFGGVSVITPGTNTSNQVAVLYQGVNCTEVPVAIHADQLTPTWRVYSTGSNVFQTRAGCLIGAEHVNNSYECDIPIGAGICASYQTQTNSPRRARSVASQSIIAYTMSLGAENSVAYSNNSIAIPTNFTISVTTEILPVSMTKTSVDCTMYICGDSTECSNLLLQYGSFCTQLNRALTGIAVEQDKNTQEVFAQVKQIYKTPPIKDFGGFNFSQILPDPSKPSKRSFIEDLLFNKVTLADAGFIKQYGYCLGDIAARDLICAQKFNGLTVLPPLLTDEMIAQYTSALLAGTITSGWWFGAGAALQIPFAMQMAYRFNGIGVTQNVLYENQKLIANQFNSAIGKIQDSLSSTASALGKLQDVVNQNAQALNTLVKQLSSNFGAISSVLNDILSRLDPPEAEVQIDRLITGRLQSLQTYVTQQLIRAAEIRWSANLAATKMSECVLGQSKRVDFCGKGYHLMSFPQSAPHGVVFLHVTYVPAQEKNFTTAPAICHDGKAHFPREGVFVSNGTHWFVTQRNFYEPQIITTDNTFVSGNCDVVIGIVNNTVYDPLQPELDSGGGSGGGQIYEGKLTAEGLRFGIVASRFNHALVDRLVEGAIDAIVRHGGREEDITLVRVPGSWEIPVAAGELARKEDIDAVIAIGVLIRGATPHFDYIASEVSKGLADLSLELRKPITFGVITADTLEQAIERAGTKHGNKGWEAALSAIEMANLFKSLR

SEQ ID NO: 7803 - protein, 1307 aa, Artificial Sequence
  SARS-CoV-2/Belgium/VAG-03013/2020__EPI_ISL_415155 spike protein (1-1147)(K986P_V987P_T887W_A1020W) LumSynth construct
MFVFLVLLPLVSSQCVNLTTRTQLPPAYTNSFTRGVYYPDKVFRSSVLHSTQDLFLPFFSNVTWFHAIHVSGTNGTKRFDNPVLPFNDGVYFASTEKSNIIRGWIFGTTLDSKTQSLLIVNNATNVVIKVCEFQFCNDPFLGVYYHKNNKSWMESEFRVYSSANNCTFEYVSQPFLMDLEGKQGNFKNLREFVFKNIDGYFKIYSKHTPINLVRDLPQGFSALEPLVDLPIGINITRFQTLLALHRSYLTPGDSSSGWTAGAAAYYVGYLQPRTFLLKYNENGTITDAVDCALDPLSETKCTLKSFTVEKGIYQTSNFRVQPTESIVRFPNITNLCPFGEVFNATRFASVYAWNRKRISNCVADYSVLYNSASFSTFKCYGVSPTKLNDLCFTNVYADSFVIRGDEVRQIAPGQTGKIADYNYKLPDDFTGCVIAWNSNNLDSKVGGNYNYLYRLFRKSNLKPFERDISTEIYQAGSTPCNGVEGFNCYFPLQSYGFQPTNGVGYQPYRVVVLSFELLHAPATVCGPKKSTNLVKNKCVNFNFNGLTGTGVLTESNKKFLPFQQFGRDIADTTDAVRDPQTLEILDITPCSFGGVSVITPGTNTSNQVAVLYQGVNCTEVPVAIHADQLTPTWRVYSTGSNVFQTRAGCLIGAEHVNNSYECDIPIGAGICASYQTQTNSPRRARSVASQSIIAYTMSLGAENSVAYSNNSIAIPTNFTISVTTEILPVSMTKTSVDCTMYICGDSTECSNLLLQYGSFCTQLNRALTGIAVEQDKNTQEVFAQVKQIYKTPPIKDFGGFNFSQILPDPSKPSKRSFIEDLLFNKVTLADAGFIKQYGDCLGDIAARDLICAQKFNGLTVLPPLLTDEMIAQYTSALLAGTITSGWWFGAGAALQIPFAMQMAYRFNGIGVTQNVLYENQKLIANQFNSAIGKIQDSLSSTATALGKLQDVVNQNAQALNTLVKQLSSNFGAISSVLNDILSRLDPPEAEVQIDRLITGRLQSLQTYVTQQLIRAAEIRWSANLAATKMSECVLGQSKRVDFCGKGYHLMSFPQSAPHGVVFLHVTYVPAQEKNFTTAPAICHDGKAHFPREGVFVSNGTHWFVTQRNFYEPQIITTDNTFVSGNCDVVIGIVNNTVYDPLQPELDSGGGSGGGQIYEGKLTAEGLRFGIVASRFNHALVDRLVEGAIDAIVRHGGREEDITLVRVPGSWEIPVAAGELARKEDIDAVIAIGVLIRGATPHFDYIASEVSKGLADLSLELRKPITFGVITADTLEQAIERAGTKHGNKGWEAALSAIEMANLFKSLR

SEQ ID NO: 7804 - protein, 1307 aa, Artificial Sequence
  SARS-CoV-2/Belgium/BC-03016/2020__EPI_ISL_415157 spike protein (1-1147)(K986P_V987P_T887W_A1020W) LumSynth construct
MFVFLVLLPLVSSQCVNLTTRTQLPPAYTNSFTRGVYYPDKVFRSSVLHSTQDLFLPFFSNVTWFHAIHVSGTNGTKRFDNPVLPFNDGVYFASTEKSNIIRGWIFGTTLDSKTQSLLIVNNATNVVIKVCEFQFCNDPFLGVYYHKNNKSWMESEFRVYSSANNCTFEYVSQPFLMDLEGKQGNFKNLREFVFKNIDGYFKIYSKHTPINLVRDLPQGFSALEPLVDLPIGINITRFQTLLALHRSYLTPGDSSSGWTAGAAAYYVGYLQPRTFLLKYNENGTITDAVDCALDPLSETKCTLKSFTVEKGIYQTSNFRVQPTESIVRFPNITNLCPFGEVFNATRFASVYAWNRKRISNCVADYSVLYNSASFSTFKCYGVSPTKLNDLCFTNVYADSFVIRGDEVRQIAPGQTGKIADYNYKLPDDFTGCVIAWNSNNLDSKVGGNYNYLYRLFRKSNLKPFERDISTEIYQAGSTPCNGVEGFNCYFPLQSYGFQPTNGVGYQPYRVVVLSFELLHAPATVCGPKKSTNLVKNKCVNFNFNGLTGTGVLTESNKKFLPFQQFGRDIADTTDAVRDPQTLEILDITPCSFGGVSVITPGTNTSNQVAVLYQGVNCTEVPVAIHADQLTPTWRVYSTGSNVFQTRAGCLIGAEHVNNSYECDIPIGAGICASYQTQTNSPRRARSVASQSIIAYTMSLGAENSVAYSNNSIAIPTNFTISVTTEILPVSMTKTSVDCTMYICGDSTECSNLLLQYGSFCTQLNRALTGIAVEQDKNTQEVFAQVKQIYKTPPIKDFGGFNFSQILPDPSKPSKRSFIEDLLFNKVTLADAGFIKQYGDCLGDIAARDLICAQKFNGLTVLPPLLTDEMIAQYTSALLAGTITSGWWFGAGAALQIPFAMQMAYRFNGIGVTQNVLYENQKLIANQFNSAIGKIQDSLSSTAPALGKLQDVVNQNAQALNTLVKQLSSNFGAISSVLNDILSRLDPPEAEVQIDRLITGRLQSLQTYVTQQLIRAAEIRWSANLAATKMSECVLGQSKRVDFCGKGYHLMSFPQSAPHGVVFLHVTYVPAQEKNFTTAPAICHDGKAHFPREGVFVSNGTHWFVTQRNFYEPQIITTDNTFVSGNCDVVIGIVNNTVYDPLQPELDSGGGSGGGQIYEGKLTAEGLRFGIVASRFNHALVDRLVEGAIDAIVRHGGREEDITLVRVPGSWEIPVAAGELARKEDIDAVIAIGVLIRGATPHFDYIASEVSKGLADLSLELRKPITFGVITADTLEQAIERAGTKHGNKGWEAALSAIEMANLFKSLR

SEQ ID NO: 7805 - protein, 1307 aa, Artificial Sequence
  SARS-CoV-2/Germany/BavPat3/2020__EPI_ISL_414521 spike protein (1-1147)(K986P_V987P_T887W_A1020W) LumSynth construct
MFVFLVLLPLVSSQCVNLTTRTQLPPAYTNSFTRGVYYPDKVFRSSVLHSTQDLFLPFFSNVTWFHAIHVSGTNGTKRFDNPVLPFNDGVYFASTEKSNIIRGWIFGTTLDSKTQSLLIVNNATNVVIKVCEFQFCNDPFLGVYYHKNNKSWMESEFRVYSSANNCTFEYVSQPFLMDLEGKQGNFKNLREFVFKNIDGYFKIYSKHTPINLVRDLPQGFSALEPLVDLPIGINITRFQTLLALHRSYLTPGDSSSGWTAGAAAYYVGYLQPRTFLLKYNENGTITDAVDCALDPLSETKCTLKSFTVEKGIYQTSNFRVQPTESIVRFPNITNLCPFGEVFNATRFASVYAWNRKRISNCVADYSVLYNSASFSTFKCYGVSPTKLNDLCFTNVYADSFVIRGDEVRQIAPGQTGKIADYNYKLPDDFTGCVIAWNSNNLDSKVGGNYNYLYRLFRKSNLKPFERDISTEIYQAGSTPCNGVEGFNCYFPLQSYGFQPTNGVGYQPYRVVVLSFELLHAPATVCGPKKSTNLVKNKCVNFNFNGLTGTGVLTESNKKFLPFQQFGRDIADTTDAVRDPQTLEILDITPCSFGGVSVITPGTNTSNQVAVLYQDVNCTEVPVAIHADQLTPTWRVYSTGSNVFQTRAGCLIGAEHVNNSYECDIPIGAGICASYQTQTNSPRRARSVASQSIIAYTMSLGAENSVAYSNNSIAIPTNFTISVTTEILPVSMTKTSVDCTMYICGDSTECSNLLLQYGSFCTQLNRALTGIAVEQDKNTQQVFAQVKQIYKTPPIKDFGGFNFSQILPDPSKPSKRSFIEDLLFNKVTLADAGFIKQYGDCLGDIAARDLICAQKFNGLTVLPPLLTDEMIAQYTSALLAGTITSGWWFGAGAALQIPFAMQMAYRFNGIGVTQNVLYENQKLIANQFNSAIGKIQDSLSSTASALGKLQDVVNQNAQALNTLVKQLSSNFGAISSVLNDILSRLDPPEAEVQIDRLITGRLQSLQTYVTQQLIRAAEIRWSANLAATKMSECVLGQSKRVDFCGKGYHLMSFPQSAPHGVVFLHVTYVPAQEKNFTTAPAICHDGKAHFPREGVFVSNGTHWFVTQRNFYEPQIITTDNTFVSGNCDVVIGIVNNTVYDPLQPELDSGGGSGGGQIYEGKLTAEGLRFGIVASRFNHALVDRLVEGAIDAIVRHGGREEDITLVRVPGSWEIPVAAGELARKEDIDAVIAIGVLIRGATPHFDYIASEVSKGLADLSLELRKPITFGVITADTLEQAIERAGTKHGNKGWEAALSAIEMANLFKSLR

SEQ ID NO: 7806 - protein, 1307 aa, Artificial Sequence
  SARS-CoV-2/France/HF1805/2020__EPI_ISL_414628 spike protein (1-1147)(K986P_V987P_T887W_A1020W) LumSynth construct
MFVFLVLLPLVSSQCVNLTTRTQLPPAYTNSFTRGVYYPDKVFRSSVLHSTQDLFLPFFSNVTWFHAIHVSGTNGTKRFDNPVLPFNDGVYFASTEKSNIIRGWIFGTTLDSKTQSLLIVNNATNVVIKVCEFQFCNDPFLGVYYHKNNKSWMESEFRVYSSANNCTFEYVSQPFLMDLEGKQGNFKNLREFVFKNIDGYFKIYSKHTPINLVRDLPQGFSALEPLVDLPIGINITRFQTLLALHRSYLTPGDSSSGWTAGAAAYYVGYLQPRTFLLKYNENGTITDAVDCALDPLSETKCTLKSFTVEKGIYQTSNFRVQPTESIVRFPNITNLCPFGEVFNATRFASVYAWNRKRISNCVADYSVLYNSASFSTFKCYGVSPTKLNDLCFTNVYADSFVIRGDEVRQIAPGQTGKIADYNYKLPDDFTGCVIAWNSNNLDSKVGGNYNYLYRLFRKSNLKPFERDISTEIYQAGSTPCNGVEGFNCYFPLQSYGFQPTNGVGYQPYRVVVLSFELLHAPATVCGPKKSTNLVKNKCVNFNFNGLTGTGVLTESNKKFLPFQQFGRDIADTTDAVRDPQTLEILDITPCSFGGVSVITPGTNTSNQVAVLYQGVNCTEVPVAIHADQLTPTWRVYSTGSNVFQTRAGCLIGAEHVNNSYECDIPIGAGICASYQTQTNSPRRARSVASQSIIAYTMSLGAENSVAYSNNSIAIPTNFTISVTTEILPVSMTKTSVDCTMYICGDSTECSNLLLQYGSFCTQLNRALTGIAVEQDKNTQEVFAQVKQIYKTPPIKDFGGFNFSQILPDPSKPSKRSFIEDLLFNKVTLADAGFIKQYGDCLGDIAARDLICAQKFNGLTVLPPLLTDEMIAQYTSALLAGTITSGWWFGAGAALQIPFAMQMAYRFNGIGVTQNVLYENQKLIANQFNSAIGKIQDSLSSTASALGKLQDVVNQNAQALNTLVKQLSSNFGAISSVLNDILSRLDPPEAEVQIDRLITGRLQSLQTYVTQQLIRAAEIRWSANLAATKMSECVLGQSKRVDFCGKGYHLMSFPQSAPHGVVFLHVTYVPAQEKNFTTAPAICHDGKAHFPREGVFVSNGTHWFVTQRNFYEPQIITTDNTFVSGNCDVVIGVVNNTVYDPLQPELDSGGGSGGGQIYEGKLTAEGLRFGIVASRFNHALVDRLVEGAIDAIVRHGGREEDITLVRVPGSWEIPVAAGELARKEDIDAVIAIGVLIRGATPHFDYIASEVSKGLADLSLELRKPITFGVITADTLEQAIERAGTKHGNKGWEAALSAIEMANLFKSLR

SEQ ID NO: 7807 - protein, 1307 aa, Artificial Sequence
  SARS-CoV-2/Netherlands/ZuidHolland_9/2020__EPI_ISL_414445 spike protein (1-1147)(K986P_V987P_T887W_A1020W) LumSynth construct
MFVFLVLLPLVSSQCVNLTTRTQLPPAYTNSFTRGVYYPDKVFRSSVLHSTQDLFLPFFSNVTWFHAIHVSGTNGTKRFDNPVLPFNDGVYFASTEKSNIIRGWIFGTTLDSKTQSLLIVNNATNVVIKVCEFQFCNDPFLGVYYHKNNKSWMESEFRVYSSANNCTFEYVSQPFLMDLEGKQGNFKNLREFVFKNIDGYFKIYSKHTPINLVRDLPQGFSALEPLVDLPIGINITRFQTLLALHRSYLTPGDSSSGWTAGAAAYYVGYLQPRTFLLKYNENGTITDAVDCALDPLSETKCTLKSFTVEKGIYQTSNFRVQPTESIVRFPNITNLCPFGEVFNATRFASVYAWNRKRISNCVADYSVLYNSASFSTFKCYGVSPTKLNDLCFTNVYADSFVIRGDEVRQIAPGQTGKIADYNYKLPDDFTGCVIAWNSNNLDSKVGGNYNYLYRLFRKSNLKPFERDISTEIYQAGSTPCNGVEGFNCYFPLQSYGFQPTNGVGYQPYRVVVLSFELLHAPATVCGPKKSTNLVKNKCVNFNFNGLTGTGVLTESNKKFLPFQQFGRDIADTTDAVRDPQTLEILDITPCSFGGVSVITPGTNTSNQVAVLYQGVNCTEVPVAIHADQLTPTWRVYSTGSNVFQTRAGCLIGAEHVNNSYECDIPIGAGICASYQTQTNSPRRARSVASQSIIAYTMSLGAENSVAYSNNSIAIPTNFTISVTTEILPVSMTKTSVDCTMYICGDSTECSNLLLQYGSFCTQLNRALTGIAVEQDKNTQEVFAQVKQIYKTPPIKDFGGFNFSQILPDPSKPSKRSFIEDLLFNKVTLADAGFIKQYGDCLGDIAARDLICVQKFNGLTVLPPLLTDEMIAQYTSALLAGTITSGWWFGAGAALQIPFAMQMAYRFNGIGVTQNVLYENQKLIANQFNSAIGKIQDSLSSTASALGKLQDVVNQNAQALNTLVKQLSSNFGAISSVLNDILSRLDPPEAEVQIDRLITGRLQSLQTYVTQQLIRAAEIRWSANLAATKMSECVLGQSKRVDFCGKGYHLMSFPQSAPHGVVFLHVTYVPAQEKNFTTAPAICHDGKAHFPREGVFVSNGTHWFVTQRNFYEPQIITTDNTFVSGNCDVVIGIVNNTVYDPLQPELDSGGGSGGGQIYEGKLTAEGLRFGIVASRFNHALVDRLVEGAIDAIVRHGGREEDITLVRVPGSWEIPVAAGELARKEDIDAVIAIGVLIRGATPHFDYIASEVSKGLADLSLELRKPITFGVITADTLEQAIERAGTKHGNKGWEAALSAIEMANLFKSLR

SEQ ID NO: 7808 - protein, 1307 aa, Artificial Sequence
  SARS-CoV-2/Finland/FIN03032020A/2020__EPI_ISL_413602 spike protein (1-1147)(K986P_V987P_T887W_A1020W) LumSynth construct
MFVFLVLLPLVSSQCVNLTTRTQLPPAYTNSFTRGVYYPDKVFRSSVLHSTQDLFLPFFSNVTWFHAIHVSGTNGTKRFDNPVLPFNDGVYFASTEKSNIIRGWIFGTTLDSKTQSLLIVNNATNVVIKVCEFQFCNDPFLGVYYHKNNKSWMESEFRVYSSANNCTFEYVSQPFLMDLEGKQGNFKNLREFVFKNIDGYFKIYSKHTPINLVRDLPQGFSALEPLVDLPIGINITRFQTLLALHRSYLTPGDSSSGWTAGAAAYYVGYLQPRTFLLKYNENGTITDAVDCALDPLSETKCTLKSFTVEKGIYQTSNFRVQPTESIVRFPNITNLCPFGEVFNATRFASVYAWNRKRISNCVADYSVLYNSASFSTFKCYGVSPTKLNDLCFTNVYADSFVIRGDEVRQIAPGQTGKIADYNYKLPDDFTGCVISWNSNNLDSKVGGNYNYLYRLFRKSNLKPFERDISTEIYQAGSTPCNGVEGFNCYFPLQSYGFQPTNGVGYQPYRVVVLSFELLHAPATVCGPKKSTNLVKNKCVNFNFNGLTGTGVLTESNKKFLPFQQFGRDIADTTDAVRDPQTLEILDITPCSFGGVSVITPGTNTSNQVAVLYQGVNCTEVPVAIHADQLTPTWRVYSTGSNVFQTRAGCLIGAEHVNNSYECDIPIGAGICASYQTQTNSPRRARSVASQSIIAYTMSLGAENSVAYSNNSIAIPTNFTISVTTEILPVSMTKTSVDCTMYICGDSTECSNLLLQYGSFCTQLNRALTGIAVEQDKNTQEVFAQVKQIYKTPPIKDFGGFNFSQILPDPSKPSKRSFIEDLLFNKVTLADAGFIKQYGDCLGDIAARDLICAQKFNGLTVLPPLLTDEMIAQYTSALLAGTITSGWWFGAGAALQIPFAMQMAYRFNGIGVTQNVLYENQKLIANQFNSAIGKIQDSLSSTASALGKLQDVVNQNAQALNTLVKQLSSNFGAISSVLNDILSRLDPPEAEVQIDRLITGRLQSLQTYVTQQLIRAAEIRWSANLAATKMSECVLGQSKRVDFCGKGYHLMSFPQSAPHGVVFLHVTYVPAQEKNFTTAPAICHDGKAHFPREGVFVSNGTHWFVTQRNFYEPQIITTDNTFVSGNCDVVIGIVNNTVYDPLQPELDSGGGSGGGQIYEGKLTAEGLRFGIVASRFNHALVDRLVEGAIDAIVRHGGREEDITLVRVPGSWEIPVAAGELARKEDIDAVIAIGVLIRGATPHFDYIASEVSKGLADLSLELRKPITFGVITADTLEQAIERAGTKHGNKGWEAALSAIEMANLFKSLR

SEQ ID NO: 7809 - protein, 1307 aa, Artificial Sequence
  SARS-CoV-2/France/GE1977/2020__EPI_ISL_414632 spike protein (1-1147)(K986P_V987P_T887W_A1020W) LumSynth construct
MFVFLVLLPLVSSQCVNLTTRTQLPPAYTNSFTRGVYYPDKVFRSSVLHSTQDLFLPFFSNVTWFHAIHVSGTNGTKRFDNPVLPFNDGVYFASTEKSNIIRGWIFGTTLDSKTQSLLIVNNATNVVIKVCEFQFCNDPFLGVYYHKNNKSWMESEFRVYSSANNCTFEYVSQPFLMDLEGKQGNFKNLREFVFKNIDGYFKIYSKHTPINLVRDLPQGFSALEPLVDLPIGINITRFQTLLALHRSYLTPGDSSSGWTAGAAAYYVGYLQPRTFLLKYNENGTITDAVDCALDPLSETKCTLKSFTVEKGIYQTSNFRVQPTESIVRFPNITNLCPFGEVFNATRFASVYAWNRKRISNCVADYSVLYNSASFSTFKCYGVSPTKLNDLCFTNVYADSFVIRGDEVRQIAPGQTGKIADYNYKLPDDFTGCVIAWNSNNLDSKVGGNYNYLYRLFRKSNLKPFERDISTEIYQAGSTPCNGVEGFNCYFPLQSYGFQPTNGVGYQPYRVVVLSFELLHAPATVCGPKKSTNLVKNKCVNFNFNGLTGTGVLTESNKKFLPFQQFGRDIADTTDAVRDPQTLEILDITPCSFGGVSVITPGTNTSNQVAVLYQGVNCTEVPVAIHADQLTPTWRVYSTGSNVFQTRAGCLIGAEHVNNSYECDIPIGAGICASYQTQTNSPRRARSVASQSIIAYTMSLGAENSVAYSNNSIAIPTNFTISVTTEILPVSMTKTSVDCTMYICGDSTECSNLLLQYGSFCTQLNRALTGIAVEQDKNTQEVFAQVKQIYKTPPIKDFGGFNFSQILPDPSKPSKRSFIEDLLFNKVTLADAGFIKQYGDCLGDIAARDLICAQKFNGLTVLPPLLTDEMIAQYTSALLAGTITSGWWFGAGAALQIPFAMQMAYRFNGIGVTQNVLYENQKLIANQFNSAIGKIQDSLFSTASALGKLQDVVNQNAQALNTLVKQLSSNFGAISSVLNDILSRLDPPEAEVQIDRLITGRLQSLQTYVTQQLIRAAEIRWSANLAATKMSECVLGQSKRVDFCGKGYHLMSFPQSAPHGVVFLHVTYVPAQEKNFTTAPAICHDGKAHFPREGVFVSNGTHWFVTQRNFYEPQIITTDNTFVSGNCDVVIGIVNNTVYDPLQPELDSGGGSGGGQIYEGKLTAEGLRFGIVASRFNHALVDRLVEGAIDAIVRHGGREEDITLVRVPGSWEIPVAAGELARKEDIDAVIAIGVLIRGATPHFDYIASEVSKGLADLSLELRKPITFGVITADTLEQAIERAGTKHGNKGWEAALSAIEMANLFKSLR

SEQ ID NO: 7810 - protein, 1307 aa, Artificial Sequence
  SARS-CoV-2/Finland/FIN-313/2020__EPI_ISL_414641 spike protein (1-1147)(K986P_V987P_T887W_A1020W) LumSynth construct
MFVFLVLLPLVSSQCVNLTTRTQLPPAYTNSFTRGVYYPDKVFRSSVLHSTQDLFLPFFSNVTWFHAIHVSGTNGTKRFDNPVLPFNDGVYFASTEKSNIIRGWIFGTTLDSKTQSLLIVNNATNVVIKVCEFQFCNDPFLGVYYHKNNKSWMESEFRVYSSANNCTFEYVSQPFLMDLEGKQGNFKNLREFVFKNIDGYFKIYSKHTPINLVRDLPQGFSALEPLVDLPIGINITRFKTLLALHRSYLTPGDSSSGWTAGAAAYYVGYLQPRTFLLKYNENGTITDAVDCALDPLSETKCTLKSFTVEKGIYQTSNFRVQPTESIVRFPNITNLCPFGEVFNATRFASVYAWNRKRISNCVADYSVLYNSASFSTFKCYGVSPTKLNDLCFTNVYADSFVIRGDEVRQIAPGQTGKIADYNYKLPDDFTGCVIAWNSNNLDSKVGGNYNYLYRLFRKSNLKPFERDISTEIYQAGSTPCNGVEGFNCYFPLQSYGFQPTNGVGYQPYRVVVLSFELLHAPATVCGPKKSTNLVKNKCVNFNFNGLTGTGVLTESNKKFLPFQQFGRDIADTTDAVRDPQTLEILDITPCSFGGVSVITPGTNTSNQVAVLYQGVNCTEVPVAIHADQLTPTWRVYSTGSNVFQTRAGCLIGAEHVNNSYECDIPIGAGICASYQTQTNSPRRARSVASQSIIAYTMSLGAENSVAYSNNSIAIPTNFTISVTTEILPVSMTKTSVDCTMYICGDSTECSNLLLQYGSFCTQLNRALTGIAVEQDKNTQEVFAQVKQIYKTPPIKDFGGFNFSQILPDPSKPSKRSFIEDLLFNKVTLADAGFIKQYGDCLGDIAARDLICAQKFNGLTVLPPLLTDEMIAQYTSALLAGTITSGWWFGAGAALQIPFAMQMAYRFNGIGVTQNVLYENQKLIANQFNSAIGKIQDSLSSTASALGKLQDVVNQNAQALNTLVKQLSSNFGAISSVLNDILSRLDPPEAEVQIDRLITGRLQSLQTYVTQQLIRAAEIRWSANLAATKMSECVLGQSKRVDFCGKGYHLMSFPQSAPHGVVFLHVTYVPAQEKNFTTAPAICHDGKAHFPREGVFVSNGTHWFVTQRNFYEPQIITTDNTFVSGNCDVVIGIVNNTVYDPLQPELDSGGGSGGGQIYEGKLTAEGLRFGIVASRFNHALVDRLVEGAIDAIVRHGGREEDITLVRVPGSWEIPVAAGELARKEDIDAVIAIGVLIRGATPHFDYIASEVSKGLADLSLELRKPITFGVITADTLEQAIERAGTKHGNKGWEAALSAIEMANLFKSLR

SEQ ID NO: 7811 - protein, 1307 aa, Artificial Sequence
  SARS-CoV-2/Netherlands/ZuidHolland_2/2020__EPI_ISL_414556 spike protein (1-1147)(K986P_V987P_T887W_A1020W) LumSynth construct
MFVFLVLLPLVSSQCVNLTTRTQLPPAYTNSFTRGVYYPDKVFRSSVLHSTQDLFLPFFSNVTWFHAIHVSGTNGTKRFDNPVLPFNDGVYFASTEKSNIIRGWIFGTTLDSKTQSLLIVNNATNVVIKVCEFQFCNDPFLGVYYHKNNKSWMESEFRVYSSANNCTFEYVSQPFLMDLEGKQGNFKNLREFVFKNIDGYFKIYSKHTPINLVRDLPQGFSALEPLVDLPIGINITRFQTLLALHRSYLTPGDSSSGWTAGAAAYYVGYLQPRTFLLKYNENGTITDAVDCALDPLSETKCTLKSFTVEKGIYQTSNFRVQPTESIVRFPNITNLCPFGEVFNATRFASVYAWNRKRISNCVADYSVLYNSASFSTFKCYGVSPTKLNDLCFTNVYADSFVIRGDEVRQIAPGQTGKIADYNYKLPDDFTGCVIAWNSNNLDSKVGGNYNYLYRLFRKSNLKPFERDISTEIYQAGSTPCNGVEGFNCYFPLQSYGFQPTNGVGYQPYRVVVLSFELLHAPATVCGPKKSTNLVKNKCVNFNFNGLTGTGVLTESNKKFLPFQQFGRDIADTTDAVRDPQTLEILDITPCSFGGVSVITPGTNTSNQVAVLYQGVNCTEVPVAIHADQLTPTWRVYSTGSNVFQTRAGCLIGAEHVNNSYECDIPIGAGICASYQTQTNSPRRARSVASQSIIAYTMSLGAENSVAYSNNSIAIPTNFTISVTTEILPVSMTKTSVDCTMYICGDSTECSNLLLQYGSFCTQLNRALTGIALEQDKNTQEVFAQVKQIYKTPPIKDFGGFNFSQILPDPSKPSKRSFIEDLLFNKVTLADAGFIKQYGDCLGDIAARDLICAQKFNGLTVLPPLLTDEMIAQYTSALLAGTITSGWWFGAGAALQIPFAMQMAYRFNGIGVTQNVLYENQKLIANQFNSAIGKIQDSLSSTASALGKLQDVVNQNAQALNTLVKQLSSNFGAISSVLNDILSRLDPPEAEVQIDRLITGRLQSLQTYVTQQLIRAAEIRWSANLAATKMSECVLGQSKRVDFCGKGYHLMSFPQSAPHGVVFLHVTYVPAQEKNFTTAPAICHDGKAHFPREGVFVSNGTHWFVTQRNFYEPQIITTDNTFVSGNCDVVIGIVNNTVYDPLQPELDSGGGSGGGQIYEGKLTAEGLRFGIVASRFNHALVDRLVEGAIDAIVRHGGREEDITLVRVPGSWEIPVAAGELARKEDIDAVIAIGVLIRGATPHFDYIASEVSKGLADLSLELRKPITFGVITADTLEQAIERAGTKHGNKGWEAALSAIEMANLFKSLR

SEQ ID NO: 7812 - protein, 1307 aa, Artificial Sequence
  SARS-CoV-2/USA/WA-UW31/2020__EPI_ISL_414618 spike protein (1-1147)(K986P_V987P_T887W_A1020W) LumSynth construct
MFVFLVLLPLVSSQCVNLTTRTQLPPAYTNSFTRGVYYPDKVFRSSVLHSTQDLFLPFFSNVTWFHAIHVSGTNGTKRFDNPVLPFNDGVYFASTEKSNIIRGWIFGTTLDSKTQSLLIVNNATNVVIKVCEFQFCNDPFLGVYYHKNNKSWMESEFRVYSSANNCTFEYVSQPFLMDLEGKQGNFKNLREFVFKNIDGYFKIYSKHTPINLVRDLPQGFSALEPLVDLPIGINITRFQTLLALHRSYLTPGDSSSGWTAGAAAYYVGYLQPRTFLLKYNENGTITDAVDCALDPLSETKCTLKSFTVEKGIYQTSNFRVQPTESIVRFPNITNLCPFGEVFNATRFASVYAWNRKRISNCVADYSVLYNSASFSTFKCYGVSPTKLNDLCFTNVYADSFVIRGDEVRQIAPGQTGKIADYNYKLPDDFTGCVIAWNSNNLDSKVGGNYNYLYRLFRKSNLKPFERDISTEIYQAGSTPCNGAEGFNCYFPLQSYGFQPTNGVGYQPYRVVVLSFELLHAPATVCGPKKSTNLVKNKCVNFNFNGLTGTGVLTESNKKFLPFQQFGRDIADTTDAVRDPQTLEILDITPCSFGGVSVITPGTNTSNQVAVLYQDVNCTEVPVAIHADQLTPTWRVYSTGSNVFQTRAGCLIGAEHVNNSYECDIPIGAGICASYQTQTNSPRRARSVASQSIIAYTMSLGAENSVAYSNNSIAIPTNFTISVTTEILPVSMTKTSVDCTMYICGDSTECSNLLLQYGSFCTQLNRALTGIAVEQDKNTQEVFAQVKQIYKTPPIKDFGGFNFSQILPDPSKPSKRSFIEDLLFNKVTLADAGFIKQYGDCLGDIAARDLICAQKFNGLTVLPPLLTDEMIAQYTSALLAGTITSGWWFGAGAALQIPFAMQMAYRFNGIGVTQNVLYENQKLIANQFNSAIGKIQDSLSSTASALGKLQDVVNQNAQALNTLVKQLSSNFGAISSVLNDILSRLDPPEAEVQIDRLITGRLQSLQTYVTQQLIRAAEIRWSANLAATKMSECVLGQSKRVDFCGKGYHLMSFPQSAPHGVVFLHVTYVPAQEKNFTTAPAICHDGKAHFPREGVFVSNGTHWFVTQRNFYEPQIITTDNTFVSGNCDVVIGIVNNTVYDPLQPELDSGGGSGGGQIYEGKLTAEGLRFGIVASRFNHALVDRLVEGAIDAIVRHGGREEDITLVRVPGSWEIPVAAGELARKEDIDAVIAIGVLIRGATPHFDYIASEVSKGLADLSLELRKPITFGVITADTLEQAIERAGTKHGNKGWEAALSAIEMANLFKSLR

SEQ ID NO: 7813 - protein, 1307 aa, Artificial Sequence
  SARS-CoV-2/South Korea/SNU01/2020__EPI_ISL_411929 spike protein (1-1147)(K986P_V987P_T887W_A1020W) LumSynth construct
MFVFLVLLPLVSSQCVNLTTRTQLPPAYTNSFTRGVYYPDKVFRSSVLHSTQDLFLPFFSNVTWFHAIHVSGTNGTKRFDNPVLPFNDGVYFASTEKSNIIRGWIFGTTLDSKTQSLLIVNNATNVVIKVCEFQFCNDPFLGVYYHKNNKSWMESEFRVYSSANNCTFEYVSQPFLMDLEGKQGNFKNLREFVFKNIDGYFKIYSKHTPINLVRDLPQGFWALEPLVDLPIGINITRFQTLLALHRSYLTPGDSSSGWTAGAAAYYVGYLQPRTFLLKYNENGTITDAVDCALDPLSETKCTLKSFTVEKGIYQTSNFRVQPTESIVRFPNITNLCPFGEVFNATRFASVYAWNRKRISNCVADYSVLYNSASFSTFKCYGVSPTKLNDLCFTNVYADSFVIRGDEVRQIAPGQTGKIADYNYKLPDDFTGCVIAWNSNNLDSKVGGNYNYLYRLFRKSNLKPFERDISTEIYQAGSTPCNGVEGFNCYFPLQSYGFQPTNGVGYQPYRVVVLSFELLHAPATVCGPKKSTNLVKNKCVNFNFNGLTGTGVLTESNKKFLPFQQFGRDIADTTDAVRDPQTLEILDITPCSFGGVSVITPGTNTSNQVAVLYQDVNCTEVPVAIHADQLTPTWRVYSTGSNVFQTRAGCLIGAEHVNNSYECDIPIGAGICASYQTQTNSPRRARSVASQSIIAYTMSLGAENSVAYSNNSIAIPTNFTISVTTEILPVSMTKTSVDCTMYICGDSTECSNLLLQYGSFCTQLNRALTGIAVEQDKNTQEVFAQVKQIYKTPPIKDFGGFNFSQILPDPSKPSKRSFIEDLLFNKVTLADAGFIKQYGDCLGDIAARDLICAQKFNGLTVLPPLLTDEMIAQYTSALLAGTITSGWWFGAGAALQIPFAMQMAYRFNGIGVTQNVLYENQKLIANQFNSAIGKIQDSLSSTASALGKLQDVVNQNAQALNTLVKQLSSNFGAISSVLNDILSRLDPPEAEVQIDRLITGRLQSLQTYVTQQLIRAAEIRWSANLAATKMSECVLGQSKRVDFCGKGYHLMSFPQSAPHGVVFLHVTYVPAQEKNFTTAPAICHDGKAHFPREGVFVSNGTHWFVTQRNFYEPQIITTDNTFVSGNCDVVIGIVNNTVYDPLQPELDSGGGSGGGQIYEGKLTAEGLRFGIVASRFNHALVDRLVEGAIDAIVRHGGREEDITLVRVPGSWEIPVAAGELARKEDIDAVIAIGVLIRGATPHFDYIASEVSKGLADLSLELRKPITFGVITADTLEQAIERAGTKHGNKGWEAALSAIEMANLFKSLR

SEQ ID NO: 7814 - protein, 1307 aa, Artificial Sequence
  SARS-CoV-2/China/WF0004/2020__EPI_ISL_413694 spike protein (1-1147)(K986P_V987P_T887W_A1020W) LumSynth construct
MFVFLVLLPLVSSQCVNLTTRTQLPPAYTNSFTRGVYYPDKVFRSSVLHSTQDLFLPFFSNVTWFHAIHVSGTNGTKRFDNPVLPFNDGVYFASTEKSNIIRGWIFGTTLDSKTQSLLIVNNATNVVIKVCEFQFCNDPFLGVYYHKNNKSWTESEFRVYSSANNCTFEYVSQPFLMDLEGKQGNFKNLREFVFKNIDGYFKIYSKHTPINLVRDLPQGFSALEPLVDLPIGINITRFQTLLALHRSYLTPGDSSSGWTAGAAAYYVGYLQPRTFLLKYNENGTITDAVDCALDPLSETKCTLKSFTVEKGIYQTSNFRVQPTESIVRFPNITNLCPFGEVFNATRFASVYAWNRKRISNCVADYSVLYNSASFSTFKCYGVSPTKLNDLCFTNVYADSFVIRGDEVRQIAPGQTGKIADYNYKLPDDFTGCVIAWNSNNLDSKVGGNYNYLYRLFRKSNLKPFERDISTEIYQAGSTPCNGVEGFNCYFPLQSYGFQPTNGVGYQPYRVVVLSFELLHAPATVCGPKKSTNLVKNKCVNFNFNGLTGTGVLTESNKKFLPFQQFGRDIADTTDAVRDPQTLEILDITPCSFGGVSVITPGTNTSNQVAVLYQDVNCTEVPVAIHADQLTPTWRVYSTGSNVFQTRAGCLIGAEHVNNSYECDIPIGAGICASYQTQTNSPRRARSVASQSIIAYTMSLGAENSVAYSNNSIAIPTNFTISVTTEILPVSMTKTSVDCTMYICGDSTECSNLLLQYGSFCTQLNRALTGIAVEQDKNTQEVFAQVKQIYKTPPIKDFGGFNFSQILPDPSKPSKRSFIEDLLFNKVTLADAGFIKQYGDCLGDIAARDLICAQKFNGLTVLPPLLTDEMIAQYTSALLAGTITSGWWFGAGAALQIPFAMQMAYRFNGIGVTQNVLYENQKLIANQFNSAIGKIQDSLSSTASALGKLQDVVNQNAQALNTLVKQLSSNFGAISSVLNDILSRLDPPEAEVQIDRLITGRLQSLQTYVTQQLIRAAEIRWSANLAATKMSECVLGQSKRFDFCGKGYHLMSFPQSAPHGVVFLHVTYVPAQEKNFTTAPAICHDGKAHFPREGVFVSNGTHWFVTQRNFYEPQIITTDNTFVSGNCDVVIGIVNNTVYDPLQPELDSGGGSGGGQIYEGKLTAEGLRFGIVASRFNHALVDRLVEGAIDAIVRHGGREEDITLVRVPGSWEIPVAAGELARKEDIDAVIAIGVLIRGATPHFDYIASEVSKGLADLSLELRKPITFGVITADTLEQAIERAGTKHGNKGWEAALSAIEMANLFKSLR

SEQ ID NO: 7815 - protein, 1307 aa, Artificial Sequence
  SARS-CoV-2/China/WF0028/2020__EPI_ISL_413791 spike protein (1-1147)(K986P_V987P_T887W_A1020W) LumSynth construct
MFVFLVLLPLVSSQCVNLTTRTQLPPAYTNSFTRGVYYPDKVFRSSVLHSTQDLFLPFFSNVTWFHAIHVSGTNGTKRFDNPVLPFNDGVYFASTEKSNIIRGWIFGTTLDSKTQSLLIVNNATNVVIKVCEFQFCNDPFLGVYYHKNNKSWMESEFRVYSSANNCTFEYVSQPFLMDLEGKQGNFKNLREFVFKNIDGYFKIYSKHTPINLVRDLPQGFSALEPLVDLPIGINITRFQTLLALHRSYLTPGDSSSGWTAGAAAYYVGYLQPRTFLLKYNENGTITDAVDCALDPLSETKCTLKSFTVEKGIYQTSNFRVQPTESIVRFPNITNLCPFGEVFNATRFASVYAWNRKRISNCVADYSVLYNSASFSTFKCYGVSPTKLNDLCFTNVYADSFVIRGDEVRQIAPGQTGKIADYNYKLPDDFTGCVIAWNSNNLDSKVGGNYNYLYRLFRKSNLKPFERDISTEIYQAGSTPCNGVEGFNCYFPLQSYGFQPTNGVGYQPYRVVVLSFELLHAPATVCGPKKSTNLVKNKCVNFNFNGLTGTGVLTESNKKFLPFQQFGRDIADTTDAVRDPQTLEILDITPCSFGGVSVITPGTNTSNQVAVLYQDVNCTEVPVAIHADQLTPTWRVYSTGSNVFQTRAGCLIGAEHVNNSYECDIPIGAGICASYQTQTNSPRRARSVASQSIIAYTMSLGAENSVAYSNNSIAIPTNFTISVTTEILPVSMTKTSVDCTMYICGDSTECSNLLLQYGSFCTQLNRALTGIAVEQDKNTQEVFAQVKQIYKTPPIKDFGGFNFSQILPDPSKPSKRSFIEDLLFNKVTLADAGFIKQYGDCLGDIAARDLICAQKFNGLTVLPPLLTDEMIAQYTSALLAGTITSGWWFGAGAALQIPFAMQMAYRFNGIGVTQNVLYENQKLIANQFNSAIGKIQDSLSSTASALGKLQDVVNQNAQALNTLVKQLSSNFGAISSVLNDILSRLDPPEAEVQIDRLITGRLQSLQTYVTQQLIRAAEIRWSANLAATKMSECVLGQSKRVDFCGKGYHLMSFPQSAPHGVVFLHVTYVPAQEKNFTTAPAICHDGKAHFPREGVFVSNGTHWFVTQRNFYEPQIITTDNTFVSGNCDVVIGIVNNTVYDPLQPELESGGGSGGGQIYEGKLTAEGLRFGIVASRFNHALVDRLVEGAIDAIVRHGGREEDITLVRVPGSWEIPVAAGELARKEDIDAVIAIGVLIRGATPHFDYIASEVSKGLADLSLELRKPITFGVITADTLEQAIERAGTKHGNKGWEAALSAIEMANLFKSLR

SEQ ID NO: 7816 - protein, 1307 aa, Artificial Sequence
  SARS-CoV-2/2019-nCoV/USA-CruiseA-18/2020__MT159716.1 spike protein (1-1147)(K986P_V987P_T887W_A1020W) LumSynth construct
MFVFLVLLPLVSSQCVNLTTRTQLPPAYTNSFTRGVYYPDKVFRSSVLHSTQDLFLPFFSNVTWFHAIHVSGTNGTKRFDNPVLPFNDGVYFASTEKSNIIRGWIFGTTLDSKTQSLLIVNNATNVVIKVCEFQFCNDPFLGVYYHKNNKSWMESELRVYSSANNCTFEYVSQPFLMDLEGKQGNFKNLREFVFKNIDGYFKIYSKHTPINLVRDLPQGFSALEPLVDLPIGINITRFQTLLALHRSYLTPGDSSSGWTAGAAAYYVGYLQPRTFLLKYNENGTITDAVDCALDPLSETKCTLKSFTVEKGIYQTSNFRVQPTESIVRFPNITNLCPFGEVFNATRFASVYAWNRKRISNCVADYSVLYNSASFSTFKCYGVSPTKLNDLCFTNVYADSFVIRGDEVRQIAPGQTGKIADYNYKLPDDFTGCVIAWNSNNLDSKVGGNYNYLYRLFRKSNLKPFERDISTEIYQAGSTPCNGVEGFNCYFPLQSYGFQPTNGVGYQPYRVVVLSFELLHAPATVCGPKKSTNLVKNKCVNFNFNGLTGTGVLTESNKKFLPFQQFGRDIADTTDAVRDPQTLEILDITPCSFGGVSVITPGTNTSNQVAVLYQDVNCTEVPVAIHADQLTPTWRVYSTGSNVFQTRAGCLIGAEHVNNSYECDIPIGAGICASYQTQTNSPRRARSVASQSIIAYTMSLGAENSVAYSNNSIAIPTNFTISVTTEILPVSMTKTSVDCTMYICGDSTECSNLLLQYGSFCTQLNRALTGIAVEQDKNTQEVFAQVKQIYKTPPIKDFGGFNFSQILPDPSKPSKRSFIEDLLFNKVTLADAGFIKQYGDCLGDIAARDLICAQKFNGLTVLPPLLTDEMIAQYTSALLAGTITSGWWFGAGAALQIPFAMQMAYRFNGIGVTQNVLYENQKLIANQFNSAIGKIQDSLSSTASALGKLQDVVNQNAQALNTLVKQLSSNFGAISSVLNDILSRLDPPEAEVQIDRLITGRLQSLQTYVTQQLIRAAEIRWSANLAATKMSECVLGQSKRVDFCGKGYHLMSFPQSAPHGVVFLHVTYVPAQEKNFTTAPAICHDGKAHFPREGVFVSNGTHWFVTQRNFYEPQIITTDNTFVSGNCDVVIGIVNNTVYDPLQPELDSGGGSGGGQIYEGKLTAEGLRFGIVASRFNHALVDRLVEGAIDAIVRHGGREEDITLVRVPGSWEIPVAAGELARKEDIDAVIAIGVLIRGATPHFDYIASEVSKGLADLSLELRKPITFGVITADTLEQAIERAGTKHGNKGWEAALSAIEMANLFKSLR

SEQ ID NO: 7817 - protein, 1307 aa, Artificial Sequence
  SARS-CoV-2/SARS-CoV-2/Yunnan-01/human/2020/CHN__MT049951.1 spike protein (1-1147)(K986P_V987P_T887W_A1020W) LumSynth construct
MFVFLVLLPLVSSQCVNLTTRTQLPPANTNSFTRGVYYPDKVFRSSVLHSTQDLFLPFFSNVTWFHAIHVSGTNGTKRFDNPVLPFNDGVYFASTEKSNIIRGWIFGTTLDSKTQSLLIVNNATNVVIKVCEFQFCNDPFLGVYYHKNNKSWMESEFRVYSSANNCTFEYVSQPFLMDLEGKQGNFKNLREFVFKNIDGYFKIYSKHTPINLVRDLPQGFSALEPLVDLPIGINITRFQTLLALHRSYLTPGDSSSGWTAGAAAYYVGYLQPRTFLLKYNENGTITDAVDCALDPLSETKCTLKSFTVEKGIYQTSNFRVQPTESIVRFPNITNLCPFGEVFNATRFASVYAWNRKRISNCVADYSVLYNSASFSTFKCYGVSPTKLNDLCFTNVYADSFVIRGDEVRQIAPGQTGKIADYNYKLPDDFTGCVIAWNSNNLDSKVGGNYNYLYRLFRKSNLKPFERDISTEIYQAGSTPCNGVEGFNCYFPLQSYGFQPTNGVGYQPYRVVVLSFELLHAPATVCGPKKSTNLVKNKCVNFNFNGLTGTGVLTESNKKFLPFQQFGRDIADTTDAVRDPQTLEILDITPCSFGGVSVITPGTNTSNQVAVLYQDVNCTEVPVAIHADQLTPTWRVYSTGSNVFQTRAGCLIGAEHVNNSYECDIPIGAGICASYQTQTNSPRRARSVASQSIIAYTMSLGAENSVAYSNNSIAIPTNFTISVTTEILPVSMTKTSVDCTMYICGDSTECSNLLLQYGSFCTQLNRALTGIAVEQDKNTQEVFAQVKQIYKTPPIKDFGGFNFSQILPDPSKPSKRSFIEDLLFNKVTLADAGFIKQYGDCLGDIAARDLICAQKFNGLTVLPPLLTDEMIAQYTSALLAGTITSGWWFGAGAALQIPFAMQMAYRFNGIGVTQNVLYENQKLIANQFNSAIGKIQDSLSSTASALGKLQDVVNQNAQALNTLVKQLSSNFGAISSVLNDILSRLDPPEAEVQIDRLITGRLQSLQTYVTQQLIRAAEIRWSANLAATKMSECVLGQSKRVDFCGKGYHLMSFPQSAPHGVVFLHVTYVPAQEKNFTTAPAICHDGKAHFPREGVFVSNGTHWFVTQRNFYEPQIITTDNTFVSGNCDVVIGIVNNTVYDPLQPELDSGGGSGGGQIYEGKLTAEGLRFGIVASRFNHALVDRLVEGAIDAIVRHGGREEDITLVRVPGSWEIPVAAGELARKEDIDAVIAIGVLIRGATPHFDYIASEVSKGLADLSLELRKPITFGVITADTLEQAIERAGTKHGNKGWEAALSAIEMANLFKSLR

SEQ ID NO: 7818 - protein, 1307 aa, Artificial Sequence
  SARS-CoV-2/USA/WA-UW292/2020__EPI_ISL_418077 spike protein (1-1147)(K986P_V987P_T887W_A1020W) LumSynth construct
MFVFLVLLPLVSSQCVNLTTRTQLPPAYTNSFTRGVYYPDKVFRSSVLHSTQDLFLPFFSNVTWFHAIHVSGTNGTKRFDNPVLPFNDGVYFASTEKSNIIRGWIFGTTLDSKTQSLLIVNNATNVVIKVCEFQFCNDPFLGVYYHKNNKSWMESEFRVYSSANNCTFEYVSQPFLMDLEGKQGNFKNLREFVFKNIDGYFKIYSKHTPINLVRDLPQGFSALEPLVDLPIGINITRFQTLLALHRSYLTPGDSSSGWTAGAAAYYVGYLQPRTFLLKYNENGTITDAVDCALDPLSETKCTLKSFTVEKGIYQTSNFRVQPTESIVRFPNITNLCPFGEVFNATRFASVYAWNRKRISNCVADYSVLYNSASFSTFKCYGVSPTKLNDLCFTNVYADSFVIRGDEVRQIAPGQTGKIADYNYKLPDDFTGCVIAWNSNNLDSKVGGNYNYLYRLFRKSNLKPFERDISTEIYQASSTPCNGVEGFNCYFPLQSYGFQPTNGVGYQPYRVVVLSFELLHAPATVCGPKKSTNLVKNKCVNFNFNGLTGTGVLTESNKKFLPFQQFGRDIADTTDAVRDPQTLEILDITPCSFGGVSVITPGTNTSNQVAVLYQDVNCTEVPVAIHADQLTPTWRVYSTGSNVFQTRAGCLIGAEHVNNSYECDIPIGAGICASYQTQTNSPRRARSVASQSIIAYTMSLGAENSVAYSNNSIAIPTNFTISVTTEILPVSMTKTSVDCTMYICGDSTECSNLLLQYGSFCTQLNRALTGIAVEQDKNTQEVFAQVKQIYKTPPIKDFGGFNFSQILPDPSKPSKRSFIEDLLFNKVTLADAGFIKQYGDCLGDIAARDLICAQKFNGLTVLPPLLTDEMIAQYTSALLAGTITSGWWFGAGAALQIPFAMQMAYRFNGIGVTQNVLYENQKLIANQFNSAIGKIQDSLSSTASALGKLQDVVNQNAQALNTLVKQLSSNFGAISSVLNDILSRLDPPEAEVQIDRLITGRLQSLQTYVTQQLIRAAEIRWSANLAATKMSECVLGQSKRVDFCGKGYHLMSFPQSAPHGVVFLHVTYVPAQEKNFTTAPAICHDGKAHFPREGVFVSNGTHWFVTQRNFYEPQIITTDNTFVSGNCDVVIGIVNNTVYDPLQPELDSGGGSGGGQIYEGKLTAEGLRFGIVASRFNHALVDRLVEGAIDAIVRHGGREEDITLVRVPGSWEIPVAAGELARKEDIDAVIAIGVLIRGATPHFDYIASEVSKGLADLSLELRKPITFGVITADTLEQAIERAGTKHGNKGWEAALSAIEMANLFKSLR

SEQ ID NO: 7819 - protein, 1307 aa, Artificial Sequence
  SARS-CoV-2/Iceland/192/2020__EPI_ISL_417819 spike protein (1-1147)(K986P_V987P_T887W_A1020W) LumSynth construct
MFVFFVLLPLVSSQCVNLTTRTQLPPAYTNSFTRGVYYPDKVFRSSVLHSTQDLFLPFFSNVTWFHAIHVSGTNGTKRFDNPVLPFNDGVYFASTEKSNIIRGWIFGTTLDSKTQSLLIVNNATNVVIKVCEFQFCNDPFLGVYYHKNNKSWMESEFRVYSSANNCTFEYVSQPFLMDLEGKQGNFKNLREFVFKNIDGYFKIYSKHTPINLVRDLPQGFSALEPLVDLPIGINITRFQTLLALHRSYLTPGDSSSGWTAGAAAYYVGYLQPRTFLLKYNENGTITDAVDCALDPLSETKCTLKSFTVEKGIYQTSNFRVQPTESIVRFPNITNLCPFGEVFNATRFASVYAWNRKRISNCVADYSVLYNSASFSTFKCYGVSPTKLNDLCFTNVYADSFVIRGDEVRQIAPGQTGKIADYNYKLPDDFTGCVIAWNSNNLDSKVGGNYNYLYRLFRKSNLKPFERDISTEIYQAGSTPCNGVEGFNCYFPLQSYGFQPTNGVGYQPYRVVVLSFELLHAPATVCGPKKSTNLVKNKCVNFNFNGLTGTGVLTESNKKFLPFQQFGRDIADTTDAVRDPQTLEILDITPCSFGGVSVITPGTNTSNQVAVLYQGVNCTEVPVAIHADQLTPTWRVYSTGSNVFQTRAGCLIGAEHVNNSYECDIPIGAGICASYQTQTNSPRRARSVASQSIIAYTMSLGAENSVAYSNNSIAIPTNFTISVTTEILPVSMTKTSVDCTMYICGDSTECSNLLLQYGSFCTQLNRALTGIAVEQDKNTQEVFAQVKQIYKTPPIKDFGGFNFSQILPDPSKPSKRSFIEDLLFNKVTLADAGFIKQYGDCLGDIAARDLICAQKFNGLTVLPPLLTDEMIAQYTSALLAGTITSGWWFGAGAALQIPFAMQMAYRFNGIGVTQNVLYENQKLIANQFNSAIGKIQDSLSSTASALGKLQDVVNQNAQALNTLVKQLSSNFGAISSVLNDILSRLDPPEAEVQIDRLITGRLQSLQTYVTQQLIRAAEIRWSANLAATKMSECVLGQSKRVDFCGKGYHLMSFPQSAPHGVVFLHVTYVPAQEKNFTTAPAICHDGKAHFPREGVFVSNGTHWFVTQRNFYEPQIITTDNTFVSGNCDVVIGIVNNTVYDPLQPELDSGGGSGGGQIYEGKLTAEGLRFGIVASRFNHALVDRLVEGAIDAIVRHGGREEDITLVRVPGSWEIPVAAGELARKEDIDAVIAIGVLIRGATPHFDYIASEVSKGLADLSLELRKPITFGVITADTLEQAIERAGTKHGNKGWEAALSAIEMANLFKSLR

SEQ ID NO: 7820 - protein, 1307 aa, Artificial Sequence
  SARS-CoV-2/Belgium/ULG-6939/2020__EPI_ISL_417020 spike protein (1-1147)(K986P_V987P_T887W_A1020W) LumSynth construct
MFVFLVLLPLVSSQCVNLTTRTQLPPAYTNSFTRGVYYPDKVFRSSVLHSTQDLFLPFFSNVTWFHAIHVSGTNGTKRFDNPVLPFNDGVYFASTEKSNIIRGWIFGTTLDSKTQSLLIVNNATNVVIKVCEFQFCNDPFLGVYYHKNNKSWMESEFRVYSSANNCTFEYVSQPFLMDLEGKQGNFKNLREFVFKNIDGYFKIYSKHTPINLVRDLPQGFSALEPLVDLPIGINITRFQTLLALHRSYLTPGDSSSGWTAGAAAYYVGYLQPRTFLLKYNENGTITDAVDCALDPLSETKCTLKSFTVEKGIYQTSNFRVQPTESIVRFPNITNLCPFGEVFNATRFASVYAWNRKRISNCVADYSVLYNSASFSTFKCYGVSPTKLNDLCFTNVYADSFVIRGDEVRQIAPGQTGKIADYNYKLPDDFTGCVIAWNSNNLDSKVGGNYNYLYRLFRKSNLKPFERDISTEIYQAGSTPCNGVEGFNCYFPLQSYGFQPTNGVGYQPYRVVVLSFELLHAPATVCGPKKSTNLVKNKCVNFNFNGLTGTGVLTESNKKFLPFQQFGRDIADTTDAVRDPQTLEILDITPCSFGGVSVITPGTNTSNQVAVLYQGVNCTEVPVAIHADQLTPTWRVYSTGSNVFQTRAGCLIGAEHVNNSYECDIPIGAGICASYQTQTNSPRRARSVASQSIIAYTMSLGAENSVVYSNNSIAIPTNFTISVTTEILPVSMTKTSVDCTMYICGDSTECSNLLLQYGSFCTQLNRALTGIAVEQDKNTQEVFAQVKQIYKTPPIKDFGGFNFSQILPDPSKPSKRSFIEDLLFNKVTLADAGFIKQYGDCLGDIAARDLICAQKFNGLTVLPPLLTDEMIAQYTSALLAGTITSGWWFGAGAALQIPFAMQMAYRFNGIGVTQNVLYENQKLIANQFNSAIGKIQDSLSSTASALGKLQDVVNQNAQALNTLVKQLSSNFGAISSVLNDILSRLDPPEAEVQIDRLITGRLQSLQTYVTQQLIRAAEIRWSANLAATKMSECVLGQSKRVDFCGKGYHLMSFPQSAPHGVVFLHVTYVPAQEKNFTTAPAICHDGKAHFPREGVFVSNGTHWFVTQRNFYEPQIITTDNTFVSGNCDVVIGIVNNTVYDPLQPELDSGGGSGGGQIYEGKLTAEGLRFGIVASRFNHALVDRLVEGAIDAIVRHGGREEDITLVRVPGSWEIPVAAGELARKEDIDAVIAIGVLIRGATPHFDYIASEVSKGLADLSLELRKPITFGVITADTLEQAIERAGTKHGNKGWEAALSAIEMANLFKSLR

SEQ ID NO: 7821 - protein, 1307 aa, Artificial Sequence
  SARS-CoV-2/France/HF2496/2020__EPI_ISL_418231 spike protein (1-1147)(K986P_V987P_T887W_A1020W) LumSynth construct
MFVFLVLLPLVSSQCVNLTTRTQLPPAYTNSFTRGVYYPDKVFRSSVLHSTQDLFLPFFSNVTWFHAIHVSGTNGTKRFDNPVLPFNDGVYFASTEKSNIIRGWIFGTTLDSKTQSLLIVNNATNVVIKVCEFQFCNDPFLGVYYHKNNKSWMESEFRVYSSANNCTFEYVSQPFLMDLEGKQGNFKNLREFVFKNIDGYFKIYSKHTPINLVRDLPQGFSALEPLVDLPIGINITRFQTLLALHRSYLTPGDSSSGWTAGAAAYYVGYLQPRTFLLKYNENGTITDAVDCALDPLSETKCTLKSFTVEKGIYQTSNFRVQPTESIVRFPNITNLCPFGEVFNATRFASVYAWNRKRISNCVADYSVLYNSASFSTFKCYGVSPTKLNDLCFTNVYADSFVIRGDEVRQIAPGQTGKIADYNYKLPDDFTGCVIAWNSNNLDSKVGGNYNYLYRLFRKSNLKPFERDISTEIYQAGSTPCNGVEGFNCYFPLQSYGFQPTNGVGYQPYRVVVLSFELLHAPATVCGPKKSTNLVKNKCVNFNFNGLTGTGVLTESNKKFLPFQQFGRDIADTTDAVRDPQTLEILDITPCSFGGVSVITPGTNTSNQVAVLYQGVNCTEVPVAIHADQLTPTWRVYSTGSNVFQTRAGCLIGAEHVNNSYECDIPIGAGICASYQTQTNSPRRARSVASQSIIAYTMSLGAENSVAYSNNSIAIPTNFTISVTTEILPVSMTKTSVDCTMYICGDSTECSNLLLQYGSFCTQLNRALTGIAVEQDKNTQEVFAQVKQIYKTPPIKDFGGFNFSQILPDPSKPSKRSFIEDLLFNKVTLADAGFIKQYGDCLGDIVARDLICAQKFNGLTVLPPLLTDEMIAQYTSALLAGTITSGWWFGAGAALQIPFAMQMAYRFNGIGVTQNVLYENQKLIANQFNSAIGKIQDSLSSTASALGKLQDVVNQNAQALNTLVKQLSSNFGAISSVLNDILSRLDPPEAEVQIDRLITGRLQSLQTYVTQQLIRAAEIRWSANLAATKMSECVLGQSKRVDFCGKGYHLMSFPQSAPHGVVFLHVTYVPAQEKNFTTAPAICHDGKAHFPREGVFVSNGTHWFVTQRNFYEPQIITTDNTFVSGNCDVVIGIVNNTVYDPLQPELDSGGGSGGGQIYEGKLTAEGLRFGIVASRFNHALVDRLVEGAIDAIVRHGGREEDITLVRVPGSWEIPVAAGELARKEDIDAVIAIGVLIRGATPHFDYIASEVSKGLADLSLELRKPITFGVITADTLEQAIERAGTKHGNKGWEAALSAIEMANLFKSLR

SEQ ID NO: 7822 - protein, 1307 aa, Artificial Sequence
  SARS-CoV-2/USA/WA-UW291/2020__EPI_ISL_418076 spike protein (1-1147)(K986P_V987P_T887W_A1020W) LumSynth construct
MFVFLVLLPLVSSQCVNLTTRTQLPPAYTNSFTRGVYYPDKVFRSSVLHSTQDLFLPFFSNVTWFHAIHVSGTNGTKRFDNPVLPFNDGVYFASTEKSNIIRGWIFGTTLDSKTQSLLIVNNATNVVIKVCEFQFCNDPFLGVYYHKNNKSWMESEFRVYSSANNCTFEYVSQPFLMDLEGKQGNFKNLREFVFKNIDGYFKIYSKHTPINLVRDLPQGFSALEPLVDLPIGINITRFQTLLALHRSYLTPGDSSSGWTAGAAAYYVGYLQPRTFLLKYNENGTITDAVDCALDPLSETKCTLKSFTVEKGIYQTSNFRVQPTESIVRFPNITNLCPFGEVFNATRFASVYAWNRKRISNCVADYSVLYNSASFSTFKCYGVSPTKLNDLCFTNVYADSFVIRGDEVRQIAPGQTGKIADYNYKLPDDFTGCVIAWNSNNLDSKVGGNYNYLYRLFRKSNLKPFERDISTEIYQAGSTPCNGVEGFNCYFPLQSYGFQPTNGVGYQPYRVVVLSFELLHAPATVCGPKKSTNLVKNKCVNFNFNGLTGTGVLTESNKKFLPFQQFGRDIADTTDAVRDPQTLEILDITPCSFGGVSVITPGTNTSNQVAVLYQGVNCTEVPVAIHADQLTPTWRVYSTGSNVFQTRAGCLIGAEHVNNSYECDIPIGAGICASYQTQTNSPRRARSVASQSIIAYTMSLGAENSVAYSNNSIAIPTNFTISVTTEILPVSMTKTSVDCTMYICGDSTECSNLLLQYGSFCTQLNRALTGIAVEQDKNTQEVFAQVKQIYKTPPIKDFGGFNFSQILPDPSKPSKRSFIEDLLFNKVTLADAGFIKQYGDCLGDIAARDLICAQKFNGLTVLPPLLTDEMIAQYTSALLAGTITSGWWFGAGAALQIPFAMQMAYRFNGIGVTQNVLYENQKLIANQFNSAIGKIQYSLSSTASALGKLQDVVNQNAQALNTLVKQLSSNFGAISSVLNDILSRLDPPEAEVQIDRLITGRLQSLQTYVTQQLIRAAEIRWSANLAATKMSECVLGQSKRVDFCGKGYHLMSFPQSAPHGVVFLHVTYVPAQEKNFTTAPAICHDGKAHFPREGVFVSNGTHWFVTQRNFYEPQIITTDNTFVSGNCDVVIGIVNNTVYDPLQPELDSGGGSGGGQIYEGKLTAEGLRFGIVASRFNHALVDRLVEGAIDAIVRHGGREEDITLVRVPGSWEIPVAAGELARKEDIDAVIAIGVLIRGATPHFDYIASEVSKGLADLSLELRKPITFGVITADTLEQAIERAGTKHGNKGWEAALSAIEMANLFKSLR

SEQ ID NO: 7823 - protein, 1307 aa, Artificial Sequence; identical to SEQ ID NO: 7786
  SARS-CoV-2/Portugal/PT0034/2020__EPI_ISL_418019 spike protein (1-1147)(K986P_V987P_T887W_A1020W) LumSynth construct

SEQ ID NO: 7824 - protein, 1307 aa, Artificial Sequence; identical to SEQ ID NO: 7778
  SARS-CoV-2/Iceland/202/2020__EPI_ISL_417750 spike protein (1-1147)(K986P_V987P_T887W_A1020W) LumSynth construct

SEQ ID NO: 7825 - protein, 1307 aa, Artificial Sequence
  SARS-CoV-2/USA/WA-UW261/2020__EPI_ISL_418046 spike protein (1-1147)(K986P_V987P_T887W_A1020W) LumSynth construct
MFVFLVLLPLVSSQCVNLTTRTQLPPAYTNSFTRGVYYPDKVFRSSVLHSTQDLFLPFFSNVTWFHAIHVSGTNGTKRFDNPVLPFNDGVYFASTEKSNIIRGWIFGTTLDSKTQSLLIVNNATNVVIKVCEFQFCNDPFLGVYYHKNNKSWMESEFRVYSSANNCTFEYVSQPFLMDLEGKQGNFKNLREFVFKNIDGYFKIYSKHTPINLVRDLPQGFSALEPLVDLPIGINITRFQTLLALHRSYLTPGDSSSGWTAGAAAYYVGYLQPRTFLLKYNENGTITDAVDCALDPLSETKCTLKSFTVEKGIYQTSNFRVQPTESIVRFPNITNLCPFGEVFNATRFTSVYAWNRKRISNCVADYSVLYNSASFSTFKCYGVSPTKLNDLCFTNVYADSFVIRGDEVRQIAPGQTGKIADYNYKLPDDFTGCVIAWNSNNLDSKVGGNYNYLYRLFRKSNLKPFERDISTEIYQAGSTPCNGVEGFNCYFPLQSYGFQPTNGVGYQPYRVVVLSFELLHAPATVCGPKKSTNLVKNKCVNFNFNGLTGTGVLTESNKKFLPFQQFGRDIADTTDAVRDPQTLEILDITPCSFGGVSVITPGTNTSNQVAVLYQDVNCTEVPVAIHADQLTPTWRVYSTGSNVFQTRAGCLIGAEHVNNSYECDIPIGAGICASYQTQTNSPRRARSVASQSIIAYTMSLGAENSVAYSNNSIAIPTNFTISVTTEILPVSMTKTSVDCTMYICGDSTECSNLLLQYGSFCTQLNRALTGIAVEQDKNTQEVFAQVKQIYKTPPIKDFGGFNFSQILPDPSKPSKRSFIEDLLFNKVTLADAGFIKQYGDCLGDIAARDLICAQKFNGLTVLPPLLTDEMIAQYTSALLAGTITSGWWFGAGAALQIPFAMQMAYRFNGIGVTQNVLYENQKLIANQFNSAIGKIQDSLSSTASALGKLQDVVNQNAQALNTLVKQLSSNFGAISSVLNDILSRLDPPEAEVQIDRLITGRLQSLQTYVTQQLIRAAEIRWSANLAATKMSECVLGQSKRVDFCGKGYHLMSFPQSAPHGVVFLHVTYVPAQEKNFTTAPAICHDGKAHFPREGVFVSNGTHWFVTQRNFYEPQIITTDNTFVSGNCDVVIGIVNNTVYDPLQPELDSGGGSGGGQIYEGKLTAEGLRFGIVASRFNHALVDRLVEGAIDAIVRHGGREEDITLVRVPGSWEIPVAAGELARKEDIDAVIAIGVLIRGATPHFDYIASEVSKGLADLSLELRKPITFGVITADTLEQAIERAGTKHGNKGWEAALSAIEMANLFKSLR

SEQ ID NO: 7826 - protein, 1307 aa, Artificial Sequence
  SARS-CoV-2/Portugal/PT0035/2020__EPI_ISL_418020 spike protein (1-1147)(K986P_V987P_T887W_A1020W) LumSynth construct
MFVFLVLLPLVSSQCVNLTTRTQLPPAYTNSFTRGVYYPDKVFRSSVLHSTQDLFLPFFSNVTWFHAIHVSGTNGTKRFDNPVLPFNDGVYFASTEKSNIIRGWIFGTTLDSKTQSLLIVNNATNVVIKVCEFQFCNDPFLGVYYHKNNKSWMESEFRVYSSANNCTFEYVSQPFLMDLEGKQGNFKNLREFVFKNIDGYFKIYSKHTPINLVRDLPQGFSALEPLVDLPIGINITRFQTLLALHRSYLTPGDSSSGWTAGAAAYYVGYLQPRTFLLKYNENGTITDAVDCALDPLSETKCTLKSFTVEKGIYQTSNFRVQPTESIVRFPNITNLCPFGEVFNATRFASVYAWNRKRISNCVADYSVLYNSASFSTFKCYGVSPTKLNDLCFTNVYADSFVIRGDEVRQIAPGQTGKIADYNYKLPDDFTGCVIAWNSNNLDSKVGGNYNYLYRLFRKSNLKPFERDISTEIYQAGSTPCNGVEGFNCYFPLQSYGFQPTNGVGYQPYRVVVLSFELLHAPATVCGPKKSTNLVKNKCVNFNFNGLTGTGVLTESNKKFLPFQQFGRDIADTTDAVRDPQTLEILDITPCSFGGVSVITPGTNTSNQVAVLYQDVNCTEVPVAIHADQLTPTWRVYSTGSNVFQTRAGCLIGAEHVNNSYECDIPIGAGICASYQTQTNSPRRARSVASQSIIAYTMSLGAENSVAYSNNSIAIPTNFTISVTTEILPVSMTKTSVDCTMYICGDSTECSNLLLQYGSFCTQLNRALTGIAVEQDKNTQEVFAQVKQIYKTPPIKDFGGFNFSQILPDPSKPSKRSFIEDLLFNKVTLADAGFIKQYGDCLGDISARDLICAQKFNGLTVLPPLLTDEMIAQYTSALLAGTITSGWWFGAGAALQIPFAMQMAYRFNGIGVTQNVLYENQKLIANQFNSAIGKIQDSLSSTASALGKLQDVVNQNAQALNTLVKQLSSNFGAISSVLNDILSRLDPPEAEVQIDRLITGRLQSLQTYVTQQLIRAAEIRWSANLAATKMSECVLGQSKRVDFCGKGYHLMSFPQSAPHGVVFLHVTYVPAQEKNFTTAPAICHDGKAHFPREGVFVSNGTHWFVTQRNFYEPQIITTDNTFVSGNCDVVIGIVNNTVYDPLQPELDSGGGSGGGQIYEGKLTAEGLRFGIVASRFNHALVDRLVEGAIDAIVRHGGREEDITLVRVPGSWEIPVAAGELARKEDIDAVIAIGVLIRGATPHFDYIASEVSKGLADLSLELRKPITFGVITADTLEQAIERAGTKHGNKGWEAALSAIEMANLFKSLR

SEQ ID NO: 7827 - protein, 1307 aa, Artificial Sequence
  SARS-CoV-2/USA/NY-NYUMC7/2020__EPI_ISL_418192 spike protein (1-1147)(K986P_V987P_T887W_A1020W) LumSynth construct
MFVFLVLLPLVSSQCVNLTTRTQLPPAYTNSFTRGVYYPDKVFRSSVLHSTQDLFLPFFSNVTWFHAIHVSGTNGTKRFDNPVLPFNDGVYFASTEKSNIIRGWIFGTTLDSKTQSLLIVNNATNVVIKVCEFQFCNDPFLGVYHHKNNKSWMESEFRVYSSANNCTFEYVSQPFLMDLEGKQGNFKNLREFVFKNIDGYFKIYSKHTPINLVRDLPQGFSALEPLVDLPIGINITRFQTLLALHRSYLTPGDSSSGWTAGAAAYYVGYLQPRTFLLKYNENGTITDAVDCALDPLSETKCTLKSFTVEKGIYQTSNFRVQPTESIVRFPNITNLCPFGEVFNATRFASVYAWNRKRISNCVADYSVLYNSASFSTFKCYGVSPTKLNDLCFTNVYADSFVIRGDEVRQIAPGQTGKIADYNYKLPDDFTGCVIAWNSNNLDSKVGGNYNYLYRLFRKSNLKPFERDISTEIYQAGSTPCNGVEGFNCYFPLQSYGFQPTNGVGYQPYRVVVLSFELLHAPATVCGPKKSTNLVKNKCVNFNFNGLTGTGVLTESNKKFLPFQQFGRDIADTTDAVRDPQTLEILDITPCSFGGVSVITPGTNTSNQVAVLYQGVNCTEVPVAIHADQLTPTWRVYSTGSNVFQTRAGCLIGAEHVNNSYECDIPIGAGICASYQTQTNSPRRARSVASQSIIAYTMSLGAENSVAYSNNSIAIPTNFTISVTTEILPVSMTKTSVDCTMYICGDSTECSNLLLQYGSFCTQLNRALTGIAVEQDKNTQEVFAQVKQIYKTPPIKDFGGFNFSQILPDPSKPSKRSFIEDLLFNKVTLADAGFIKQYGDCLGDIAARDLICAQKFNGLTVLPPLLTDEMIAQYTSALLAGTITSGWWFGAGAALQIPFAMQMAYRFNGIGVTQNVLYENQKLIANQFNSAIGKIQDSLSSTASALGKLQDVVNQNAQALNTLVKQLSSNFGAISSVLNDILSRLDPPEAEVQIDRLITGRLQSLQTYVTQQLIRAAEIRWSANLAATKMSECVLGQSKRVDFCGKGYHLMSFPQSAPHGVVFLHVTYVPAQEKNFTTAPAICHDGKAHFPREGVFVSNGTHWFVTQRNFYEPQIITTDNTFVSGNCDVVIGIVNNTVYDPLQPELDSGGGSGGGQIYEGKLTAEGLRFGIVASRFNHALVDRLVEGAIDAIVRHGGREEDITLVRVPGSWEIPVAAGELARKEDIDAVIAIGVLIRGATPHFDYIASEVSKGLADLSLELRKPITFGVITADTLEQAIERAGTKHGNKGWEAALSAIEMANLFKSLR

SEQ ID NO: 7828 - protein, 1307 aa, Artificial Sequence
  SARS-CoV-2/Iceland/189/2020__EPI_ISL_417709 spike protein (1-1147)(K986P_V987P_T887W_A1020W) LumSynth construct
MFVFLVLLPLVSSQCVNLTTRTQLPPAYTNSFTRGVYYPDKVFRSSVLHSTQDLFLPFFSNVTWFHAIHVSGTNGTKRFDNPVLPFNDGVYFASTEKSNIIRGWIFGTTLDSKTQSLLIVNNATNVVIKVCEFQFCNDPFLGVYYHKNNKSWMESEFRVYSSANNCTFEYVSQPFLMDLEGKQGNFKNLREFVFKNIDGYFKIYSKHTPINLVRDLPQGFSALEPLVDLPIGINITRFQTLLALHRSYLTPGDSSSGWTAGAAAYYVGYLQPRTFLLKYNENGTITDAVDCALDPLSETKCTLKSFTVEKGIYQTSNFRVQPTESIVRFPNITNLCPFGEVFNATRFASVYAWNRKRISNCVADYSVLYNSASFSTFKCYGVSPTKLNDLCFTNVYADSFVIRGDEVRQIAPGQTGKIADYNYKLPDDFTGCVIAWNSNNLDSKVGGNYNYLYRLFRKSNLKPFERDISTEIYQAGSTPCNGVEGFNCYFPLQSYGFQPTNGVGYQPYRVVVLSFELLHAPATVCGPKKSTNLVKNKCVNFNFNGLTGTGVLTESNKKFLPFQQFGRDIADTTDAVRDPQTLEILDITPCSFGGVSVITPGTNTSNQVAVLYQGVNCTEVPVAIHADQLTPTWRVYSTGSNVFQTRAGCLIGAEHVNNSYECDIPIGAGICASYQTQTNSPRRARSVASQSIIAYTMSLGAENSVAYSNNSIAIPTNFTISVTTEILPVSMTKTSVDCTMYICGDSTECSNLLLQYGSFCTQLNRALTGIAVEQDKNTQEVFAQVKQIYKTPPIKDFGGFNFSQILPDPSKPSKRSFIEDLLFNKVTLADAGFTKQYGDCLGDIAARDLICAQKFNGLTVLPPLLTDEMIAQYTSALLAGTITSGWWFGAGAALQIPFAMQMAYRFNGIGVTQNVLYENQKLIANQFNSAIGKIQDSLSSTASALGKLQDVVNQNAQALNTLVKQLSSNFGAISSVLNDILSRLDPPEAEVQIDRLITGRLQSLQTYVTQQLIRAAEIRWSANLAATKMSECVLGQSKRVDFCGKGYHLMSFPQSAPHGVVFLHVTYVPAQEKNFTTAPAICHDGKAHFPREGVFVSNGTHWFVTQRNFYEPQIITTDNTFVSGNCDVVIGIVNNTVYDPLQPELDSGGGSGGGQIYEGKLTAEGLRFGIVASRFNHALVDRLVEGAIDAIVRHGGREEDITLVRVPGSWEIPVAAGELARKEDIDAVIAIGVLIRGATPHFDYIASEVSKGLADLSLELRKPITFGVITADTLEQAIERAGTKHGNKGWEAALSAIEMANLFKSLR

SEQ ID NO: 7829 - protein, 1307 aa, Artificial Sequence
  SARS-CoV-2/Australia/NSW56/2020__EPI_ISL_417408 spike protein (1-1147)(K986P_V987P_T887W_A1020W) LumSynth construct
MFVFLVLLPLVSSQCVNLTTRTQLPPAYTNSFTRGVYYPDKVFRSSVLHSTQDLFLPFFSNVTWFHAIHVSGTNGTKRFDNPVLPFNDGVYFASTEKSNIIRGWIFGTTLDSKTQSLLIVNNATNVVIKVCEFQFCNDPFLGVYYHKNNKSWMESEFRVYSSANNCTFEYVSQPFLMDLEGKQGNFKNLREFVFKNIDGYFKIYSKHTPINLVRDLPQGFSALEPLVDLPIGINITRFQTLLALHRSYLTPGDSSSGWTAGAAAYYVGYLQPRTFLLKYNENGTITDAVDCALDPLSETKCTLKSFTVEKGIYQTSNFRVQPTESIVRFPNITNLCPFGEVFNATRFASVYAWNRKRISNCVADYSVLYNSASFSTFKCYGVSPTKLNDLCFTNVYADSFVIRGDEVRQIAPGQTGKIADYNYKLPDDFTGCVIAWNSNNLDSKVGGNYNYLYRLFRKSNLKPFERDISTEIYQAGSTPCNGVEGFNCYFPLQSYGFQPTNGVGYQPYRVVVLSFELLHAPATVCGPKKSTNLVKNKCVNFNFNGLTGTGVLTESNKKFLPFQQFGRDIADTTDAVRDPQTLEILDITPCSFGGVSVITPGTNTSNQVAVLYQDVNCTEVPVAIHADQLTPTWRVYSTGSNVFQTRAGCLIGAEHVNNSYECDIPIGAGICASYQTQTNSPRRARSVASQSIIAYTMSLGAENSVAYSNNSIAIPTNFTISVTTEILPVSMTKTSVDCTMYICGDSTECSNLLLQYGSFCTQLNRALTGIAVEQDKNTQEVFAQVKQIYKTPPIKDFGGFNFSQILPDSSKPSKRSFIEDLLFNKVTLADAGFIKQYGDCLGDIAARDLICAQKFNGLTVLPPLLTDEMIAQYTSALLAGTITSGWWFGAGAALQIPFAMQMAYRFNGIGVTQNVLYENQKLIANQFNSAIGKIQDSLSSTASALGKLQDVVNQNAQALNTLVKQLSSNFGAISSVLNDILSRLDPPEAEVQIDRLITGRLQSLQTYVTQQLIRAAEIRWSANLAATKMSECVLGQSKRVDFCGKGYHLMSFPQSAPHGVVFLHVTYVPAQEKNFTTAPAICHDGKAHFPREGVFVSNGTHWFVTQRNFYEPQIITTDNTFVSGNCDVVIGIVNNTVYDPLQPELDSGGGSGGGQIYEGKLTAEGLRFGIVASRFNHALVDRLVEGAIDAIVRHGGREEDITLVRVPGSWEIPVAAGELARKEDIDAVIAIGVLIRGATPHFDYIASEVSKGLADLSLELRKPITFGVITADTLEQAIERAGTKHGNKGWEAALSAIEMANLFKSLR

SEQ ID NO: 7830 - protein, 1307 aa, Artificial Sequence
  SARS-CoV-2/Iceland/280/2020__EPI_ISL_417608 spike protein (1-1147)(K986P_V987P_T887W_A1020W) LumSynth construct
MFVFLVLLPLVSSQCVNLTTRTQLPPAYTNSFTRGVYYPDKVFRSSVLHSTQDLFLPFFSNVTWFHAIHVSGTNGTKRFDNPVLPFNDGVYFASTEKSNIIRGWIFGTTLDSKTQSLLIVNNATNVVIKVCEFQFCNDPFLGVYYHKNNKSWMESEFRVYSSANNCTFEYVSQPFLMDLEGKQGNFKNLREFVFKNIDGYFKIYSKHTPINLVRDLPQGFSALEPLVDLPIGINITRFQTLLALHRSYLTPGDSSSGWTAGAAAYYVGYLQPRTFLLKYNENGTITDAVDCALDPLSETKCTLKSFTVEKGIYQTSNFRVQPTESIVRFPNITNLCPFGEVFNATRFASVYAWNRKRISNCVADYSVLYNSASFSTFKCYGVSPTKLNDLCFTNVYADSFVIRGDEVRQIAPGQTGKIADYNYKLPDDFTGCVIAWNSNNLDSKVGGNYNYLYRLFRKSNLKPFERDISTEIYQAGSTPCNGVEGFNCYFPLQSYGFQPTNGVGYQPYRVVVLSFELLHAPATVCGPKKSTNLVKNKCVNFNFNGLTGTGVLTESNKKFLPFQQFGRDIADTTDAVRDPQTLEILDITPCSFGGVSVITPGTNTSNQVAVLYQGVNCTEVPVAIHADQLTPTWRVYSTGSNVFQTRAGCLIGAEHVNNSYECDIPIGAGICASYHTQTNSPRRARSVASQSIIAYTMSLGAENSVAYSNNSIAIPTNFTISVTTEILPVSMTKTSVDCTMYICGDSTECSNLLLQYGSFCTQLNRALTGIAVEQDKNTQEVFAQVKQIYKTPPIKDFGGFNFSQILPDPSKPSKRSFIEDLLFNKVTLADAGFIKQYGDCLGDIAARDLICAQKFNGLTVLPPLLTDEMIAQYTSALLAGTITSGWWFGAGAALQIPFAMQMAYRFNGIGVTQNVLYENQKLIANQFNSAIGKIQDSLSSTASALGKLQDVVNQNAQALNTLVKQLSSNFGAISSVLNDILSRLDPPEAEVQIDRLITGRLQSLQTYVTQQLIRAAEIRWSANLAATKMSECVLGQSKRVDFCGKGYHLMSFPQSAPHGVVFLHVTYVPAQEKNFTTAPAICHDGKAHFPREGVFVSNGTHWFVTQRNFYEPQIITTDNTFVSGNCDVVIGIVNNTVYDPLQPELDSGGGSGGGQIYEGKLTAEGLRFGIVASRFNHALVDRLVEGAIDAIVRHGGREEDITLVRVPGSWEIPVAAGELARKEDIDAVIAIGVLIRGATPHFDYIASEVSKGLADLSLELRKPITFGVITADTLEQAIERAGTKHGNKGWEAALSAIEMANLFKSLR

SEQ ID NO: 7831 - protein, 1307 aa, Artificial Sequence; identical to SEQ ID NO: 7786
  SARS-CoV-2/Iceland/247/2020__EPI_ISL_417575 spike protein (1-1147)(K986P_V987P_T887W_A1020W) LumSynth construct

SEQ ID NO: 7832 - protein, 1307 aa, Artificial Sequence
  SARS-CoV-2/Iceland/238/2020__EPI_ISL_417566 spike protein (1-1147)(K986P_V987P_T887W_A1020W) LumSynth construct
MFVFLVLLPLVSSQCVNLTTRTQLPPAYTNSFTRGVYYPDKVFRSSVLHSTQDLFLPFFSNVTWFHAIHVSGTNGTKRFDNPVLPFNDGVYFASTEKSNIIRGWIFGTTLDSKTQSLLIVNNATNVVIKVCEFQFCNDPFLGVYYHKNNKSWMESEFRVYSSANNCTFEYVSQPFLMDLEGKQGNFKNLREFVFKNIDGYFKIYSKHTPINLVRDLPQGFSALEPLVDLPIGINITRFQTLLALHRSYLTPGDSSSGWTAGAAAYYVGYLQPRTFLLKYNENGTITDAVDCALDPLSETKCTLKSFTVEKGIYQTSNFRVQPTESIVRFPNITNLCPFGEVFNATRFASVYAWNRKRISNCVADYSVLYNSASFSTFKCYGVSPTKLNDLCFTNVYADSFVIRGDEVRQIAPGQTGKIADYNYKLPDDFTGCVIAWNSNNLDSKVGGNYNYLYRLFRKSNLKPFERDISTEIYQAGSTPCNGVEGFNCYFPLQSYGFQPTNGVGYQPYRVVVLSFELLHAPATVCGPKKSTNLVKNKCVNFNFNGLTGTGVLTESNKKFLPFQQFGRDIADTTDAVRDPQTLEILDITPCSFGGVSVITPGTNTSNQVAVLYQGVNCTEVPVAIHADQLTPTWRVYSTGSNVFQTRAGCLIGAEHVNNSYECDIPIGAGICASYQTQTNSPRRARSVASQSIIAYTMSLGAENSVAYSNNSIAIPTNFTISVTTEILPVSMTKTSVDCTMYICGDSTECSNLLLQYGSFCTQLNRALTGIAVEQDKNTQEVFAQVKQIYKTPPIKDFGGFNFSQILPDPSKPSKRSFIEDLLFNKVTLADVGFIKQYGDCLGDIAARDLICAQKFNGLTVLPPLLTDEMIAQYTSALLAGTITSGWWFGAGAALQIPFAMQMAYRFNGIGVTQNVLYENQKLIANQFNSAIGKIQDSLSSTASALGKLQDVVNQNAQALNTLVKQLSSNFGAISSVLNDILSRLDPPEAEVQIDRLITGRLQSLQTYVTQQLIRAAEIRWSANLAATKMSECVLGQSKRVDFCGKGYHLMSFPQSAPHGVVFLHVTYVPAQEKNFTTAPAICHDGKAHFPREGVFVSNGTHWFVTQRNFYEPQIITTDNTFVSGNCDVVIGIVNNTVYDPLQPELDSGGGSGGGQIYEGKLTAEGLRFGIVASRFNHALVDRLVEGAIDAIVRHGGREEDITLVRVPGSWEIPVAAGELARKEDIDAVIAIGVLIRGATPHFDYIASEVSKGLADLSLELRKPITFGVITADTLEQAIERAGTKHGNKGWEAALSAIEMANLFKSLR

SEQ ID NO: 7833 - protein, 1307 aa, Artificial Sequence
  SARS-CoV-2/Greece/16/2020__EPI_ISL_418265 spike protein (1-1147)(K986P_V987P_T887W_A1020W) LumSynth construct
MFVFLVLLPLVSSQCVNLTTRTQLPPAYTNSFTRGVYYPDKVFRSSVLHSTQDLFLPFFSNVTWFHAIHVSGTNGTKRFDNPVLPFNDGVYFASTEKSNIIRGWIFGTTLDSKTQSLLIVNNATNVVIKVCEFQFCNDPFLGVYYHKNNKSWMESEFRVYSSANNCTFEYVSQPFLMDLEGKQGNFKNLREFVFKNVDGYFKIYSKHTPINLVRDLPQGFSALEPLVDLPIGINITRFQTLLALHRSYLTPGDSSSGWTAGAAAYYVGYLQPRTFLLKYNENGTITDAVDCALDPLSETKCTLKSFTVEKGIYQTSNFRVQPTESIVRFPNITNLCPFGEVFNATRFASVYAWNRKRISNCVADYSVLYNSASFSTFKCYGVSPTKLNDLCFTNVYADSFVIRGDEVRQIAPGQTGKIADYNYKLPDDFTGCVIAWNSNNLDSKVGGNYNYLYRLFRKSNLKPFERDISTEIYQAGSTPCNGVEGFNCYFPLQSYGFQPTNGVGYQPYRVVVLSFELLHAPATVCGPKKSTNLVKNKCVNFNFNGLTGTGVLTESNKKFLPFQQFGRDIADTTDAVRDPQTLEILDITPCSFGGVSVITPGTNTSNQVAVLYQDVNCTEVPVAIHADQLTPTWRVYSTGSNVFQTRAGCLIGAEHVNNSYECDIPIGAGICASYQTQTNSPRRARSVASQSIIAYTMSLGAENSVAYSNNSIAIPTNFTISVTTEILPVSMTKTSVDCTMYICGDSTECSNLLLQYGSFCTQLNRALTGIAVEQDKNTQEVFAQVKQIYKTPPIKDFGGFNFSQILPDPSKPSKRSFIEDLLFNKVTLADAGFIKQYGDCLGDIAARDLICAQKFNGLTVLPPLLTDEMIAQYTSALLAGTITSGWWFGAGAALQIPFAMQMAYRFNGIGVTQNVLYENQKLIANQFNSAIGKIQDSLSSTASALGKLQDVVNQNAQALNTLVKQLSSNFGAISSVLNDILSRLDPPEAEVQIDRLITGRLQSLQTYVTQQLIRAAEIRWSANLAATKMSECVLGQSKRVDFCGKGYHLMSFPQSAPHGVVFLHVTYVPAQEKNFTTAPAICHDGKAHFPREGVFVSNGTHWFVTQRNFYEPQIITTDNTFVSGNCDVVIGIVNNTVYDPLQPELDSGGGSGGGQIYEGKLTAEGLRFGIVASRFNHALVDRLVEGAIDAIVRHGGREEDITLVRVPGSWEIPVAAGELARKEDIDAVIAIGVLIRGATPHFDYIASEVSKGLADLSLELRKPITFGVITADTLEQAIERAGTKHGNKGWEAALSAIEMANLFKSLR

SEQ ID NO: 7834 - protein, 1307 aa, Artificial Sequence
  SARS-CoV-2/Iceland/319/2020__EPI_ISL_417648 spike protein (1-1147)(K986P_V987P_T887W_A1020W) LumSynth construct
MFVFLVLLPLVSSQCVNLTTRTQLPPAYTNSFTRGVYYPDKVFRSSVLHSTQDLFLPFFSNVTWFHAIHVSGTNGTKRFDNPVLPFNDGVYFASTEKSNIIRGWIFGTTLDSKTQSLLIVNNATNVVIKVCEFQFCNDPFLGVYYHKNNKSWMESEFRVYSSANNCTFEYVSQPFLIDLEGKQGNFKNLREFVFKNIDGYFKIYSKHTPINLVRDLPQGFSALEPLVDLPIGINITRFQTLLALHRSYLTPGDSSSGWTAGAAAYYVGYLQPRTFLLKYNENGTITDAVDCALDPLSETKCTLKSFTVEKGIYQTSNFRVQPTESIVRFPNITNLCPFGEVFNATRFASVYAWNRKRISNCVADYSVLYNSASFSTFKCYGVSPTKLNDLCFTNVYADSFVIRGDEVRQIAPGQTGKIADYNYKLPDDFTGCVIAWNSNNLDSKVGGNYNYLYRLFRKSNLKPFERDISTEIYQAGSTPCNGVEGFNCYFPLQSYGFQPTNGVGYQPYRVVVLSFELLHAPATVCGPKKSTNLVKNKCVNFNFNGLTGTGVLTESNKKFLPFQQFGRDIADTTDAVRDPQTLEILDITPCSFGGVSVITPGTNTSNQVAVLYQGVNCTEVPVAIHADQLTPTWRVYSTGSNVFQTRAGCLIGAEHVNNSYECDIPIGAGICASYQTQTNSPRRARSVASQSIIAYTMSLGAENSVAYSNNSIAIPTNFTISVTTEILPVSMTKTSVDCTMYICGDSTECSNLLLQYGSFCTQLNRALTGIAVEQDKNTQEVFAQVKQIYKTPPIKDFGGFNFSQILPDPSKPSKRSFIEDLLFNKVTLADAGFIKQYGDCLGDIAARDLICAQKFNGLTVLPPLLTDEMIAQYTSALLAGTITSGWWFGAGAALQIPFAMQMAYRFNGIGVTQNVLYENQKLIANQFNSAIGKIQDSLSSTASALGKLQDVVNQNAQALNTLVKQLSSNFGAISSVLNDILSRLDPPEAEVQIDRLITGRLQSLQTYVTQQLIRAAEIRWSANLAATKMSECVLGQSKRVDFCGKGYHLMSFPQSAPHGVVFLHVTYVPAQEKNFTTAPAICHDGKAHFPREGVFVSNGTHWFVTQRNFYEPQIITTDNTFVSGNCDVVIGIVNNTVYDPLQPELDSGGGSGGGQIYEGKLTAEGLRFGIVASRFNHALVDRLVEGAIDAIVRHGGREEDITLVRVPGSWEIPVAAGELARKEDIDAVIAIGVLIRGATPHFDYIASEVSKGLADLSLELRKPITFGVITADTLEQAIERAGTKHGNKGWEAALSAIEMANLFKSLR

SEQ ID NO: 7835 - protein, 1307 aa, Artificial Sequence
  SARS-CoV-2/Congo/94/2020__EPI_ISL_417947 spike protein (1-1147)(K986P_V987P_T887W_A1020W) LumSynth construct
MFVFLVLLPLVSSQCVNLTTRTQLPPAYTNSFTRGVYYPDKVFRSSVLHSTQDLFLPFFSNVTWFHAIHVSGTNGTKRFDNPVLPFNDGVYFASTEKSNIIRGWIFGTTLDSKTQSLLIVNNATNVVIKVCEFQFCNDPFLGVYYHKNNKSWMESEFRVYSSANNCTFEYVSQPFLMDLEGKQGNFKNLREFVFKNIDGYFKIYSKHTPINLVRDLPQGFSALEPLVDLPIGINITRFQTLLALHRSYLTPGDSSSGWTAGAAAYYVGYLQPRTFLLKYNENGTITDAVDCALDPLSETKCTLKSFTVEKGIYQTSNFRVQPTESIVRFPNITNLCPFGEVFNATRFASVYAWNRKRISNCVADYSVLYNSASFSTFKCYGVSPTKLNDLCFTNVYADSFVIRGDEVRQIAPGQTGKIADYNYKLPDDFTGCVIAWNSNNLDSKVGGNYNYLYRLFRKSNLKPFERDISTEIYQAGSTPCNGVEGFNCYFPLQSYGFQPTNGVGYQPYRVVVLSFELLHAPATVCGPKKSTNLVKNKCVNFNFNGLTGTGVLTESNKKFLPFQQFGRDIADTTDAVRDPQTLEILDITPCSFGGVSVITPGTNTSNQVAVLYQGVNCTEVPVAIHADQLTPTWRVYSTGSNVFQTRAGCLIGAEHVNNSYECDIPIGAGICASYQTQTNSPRRARSVASQSIIAYTMSLGAENSVAYSNNSIAIPTNFTISVTTEILPVSMTKTSVDCTMYICGDSTECSNLLLQYGSFCTQLNRALTGIAVEQDKNTQEVFAQVKQIYKTPPIKDFGGFNFSQILPDPSKPSKRSFIEDILFNKVTLADAGFIKQYGDCLGDIAARDLICAQKFNGLTVLPPLLTDEMIAQYTSALLAGTITSGWWFGAGAALQIPFAMQMAYRFNGIGVTQNVLYENQKLIANQFNSAIGKIQDSLSSTASALGKLQDVVNQNAQALNTLVKQLSSNFGAISSVLNDILSRLDPPEAEVQIDRLITGRLQSLQTYVTQQLIRAAEIRWSANLAATKMSECVLGQSKRVDFCGKGYHLMSFPQSAPHGVVFLHVTYVPAQEKNFTTAPAICHDGKAHFPREGVFVSNGTHWFVTQRNFYEPQIITTDNTFVSGNCDVVIGIVNNTVYDPLQPELDSGGGSGGGQIYEGKLTAEGLRFGIVASRFNHALVDRLVEGAIDAIVRHGGREEDITLVRVPGSWEIPVAAGELARKEDIDAVIAIGVLIRGATPHFDYIASEVSKGLADLSLELRKPITFGVITADTLEQAIERAGTKHGNKGWEAALSAIEMANLFKSLR

SEQ ID NO: 7836 - protein, 1307 aa, Artificial Sequence
  SARS-CoV-2/Congo/158/2020__EPI_ISL_417950 spike protein (1-1147)(K986P_V987P_T887W_A1020W) LumSynth construct
MFVFLVLLPLVSSQCVNLTTRTQLPPAYTNSFTRGVYYPDKVFRSSVLHSTQDLFLPFFSNVTWFHAIHVSGTNGTKRFDNPVLPFNDGVYFASTEKSNIIRGWIFGTTLDSKTQSLLIVNNATNVVIKVCEFQFCNDPFLGVYYHKNNKSWMESEFRVYSSANNCTFEYVSQPFLMDLEGKQGNFKNLREFVFKNIDGYFKIYSKHTPINLVRDLPQGFSALEPLVDLPIGINITRFQTLLALHRSYLTPGDSSSGWTAGAAAYYVGYLQPRTFLLKYNENGTITDAVDCALDPLSETKCTLKSFTVEKGIYQTSNFRVQPTESIVRFPNITNLCPFGEVFNATRFASVYAWNRKRISNCVADYSVLYNSASFSTFKCYGVSPTKLNDLCFTNVYADSFVIRGDEVRQIAPGQTGKIADYNYKLPDDFTGCVIAWNSNNLDSKVGGNYNYLYRLFRKSNLKPFERDISTEIYQAGSTPCNGVEGFNCYFPLQSYGFQPTNGVGYQPYRVVVLSFELLHAPATVCGPKKSTNLVKNKCVNFNFNGLTGTGVLTESNKKFLPFQQFGRDIADTTDAVRDPQTLEILDITPCSFGGVSVITPGTNTSNQVAVLYQDVNCTEVPVAIHADQLTPTWRVYSTGSNVFQTRAGCLIGAEHVNNSYECDIPIGAGICASYQTQTNSPRRARSVASQSIIAYTMSLGAENSVAYSNNSIAIPTNFTISVTTEILPVSMTKTSVDCTMYICGDSTECSNLLLQYGSFCTQLNRALTGIAVEQDKNTQEVFAQVKQIYKTPPIKDFGGFNFSQILPDPSKPSKRSFIEDLLFNKVTLADAGFIKQYGDCLGDIAARDLICAQKFNGLTVLPPLLTDEMIAQYTSALLAGTITSGWWFGAGAALQIPFAMQMAYRFNGIGVTQNVLYENQKLIANQFNSAIGKIQDSLSSTASALGKLQDVVNQNAQALNTLVKQLSSNFGAISSVLNDILSRLDPPEAEVQIDRLITGRLQSLQTYVTQQLIRAAEIRWSANLAATKMSECVLGQSKRVDFCGKGYHLMSFPQSAPHGVVFLHVTYVPAQEKNFTTAPAICHDGKAHFPREGVFVSNGTHWFVTQRNFYEPQIITTDNTFLSGNCDVVIGIVNNTVYDPLQPELDSGGGSGGGQIYEGKLTAEGLRFGIVASRFNHALVDRLVEGAIDAIVRHGGREEDITLVRVPGSWEIPVAAGELARKEDIDAVIAIGVLIRGATPHFDYIASEVSKGLADLSLELRKPITFGVITADTLEQAIERAGTKHGNKGWEAALSAIEMANLFKSLR

SEQ ID NO: 7837 - protein, 1307 aa, Artificial Sequence
  SARS-CoV-2/USA/UT-00034/2020__EPI_ISL_417977 spike protein (1-1147)(K986P_V987P_T887W_A1020W) LumSynth construct
MFVFLVLLPLVSSQCVNLTTRTQLPPAYTNSFTRGVYYPDKVFRSSVLHSTQDLFLPFFSNVTWFHAIHVSGTNGTKRFDNPVLPFNDGVYFASTEKSNIIRGWIFGTTLDSKTQSLLIVNNATNVVIKVCEFQFCNDPFLGVYYYKNNKSWMESEFRVYSSANNCTFEYVSQPFLMDLEGKQGNFKNLREFVFKNIDGYFKIYSKHTPINLVRDLPQGFSALEPLVDLPIGINITRFQTLLALHRSYLTPGDSSSGWTAGAAAYYVGYLQPRTFLLKYNENGTITDAVDCALDPLSETKCTLKSFTVEKGIYQTSNFRVQPTESIVRFPNITNLCPFGEVFNATRFASVYAWNRKRISNCVADYSVLYNSASFSTFKCYGVSPTKLNDLCFTNVYADSFVIRGDEVRQIAPGQTGKIADYNYKLPDDFTGCVIAWNSNNLDSKVGGNYNYLYRLFRKSNLKPFERDISTEIYQAGSTPCNGVEGFNCYFPLQSYGFQPTNGVGYQPYRVVVLSFELLHAPATVCGPKKSTNLVKNKCVNFNFNGLTGTGVLTESNKKFLPFQQFGRDIADTTDAVRDPQTLEILDITPCSFGGVSVITPGTNTSNQVAVLYQGVNCTEVPVAIHADQLTPTWRVYSTGSNVFQTRAGCLIGAEHVNNSYECDIPIGAGICASYQTQTNSPRRARSVASQSIIAYTMSLGAENSVAYSNNSIAIPTNFTISVTTEILPVSMTKTSVDCTMYICGDSTECSNLLLQYGSFCTQLNRALTGIAVEQDKNTQEVFAQVKQIYKTPPIKDFGGFNFSQILPDPSKPSKRSFIEDLLFNKVTLADAGFIKQYGDCLGDIAARDLICAQKFNGLTVLPPLLTDEMIAQYTSALLAGTITSGWWFGAGAALQIPFAMQMAYRFNGIGVTQNVLYENQKLIANQFNSAIGKIQDSLSSTASALGKLQDVVNQNAQALNTLVKQLSSNFGAISSVLNDILSRLDPPEAEVQIDRLITGRLQSLQTYVTQQLIRAAEIRWSANLAATKMSECVLGQSKRVDFCGKGYHLMSFPQSAPHGVVFLHVTYVPAQEKNFTTAPAICHDGKAHFPREGVFVSNGTHWFVTQRNFYEPQIITTDNTFVSGNCDVVIGIVNNTVYDPLQPELDSGGGSGGGQIYEGKLTAEGLRFGIVASRFNHALVDRLVEGAIDAIVRHGGREEDITLVRVPGSWEIPVAAGELARKEDIDAVIAIGVLIRGATPHFDYIASEVSKGLADLSLELRKPITFGVITADTLEQAIERAGTKHGNKGWEAALSAIEMANLFKSLR

SEQ ID NO: 7838 - protein, 1307 aa, Artificial Sequence
  SARS-CoV-2/USA/UT-00033/2020__EPI_ISL_417976 spike protein (1-1147)(K986P_V987P_T887W_A1020W) LumSynth construct
MFVFLVLLPLVSSQCVNLTTRTQLPPAYTNSFTRGVYYPDKVFRSSVLHSTQDLFLPFFSNVTWFHAIHVSGTNGTKRFDNPVLPFNDGVYFASTEKSNIIRGWIFGTTLDSKTQSLLIVNNATNVVIKVCEFQFCNDPFLGVYYHKNNKSWMESEFRVYSSANNCTFEYVSQPFLMDLEGKQGNFKNLREFVFKNIDGYFKIYSKHTPINLVRDLPQGFSALEPLVDLPIGINITRFQTLLALHRSYLTPGDSSSGLTAGAAAYYVGYLQPRTFLLKYNENGTITDAVDCALDPLSETKCTLKSFTVEKGIYQTSNFRVQPTESIVRFPNITNLCPFGEVFNATRFASVYAWNRKRISNCVADYSVLYNSASFSTFKCYGVSPTKLNDLCFTNVYADSFVIRGDEVRQIAPGQTGKIADYNYKLPDDFTGCVIAWNSNNLDSKVGGNYNYLYRLFRKSNLKPFERDISTEIYQAGSTPCNGVEGFNCYFPLQSYGFQPTNGVGYQPYRVVVLSFELLHAPATVCGPKKSTNLVKNKCVNFNFNGLTGTGVLTESNKKFLPFQQFGRDIADTTDAVRDPQTLEILDITPCSFGGVSVITPGTNTSNQVAVLYQGVNCTEVPVAIHADQLTPTWRVYSTGSNVFQTRAGCLIGAEHVNNSYECDIPIGAGICASYQTQTNSPRRARSVASQSIIAYTMSLGAENSVAYSNNSIAIPTNFTISVTTEILPVSMTKTSVDCTMYICGDSTECSNLLLQYGSFCTQLNRALTGIAVEQDKNTQEVFAQVKQIYKTPPIKDFGGFNFSQILPDPSKPSKRSFIEDLLFNKVTLADAGFIKQYGDCLGDIAARDLICAQKFNGLTVLPPLLTDEMIAQYTSALLAGTITSGWWFGAGAALQIPFAMQMAYRFNGIGVTQNVLYENQKLIANQFNSAIGKIQDSLSSTASALGKLQDVVNQNAQALNTLVKQLSSNFGAISSVLNDILSRLDPPEAEVQIDRLITGRLQSLQTYVTQQLIRAAEIRWSANLAATKMSECVLGQSKRVDFCGKGYHLMSFPQSAPHGVVFLHVTYVPAQEKNFTTAPAICHDGKAHFPREGVFVSNGTHWFVTQRNFYEPQIITTDNTFVSGNCDVVIGIVNNTVYDPLQPELDSGGGSGGGQIYEGKLTAEGLRFGIVASRFNHALVDRLVEGAIDAIVRHGGREEDITLVRVPGSWEIPVAAGELARKEDIDAVIAIGVLIRGATPHFDYIASEVSKGLADLSLELRKPITFGVITADTLEQAIERAGTKHGNKGWEAALSAIEMANLFKSLR

SEQ ID NO: 7839 - protein, 1307 aa, Artificial Sequence
  SARS-CoV-2/USA/WI-13/2020__EPI_ISL_417516 spike protein (1-1147)(K986P_V987P_T887W_A1020W) LumSynth construct
MFVFLVLLPLVSSQCVNLTTRTQLPPAYTNSFTRGVYYPDKVFRSSVLHSTQDLFLPFFSNVTWFHAIHVSGTNGTKRFDNPVLPFNDGVYFASTEKSNIIRGWIFGTTLDSKTQSLLIVNNATNVVIKVCEFQFCNDPFLGVYYHKNNKSWMESEFRVYSSANNCTFEYVSQPFLMDLEGKQGNFKNLREFVFKNIDGYFKIYSKHTPINLVRDLPQGFSALEPLVDLPIGINITRFQTLLALHRSYLTPGDSSSGWTAGAAAYYVGYLQPRTFLLKYNENGTITDAVDCALDPLSETKCTLKSFTVEKGIYQTSNFRVLPTESIVRFPNITNLCPFGEVFNATRFASVYAWNRKRISNCVADYSVLYNSASFSTFKCYGVSPTKLNDLCFTNVYADSFVIRGDEVRQIAPGQTGKIADYNYKLPDDFTGCVIAWNSNNLDSKVGGNYNYLYRLFRKSNLKPFERDISTEIYQAGSTPCNGVEGFNCYFPLQSYGFQPTNGVGYQPYRVVVLSFELLHAPATVCGPKKSTNLVKNKCVNFNFNGLTGTGVLTESNKKFLPFQQFGRDIADTTDAVRDPQTLEILDITPCSFGGVSVITPGTNTSNQVAVLYQGVNCTEVPVAIHADQLTPTWRVYSTGSNVFQTRAGCLIGAEHVNNSYECDIPIGAGICASYQTQTNSPRRARSVASQSIIAYTMSLGAENSVAYSNNSIAIPTNFTISVTTEILPVSMTKTSVDCTMYICGDSTECSNLLLQYGSFCTQLNRALTGIAVEQDKNTQEVFAQVKQIYKTPPIKDFGGFNFSQILPDPSKPSKRSFIEDLLFNKVTLADAGFIKQYGDCLGDIAARDLICAQKFNGLTVLPPLLTDEMIAQYTSALLAGTITSGWWFGAGAALQIPFAMQMAYRFNGIGVTQNVLYENQKLIANQFNSAIGKIQDSLSSTASALGKLQDVVNQNAQALNTLVKQLSSNFGAISSVLNDILSRLDPPEAEVQIDRLITGRLQSLQTYVTQQLIRAAEIRWSANLAATKMSECVLGQSKRVDFCGKGYHLMSFPQSAPHGVVFLHVTYVPAQEKNFTTAPAICHDGKAHFPREGVFVSNGTHWFVTQRNFYEPQIITTDNTFVSGNCDVVIGIVNNTVYDPLQPELDSGGGSGGGQIYEGKLTAEGLRFGIVASRFNHALVDRLVEGAIDAIVRHGGREEDITLVRVPGSWEIPVAAGELARKEDIDAVIAIGVLIRGATPHFDYIASEVSKGLADLSLELRKPITFGVITADTLEQAIERAGTKHGNKGWEAALSAIEMANLFKSLR

SEQ ID NO: 7840 - protein, 1306 aa, Artificial Sequence
  SARS-CoV-2/India/1-27/2020__EPI_ISL_413522 spike protein (1-1146)(K985P_V986P_T886W_A1019W) LumSynth construct
MFVFLVLLPLVSSQCVNLTTRTQLPPAYTNSFTRGVYYPDKVFRSSVLHSTQDLFLPFFSNVTWFHAIHVSGTNGTKRFDNPVLPFNDGVYFASTEKSNIIRGWIFGTTLDSKTQSLLIVNNATNVVIKVCEFQFCNDPFLGVYHKNNKSWMESEFRVYSSANNCTFEYVSQPFLMDLEGKQGNFKNLREFVFKNIDGYFKIYSKHTPINLVRDLPQGFSALEPLVDLPIGINITRFQTLLALHRSYLTPGDSSSGWTAGAAAYYVGYLQPRTFLLKYNENGTITDAVDCALDPLSETKCTLKSFTVEKGIYQTSNFRVQPTESIVRFPNITNLCPFGEVFNATRFASVYAWNRKRISNCVADYSVLYNSASFSTFKCYGVSPTKLNDLCFTNVYADSFVIRGDEVIQIAPGQTGKIADYNYKLPDDFTGCVIAWNSNNLDSKVGGNYNYLYRLFRKSNLKPFERDISTEIYQAGSTPCNGVEGFNCYFPLQSYGFQPTNGVGYQPYRVVVLSFELLHAPATVCGPKKSTNLVKNKCVNFNFNGLTGTGVLTESNKKFLPFQQFGRDIADTTDAVRDPQTLEILDITPCSFGGVSVITPGTNTSNQVAVLYQDVNCTEVPVAIHADQLTPTWRVYSTGSNVFQTRAGCLIGAEHVNNSYECDIPIGAGICASYQTQTNSPRRARSVASQSIIAYTMSLGAENSVAYSNNSIAIPTNFTISVTTEILPVSMTKTSVDCTMYICGDSTECSNLLLQYGSFCTQLNRALTGIAVEQDKNTQEVFAQVKQIYKTPPIKDFGGFNFSQILPDPSKPSKRSFIEDLLFNKVTLADAGFIKQYGDCLGDIAARDLICAQKFNGLTVLPPLLTDEMIAQYTSALLAGTITSGWWFGAGAALQIPFAMQMAYRFNGIGVTQNVLYENQKLIANQFNSAIGKIQDSLSSTASALGKLQDVVNQNAQALNTLVKQLSSNFGAISSVLNDILSRLDPPEAEVQIDRLITGRLQSLQTYVTQQLIRAAEIRWSANLAATKMSECVLGQSKRVDFCGKGYHLMSFPQSAPHGVVFLHVTYVPAQEKNFTTAPAICHDGKAHFPREGVFVSNGTHWFVTQRNFYEPQIITTDNTFVSGNCDVVIGIVNNTVYDPLQPELDSGGGSGGGQIYEGKLTAEGLRFGIVASRFNHALVDRLVEGAIDAIVRHGGREEDITLVRVPGSWEIPVAAGELARKEDIDAVIAIGVLIRGATPHFDYIASEVSKGLADLSLELRKPITFGVITADTLEQAIERAGTKHGNKGWEAALSAIEMANLFKSLR

SEQ ID NO: 7841 - protein, 1301 aa, Artificial Sequence
  SARS-CoV-2/pangolin/Guangxi/P4L/2017__EPI_ISL_410538 spike protein (1-1141)(K980P_V981P_T881W_A1014W) LumSynth construct
MFVFLFVLPLVSSQCVNLTTRTGIPPGYTNSSTRGVYYPDKVFRSSILHLTQDLFLPFFSNVTWFNTINYQGGFKKFDNPVLPFNDGVYFASTEKSNIIRGWIFGTTLDARTQSLLIVNNATNVVIKVCEFQFCTDPFLGVYYHNNNKTWVENEFRVYSSANNCTFEYISQPFLMDLEGKQGNFKNLREFVFKNVDGYFKIYSKHTPIDLVRDLPRGFAALEPLVDLPIGINITRFQTLLALHRSYLTPGNLESGWTTGAAAYYVGYLQQRTFLLSYNQNGTITDAVDCSLDPLSETKCTLKSLTVEKGIYQTSNFRVQPTISIVRFPNITNLCPFGEVFNASKFASVYAWNRKRISNCVADYSVLYNSTSFSTFKCYGVSPTKLNDLCFTNVYADSFVVKGDEVRQIAPGQTGVIADYNYKLPDDFTGCVIAWNSVKQDALTGGNYGYLYRLFRKSKLKPFERDISTEIYQAGSTPCNGQVGLNCYYPLERYGFHPTTGVNYQPFRVVVLSFELLNGPATVCGPKLSTTLVKDKCVNFNFNGLTGTGVLTTSKKQFLPFQQFGRDISDTTDAVRDPQTLEILDITPCSFGGVSVITPGTNTSNQVAVLYQDVNCTEVPMAIHAEQLTPAWRVYSAGANVFQTRAGCLVGAEHVNNSYECDIPVGAGICASYHSMSSLRSVNQRSIIAYTMSLGAENSVAYSNNSIAIPTNFTISVTTEILPVSMTKTSVDCTMYICGDSIECSNLLLQYGSFCTQLNRALTGIAVEQDKNTQEVFAQVKQIYKTPPIKDFGGFNFSQILPDPSKPSKRSFIEDLLFNKVTLADAGFIKQYGDCLGDIAARDLICAQKFNGLTVLPPLLTDEMIAQYTSALLAGTITSGWWFGAGAALQIPFAMQMAYRFNGIGVTQNVLYENQKLIANQFNSAIGKIQDSLSSTASALGKLQDVVNQNAQALNTLVKQLSSNFGAISSVLNDILSRLDPPEAEVQIDRLITGRLQSLQTYVTQQLIRAAEIRWSANLAATKMSECVLGQSKRVDFCGKGYHLMSFPQSAPHGVVFLHVTYVPAQEKNFTTAPAICHEGKAHFPREGVFVSNGTHWFITQRNFYEPQIITTDNTFVSGSCDVVIGIVNNTVYDPLQPELDSGGGSGGGQIYEGKLTAEGLRFGIVASRFNHALVDRLVEGAIDAIVRHGGREEDITLVRVPGSWEIPVAAGELARKEDIDAVIAIGVLIRGATPHFDYIASEVSKGLADLSLELRKPITFGVITADTLEQAIERAGTKHGNKGWEAALSAIEMANLFKSLR

SEQ ID NO: 7842 - protein, 1301 aa, Artificial Sequence
  SARS-CoV-2/pangolin/Guangxi/P5L/2017__EPI_ISL_410540 spike protein (1-1141)(K980P_V981P_T881W_A1014W) LumSynth construct
MFVFLFVLPLVSSQCVNLTTRTGIPPGYTNSSTRGVYYPDKVFRSSILHLTQDLFLPFFSNVTWFNTINYQGGFKKFDNPVLPFNDGVYFASTEKSNIIRGWIFGTTLDARTQSLLIVNNATNVVIKVCEFQFCTDPFLGVYYHNNNKTWVENEFRVYSSANNCTFEYISQPFLMDLEGKQGNFKNLREFVFKNVDGYFKIYSKHTPIDLVRDLPRGFAALEPLVDLPIGINITRFQTLLALHRSYLTPGKLESGWTTGAAAYYVGYLQQRTFLLSYNQNGTITDAVDCSLDPLSETKCTLKSLTVEKGIYQTSNFRVQPTISIVRFPNITNLCPFGEVFNASKFASVYAWNRKRISNCVADYSVLYNSTSFSTFKCYGVSPTKLNDLCFTNVYADSFVVKGDEVRQIAPGQTGVIADYNYKLPDDFTGCVIAWNSVKQDALTGGNYGYLYRLFRKSKLKPFERDISTEIYQAGSTPCNGQVGLNCYYPLERYGFHPTTGVNYQPFRVVVLSFELLNGPATVCGPKLSTTLVKDKCVNFNFNGLTGTGVLTTSKKQFLPFQQFGRDISDTTDAVRDPQTLEILDITPCSFGGVSVITPGTNTSNQVAVLYQDVNCTEVPMAIHAEQLTPAWRVYSAGANVFQTRAGCLVGAEHVNNSYECDIPVGAGICASYHSMSSFRSVNQRSIIAYTMSLGAENSVAYSNNSIAIPTNFTISVTTEILPVSMTKTSVDCTMYICGDSIECSNLLLQYGSFCTQLNRALTGIAVEQDKNTQEVFAQVKQIYKTPPIKDFGGFNFSQILPDPSKPSKRSFIEDLLFNKVTLADAGFIKQYGDCLGDIAARDLICAQKFNGLTVLPPLLTDEMIAQYTSALLAGTITSGWWFGAGAALQIPFAMQMAYRFNGIGVTQNVLYENQKLIANQFNSAIGKIQDSLSSTASALGKLQDVVNQNAQALNTLVKQLSSNFGAISSVLNDILSRLDPPEAEVQIDRLITGRLQSLQTYVTQQLIRAAEIRWSANLAATKMSECVLGQSKRVDFCGKGYHLMSFPQSAPHGVVFLHVTYVPAQEKNFTTAPAICHEGKAHFPREGVFVSNGTHWFITQRNFYEPQIITTDNTFVSGSCDVVIGIVNNTVYDPLQPELDSGGGSGGGQIYEGKLTAEGLRFGIVASRFNHALVDRLVEGAIDAIVRHGGREEDITLVRVPGSWEIPVAAGELARKEDIDAVIAIGVLIRGATPHFDYIASEVSKGLADLSLELRKPITFGVITADTLEQAIERAGTKHGNKGWEAALSAIEMANLFKSLR

SEQ ID NO: 7843 - protein, 1301 aa, Artificial Sequence
  SARS-CoV-2/pangolin/Guangxi/P5E/2017__EPI_ISL_410541 spike protein (1-1141)(K980P_V981P_T881W_A1014W) LumSynth construct
MFVFLFVLPLVSSQCVNLTTRTGIPPGYTNSSTRGVYYPDKVFRSSILHLTQDLFLPFFSNVTWFNTITYQGGSKKFDNPVLPFNDGVYFASTEKSNIIRGWIFGTTLDARTQSLLIVNNATNVVIKVCEFQFCTDPFLGVYYHNNNKTWVENEFRVYSSANNCTFEYISQPFLMDLEGKQGNFKNLREFVFKNVDGYFKIYSKHTPIDLVRDLPRGFAALEPLVDLPIGINITRFQTLLALHRSYLTPGKLESGWTTGAAAYYVGYLQQRTFLLSYNQNGTITDAVDCSLDPLSETKCTLKSLTVEKGIYQTSNFRVQPTISIVRFPNITNLCPFGEVFNASKFASVYAWNRKRISNCVADYSVLYNSTSFSTFKCYGVSPTKLNDLCFTNVYADSFVVKGDEVRQIAPGQTGVIADYNYKLPDDFTGCVIAWNSVKQDALTGDNYGYLYRLFRKSKLKPFERDISTEIYQAGSTPCNGQVGLNCYYPLERYGFHPTTGVNYQPFRVVVLSFELLNGPATVCGPKLSTTLVKDKCVNFNFNGLTGTGVLTTSKKQFLPFQQFGRDISDTTDAVRDPQTLEILDITPCSFGGVSVITPGTNTSNQVAVLYQDVNCTEVPMAIHAEQLTPAWRVYSAGANVFQTRAGCLVGAEHVNNSYECDIPVGAGICASYHSMSSFRSVNQRSIIAYTMSLGAENSVAYSNNSIAIPTNFTISVTTEILPVSMTKTSVDCTMYICGDSIECSNLLLQYGSFCTQLNRALTGIAVEQDKNTQEVFAQVKQIYKTPPIKDFGGFNFSQILPDPSKPSKRSFIEDLLFNKVTLADAGFIKQYGDCLGDIAARDLICAQKFNGLTVLPPLLTDEMIAQYTSALLAGTITSGWWFGAGAALQIPFAMQMAYRFNGIGVTQNVLYENQKLIANQFNSAIGKIQDSLSSTASALGKLQDVVNQNAQALNTLVKQLSSNFGAISSVLNDILSRLDPPEAEVQIDRLITGRLQSLQTYVTQQLIRAAEIRWSANLAATKMSECVLGQSKRVDFCGKGYHLMSFPQSAPHGVVFLHVTYVPAQEKNFTTAPAICHEGKAHFPREGVFVSNGTHWFITQRNFYEPQIITTDNTFVSGSCDVVIGIVNNTVYDPLQPELDSGGGSGGGQIYEGKLTAEGLRFGIVASRFNHALVDRLVEGAIDAIVRHGGREEDITLVRVPGSWEIPVAAGELARKEDIDAVIAIGVLIRGATPHFDYIASEVSKGLADLSLELRKPITFGVITADTLEQAIERAGTKHGNKGWEAALSAIEMANLFKSLR

SEQ ID NO: 7844 - protein, 1299 aa, Artificial Sequence
  SARS-CoV-2/pangolin/Guangxi/P1E/2017__EPI_ISL_410539 spike protein (1-1139)(K978P_V979P_T879W_A1012W) LumSynth construct
MFVFLFVLPLVSSQCVNLTTRTGIQPGYTNSSTRGVYYPDKVFRSSILHLTQDLFLPFFSNVTWFNTINYQGGFKKFDNPVLPFNDGVYFASTEKSNIIRGWIFGTTLDARTQSLLIVNNATNVVIKVCEFQFCTDPFLGVYYHNNNKTWVENEFRVYSSANNCTFEYISQPFLMDLEGKQGNFKNLREFVFKNVDGYFKIYSKHTPIDLVRDLPRGFAALEPLVDLPIGINITRFQTLLALHRSYLTPGKLESGWTTGAAAYYVGYLQQRTFLLSYNQNGTITDAVDCSLDPLSETKCTLKSLTVEKGIYQTSNFRVQPTISIVRFPNITNLCPFGEVFNASKFASVYAWNRKRISNCVADYSVLYNSTSFSTFKCYGVSPTKLNDLCFTNVYADSFVVKGDEVRQIAPGQTGVIADYNYKLPDDFTGCVIAWNSVKQDALTGGNYLYRLFRKSKLKPFERDISTEIYQAGSTPCNGQVGLNCYYPLERYGFHPTTGVNYQPFRVVVLSFELLNGPATVCGPKLSTTLVKDKCVNFNFNGLTGTGVLTTSKKQFLPFQQFGRDISDTTDAVRDPQTLEILDITPCSFGGVSVITPGTNTSNQVAVLYQDVNCTEVPMAIHAEQLTPAWRVYSAGANVFQTRAGCLVGAEHVNNSYECDIPVGAGICASYHSMSSLRSVNQRSIIAYTMSLGAENSVAYSNNSIAIPTNFTISVTTEILPVSMTKTSVDCTMYICGDSIECSNLLLQYGSFCTQLNRALTGIAVEQDKNTQEVFAQVKQIYKTPPIKDFGGFNFSQILPDPSKPSKRSFIEDLLFNKVTLADAGFIKQYGDCLGDIAARDLICAQKFNGLTVLPPLLTDEMIAQYTSALLAGTITSGWWFGAGAALQIPFAMQMAYRFNGIGVTQNVLYENQKLIANQFNSAIGKIQDSLSSTASALGKLQDVVNQNAQALNTLVKQLSSNFGAISSVLNDILSRLDPPEAEVQIDRLITGRLQSLQTYVTQQLIRAAEIRWSANLAATKMSECVLGQSKRVDFCGKGYHLMSFPQSAPHGVVFLHVTYVPAQEKNFTTAPAICHEGKAHFPREGVFVSNGTHWFITQRNFYEPQIITTDNTFVSGSCDVVIGIVNNTVYDPLQPELDSGGGSGGGQIYEGKLTAEGLRFGIVASRFNHALVDRLVEGAIDAIVRHGGREEDITLVRVPGSWEIPVAAGELARKEDIDAVIAIGVLIRGATPHFDYIASEVSKGLADLSLELRKPITFGVITADTLEQAIERAGTKHGNKGWEAALSAIEMANLFKSLR

SEQ ID NO: 7845 - protein, 1307 aa, Artificial Sequence
  SARS-CoV-2/Wuhan/WIV05/2019__EPI_ISL_402128 spike protein (1-1147)(K986P_V987P_P1069F) LumSynth construct
MFVFLVLLPLVSSQCVNLTTRTQLPPAYTNSFTRGVYYPDKVFRSSVLHSTQDLFLPFFSNVTWFHAIHVSGTNGTKRFDNPVLPFNDGVYFASTEKSNIIRGWIFGTTLDSKTQSLLIVNNATNVVIKVCEFQFCNDPFLGVYYHKNNKSWMESEFRVYSSANNCTFEYVSQPFLMDLEGKQGNFKNLREFVFKNIDGYFKIYSKHTPINLVRDLPQGFSALEPLVDLPIGINITRFQTLLALHRSYLTPGDSSSGWTAGAAAYYVGYLQPRTFLLKYNENGTITDAVDCALDPLSETKCTLKSFTVEKGIYQTSNFRVQPTESIVRFPNITNLCPFGEVFNATRFASVYAWNRKRISNCVADYSVLYNSASFSTFKCYGVSPTKLNDLCFTNVYADSFVIRGDEVRQIAPGQTGKIADYNYKLPDDFTGCVIAWNSNNLDSKVGGNYNYLYRLFRKSNLKPFERDISTEIYQAGSTPCNGVEGFNCYFPLQSYGFQPTNGVGYQPYRVVVLSFELLHAPATVCGPKKSTNLVKNKCVNFNFNGLTGTGVLTESNKKFLPFQQFGRDIADTTDAVRDPQTLEILDITPCSFGGVSVITPGTNTSNQVAVLYQDVNCTEVPVAIHADQLTPTWRVYSTGSNVFQTRAGCLIGAEHVNNSYECDIPIGAGICASYQTQTNSPRRARSVASQSIIAYTMSLGAENSVAYSNNSIAIPTNFTISVTTEILPVSMTKTSVDCTMYICGDSTECSNLLLQYGSFCTQLNRALTGIAVEQDKNTQEVFAQVKQIYKTPPIKDFGGFNFSQILPDPSKPSKRSFIEDLLFNKVTLADAGFIKQYGDCLGDIAARDLICAQKFNGLTVLPPLLTDEMIAQYTSALLAGTITSGWTFGAGAALQIPFAMQMAYRFNGIGVTQNVLYENQKLIANQFNSAIGKIQDSLSSTASALGKLQDVVNQNAQALNTLVKQLSSNFGAISSVLNDILSRLDPPEAEVQIDRLITGRLQSLQTYVTQQLIRAAEIRASANLAATKMSECVLGQSKRVDFCGKGYHLMSFPQSAPHGVVFLHVTYVFAQEKNFTTAPAICHDGKAHFPREGVFVSNGTHWFVTQRNFYEPQIITTDNTFVSGNCDVVIGIVNNTVYDPLQPELDSGGGSGGGQIYEGKLTAEGLRFGIVASRFNHALVDRLVEGAIDAIVRHGGREEDITLVRVPGSWEIPVAAGELARKEDIDAVIAIGVLIRGATPHFDYIASEVSKGLADLSLELRKPITFGVITADTLEQAIERAGTKHGNKGWEAALSAIEMANLFKSLR

SEQ ID NO: 7846 - protein, 1303 aa, Artificial Sequence
  SARS-CoV-2/bat/Yunnan/RaTG13/2013__EPI_ISL_402131 spike protein (1-1143)(K982P_V983P_P1065F) LumSynth construct
MFVFLVLLPLVSSQCVNLTTRTQLPPAYTNSSTRGVYYPDKVFRSSVLHLTQDLFLPFFSNVTWFHAIHVSGTNGIKRFDNPVLPFNDGVYFASTEKSNIIRGWIFGTTLDSKTQSLLIVNNATNVVIKVCEFQFCNDPFLGVYYHKNNKSWMESEFRVYSSANNCTFEYVSQPFLMDLEGKQGNFKNLREFVFKNIDGYFKIYSKHTPINLVRDLPPGFSALEPLVDLPIGINITRFQTLLALHRSYLTPGDSSSGWTAGAAAYYVGYLQPRTFLLKYNENGTITDAVDCALDPLSETKCTLKSFTVEKGIYQTSNFRVQPTDSIVRFPNITNLCPFGEVFNATTFASVYAWNRKRISNCVADYSVLYNSTSFSTFKCYGVSPTKLNDLCFTNVYADSFVITGDEVRQIAPGQTGKIADYNYKLPDDFTGCVIAWNSKHIDAKEGGNFNYLYRLFRKANLKPFERDISTEIYQAGSKPCNGQTGLNCYYPLYRYGFYPTDGVGHQPYRVVVLSFELLNAPATVCGPKKSTNLVKNKCVNFNFNGLTGTGVLTESNKKFLPFQQFGRDIADTTDAVRDPQTLEILDITPCSFGGVSVITPGTNASNQVAVLYQDVNCTEVPVAIHADQLTPTWRVYSTGSNVFQTRAGCLIGAEHVNNSYECDIPIGAGICASYQTQTNSRSVASQSIIAYTMSLGAENSVAYSNNSIAIPTNFTISVTTEILPVSMTKTSVDCTMYICGDSTECSNLLLQYGSFCTQLNRALTGIAVEQDKNTQEVFAQVKQIYKTPPIKDFGGFNFSQILPDPSKPSKRSFIEDLLFNKVTLADAGFIKQYGDCLGDIAARDLICAQKFNGLTVLPPLLTDEMIAQYTSALLAGTITSGWTFGAGAALQIPFAMQMAYRFNGIGVTQNVLYENQKLIANQFNSAIGKIQDSLSSTASALGKLQDVVNQNAQALNTLVKQLSSNFGAISSVLNDILSRLDPPEAEVQIDRLITGRLQSLQTYVTQQLIRAAEIRASANLAATKMSECVLGQSKRVDFCGKGYHLMSFPQSAPHGVVFLHVTYVFAQEKNFTTAPAICHDGKAHFPREGVFVSNGTHWFVTQRNFYEPQIITTDNTFVSGSCDVVIGIVNNTVYDPLQPELDSGGGSGGGQIYEGKLTAEGLRFGIVASRFNHALVDRLVEGAIDAIVRHGGREEDITLVRVPGSWEIPVAAGELARKEDIDAVIAIGVLIRGATPHFDYIASEVSKGLADLSLELRKPITFGVITADTLEQAIERAGTKHGNKGWEAALSAIEMANLFKSLR

SEQ ID NO: 7847 - protein, 1307 aa, Artificial Sequence
  SARS-CoV-2/Wuhan/HBCDC-HB-01/2019__EPI_ISL_402132 spike protein (1-1147)(K986P_V987P_P1069F) LumSynth construct
MFVFLVLLPLVSSQCVNLTTRTQLPPAYTNSITRGVYYPDKVFRSSVLHSTQDLFLPFFSNVTWFHAIHVSGTNGTKRFDNPVLPFNDGVYFASTEKSNIIRGWIFGTTLDSKTQSLLIVNNATNVVIKVCEFQFCNDPFLGVYYHKNNKSWMESEFRVYSSANNCTFEYVSQPFLMDLEGKQGNFKNLREFVFKNIDGYFKIYSKHTPINLVRDLPQGFSALEPLVDLPIGINITRFQTLLALHRSYLTPGDSSSGWTAGAAAYYVGYLQPRTFLLKYNENGTITDAVDCALDPLSETKCTLKSFTVEKGIYQTSNFRVQPTESIVRFPNITNLCPFGEVFNATRFASVYAWNRKRISNCVADYSVLYNSASFSTFKCYGVSPTKLNDLCFTNVYADSFVIRGDEVRQIAPGQTGKIADYNYKLPDDFTGCVIAWNSNNLDSKVGGNYNYLYRLFRKSNLKPFERDISTEIYQAGSTPCNGVEGFNCYFPLQSYGFQPTNGVGYQPYRVVVLSFELLHAPATVCGPKKSTNLVKNKCVNFNFNGLTGTGVLTESNKKFLPFQQFGRDIADTTDAVRDPQTLEILDITPCSFGGVSVITPGTNTSNQVAVLYQDVNCTEVPVAIHADQLTPTWRVYSTGSNVFQTRAGCLIGAEHVNNSYECDIPIGAGICASYQTQTNSPRRARSVASQSIIAYTMSLGAENSVAYSNNSIAIPTNFTISVTTEILPVSMTKTSVDCTMYICGDSTECSNLLLQYGSFCTQLNRALTGIAVEQDKNTQEVFAQVKQIYKTPPIKDFGGFNFSQILPDPSKPSKRSFIEDLLFNKVTLADAGFIKQYGDCLGDIAARDLICAQKFNGLTVLPPLLTDEMIAQYTSALLAGTITSGWTFGAGAALQIPFAMQMAYRFNGIGVTQNVLYENQKLIANQFNSAIGKIQDSLSSTASALGKLQDVVNQNAQALNTLVKQLSSNFGAISSVLNDILSRLDPPEAEVQIDRLITGRLQSLQTYVTQQLIRAAEIRASANLAATKMSECVLGQSKRVDFCGKGYHLMSFPQSAPHGVVFLHVTYVFAQEKNFTTAPAICHDGKAHFPREGVFVSNGTHWFVTQRNFYEPQIITTDNTFVSGNCDVVIGIVNNTVYDPLQPELDSGGGSGGGQIYEGKLTAEGLRFGIVASRFNHALVDRLVEGAIDAIVRHGGREEDITLVRVPGSWEIPVAAGELARKEDIDAVIAIGVLIRGATPHFDYIASEVSKGLADLSLELRKPITFGVITADTLEQAIERAGTKHGNKGWEAALSAIEMANLFKSLR

SEQ ID NO: 7848 - protein, 1307 aa, Artificial Sequence
  SARS-CoV-2/Guangdong/20SF028/2020__EPI_ISL_403936 spike protein (1-1147)(K986P_V987P_P1069F) LumSynth construct
MFVFLVLLPLVSSQCVNLTTRTQLPPAYTNSFTRGVYYPDKVFRSSVLYSTQDLFLPFFSNVTWFHAIHVSGTNGTKRFDNPVLPFNDGVYFASTEKSNIIRGWIFGTTLDSKTQSLLIVNNATNVVIKVCEFQFCNDPFLGVYYHKNNKSWMESEFRVYSSANNCTFEYVSQPFLMDLEGKQGNFKNLREFVFKNIDGYFKIYSKHTPINLVRDLPQGFSALEPLVDLPIGINITRFQTLLALHRSYLTPGDSSSGWTAGAAAYYVGYLQPRTFLLKYNENGTITDAVDCALDPLSETKCTLKSFTVEKGIYQTSNFRVQPTESIVRFPNITNLCPFGEVFNATRFASVYAWNRKRISNCVADYSVLYNSASFSTFKCYGVSPTKLNDLCFTNVYADSFVIRGDEVRQIAPGQTGKIADYNYKLPDDFTGCVIAWNSNNLDSKVGGNYNYLYRLFRKSNLKPFERDISTEIYQAGSTPCNGVEGFNCYFPLQSYGFQPTNGVGYQPYRVVVLSFELLHAPATVCGPKKSTNLVKNKCVNFNFNGLTGTGVLTESNKKFLPFQQFGRDIADTTDAVRDPQTLEILDITPCSFGGVSVITPGTNTSNQVAVLYQDVNCTEVPVAIHADQLTPTWRVYSTGSNVFQTRAGCLIGAEHVNNSYECDIPIGAGICASYQTQTNSPRRARSVASQSIIAYTMSLGAENSVAYSNNSIAIPTNFTISVTTEILPVSMTKTSVDCTMYICGDSTECSNLLLQYGSFCTQLNRALTGIAVEQDKNTQEVFAQVKQIYKTPPIKDFGGFNFSQILPDPSKPSKRSFIEDLLFNKVTLADAGFIKQYGDCLGDIAARDLICAQKFNGLTVLPPLLTDEMIAQYTSALLAGTITSGWTFGAGAALQIPFAMQMAYRFNGIGVTQNVLYENQKLIANQFNSAIGKIQDSLSSTASALGKLQDVVNQNAQALNTLVKQLSSNFGAISSVLNDILSRLDPPEAEVQIDRLITGRLQSLQTYVTQQLIRAAEIRASANLAATKMSECVLGQSKRVDFCGKGYHLMSFPQSAPHGVVFLHVTYVFAQEKNFTTAPAICHDGKAHFPREGVFVSNGTHWFVTQRNFYEPQIITTDNTFVSGNCDVVIGIVNNTVYDPLQPELDSGGGSGGGQIYEGKLTAEGLRFGIVASRFNHALVDRLVEGAIDAIVRHGGREEDITLVRVPGSWEIPVAAGELARKEDIDAVIAIGVLIRGATPHFDYIASEVSKGLADLSLELRKPITFGVITADTLEQAIERAGTKHGNKGWEAALSAIEMANLFKSLR

SEQ ID NO: 7849 - protein, 1307 aa, Artificial Sequence
  SARS-CoV-2/Shenzhen/SZTH-001/2020__EPI_ISL_406592 spike protein (1-1147)(K986P_V987P_P1069F) LumSynth construct
MFVFLVLLPLVSSQCVNLTTRTQLPPAYTNSFTRGVYYPDKVFRSSVLHSTQDLFLPFFSNVTWFHAIHVSGTNGTKRFDNPVLPFNDGVYFASTEKSNIIRGWIFGTTLDSKTQSLLIVNNATNVVIKVCEFQFCNDPFLGVYYHKNNKSWMESEFRVYSSANNCTFEYVSQPFLMDLEGKQGNFKNLREFVFKNIDGYFKIYSKHTPINLVRDLPQGFSALEPLVDLPIGINITRFQTLLALHRSYLTPGDSSSGWTAGAAAYYVGYLQPRTFLLKYNENGTITDAVDCALDPLSETKCTLKSFTVEKGIYQTSNFRVQPTESIVRFPNITNLCPFGEVFNATRFASVYAWNRKRISNCVADYSVLYNSASFSTFKCYGVSPTKLNDLCFTNVYADSFVIRGDEVRQIAPGQTGKIADYNYKLPDDFTGCVIAWNSNNLDSKVGGNYNYLYRLFRKSNLKPFERDISTEIYQAGSTPCNGVEGFNCYFPLQSYGFQPTNGVGYQPYRVVVLSFELLHAPATVCGPKKSTNLVKNKCVNFNFNGLTGTGVLTESNKKFLPFQQFGRDIADTTDAVRDPQTLEILDITPCSFGGVSVITPGTNTSNQVAVLYQDVNCTEVPVAIHADQLTPTWRVYSTGSNVFQTRAGCLIGAEHVNNSYECDIPIGAGICASYQTQTNSPRRARSVASQSIIAYTMSLGAENSVAYSNNSIAIPTNFTISVTTEILPVSMTKTSVDCTMYICGDSTECSNLLLQYGSFCTQLNRALTGIAVEQDKNTQEVFAQVKQIYKTPPIKDFGGFNFSQILPDPSKPSKRSFIEDLLFNKVTLADAGFIKQYGDCLGDIAARDLICAQKFNGLTVLPPLLTDEMIAQYTSALLAGTITSGWTFGAGAALQIPFAMQMAYRFNGIGVTQNVLYENQKLIANQFNSAIGKIQDSLSSTASALGKLQDVVNQNAQALNTLVKQLSSNFGAISSVLNDILSRLDPPEAEVQIDRLITGRLQSLQTYVTQQLIRAAEIRASANLAATKMSECVLGQSKRVDFCGKGYHLMSFPQSAPHGVVFLHVTYVFAQEKNFTTAPAICHDGKAHFPREGVFVSNGTHWFVTQRNFYEPQIITTDNTFVSGNCDVLIGIVNNTVYDPLQPELDSGGGSGGGQIYEGKLTAEGLRFGIVASRFNHALVDRLVEGAIDAIVRHGGREEDITLVRVPGSWEIPVAAGELARKEDIDAVIAIGVLIRGATPHFDYIASEVSKGLADLSLELRKPITFGVITADTLEQAIERAGTKHGNKGWEAALSAIEMANLFKSLR

SEQ ID NO: 7850 - protein, 1307 aa, Artificial Sequence
  SARS-CoV-2/Shenzhen/SZTH-004/2020__EPI_ISL_406595 spike protein (1-1147)(K986P_V987P_P1069F) LumSynth construct
MFVFLVLLPLVSSQCVNLTTRTQLPPAYTNSFTRGVYYPDKVFRSSVLHSTQDLFLPFFSNVTWFHAIHVSGTNGTKRFDNPVLPFNDGVYFASTEKSNIIRGWIFGTTLDSKTQSLLIVNNATNVVIKVCEFQFCNDPFLGVYYHKNNKSWMESEFRVYSSANNCTFEYVSQPFLMDLEGKQGNFKNLREFVFKNIDGYFKIYSKHTPINLVRDLPQGFSALEPLVDLPIGINITRFQTLLALHRSYLTPGDSSSGWTAGAAAYYVGYLQPRTFLLKYNENGTITDAVDCALDPLSETKCTLKSFTVEKGIYQTSNFRVQPTESIVRFPNITNLCPFGEVFNATRFASVYAWDRKRISNCVAYYSVLYNSASFSTFKCYGVSPTKLNDLCFTNVYADSFVIRGDEVRQIAPGQTGKIADYNYKLPDDFTGCVIAWNSNNLDSKVGGNYNYLYRLFRKSNLKPFERDISTEIYQAGSTPCNGVEGFNCYFPLQSYGFQPTNGVGYQPYRVVVLSFELLHAPATVCGPKKSTNLVKNKCVNFNFNGLTGTGVLTESNKKFLPFQQFGRDIADTTDAVRDPQTLEILDITPCSFGGVSVITPGTNTSNQVAVLYQDVNCTEVPVAIHADQLTPTWRVYSTGSNVFQTRAGCLIGAEHVNNSYECDIPIGAGICASYQTQTNSPRRARSVASQSIIAYTMSLGAENSVAYSNNSIAIPTNFTISVTTEILPVSMTKTSVDCTMYICGDSTECSNLLLQYGSFCTQLNRALTGIAVEQDKNTQEVFAQVKQIYKTPPIKDFGGFNFSQILPDPSKPSKRSFIEDLLFNKVTLADAGFIKQYGDCLGDIAARDLICAQKFNGLTVLPPLLTDEMIAQYTSALLAGTITSGWTFGAGAALQIPFAMQMAYRFNGIGVTQNVLYENQKLIANQFNSAIGKIQDSLSSTASALGKLQDVVNQNAQALNTLVKQLSSNFGAISSVLNDILSRLDPPEAEVQIDRLITGRLQSLQTYVTQQLIRAAEIRASANLAATKMSECVLGQSKRVDFCGKGYHLMSFPQSAPHGVVFLHVTYVFAQEKNFTTAPAICHDGKAHFPREGVFVSNGTHWFVTQRNFYEPQIITTDNTFVSGNCDVVIGIVNNTVYDPLQPELDSGGGSGGGQIYEGKLTAEGLRFGIVASRFNHALVDRLVEGAIDAIVRHGGREEDITLVRVPGSWEIPVAAGELARKEDIDAVIAIGVLIRGATPHFDYIASEVSKGLADLSLELRKPITFGVITADTLEQAIERAGTKHGNKGWEAALSAIEMANLFKSLR

SEQ ID NO: 7851 - protein, 1307 aa, Artificial Sequence
  SARS-CoV-2/France/IDF0372/2020__EPI_ISL_406596 spike protein (1-1147)(K986P_V987P_P1069F) LumSynth construct
MFVFLVLLPLVSSQCVNLTTRTQLPPAYTNSFTRGVYYPDKVFRSSVLHSTQDLFLPFFSNVTWFHAIHVSGTNGTKRFDNPVLPFNDGVYFASTEKSNIIRGWIFGTTLDSKTQSLLIVNNATNVVIKVCEFQFCNDPFLGVYYHKNNKSWMESEFRVYSSANNCTFEYVSQPFLMDLEGKQGNFKNLREFVFKNIDGYFKIYSKHTPINLVRDLPQGFSALEPLVDLPIGINITRFQTLLALHRSYLTPGDSSSGWTAGAAAYYVGYLQPRTFLLKYNENGTITDAVDCALDPLSETKCTLKSFTVEKGIYQTSNFRVQPTESIVRFPNITNLCPFGEVFNATRFASVYAWNRKRISNCVADYSFLYNSASFSTFKCYGVSPTKLNDLCFTNVYADSFVIRGDEVRQIAPGQTGKIADYNYKLPDDFTGCVIAWNSNNLDSKVGGNYNYLYRLFRKSNLKPFERDISTEIYQAGSTPCNGVEGFNCYFPLQSYGFQPTNGVGYQPYRVVVLSFELLHAPATVCGPKKSTNLVKNKCVNFNFNGLTGTGVLTESNKKFLPFQQFGRDIADTTDAVRDPQTLEILDITPCSFGGVSVITPGTNTSNQVAVLYQDVNCTEVPVAIHADQLTPTWRVYSTGSNVFQTRAGCLIGAEHVNNSYECDIPIGAGICASYQTQTNSPRRARSVASQSIIAYTMSLGAENSVAYSNNSIAIPTNFTISVTTEILPVSMTKTSVDCTMYICGDSTECSNLLLQYGSFCTQLNRALTGIAVEQDKNTQEVFAQVKQIYKTPPIKDFGGFNFSQILPDPSKPSKRSFIEDLLFNKVTLADAGFIKQYGDCLGDIAARDLICAQKFNGLTVLPPLLTDEMIAQYTSALLAGTITSGWTFGAGAALQIPFAMQMAYRFNGIGVTQNVLYENQKLIANQFNSAIGKIQDSLSSTASALGKLQDVVNQNAQALNTLVKQLSSNFGAISSVLNDILSRLDPPEAEVQIDRLITGRLQSLQTYVTQQLIRAAEIRASANLAATKMSECVLGQSKRVDFCGKGYHLMSFPQSAPHGVVFLHVTYVFAQEKNFTTAPAICHDGKAHFPREGVFVSNGTHWFVTQRNFYEPQIITTDNTFVSGNCDVVIGIVNNTVYDPLQPELDSGGGSGGGQIYEGKLTAEGLRFGIVASRFNHALVDRLVEGAIDAIVRHGGREEDITLVRVPGSWEIPVAAGELARKEDIDAVIAIGVLIRGATPHFDYIASEVSKGLADLSLELRKPITFGVITADTLEQAIERAGTKHGNKGWEAALSAIEMANLFKSLR

SEQ ID NO: 7852 - protein, 1307 aa, Artificial Sequence
  SARS-CoV-2/Australia/VIC01/2020__EPI_ISL_406844 spike protein (1-1147)(K986P_V987P_P1069F) LumSynth construct
MFVFLVLLPLVSSQCVNLTTRTQLPPAYTNSFTRGVYYPDKVFRSSVLHSTQDLFLPFFSNVTWFHAIHVSGTNGTKRFDNPVLPFNDGVYFASTEKSNIIRGWIFGTTLDSKTQSLLIVNNATNVVIKVCEFQFCNDPFLGVYYHKNNKSWMESEFRVYSSANNCTFEYVSQPFLMDLEGKQGNFKNLREFVFKNIDGYFKIYSKHTPINLVRDLPQGFSALEPLVDLPIGINITRFQTLLALHRRYLTPGDSSSGWTAGAAAYYVGYLQPRTFLLKYNENGTITDAVDCALDPLSETKCTLKSFTVEKGIYQTSNFRVQPTESIVRFPNITNLCPFGEVFNATRFASVYAWNRKRISNCVADYSVLYNSASFSTFKCYGVSPTKLNDLCFTNVYADSFVIRGDEVRQIAPGQTGKIADYNYKLPDDFTGCVIAWNSNNLDSKVGGNYNYLYRLFRKSNLKPFERDISTEIYQAGSTPCNGVEGFNCYFPLQSYGFQPTNGVGYQPYRVVVLSFELLHAPATVCGPKKSTNLVKNKCVNFNFNGLTGTGVLTESNKKFLPFQQFGRDIADTTDAVRDPQTLEILDITPCSFGGVSVITPGTNTSNQVAVLYQDVNCTEVPVAIHADQLTPTWRVYSTGSNVFQTRAGCLIGAEHVNNSYECDIPIGAGICASYQTQTNSPRRARSVASQSIIAYTMSLGAENSVAYSNNSIAIPTNFTISVTTEILPVSMTKTSVDCTMYICGDSTECSNLLLQYGSFCTQLNRALTGIAVEQDKNTQEVFAQVKQIYKTPPIKDFGGFNFSQILPDPSKPSKRSFIEDLLFNKVTLADAGFIKQYGDCLGDIAARDLICAQKFNGLTVLPPLLTDEMIAQYTSALLAGTITSGWTFGAGAALQIPFAMQMAYRFNGIGVTQNVLYENQKLIANQFNSAIGKIQDSLSSTASALGKLQDVVNQNAQALNTLVKQLSSNFGAISSVLNDILSRLDPPEAEVQIDRLITGRLQSLQTYVTQQLIRAAEIRASANLAATKMSECVLGQSKRVDFCGKGYHLMSFPQSAPHGVVFLHVTYVFAQEKNFTTAPAICHDGKAHFPREGVFVSNGTHWFVTQRNFYEPQIITTDNTFVSGNCDVVIGIVNNTVYDPLQPELDSGGGSGGGQIYEGKLTAEGLRFGIVASRFNHALVDRLVEGAIDAIVRHGGREEDITLVRVPGSWEIPVAAGELARKEDIDAVIAIGVLIRGATPHFDYIASEVSKGLADLSLELRKPITFGVITADTLEQAIERAGTKHGNKGWEAALSAIEMANLFKSLR

SEQ ID NO: 7853 - protein, 1307 aa, Artificial Sequence
  SARS-CoV-2/Germany/BavPat1/2020__EPI_ISL_406862 spike protein (1-1147)(K986P_V987P_P1069F) LumSynth construct
MFVFLVLLPLVSSQCVNLTTRTQLPPAYTNSFTRGVYYPDKVFRSSVLHSTQDLFLPFFSNVTWFHAIHVSGTNGTKRFDNPVLPFNDGVYFASTEKSNIIRGWIFGTTLDSKTQSLLIVNNATNVVIKVCEFQFCNDPFLGVYYHKNNKSWMESEFRVYSSANNCTFEYVSQPFLMDLEGKQGNFKNLREFVFKNIDGYFKIYSKHTPINLVRDLPQGFSALEPLVDLPIGINITRFQTLLALHRSYLTPGDSSSGWTAGAAAYYVGYLQPRTFLLKYNENGTITDAVDCALDPLSETKCTLKSFTVEKGIYQTSNFRVQPTESIVRFPNITNLCPFGEVFNATRFASVYAWNRKRISNCVADYSVLYNSASFSTFKCYGVSPTKLNDLCFTNVYADSFVIRGDEVRQIAPGQTGKIADYNYKLPDDFTGCVIAWNSNNLDSKVGGNYNYLYRLFRKSNLKPFERDISTEIYQAGSTPCNGVEGFNCYFPLQSYGFQPTNGVGYQPYRVVVLSFELLHAPATVCGPKKSTNLVKNKCVNFNFNGLTGTGVLTESNKKFLPFQQFGRDIADTTDAVRDPQTLEILDITPCSFGGVSVITPGTNTSNQVAVLYQGVNCTEVPVAIHADQLTPTWRVYSTGSNVFQTRAGCLIGAEHVNNSYECDIPIGAGICASYQTQTNSPRRARSVASQSIIAYTMSLGAENSVAYSNNSIAIPTNFTISVTTEILPVSMTKTSVDCTMYICGDSTECSNLLLQYGSFCTQLNRALTGIAVEQDKNTQEVFAQVKQIYKTPPIKDFGGFNFSQILPDPSKPSKRSFIEDLLFNKVTLADAGFIKQYGDCLGDIAARDLICAQKFNGLTVLPPLLTDEMIAQYTSALLAGTITSGWTFGAGAALQIPFAMQMAYRFNGIGVTQNVLYENQKLIANQFNSAIGKIQDSLSSTASALGKLQDVVNQNAQALNTLVKQLSSNFGAISSVLNDILSRLDPPEAEVQIDRLITGRLQSLQTYVTQQLIRAAEIRASANLAATKMSECVLGQSKRVDFCGKGYHLMSFPQSAPHGVVFLHVTYVFAQEKNFTTAPAICHDGKAHFPREGVFVSNGTHWFVTQRNFYEPQIITTDNTFVSGNCDVVIGIVNNTVYDPLQPELDSGGGSGGGQIYEGKLTAEGLRFGIVASRFNHALVDRLVEGAIDAIVRHGGREEDITLVRVPGSWEIPVAAGELARKEDIDAVIAIGVLIRGATPHFDYIASEVSKGLADLSLELRKPITFGVITADTLEQAIERAGTKHGNKGWEAALSAIEMANLFKSLR

SEQ ID NO: 7854 - protein, 1307 aa, Artificial Sequence
  SARS-CoV-2/Wuhan/HBCDC-HB-02/2020__EPI_ISL_412978 spike protein (1-1147)(K986P_V987P_P1069F) LumSynth construct
MFVFLVLLPLVSSQCVNLTTRTQLPPAYTNSFTRGVYYPDKVFRSSVLHSTQDLFLPFFSNVTWFHAIHVSGTNGTKRFDNPVLPFNDGVYFASTEKSNIIRGWIFGTTLDSKTQSLLIVNNATNVVIKVCEFQFCNDPFLGVYYHKNNKSWMESEFRVYSSANNCTFEYVSQPFLMDLEGKQGNFKNLREFVFKNIDGYFKIYSKHTPINLVRDLPQGFSALEPLVDLPIGINITRFQTLLALHRSYLTPGDSSSGWTAGAAAYYVGYLQPRTFLLKYNENGTITDAVDCALDPLSETKCTLKSFTVEKGIYQTSNFRVQPTESIVRFPNITNLCPFGEVFNATRFASVYAWNRKRISNCVADYSVLYNSASFSTFKCYGVSPTKLNDLCFTNVYADSFVIRGDEVRQIAPGQTGKIADYNYKLPDDFTGCVIAWNSNNLDSKVGGNYNYLYRLFRKSNLKPFERDISTEIYQAGSTPCNGVEGFNCYFPLQSYGFQPTNGVGYQPYRVVVLSFELLHAPATVCGPKKSTNLVKNKCVNFNFNGLTGTGVLTESNKKFLPFQQFGRDIADTTDAVRDPQTLEILDITPCSFGGVSVITPGTNTSNQVAVLYQDVNCTEVPVAIHADQLTPTWRVYSTGSNVFQTRAGCLIGAEHVNNSYECDIPIGAGICASYQTQTNSPRRARSVASQSIIAYTMSLGAENSVAYSNNSIAIPTNFTISVTTEILPVSMTKTSVDCTMYICGDSTECSNFLLQYGSFCTQLNRALTGIAVEQDKNTQEVFAQVKQIYKTPPIKDFGGFNFSQILPDPSKPSKRSFIEDLLFNKVTLADAGFIKQYGDCLGDIAARDLICAQKFNGLTVLPPLLTDEMIAQYTSALLAGTITSGWTFGAGAALQIPFAMQMAYRFNGIGVTQNVLYENQKLIANQFNSAIGKIQDSLSSTASALGKLQDVVNQNAQALNTLVKQLSSNFGAISSVLNDILSRLDPPEAEVQIDRLITGRLQSLQTYVTQQLIRAAEIRASANLAATKMSECVLGQSKRVDFCGKGYHLMSFPQSAPHGVVFLHVTYVFAQEKNFTTAPAICHDGKAHFPREGVFVSNGTHWFVTQRNFYEPQIITTDNTFVSGNCDVVIGIVNNTVYDPLQPELDSGGGSGGGQIYEGKLTAEGLRFGIVASRFNHALVDRLVEGAIDAIVRHGGREEDITLVRVPGSWEIPVAAGELARKEDIDAVIAIGVLIRGATPHFDYIASEVSKGLADLSLELRKPITFGVITADTLEQAIERAGTKHGNKGWEAALSAIEMANLFKSLR

SEQ ID NO: 7855 - protein, 1307 aa, Artificial Sequence
  SARS-CoV-2/Australia/QLD02/2020__EPI_ISL_407896 spike protein (1-1147)(K986P_V987P_P1069F) LumSynth construct
MFVFLVLLPLVSSQCVNLTTRTQLPPAYTNSFTRGVYYPDKVFRSSVLHSTQDLFLPFFSNVTWFHAIHVSGTNGTKRFDNPVLPFNDGVYFASTEKSNIIRGWIFGTTLDSKTQSLLIVNNATNVVIKVCEFQFCNDPFLGVYYHKNNKSWMESEFRVYSSANNCTFEYVSQPFLMDLEGKQGNFKNLREFVFKNIDGYFKIYSKHTPINLVRDLPQGFSALEPLVDLPIGINITRFQTLLALHRSYLTPGDSSSGWTAGAAAYYVGYLQPRTFLLKYNENGTITDAVDCALDPLSETKCTLKSFTVEKGIYQTSNFRVQPTESIVRFPNITNLCPFGEVFNATRFASVYAWNRKRISNCVADYSVLYNSASFSTFKCYGVSPTKLNDLCFTNVYADSFVIRGDEVRQIAPGQTGKIADYNYKLPDDFTGCVIAWNSNNLDSKVGGNYNYLYRLFRKSNLKPFERDISTEIYQAGSTPCNGVEGFNCYFPLQSYGFQPTNGVGYQPYRVVVLSFELLHAPATVCGPKKSTNLVKNKCVNFNFNGLTGTGVLTESNKKFLPFQQFGRDIADTTDAVRDPQTLEILDITPCSFGGVSVITPGTNTSNQVAVLYQDVNCTEVPVAIHADQLTPTWRVYSTGSNVFQTRAGCLIGAEHVNNSYECDIPIGAGICASYQTQTNSPRRARSVASQSIIAYTMSLGAENSVAYSNNSIAIPTNFTISVTTEILPVSMTKTSVDCTMYICGDSTECSNLLLQYGSFCTQLNRALTGIAVEQDKNTQEVFAQVKQIYKTPPIKDFGGFNFSQILPDPSKPSKRSFIEDLLFNKVTLADAGFIKQYGDCLGDIAARDLICAQKFNGLTVLPPLLTDEMIAQYTSALLAGTITSGWTFGAGAALQIPFAMQMAYRFNGIGVTQNVLYENQKLIANQFNSAIGKIQDSLSSTASALGKLQDVVNQNAQALNTLVKQLSSNFGAISSVLNDILSRLDPPEAEVQIDRLITGRLQSLQTYVTQQLIRAAEIRASANLAATKMSECVLGQSKRVDFCGKGYHLMSFPQSAPHGVVFLHVTYVFAQEKNFTTAPAICHDGKAHFPREGVFVSNGTHWFVTQRNFYEPQIITTDNTFVSGNCDVVIGIVNNTVYDPLQLELDSGGGSGGGQIYEGKLTAEGLRFGIVASRFNHALVDRLVEGAIDAIVRHGGREEDITLVRVPGSWEIPVAAGELARKEDIDAVIAIGVLIRGATPHFDYIASEVSKGLADLSLELRKPITFGVITADTLEQAIERAGTKHGNKGWEAALSAIEMANLFKSLR

SEQ ID NO: 7856 - protein, 1307 aa, Artificial Sequence
  SARS-CoV-2/India/1-31/2020__EPI_ISL_413523 spike protein (1-1147)(K986P_V987P_P1069F) LumSynth construct
MFVFLVLLPLVSSQCVNLTTRTQLPPAYTNSFTRGVYYPDKVFRSSVLHSTQDLFLPFFSNVTWFHAIHVSGTNGTKRFDNPVLPFNDGVYFASTEKSNIIRGWIFGTTLDSKTQSLLIVNNATNVVIKVCEFQFCNDPFLGVYYHKNNKSWMESEFRVYSSANNCTFEYVSQPFLMDLEGKQGNFKNLREFVFKNIDGYFKIYSKHTPINLVRDLPQGFSALEPLVDLPIGINITRFQTLLALHRSYLTPGDSSSGWTAGAAAYYVGYLQPRTFLLKYNENGTITDAVDCALDPLSETKCTLKSFTVEKGIYQTSNFRVQPTESIVRFPNITNLCPFGEVFNATRFASVYAWNRKRISNCVADYSVLYNSASFSTFKCYGVSPTKLNDLCFTNVYADSFVIRGDEVRQIAPGQTGKIADYNYKLPDDFTGCVIAWNSNNLDSKVGGNYNYLYRLFRKSNLKPFERDISTEIYQAGSTPCNGVEGFNCYFPLQSYGFQPTNGVGYQPYRVVVLSFELLHAPATVCGPKKSTNLVKNKCVNFNFNGLTGTGVLTESNKKFLPFQQFGRDIADTTDAVRDPQTLEILDITPCSFGGVSVITPGTNTSNQVAVLYQDVNCTEVPVAIHADQLTPTWRVYSTGSNVFQTRAGCLIGAEHVNNSYECDIPIGAGICASYQTQTNSPRRARSVASQSIIAYTMSLGAENSVAYSNNSIAIPTNFTISVTTEILPVSMTKTSVDCTMYICGDSTECSNLLLQYGSFCTQLNRALTGIAVEQDKNTQEVFAQVKQIYKTPPIKDFGGFNFSQILPDPSKPSKRSFIEDLLFNKVTLADAGFIKQYGDCLGDIAARDLICAQKFNGLTVLPPLLTDEMIAQYTSALLAGTITSGWTFGAGAALQIPFAMQMAYRFNGIGVTQNVLYENQKLIANQFNSVIGKIQDSLSSTASALGKLQDVVNQNAQALNTLVKQLSSNFGAISSVLNDILSRLDPPEAEVQIDRLITGRLQSLQTYVTQQLIRAAEIRASANLAATKMSECVLGQSKRVDFCGKGYHLMSFPQSAPHGVVFLHVTYVFAQEKNFTTAPAICHDGKAHFPREGVFVSNGTHWFVTQRNFYEPQIITTDNTFVSGNCDVVIGIVNNTVYDPLQPELDSGGGSGGGQIYEGKLTAEGLRFGIVASRFNHALVDRLVEGAIDAIVRHGGREEDITLVRVPGSWEIPVAAGELARKEDIDAVIAIGVLIRGATPHFDYIASEVSKGLADLSLELRKPITFGVITADTLEQAIERAGTKHGNKGWEAALSAIEMANLFKSLR

SEQ ID NO: 7857 - protein, 1307 aa, Artificial Sequence
  SARS-CoV-2/Guangdong/GD2020087-P0008/2020__EPI_ISL_413863 spike protein (1-1147)(K986P_V987P_P1069F) LumSynth construct
MFVFLVLLPLVSSQCVNLTTRTQLPPAYTNSFTRGVYYPDKVFRSSVLHSTQDLFLPFFSNVTWFHAIHVSGTNGTKRFDNPVLPFNDGVYFASTEKSNIIRGWIFGTTLDSKTQSLLIVNNATNVVIKVCEFQFCNDPFLGVYYHKNNKSWMESEFRVYSSANNCTFEYVSQPFLMDLEGKQGNFKNLREFVFKNIDGYFKIYSKHTPINLVRDLPQGFSALEPLVDLPIGINITRFQTLLALHRSYLTPGDSSSGWTAGAAAYYVGYLQPRTFLLKYNENGTITDAVDCALDPLSETKCTLKSFTVEKGIYQTSNFRVQPTESIVRFPNITNLCPFGEVFNATRFASVYAWNRKRISNCVADYSVLYNSASFSTFKCYGVSPTKLNDLCFTNVYADSFVIRGDEVREIAPGQTGKIADYNYKLPDDFTGCVIAWNSNNLDSKVGGNYNYLYRLFRKSNLKPFERDISTEIYQAGSTPCNGVEGFNCYFPLQSYGFQPTNGVGYQPYRVVVLSFELLHAPATVCGPKKSTNLVKNKCVNFNFNGLTGTGVLTESNKKFLPFQQFGRDIADTTDAVRDPQTLEILDITPCSFGGVSVITPGTNTSNQVAVLYQDVNCTEVPVAIHADQLTPTWRVYSTGSNVFQTRAGCLIGAEHVNNSYECDIPIGAGICASYQTQTNSPRRARSVASQSIIAYTMSLGAENSVAYSNNSIAIPTNFTISVTTEILPVSMTKTSVDCTMYICGDSTECSNLLLQYGSFCTQLNRALTGIAVEQDKNTQEVFAQVKQIYKTPPIKDFGGFNFSQILPDPSKPSKRSFIEDLLFNKVTLADAGFIKQYGDCLGDIAARDLICAQKFNGLTVLPPLLTDEMIAQYTSALLAGTITSGWTFGAGAALQIPFAMQMAYRFNGIGVTQNVLYENQKLIANQFNSAIGKIQDSLSSTASALGKLQDVVNQNAQALNTLVKQLSSNFGAISSVLNDILSRLDPPEAEVQIDRLITGRLQSLQTYVTQQLIRAAEIRASANLAATKMSECVLGQSKRVDFCGKGYHLMSFPQSAPHGVVFLHVTYVFAQEKNFTTAPAICHDGKAHFPREGVFVSNGTHWFVTQRNFYEPQIITTDNTFVSGNCDVVIGIVNNTVYDPLQPELDSGGGSGGGQIYEGKLTAEGLRFGIVASRFNHALVDRLVEGAIDAIVRHGGREEDITLVRVPGSWEIPVAAGELARKEDIDAVIAIGVLIRGATPHFDYIASEVSKGLADLSLELRKPITFGVITADTLEQAIERAGTKHGNKGWEAALSAIEMANLFKSLR

SEQ ID NO: 7858 - protein, 1307 aa, Artificial Sequence
  SARS-CoV-2/Sweden/01/2020__EPI_ISL_411951 spike protein (1-1147)(K986P_V987P_P1069F) LumSynth construct
MFVFLVLLPLVSSQCVNLTTRTQLPPAYTNSFTRGVYYPDKVFRSSVLHSTQDLFLPFFSNVTWFHAIHVSGTNGTKRFDNPVLPFNDGVYFASTEKSNIIRGWIFGTTLDSKTQSLLIVNNATNVVIKVCEFQFCNDPFLGVYYHKNNKSWMESEFRVYSSANNCTFEYVSQPFLMDLEGKQGNFKNLREFVFKNIDGYFKIYSKHTPINLVRDLPQGFSALEPLVDLPIGINITRFQTLLALHRSYLTPGDSSSGWTAGAAAYYVGYLQPRTFLLKYNENGTITDAVDCALDPLSETKCTLKSFTVEKGIYQTSNFRVQPTESIVRFPNITNLCPFGEVFNATRFASVYAWNRKRISNCVADYSVLYNSASFSTFKCYGVSPTKLNDLCFTNVYADSFVIRGDEVRQIAPGQTGKIADYNYKLPDDFTGCVIAWNSNNLDSKVGGNYNYLYRLFRKSNLKPFERDISTEIYQAGSTPCNGVEGFNCYFPLQSYGFQPTNGVGYQPYRVVVLSFELLHAPATVCGPKKSTNLVKNKCVNFNFNGLTGTGVLTESNKKFLPFQQFGRDIADTTDAVRDPQTLEILDITPCSFGGVSVITPGTNTSNQVAVLYQDVNCTEVPVAIHADQLTPTWRVYSTGSNVFQTRAGCLIGAEHVNNSYECDIPIGAGICASYQTQTNSPRRARSVASQSIIAYTMSLGAENSVAYSNNSIAIPTNFTISVTTEILPVSMTKTSVDCTMYICGDSTECSNLLLQYGSFCTQLNRALTGIAVEQDKNTQEVFAQVKQIYKTPPIKDCGGFNFSQILPDPSKPSKRSFIEDLLFNKVTLADAGFIKQYGDCLGDIAARDLICAQKFNGLTVLPPLLTDEMIAQYTSALLAGTITSGWTFGAGAALQIPFAMQMAYRFNGIGVTQNVLYENQKLIANQFNSAIGKIQDSLSSTASALGKLQDVVNQNAQALNTLVKQLSSNFGAISSVLNDILSRLDPPEAEVQIDRLITGRLQSLQTYVTQQLIRAAEIRASANLAATKMSECVLGQSKRVDFCGKGYHLMSFPQSAPHGVVFLHVTYVFAQEKNFTTAPAICHDGKAHFPREGVFVSNGTHWFVTQRNFYEPQIITTDNTFVSGNCDVVIGIVNNTVYDPLQPELDSGGGSGGGQIYEGKLTAEGLRFGIVASRFNHALVDRLVEGAIDAIVRHGGREEDITLVRVPGSWEIPVAAGELARKEDIDAVIAIGVLIRGATPHFDYIASEVSKGLADLSLELRKPITFGVITADTLEQAIERAGTKHGNKGWEAALSAIEMANLFKSLR

SEQ ID NO: 7859 - protein, 1307 aa, Artificial Sequence
  SARS-CoV-2/Tianmen/HBCDC-HB-07/2020__EPI_ISL_412983 spike protein (1-1147)(K986P_V987P_P1069F) LumSynth construct
MFVFLVLLPLVSSQCVNLTTRTQLPPAYTNSFTRGVYYPDKVFRSSVLHSTQDLFLPFFSNVTWFHAIHVSGTNGTKRFDNPVLPFNDGVYFASTEKSNIIRGWIFGTTLDSKTQSLLIVNNATNVVIKVCEFQFCNDPFLGVYYHKNNKSWMESEFRVYSSANNCTFEYVSQPFLMDLEGKQGNFKNLREFVFKNIDGYFKIYSKHTPINLVRDLPQGFSALEPLVDLPIGINITRFQTLLALHRSYLTPGDSSSGWTAGAAAYYVGYLQPRTFLLKYNENGTITDAVDCALDPLSETKCTLKSFTVEKGIYQTSNFRVQPTESIVRFPNITNLCPFGEVFNATRFASVYAWNRKRISNCVADYSVLYNSASFSTFKCYGVSPTKLNDLCFTNVYADSFVIRGDEVRQIAPGQTGKIADYNYKLPDDFTGCVIAWNSNNLDSKVGGNYNYLYRLFRKSNLKPFERDISTEIYQAGSTPCNGVEGFNCYFPLQSYGFQPTNGVGYQPYRVVVLSFELLHAPATVCGPKKSTNLVKNKCVNFNFNGLTGTGVLTESNKKFLPFQQFGRDIADTTDAVRDPQTLEILDITPCSFGGVSVITPGTNTSNQVAVLYQDLNCTEVPVAIHADQLTPTWRVYSTGSNVFQTRAGCLIGAEHVNNSYECDIPIGAGICASYQTQTNSPRRARSVASQSIIAYTMSLGAENSVAYSNNSIAIPTNFTISVTTEILPVSMTKTSVDCTMYICGDSTECSNLLLQYGSFCTQLNRALTGIAVEQDKNTQEVFAQVKQIYKTPPIKDFGGFNFSQILPDPSKPSKRSFIEDLLFNKVTLADAGFIKQYGDCLGDIAARDLICAQKFNGLTVLPPLLTDEMIAQYTSALLAGTITSGWTFGAGAALQIPFAMQMAYRFNGIGVTQNVLYENQKLIANQFNSAIGKIQDSLSSTASALGKLQDVVNQNAQALNTLVKQLSSNFGAISSVLNDILSRLDPPEAEVQIDRLITGRLQSLQTYVTQQLIRAAEIRASANLAATKMSECVLGQSKRVDFCGKGYHLMSFPQSAPHGVVFLHVTYVFAQEKNFTTAPAICHDGKAHFPREGVFVSNGTHWFVTQRNFYEPQIITTDNTFVSGNCDVVIGIVNNTVYDPLQPELDSGGGSGGGQIYEGKLTAEGLRFGIVASRFNHALVDRLVEGAIDAIVRHGGREEDITLVRVPGSWEIPVAAGELARKEDIDAVIAIGVLIRGATPHFDYIASEVSKGLADLSLELRKPITFGVITADTLEQAIERAGTKHGNKGWEAALSAIEMANLFKSLR

SEQ ID NO: 7860 - protein, 1307 aa, Artificial Sequence
  SARS-CoV-2/Hong Kong/case42_VM20002493/2020__EPI_ISL_414527 spike protein (1-1147)(K986P_V987P_P1069F) LumSynth construct
MFVFLVLLPLVSSQCVNLTTRTQLPPAYTNSFTRGVYYPDKVFRSSVLHSTQDLFLPFFSNVTWFHAIHVSGTNGTKRFDNPVLPFNDGVYFASTEKSNIIRGWIFGTTLDSKTQSLLIVNNATNVVIKVCEFQFCNDPFLGVYYHKNNKSWMESEFRVYSSANNCTFEYVSQPFLMDLEGKQGNFKNLREFVFKNIDGYFKIYSKHTPINLVRDLPQGFSALEPLVDLPIGINITRFQTLLALHRSYLTPGDSSSGWTAGAAAYYVGYLQPRTFLLKYNENGTITDAVDCALDPLSETKCTLKSFTVEKGIYQTSNFRVQPTESIVRFPNITNLCPFGEVFNATRFASVYAWNRKRISNCVADYSVLYNSASFSTFKCYGVSPTKLNDLCFTNVYADSFVIRGDEVRQIAPGQTGKIADYNYKLPDDFTGCVIAWNSNNLDSKVGGNYNYLYRLFRKSNLKPFERDISTEIYQAGSTPCNGVEGFNCYFPLQSYGFQPTNGVGYQPYRVVVLSFELLHAPATVCGPKKSTNLVKNKCVNFNFNGLTGTGVLTESNKKFLPFQQFGRDIADTTDAVRDPQTLEILDITPCSFGGVSVITPGTNTSNQVAVLYQDVNCTEVPVAIHADQLTPTWRVYSTGSNVFQTRAGCLIGAEHVNNSYECDIPIGAGICASYQTQTNSPRRARSVASQSIIAYTMSLGAENSVAYSNNSIAIPTNFAISVTTEILPVSMTKTSVDCTMYICGDSTECSNLLLQYGSFCTQLNRALTGIAVEQDKNTQEVFAQVKQIYKTPPIKDFGGFNFSQILPDPSKPSKRSFIEDLLFNKVTLADAGFIKQYGDCLGDIAARDLICAQKFNGLTVLPPLLTDEMIAQYTSALLAGTITSGWTFGAGAALQIPFAMQMAYRFNGIGVTQNVLYENQKLIANQFNSAIGKIQDSLSSTASALGKLQDVVNQNAQALNTLVKQLSSNFGAISSVLNDILSRLDPPEAEVQIDRLITGRLQSLQTYVTQQLIRAAEIRASANLAATKMSECVLGQSKRVDFCGKGYHLMSFPQSAPHGVVFLHVTYVFAQEKNFTTAPAICHDGKAHFPREGVFVSNGTHWFVTQRNFYEPQIITTDNTFVSGNCDVVIGIVNNTVYDPLQPELDSGGGSGGGQIYEGKLTAEGLRFGIVASRFNHALVDRLVEGAIDAIVRHGGREEDITLVRVPGSWEIPVAAGELARKEDIDAVIAIGVLIRGATPHFDYIASEVSKGLADLSLELRKPITFGVITADTLEQAIERAGTKHGNKGWEAALSAIEMANLFKSLR

SEQ ID NO: 7861 - protein, 1307 aa, Artificial Sequence
  SARS-CoV-2/USA/CruiseA-23/2020__EPI_ISL_414482 spike protein (1-1147)(K986P_V987P_P1069F) LumSynth construct
MFVFLVLLPLVSSQCVNLTTRTQLPPAYTNSFTRGVYYPDKVFRSSVLHSTQDLFLPFFSNVTWFHAIHVSGTNGTKRFDNPVLPFNDGVYFASTEKSNIIRGWIFGTTLDSKTQSLLIVNNATNVVIKVCEFQFCNDPFLGVYYHKNNKSWMESEFRVYSSANNCTFEYVSQPFLMDLEVKQGNFKNLREFVFKNIDGYFKIYSKHTPINLVRDLPQGFSALEPLVDLPIGINITRFQTLLALHRSYLTPGDSSSGWTAGAAAYYVGYLQPRTFLLKYNENGTITDAVDCALDPLSETKCTLKSFTVEKGIYQTSNFRVQPTESIVRFPNITNLCPFGEVFNATRFASVYAWNRKRISNCVADYSVLYNSASFSTFKCYGVSPTKLNDLCFTNVYADSFVIRGDEVRQIAPGQTGKIADYNYKLPDDFTGCVIAWNSNNLDSKVGGNYNYLYRLFRKSNLKPFERDISTEIYQAGSTPCNGVEGFNCYFPLQSYGFQPTNGVGYQPYRVVVLSFELLHAPATVCGPKKSTNLVKNKCVNFNFNGLTGTGVLTESNKKFLPFQQFGRDIADTTDAVRDPQTLEILDITPCSFGGVSVITPGTNTSNQVAVLYQDVNCTEVPVAIHADQLTPTWRVYSTGSNVFQTRAGCLIGAEHVNNSYECDIPIGAGICASYQTQTNSPRRARSVASQSIIAYTMSLGAENSVAYSNNSIAIPTNFTISVTTEILPVSMTKTSVDCTMYICGDSTECSNLLLQYGSFCTQLNRALTGIAVEQDKNTQEVFAQVKQIYKTPPIKDFGGFNFSQILPDPSKPSKRSFIEDLLFNKVTLADAGFIKQYGDCLGDIAARDLICAQKFNGLTVLPPLLTDEMIAQYTSALLAGTITSGWTFGAGAALQIPFAMQMAYRFNGIGVTQNVLYENQKLIANQFNSAIGKIQDSLSSTASALGKLQDVVNQNAQALNTLVKQLSSNFGAISSVLNDILSRLDPPEAEVQIDRLITGRLQSLQTYVTQQLIRAAEIRASANLAATKMSECVLGQSKRVDFCGKGYHLMSFPQSAPHGVVFLHVTYVFAQEKNFTTAPAICHDGKAHFPREGVFVSNGTHWFVTQRNFYEPQIITTDNTFVSGNCDVVIGIVNNTVYDPLQPELDSGGGSGGGQIYEGKLTAEGLRFGIVASRFNHALVDRLVEGAIDAIVRHGGREEDITLVRVPGSWEIPVAAGELARKEDIDAVIAIGVLIRGATPHFDYIASEVSKGLADLSLELRKPITFGVITADTLEQAIERAGTKHGNKGWEAALSAIEMANLFKSLR

SEQ ID NO: 7862 - protein, 1307 aa, Artificial Sequence
  SARS-CoV-2/Hong Kong/case85_VM20002868/2020__EPI_ISL_414519 spike protein (1-1147)(K986P_V987P_P1069F) LumSynth construct
MFVFLVLVPLVSSQCVNLTTRTQLPPAYTNSFTRGVYYPDKVFRSSVLHSTQDLFLPFFSNVTWFHAIHVSGTNGTKRFDNPVLPFNDGVYFASTEKSNIIRGWIFGTTLDSKTQSLLIVNNATNVVIKVCEFQFCNDPFLGVYYHKNNKSWMESEFRVYSSANNCTFEYVSQPFLMDLEGKQGNFKNLREFVFKNIDGYFKIYSKHTPINLVRDLPQGFSALEPLVDLPIGINITRFQTLLALHRSYLTPGDSSSGWTAGAAAYYVGYLQPRTFLLKYNENGTITDAVDCALDPLSETKCTLKSFTVEKGIYQTSNFRVQPTESIVRFPNITNLCPFGEVFNATRFASVYAWNRKRISNCVADYSVLYNSASFSTFKCYGVSPTKLNDLCFTNVYADSFVIRGDEVRQIAPGQTGKIADYNYKLPDDFTGCVIAWNSNNLDSKVGGNYNYLYRLFRKSNLKPFERDISTEIYQAGSTPCNGVEGFNCYFPLQSYGFQPTNGVGYQPYRVVVLSFELLHAPATVCGPKKSTNLVKNKCVNFNFNGLTGTGVLTESNKKFLPFQQFGRDIADTTDAVRDPQTLEILDITPCSFGGVSVITPGTNTSNQVAVLYQDVNCTEVPVAIHADQLTPTWRVYSTGSNVFQTRAGCLIGAEHVNNSYECDIPIGAGICASYQTQTNSPRRARSVASQSIIAYTMSLGAENSVAYSNNSIAIPTNFTISVTTEILPVSMTKTSVDCTMYICGDSTECSNLLLQYGSFCTQLNRALTGIAVEQDKNTQEVFAQVKQIYKTPPIKDFGGFNFSQILPDPSKPSKRSFIEDLLFNKVTLADAGFIKQYGDCLGDIAARDLICAQKFNGLTVLPPLLTDEMIAQYTSALLAGTITSGWTFGAGAALQIPFAMQMAYRFNGIGVTQNVLYENQKLIANQFNSAIGKIQDSLSSTASALGKLQDVVNQNAQALNTLVKQLSSNFGAISSVLNDILSRLDPPEAEVQIDRLITGRLQSLQTYVTQQLIRAAEIRASANLAATKMSECVLGQSKRVDFCGKGYHLMSFPQSAPHGVVFLHVTYVFAQEKNFTTAPAICHDGKAHFPREGVFVSNGTHWFVTQRNFYEPQIITTDNTFVSGNCDVVIGIVNNTVYDPLQPELDSGGGSGGGQIYEGKLTAEGLRFGIVASRFNHALVDRLVEGAIDAIVRHGGREEDITLVRVPGSWEIPVAAGELARKEDIDAVIAIGVLIRGATPHFDYIASEVSKGLADLSLELRKPITFGVITADTLEQAIERAGTKHGNKGWEAALSAIEMANLFKSLR

SEQ ID NO: 7863 - protein, 1307 aa, Artificial Sequence; identical to SEQ ID NO: 7853
  SARS-CoV-2/England/200990660/2020__EPI_ISL_414523 spike protein (1-1147)(K986P_V987P_P1069F) LumSynth construct

SEQ ID NO: 7864 - protein, 1307 aa, Artificial Sequence
  SARS-CoV-2/Australia/NSW09/2020__EPI_ISL_413595 spike protein (1-1147)(K986P_V987P_P1069F) LumSynth construct
MFVFLVLLPLVSSQCVNLTTRTQLPPAYTNSFTRGVYYPDKVFRSSVLHSTQDLFLPFFSNVTWFHAIHVSGTNGTKRFDNPVLPFNDGVYFASTEKSNIIRGWIFGTTLDSKTQSLLIVNNATNVVIKVCEFQFCNDPFLGVYYHKNNKSWMESEFRVYSSANNCTFEYVSQPFLMDLEGKQGNFKNLREFVFKNIDGYFKIYSKHTPINLVRDLPQGFSALEPLVDLPIGINITRFQTLLALHRSYLTPGDSSSGWTAGAAAYYVGYLQPRTFLLKYNENGTITDAVDCALDPLSETKCTLKSFTVEKGIYQTSNFRVQPTESIVRFPNITNLCPFGEVFNATRFASVYAWNRKRISNCVADYSVLYNSASFSTFKCYGVSPTKLNDLCFTNVYADSFVIRGDEVRQIAPGQTGKIADYNYKLPDDFTGCVIAWNSNNLDSKVGGNYNYLYRLFRKSNLKPFERDISTEIYQAGSTPCNGVEGFNCYFPLQSYGFQPTNGVGYQPYRVVVLSFELLHAPATVCGPKKSTNLVKNKCVNFNFNGLTGTGVLTESNKKFLPFQQFGRDIADTTDAVRDPQTLEILDITPCSFGGVSVITPGTNTSNQVAVLYQDVNCTEVPVAIHADQLTPTWRVYSTGSNVFQTRAGCLIGAEHVNNSYECDIPIGAGICASYQTQTNSPRRARSVASQSIIAYTMSLGAENSVAYSNNSIAIPTNFTISVTTEILPVSMTKTSVDCTMYICGDSTECSNLLLQYGSFCTQLNRALTGIAVEQDKNTQEVFAQVKQIYKTPPIKDFGGFNFSQILPDPSKPSKRSFIEDLLFNKVTLADAGFIKQYGDCLGDIAARDLICAQKFNGLTVLPPLLTDEMIAQYTSALLAGTITSGWTFGAGAALQIPFAMQMAYRFNGIGVTQNVLYENQKLIANQFNSAIGKIQDSLSFTASALGKLQDVVNQNAQALNTLVKQLSSNFGAISSVLNDILSRLDPPEAEVQIDRLITGRLQSLQTYVTQQLIRAAEIRASANLAATKMSECVLGQSKRVDFCGKGYHLMSFPQSAPHGVVFLHVTYVFAQEKNFTTAPAICHDGKAHFPREGVFVSNGTHWFVTQRNFYEPQIITTDNTFVSGNCDVVIGIVNNTVYDPLQPELDSGGGSGGGQIYEGKLTAEGLRFGIVASRFNHALVDRLVEGAIDAIVRHGGREEDITLVRVPGSWEIPVAAGELARKEDIDAVIAIGVLIRGATPHFDYIASEVSKGLADLSLELRKPITFGVITADTLEQAIERAGTKHGNKGWEAALSAIEMANLFKSLR

SEQ ID NO: 7865 - protein, 1307 aa, Artificial Sequence; identical to SEQ ID NO: 7845
  SARS-CoV-2/Australia/NSW10/2020__EPI_ISL_413596 spike protein (1-1147)(K986P_V987P_P1069F) LumSynth construct

SEQ ID NO: 7866 - protein, 1307 aa, Artificial Sequence
  SARS-CoV-2/Switzerland/1000477797/2020__EPI_ISL_413023 spike protein (1-1147)(K986P_V987P_P1069F) LumSynth construct
MFVFLVLLPLVSSQCVNLTTRTQLPPAYTNSFTRGVYYPDKVFRSSVLHSTQDLFLPFFSNVTWFHAIHVSGTNGTKRFDNPVLPFNDGVYFASTEKSNIIRGWIFGTTLDSKTQSLLIVNNATNVVIKVCEFQFCNDPFLGVYYHKNNKSWMESEFRVYSSANNCTFEYVSQPFLMDLEGKQGNFKNLREFVFKNIDGYFNIYSKHTPINLVRDLPQGFSALEPLVDLPIGINITRFQTLLALHRSYLTPGDSSSGWTAGAAAYYVGYLQPRTFLLKYNENGTITDAVDCALDPLSETKCTLKSFTVEKGIYQTSNFRVQPTESIVRFPNITNLCPFGEVFNATRFASVYAWNRKRISNCVADYSVLYNSASFSTFKCYGVSPTKLNDLCFTNVYADSFVIRGDEVRQIAPGQTGKIADYNYKLPDDFTGCVIAWNSNNLDSKVGGNYNYLYRLFRKSNLKPFERDISTEIYQAGSTPCNGVEGFNCYFPLQSYGFQPTNGVGYQPYRVVVLSFELLHAPATVCGPKKSTNLVKNKCVNFNFNGLTGTGVLTESNKKFLPFQQFGRDIADTTDAVRDPQTLEILDITPCSFGGVSVITPGTNTSNQVAVLYQGVNCTEVPVAIHADQLTPTWRVYSTGSNVFQTRAGCLIGAEHVNNSYECDIPIGAGICASYQTQTNSPRRARSVASQSIIAYTMSLGAENSVAYSNNSIAIPTNFTISVTTEILPVSMTKTSVDCTMYICGDSTECSNLLLQYGSFCTQLNRALTGIAVEQDKNTQEVFAQVKQIYKTPPIKDFGGFNFSQILPDPSKPSKRSFIEDLLFNKVTLADAGFIKQYGDCLGDIAARDLICAQKFNGLTVLPPLLTDEMIAQYTSALLAGTITSGWTFGAGAALQIPFAMQMAYRFNGIGVTQNVLYENQKLIANQFNSAIGKIQDSLSSTASALGKLQDVVNQNAQALNTLVKQLSSNFGAISSVLNDILSRLDPPEAEVQIDRLITGRLQSLQTYVTQQLIRAAEIRASANLAATKMSECVLGQSKRVDFCGKGYHLMSFPQSAPHGVVFLHVTYVFAQEKNFTTAPAICHDGKAHFPREGVFVSNGTHWFVTQRNFYEPQIITTDNTFVSGNCDVVIGIVNNTVYDPLQPELDSGGGSGGGQIYEGKLTAEGLRFGIVASRFNHALVDRLVEGAIDAIVRHGGREEDITLVRVPGSWEIPVAAGELARKEDIDAVIAIGVLIRGATPHFDYIASEVSKGLADLSLELRKPITFGVITADTLEQAIERAGTKHGNKGWEAALSAIEMANLFKSLR

SEQ ID NO: 7867 - protein, 1307 aa, Artificial Sequence
  SARS-CoV-2/Belgium/BA-02291/2020__EPI_ISL_415159 spike protein (1-1147)(K986P_V987P_P1069F) LumSynth construct
MFVFLVLLPLVSSQCVNLTTRTQLPPAYTNSFTRGVYYPDKVFRSSVLHSTQDLFLPFFSNVTWFHAIHVSGTNGTKRFDNPVLPFNDGVYFASTEKSNIIRGWIFGTTLDSKTQSLLIVNNATNVVIKVCEFQFCNDPFLGVYYHKNNKSWMESEFRVYSSANNCTFEYVSQPFLMDLEGKQGNFKNLREFVFKNIDGYFKIYSKHTPINLVRDLPQGFSALEPLVDLPIGINITRFQTLLALHRSYLTPGDSSSGWTAGAAAYYVGYLQPRTFLLKYNENGTITDAVDCALDPLSETKCTLKSFTVEKGIYQTSNFRVQPTESIVRFPNITNLCPFGEVFNATRFASVYAWNRKRISNCVADYSVLYNSASFSTFKCYGVSPTKLNDLCFTNVYADSFVIRGDEVRQIAPGQTGKIADYNYKLPDDFTGCVIAWNSNNLDSKVGGNYNYLYRLFRRSNLKPFERDISTEIYQAGSTPCNGVEGFNCYFPLQSYGFQPTNGVGYQPYRVVVLSFELLPAPATVCGPKKSTNLVKNKCVNFNFNGLTGTGVLTESNKKFLPFQQFGRDIADTTDAVRDPQTLEILDITPCSFGGVSVITPGTNTSNQVAVLYQGVNCTEVPVAIHADQLTPTWRVYSTGSNVFQTRAGCLIGAEHVNNSYECDIPIGAGICASYQTQTNSPRRARSVASQSIIAYTMSLGAENSVAYSNNSIAIPTNFTISVTTEILPVSMTKTSVDCTMYICGDSTECSNLLLQYGSFCTQLNRALTGIAVEQDKNTQEVFAQVKQIYKTPPIKDFGGFNFSQILPDPSKPSKRSFIEDLLFNKVTLADAGFIKQYGDCLGDIAARDLICAQKFNGLTVLPPLLTDEMIAQYTSALLAGTITSGWTFGAGAALQIPFAMQMAYRFNGIGVTQNVLYENQKLIANQFNSAIGKIQDSLSSAAPALGKLQDVVNQNAQALNTLVKQLSSNFGAISSVLNDILSRLDPPEAEVQIDRLITGRLQSLQTYVTQQLIRAAEIRASANLAATKMSECVLGQSKRVDFCGKGYHLMSFPQSAPHGVVFLHVTYVFAQEKNFTTAPAICHDGKAHFPREGVFVSNGTHWFVTQRNFYEPQIITTDNTFVSGNCDVVIGIVNNTVYDPLQPELDSGGGSGGGQIYEGKLTAEGLRFGIVASRFNHALVDRLVEGAIDAIVRHGGREEDITLVRVPGSWEIPVAAGELARKEDIDAVIAIGVLIRGATPHFDYIASEVSKGLADLSLELRKPITFGVITADTLEQAIERAGTKHGNKGWEAALSAIEMANLFKSLR

SEQ ID NO: 7868 - protein, 1307 aa, Artificial Sequence
  SARS-CoV-2/USA/WA8-UW5/2020__EPI_ISL_413486 spike protein (1-1147)(K986P_V987P_P1069F) LumSynth construct
MFVFLVLLPLVSSQCVNLTTRTQLPPAYTNSFTRGVYYPDKVFRSSVLHSTQDLFLPFFSNVTWFHAIHVSGTNGTKRFDNPVLPFNDGVYFASTEKSNIIRGWIFGTTLDSKTQSLLIVNNATNVVIKVCEFQFCNDPFLGVYYHKNNKSWMESEFRVYSSANNCTFEYVSQPFLMDLEGKQGNFKNLREFVFKNIDGYFKIYSKHTPINLVRDLPQGFSALEPLVDLPIGINITRFQTLLALHRSYLTPGDSSSGWTAGAAAYYVGYLQPRTFLLKYNENGTITDAVDCALDPLSETKCTLKSFTVEKGIYQTSNFRVQPTESIVRFPNITNLCPFGEVFNATRFASVYAWNRKRISNCVADYSVLYNSASFSTFKCYGVSPTKLNDLCFTNVYADSFVIRGDEVRQIAPGQTGKIADYNYKLPDDFTGCVIAWNSNNLDSKVGGNYNYLYRLFRKSNLKPFERDISTEIYQAGSTPCNGVEGFNCYFPLQSYGFQPTNGVGYQPYRVVVLSFELLHAPATVCGPKKSTNLVKNKCVNFNFNGLTGTGVLTESNKKFLPFQQFGRDIADTTDAVRDPQTLEILDITPCSFGGVSVITPGTNTSNQVAVLYQDVNCTEVPVAIHADQLTPTWRVYSTGSNVFQTRAGCLIGAEYVNNSYECDIPIGAGICASYQTQTNSPRRARSVASQSIIAYTMSLGAENSVAYSNNSIAIPTNFTISVTTEILPVSMTKTSVDCTMYICGDSTECSNLLLQYGSFCTQLNRALTGIAVEQDKNTQEVFAQVKQIYKTPPIKDFGGFNFSQILPDPSKPSKRSFIEDLLFNKVTLADAGFIKQYGDCLGDIAARDLICAQKFNGLTVLPPLLTDEMIAQYTSALLAGTITSGWTFGAGAALQIPFAMQMAYRFNGIGVTQNVLYENQKLIANQFNSAIGKIQDSLSSTASALGKLQDVVNQNAQALNTLVKQLSSNFGAISSVLNDILSRLDPPEAEVQIDRLITGRLQSLQTYVTQQLIRAAEIRASANLAATKMSECVLGQSKRVDFCGKGYHLMSFPQSAPHGVVFLHVTYVFAQEKNFTTAPAICHDGKAHFPREGVFVSNGTHWFVTQRNFYEPQIITTDNTFVSGNCDVVIGIVNNTVYDPLQPELDSGGGSGGGQIYEGKLTAEGLRFGIVASRFNHALVDRLVEGAIDAIVRHGGREEDITLVRVPGSWEIPVAAGELARKEDIDAVIAIGVLIRGATPHFDYIASEVSKGLADLSLELRKPITFGVITADTLEQAIERAGTKHGNKGWEAALSAIEMANLFKSLR

SEQ ID NO: 7869 - protein, 1307 aa, Artificial Sequence
  SARS-CoV-2/England/20102000506/2020__EPI_ISL_415147 spike protein (1-1147)(K986P_V987P_P1069F) LumSynth construct
MFVFLVLLPLVSSQCVNLTTRTQLPPAYTNSFTRGVYYPDKVFRSSVLHSTQDLFLPFFSNVTWFHAIHVSGTNGTKRFDNPVLPFNDGVYFASTEKSNIIRGWIFGTTLDSKTQSLLIVNNATNVVIKVCEFQFCNDPFLGVYYHKNNKSWMESEFRVYSSANNCTFEYVSQPFLMDLEGKQGNFKNLREFVFKNIDGYFKIYSKHTPINLVRDLPQGFSALEPLVDLPIGINITRFQTLLALHRSYLTPGDSSSGWTAGAAAYYVGYLQPRTFLLKYNENGTITDAVDCALDPLSETKCTLKSFTVEKGIYQTSNFRVQPTESIVRFPNITNLCPFGEVFNATRFASVYAWNRKRISNCVADYSVLYNSASFSTFKCYGVSPTKLNDLCFTNVYADSFVIRGDEVRQIAPGQTGKIADYNYKLPDDFTGCVIAWNSNNLDSKVGGNYNYLYRLFRKSNLKPFERDISTEIYQAGSTPCNGVEGFNCYFPLQSYGFQPTNGVGYQPYRVVVLSFELLHAPATVCGPKKSTNLVKNKCVNFNFNGLTGTGVLTESNKKFLPFQQFGRDIADTTDAVRDPQTLEILDITPCSFGGVSVITPGTNTSNQVAVLYQGVNCTEVPVAIHADQLTPTWRVYSTGSNVFQTRAGCLIGAEHVNNSYECDIPIGAGICASYQTQTNSPRRARSVASQSIIAYTMSLGAENSVAYSNNSIAIPTNFTISVTTEILPVSMTKTSVDCTMYICGDSTECSNLLLQYGSFCTQLNRALTGIAVEQDKNTQEVFAQVKQIYKTPPIKDFGGFNFSQILPDPSKPSKRSFIEDLLFNKVTLADAGFIKQYGYCLGDIAARDLICAQKFNGLTVLPPLLTDEMIAQYTSALLAGTITSGWTFGAGAALQIPFAMQMAYRFNGIGVTQNVLYENQKLIANQFNSAIGKIQDSLSSTASALGKLQDVVNQNAQALNTLVKQLSSNFGAISSVLNDILSRLDPPEAEVQIDRLITGRLQSLQTYVTQQLIRAAEIRASANLAATKMSECVLGQSKRVDFCGKGYHLMSFPQSAPHGVVFLHVTYVFAQEKNFTTAPAICHDGKAHFPREGVFVSNGTHWFVTQRNFYEPQIITTDNTFVSGNCDVVIGIVNNTVYDPLQPELDSGGGSGGGQIYEGKLTAEGLRFGIVASRFNHALVDRLVEGAIDAIVRHGGREEDITLVRVPGSWEIPVAAGELARKEDIDAVIAIGVLIRGATPHFDYIASEVSKGLADLSLELRKPITFGVITADTLEQAIERAGTKHGNKGWEAALSAIEMANLFKSLR

SEQ ID NO: 7870 - protein, 1307 aa, Artificial Sequence
  SARS-CoV-2/Belgium/VAG-03013/2020__EPI_ISL_415155 spike protein (1-1147)(K986P_V987P_P1069F) LumSynth construct
MFVFLVLLPLVSSQCVNLTTRTQLPPAYTNSFTRGVYYPDKVFRSSVLHSTQDLFLPFFSNVTWFHAIHVSGTNGTKRFDNPVLPFNDGVYFASTEKSNIIRGWIFGTTLDSKTQSLLIVNNATNVVIKVCEFQFCNDPFLGVYYHKNNKSWMESEFRVYSSANNCTFEYVSQPFLMDLEGKQGNFKNLREFVFKNIDGYFKIYSKHTPINLVRDLPQGFSALEPLVDLPIGINITRFQTLLALHRSYLTPGDSSSGWTAGAAAYYVGYLQPRTFLLKYNENGTITDAVDCALDPLSETKCTLKSFTVEKGIYQTSNFRVQPTESIVRFPNITNLCPFGEVFNATRFASVYAWNRKRISNCVADYSVLYNSASFSTFKCYGVSPTKLNDLCFTNVYADSFVIRGDEVRQIAPGQTGKIADYNYKLPDDFTGCVIAWNSNNLDSKVGGNYNYLYRLFRKSNLKPFERDISTEIYQAGSTPCNGVEGFNCYFPLQSYGFQPTNGVGYQPYRVVVLSFELLHAPATVCGPKKSTNLVKNKCVNFNFNGLTGTGVLTESNKKFLPFQQFGRDIADTTDAVRDPQTLEILDITPCSFGGVSVITPGTNTSNQVAVLYQGVNCTEVPVAIHADQLTPTWRVYSTGSNVFQTRAGCLIGAEHVNNSYECDIPIGAGICASYQTQTNSPRRARSVASQSIIAYTMSLGAENSVAYSNNSIAIPTNFTISVTTEILPVSMTKTSVDCTMYICGDSTECSNLLLQYGSFCTQLNRALTGIAVEQDKNTQEVFAQVKQIYKTPPIKDFGGFNFSQILPDPSKPSKRSFIEDLLFNKVTLADAGFIKQYGDCLGDIAARDLICAQKFNGLTVLPPLLTDEMIAQYTSALLAGTITSGWTFGAGAALQIPFAMQMAYRFNGIGVTQNVLYENQKLIANQFNSAIGKIQDSLSSTATALGKLQDVVNQNAQALNTLVKQLSSNFGAISSVLNDILSRLDPPEAEVQIDRLITGRLQSLQTYVTQQLIRAAEIRASANLAATKMSECVLGQSKRVDFCGKGYHLMSFPQSAPHGVVFLHVTYVFAQEKNFTTAPAICHDGKAHFPREGVFVSNGTHWFVTQRNFYEPQIITTDNTFVSGNCDVVIGIVNNTVYDPLQPELDSGGGSGGGQIYEGKLTAEGLRFGIVASRFNHALVDRLVEGAIDAIVRHGGREEDITLVRVPGSWEIPVAAGELARKEDIDAVIAIGVLIRGATPHFDYIASEVSKGLADLSLELRKPITFGVITADTLEQAIERAGTKHGNKGWEAALSAIEMANLFKSLR

SEQ ID NO: 7871 - protein, 1307 aa, Artificial Sequence
  SARS-CoV-2/Belgium/BC-03016/2020__EPI_ISL_415157 spike protein (1-1147)(K986P_V987P_P1069F) LumSynth construct
MFVFLVLLPLVSSQCVNLTTRTQLPPAYTNSFTRGVYYPDKVFRSSVLHSTQDLFLPFFSNVTWFHAIHVSGTNGTKRFDNPVLPFNDGVYFASTEKSNIIRGWIFGTTLDSKTQSLLIVNNATNVVIKVCEFQFCNDPFLGVYYHKNNKSWMESEFRVYSSANNCTFEYVSQPFLMDLEGKQGNFKNLREFVFKNIDGYFKIYSKHTPINLVRDLPQGFSALEPLVDLPIGINITRFQTLLALHRSYLTPGDSSSGWTAGAAAYYVGYLQPRTFLLKYNENGTITDAVDCALDPLSETKCTLKSFTVEKGIYQTSNFRVQPTESIVRFPNITNLCPFGEVFNATRFASVYAWNRKRISNCVADYSVLYNSASFSTFKCYGVSPTKLNDLCFTNVYADSFVIRGDEVRQIAPGQTGKIADYNYKLPDDFTGCVIAWNSNNLDSKVGGNYNYLYRLFRKSNLKPFERDISTEIYQAGSTPCNGVEGFNCYFPLQSYGFQPTNGVGYQPYRVVVLSFELLHAPATVCGPKKSTNLVKNKCVNFNFNGLTGTGVLTESNKKFLPFQQFGRDIADTTDAVRDPQTLEILDITPCSFGGVSVITPGTNTSNQVAVLYQGVNCTEVPVAIHADQLTPTWRVYSTGSNVFQTRAGCLIGAEHVNNSYECDIPIGAGICASYQTQTNSPRRARSVASQSIIAYTMSLGAENSVAYSNNSIAIPTNFTISVTTEILPVSMTKTSVDCTMYICGDSTECSNLLLQYGSFCTQLNRALTGIAVEQDKNTQEVFAQVKQIYKTPPIKDFGGFNFSQILPDPSKPSKRSFIEDLLFNKVTLADAGFIKQYGDCLGDIAARDLICAQKFNGLTVLPPLLTDEMIAQYTSALLAGTITSGWTFGAGAALQIPFAMQMAYRFNGIGVTQNVLYENQKLIANQFNSAIGKIQDSLSSTAPALGKLQDVVNQNAQALNTLVKQLSSNFGAISSVLNDILSRLDPPEAEVQIDRLITGRLQSLQTYVTQQLIRAAEIRASANLAATKMSECVLGQSKRVDFCGKGYHLMSFPQSAPHGVVFLHVTYVFAQEKNFTTAPAICHDGKAHFPREGVFVSNGTHWFVTQRNFYEPQIITTDNTFVSGNCDVVIGIVNNTVYDPLQPELDSGGGSGGGQIYEGKLTAEGLRFGIVASRFNHALVDRLVEGAIDAIVRHGGREEDITLVRVPGSWEIPVAAGELARKEDIDAVIAIGVLIRGATPHFDYIASEVSKGLADLSLELRKPITFGVITADTLEQAIERAGTKHGNKGWEAALSAIEMANLFKSLR

SEQ ID NO: 7872 - protein, 1307 aa, Artificial Sequence
  SARS-CoV-2/Germany/BavPat3/2020__EPI_ISL_414521 spike protein (1-1147)(K986P_V987P_P1069F) LumSynth construct
MFVFLVLLPLVSSQCVNLTTRTQLPPAYTNSFTRGVYYPDKVFRSSVLHSTQDLFLPFFSNVTWFHAIHVSGTNGTKRFDNPVLPFNDGVYFASTEKSNIIRGWIFGTTLDSKTQSLLIVNNATNVVIKVCEFQFCNDPFLGVYYHKNNKSWMESEFRVYSSANNCTFEYVSQPFLMDLEGKQGNFKNLREFVFKNIDGYFKIYSKHTPINLVRDLPQGFSALEPLVDLPIGINITRFQTLLALHRSYLTPGDSSSGWTAGAAAYYVGYLQPRTFLLKYNENGTITDAVDCALDPLSETKCTLKSFTVEKGIYQTSNFRVQPTESIVRFPNITNLCPFGEVFNATRFASVYAWNRKRISNCVADYSVLYNSASFSTFKCYGVSPTKLNDLCFTNVYADSFVIRGDEVRQIAPGQTGKIADYNYKLPDDFTGCVIAWNSNNLDSKVGGNYNYLYRLFRKSNLKPFERDISTEIYQAGSTPCNGVEGFNCYFPLQSYGFQPTNGVGYQPYRVVVLSFELLHAPATVCGPKKSTNLVKNKCVNFNFNGLTGTGVLTESNKKFLPFQQFGRDIADTTDAVRDPQTLEILDITPCSFGGVSVITPGTNTSNQVAVLYQDVNCTEVPVAIHADQLTPTWRVYSTGSNVFQTRAGCLIGAEHVNNSYECDIPIGAGICASYQTQTNSPRRARSVASQSIIAYTMSLGAENSVAYSNNSIAIPTNFTISVTTEILPVSMTKTSVDCTMYICGDSTECSNLLLQYGSFCTQLNRALTGIAVEQDKNTQQVFAQVKQIYKTPPIKDFGGFNFSQILPDPSKPSKRSFIEDLLFNKVTLADAGFIKQYGDCLGDIAARDLICAQKFNGLTVLPPLLTDEMIAQYTSALLAGTITSGWTFGAGAALQIPFAMQMAYRFNGIGVTQNVLYENQKLIANQFNSAIGKIQDSLSSTASALGKLQDVVNQNAQALNTLVKQLSSNFGAISSVLNDILSRLDPPEAEVQIDRLITGRLQSLQTYVTQQLIRAAEIRASANLAATKMSECVLGQSKRVDFCGKGYHLMSFPQSAPHGVVFLHVTYVFAQEKNFTTAPAICHDGKAHFPREGVFVSNGTHWFVTQRNFYEPQIITTDNTFVSGNCDVVIGIVNNTVYDPLQPELDSGGGSGGGQIYEGKLTAEGLRFGIVASRFNHALVDRLVEGAIDAIVRHGGREEDITLVRVPGSWEIPVAAGELARKEDIDAVIAIGVLIRGATPHFDYIASEVSKGLADLSLELRKPITFGVITADTLEQAIERAGTKHGNKGWEAALSAIEMANLFKSLR

SEQ ID NO: 7873 - protein, 1307 aa, Artificial Sequence
  SARS-CoV-2/France/HF1805/2020__EPI_ISL_414628 spike protein (1-1147)(K986P_V987P_P1069F) LumSynth construct
MFVFLVLLPLVSSQCVNLTTRTQLPPAYTNSFTRGVYYPDKVFRSSVLHSTQDLFLPFFSNVTWFHAIHVSGTNGTKRFDNPVLPFNDGVYFASTEKSNIIRGWIFGTTLDSKTQSLLIVNNATNVVIKVCEFQFCNDPFLGVYYHKNNKSWMESEFRVYSSANNCTFEYVSQPFLMDLEGKQGNFKNLREFVFKNIDGYFKIYSKHTPINLVRDLPQGFSALEPLVDLPIGINITRFQTLLALHRSYLTPGDSSSGWTAGAAAYYVGYLQPRTFLLKYNENGTITDAVDCALDPLSETKCTLKSFTVEKGIYQTSNFRVQPTESIVRFPNITNLCPFGEVFNATRFASVYAWNRKRISNCVADYSVLYNSASFSTFKCYGVSPTKLNDLCFTNVYADSFVIRGDEVRQIAPGQTGKIADYNYKLPDDFTGCVIAWNSNNLDSKVGGNYNYLYRLFRKSNLKPFERDISTEIYQAGSTPCNGVEGFNCYFPLQSYGFQPTNGVGYQPYRVVVLSFELLHAPATVCGPKKSTNLVKNKCVNFNFNGLTGTGVLTESNKKFLPFQQFGRDIADTTDAVRDPQTLEILDITPCSFGGVSVITPGTNTSNQVAVLYQGVNCTEVPVAIHADQLTPTWRVYSTGSNVFQTRAGCLIGAEHVNNSYECDIPIGAGICASYQTQTNSPRRARSVASQSIIAYTMSLGAENSVAYSNNSIAIPTNFTISVTTEILPVSMTKTSVDCTMYICGDSTECSNLLLQYGSFCTQLNRALTGIAVEQDKNTQEVFAQVKQIYKTPPIKDFGGFNFSQILPDPSKPSKRSFIEDLLFNKVTLADAGFIKQYGDCLGDIAARDLICAQKFNGLTVLPPLLTDEMIAQYTSALLAGTITSGWTFGAGAALQIPFAMQMAYRFNGIGVTQNVLYENQKLIANQFNSAIGKIQDSLSSTASALGKLQDVVNQNAQALNTLVKQLSSNFGAISSVLNDILSRLDPPEAEVQIDRLITGRLQSLQTYVTQQLIRAAEIRASANLAATKMSECVLGQSKRVDFCGKGYHLMSFPQSAPHGVVFLHVTYVFAQEKNFTTAPAICHDGKAHFPREGVFVSNGTHWFVTQRNFYEPQIITTDNTFVSGNCDVVIGVVNNTVYDPLQPELDSGGGSGGGQIYEGKLTAEGLRFGIVASRFNHALVDRLVEGAIDAIVRHGGREEDITLVRVPGSWEIPVAAGELARKEDIDAVIAIGVLIRGATPHFDYIASEVSKGLADLSLELRKPITFGVITADTLEQAIERAGTKHGNKGWEAALSAIEMANLFKSLR

SEQ ID NO: 7874 - protein, 1307 aa, Artificial Sequence
  SARS-CoV-2/Netherlands/ZuidHolland_9/2020__EPI_ISL_414445 spike protein (1-1147)(K986P_V987P_P1069F) LumSynth construct
MFVFLVLLPLVSSQCVNLTTRTQLPPAYTNSFTRGVYYPDKVFRSSVLHSTQDLFLPFFSNVTWFHAIHVSGTNGTKRFDNPVLPFNDGVYFASTEKSNIIRGWIFGTTLDSKTQSLLIVNNATNVVIKVCEFQFCNDPFLGVYYHKNNKSWMESEFRVYSSANNCTFEYVSQPFLMDLEGKQGNFKNLREFVFKNIDGYFKIYSKHTPINLVRDLPQGFSALEPLVDLPIGINITRFQTLLALHRSYLTPGDSSSGWTAGAAAYYVGYLQPRTFLLKYNENGTITDAVDCALDPLSETKCTLKSFTVEKGIYQTSNFRVQPTESIVRFPNITNLCPFGEVFNATRFASVYAWNRKRISNCVADYSVLYNSASFSTFKCYGVSPTKLNDLCFTNVYADSFVIRGDEVRQIAPGQTGKIADYNYKLPDDFTGCVIAWNSNNLDSKVGGNYNYLYRLFRKSNLKPFERDISTEIYQAGSTPCNGVEGFNCYFPLQSYGFQPTNGVGYQPYRVVVLSFELLHAPATVCGPKKSTNLVKNKCVNFNFNGLTGTGVLTESNKKFLPFQQFGRDIADTTDAVRDPQTLEILDITPCSFGGVSVITPGTNTSNQVAVLYQGVNCTEVPVAIHADQLTPTWRVYSTGSNVFQTRAGCLIGAEHVNNSYECDIPIGAGICASYQTQTNSPRRARSVASQSIIAYTMSLGAENSVAYSNNSIAIPTNFTISVTTEILPVSMTKTSVDCTMYICGDSTECSNLLLQYGSFCTQLNRALTGIAVEQDKNTQEVFAQVKQIYKTPPIKDFGGFNFSQILPDPSKPSKRSFIEDLLFNKVTLADAGFIKQYGDCLGDIAARDLICVQKFNGLTVLPPLLTDEMIAQYTSALLAGTITSGWTFGAGAALQIPFAMQMAYRFNGIGVTQNVLYENQKLIANQFNSAIGKIQDSLSSTASALGKLQDVVNQNAQALNTLVKQLSSNFGAISSVLNDILSRLDPPEAEVQIDRLITGRLQSLQTYVTQQLIRAAEIRASANLAATKMSECVLGQSKRVDFCGKGYHLMSFPQSAPHGVVFLHVTYVFAQEKNFTTAPAICHDGKAHFPREGVFVSNGTHWFVTQRNFYEPQIITTDNTFVSGNCDVVIGIVNNTVYDPLQPELDSGGGSGGGQIYEGKLTAEGLRFGIVASRFNHALVDRLVEGAIDAIVRHGGREEDITLVRVPGSWEIPVAAGELARKEDIDAVIAIGVLIRGATPHFDYIASEVSKGLADLSLELRKPITFGVITADTLEQAIERAGTKHGNKGWEAALSAIEMANLFKSLR

SEQ ID NO: 7875 - protein, 1307 aa, Artificial Sequence
  SARS-CoV-2/Finland/FIN03032020A/2020__EPI_ISL_413602 spike protein (1-1147)(K986P_V987P_P1069F) LumSynth construct
MFVFLVLLPLVSSQCVNLTTRTQLPPAYTNSFTRGVYYPDKVFRSSVLHSTQDLFLPFFSNVTWFHAIHVSGTNGTKRFDNPVLPFNDGVYFASTEKSNIIRGWIFGTTLDSKTQSLLIVNNATNVVIKVCEFQFCNDPFLGVYYHKNNKSWMESEFRVYSSANNCTFEYVSQPFLMDLEGKQGNFKNLREFVFKNIDGYFKIYSKHTPINLVRDLPQGFSALEPLVDLPIGINITRFQTLLALHRSYLTPGDSSSGWTAGAAAYYVGYLQPRTFLLKYNENGTITDAVDCALDPLSETKCTLKSFTVEKGIYQTSNFRVQPTESIVRFPNITNLCPFGEVFNATRFASVYAWNRKRISNCVADYSVLYNSASFSTFKCYGVSPTKLNDLCFTNVYADSFVIRGDEVRQIAPGQTGKIADYNYKLPDDFTGCVISWNSNNLDSKVGGNYNYLYRLFRKSNLKPFERDISTEIYQAGSTPCNGVEGFNCYFPLQSYGFQPTNGVGYQPYRVVVLSFELLHAPATVCGPKKSTNLVKNKCVNFNFNGLTGTGVLTESNKKFLPFQQFGRDIADTTDAVRDPQTLEILDITPCSFGGVSVITPGTNTSNQVAVLYQGVNCTEVPVAIHADQLTPTWRVYSTGSNVFQTRAGCLIGAEHVNNSYECDIPIGAGICASYQTQTNSPRRARSVASQSIIAYTMSLGAENSVAYSNNSIAIPTNFTISVTTEILPVSMTKTSVDCTMYICGDSTECSNLLLQYGSFCTQLNRALTGIAVEQDKNTQEVFAQVKQIYKTPPIKDFGGFNFSQILPDPSKPSKRSFIEDLLFNKVTLADAGFIKQYGDCLGDIAARDLICAQKFNGLTVLPPLLTDEMIAQYTSALLAGTITSGWTFGAGAALQIPFAMQMAYRFNGIGVTQNVLYENQKLIANQFNSAIGKIQDSLSSTASALGKLQDVVNQNAQALNTLVKQLSSNFGAISSVLNDILSRLDPPEAEVQIDRLITGRLQSLQTYVTQQLIRAAEIRASANLAATKMSECVLGQSKRVDFCGKGYHLMSFPQSAPHGVVFLHVTYVFAQEKNFTTAPAICHDGKAHFPREGVFVSNGTHWFVTQRNFYEPQIITTDNTFVSGNCDVVIGIVNNTVYDPLQPELDSGGGSGGGQIYEGKLTAEGLRFGIVASRFNHALVDRLVEGAIDAIVRHGGREEDITLVRVPGSWEIPVAAGELARKEDIDAVIAIGVLIRGATPHFDYIASEVSKGLADLSLELRKPITFGVITADTLEQAIERAGTKHGNKGWEAALSAIEMANLFKSLR

SEQ ID NO: 7876 - protein, 1307 aa, Artificial Sequence
  SARS-CoV-2/France/GE1977/2020__EPI_ISL_414632 spike protein (1-1147)(K986P_V987P_P1069F) LumSynth construct
MFVFLVLLPLVSSQCVNLTTRTQLPPAYTNSFTRGVYYPDKVFRSSVLHSTQDLFLPFFSNVTWFHAIHVSGTNGTKRFDNPVLPFNDGVYFASTEKSNIIRGWIFGTTLDSKTQSLLIVNNATNVVIKVCEFQFCNDPFLGVYYHKNNKSWMESEFRVYSSANNCTFEYVSQPFLMDLEGKQGNFKNLREFVFKNIDGYFKIYSKHTPINLVRDLPQGFSALEPLVDLPIGINITRFQTLLALHRSYLTPGDSSSGWTAGAAAYYVGYLQPRTFLLKYNENGTITDAVDCALDPLSETKCTLKSFTVEKGIYQTSNFRVQPTESIVRFPNITNLCPFGEVFNATRFASVYAWNRKRISNCVADYSVLYNSASFSTFKCYGVSPTKLNDLCFTNVYADSFVIRGDEVRQIAPGQTGKIADYNYKLPDDFTGCVIAWNSNNLDSKVGGNYNYLYRLFRKSNLKPFERDISTEIYQAGSTPCNGVEGFNCYFPLQSYGFQPTNGVGYQPYRVVVLSFELLHAPATVCGPKKSTNLVKNKCVNFNFNGLTGTGVLTESNKKFLPFQQFGRDIADTTDAVRDPQTLEILDITPCSFGGVSVITPGTNTSNQVAVLYQGVNCTEVPVAIHADQLTPTWRVYSTGSNVFQTRAGCLIGAEHVNNSYECDIPIGAGICASYQTQTNSPRRARSVASQSIIAYTMSLGAENSVAYSNNSIAIPTNFTISVTTEILPVSMTKTSVDCTMYICGDSTECSNLLLQYGSFCTQLNRALTGIAVEQDKNTQEVFAQVKQIYKTPPIKDFGGFNFSQILPDPSKPSKRSFIEDLLFNKVTLADAGFIKQYGDCLGDIAARDLICAQKFNGLTVLPPLLTDEMIAQYTSALLAGTITSGWTFGAGAALQIPFAMQMAYRFNGIGVTQNVLYENQKLIANQFNSAIGKIQDSLFSTASALGKLQDVVNQNAQALNTLVKQLSSNFGAISSVLNDILSRLDPPEAEVQIDRLITGRLQSLQTYVTQQLIRAAEIRASANLAATKMSECVLGQSKRVDFCGKGYHLMSFPQSAPHGVVFLHVTYVFAQEKNFTTAPAICHDGKAHFPREGVFVSNGTHWFVTQRNFYEPQIITTDNTFVSGNCDVVIGIVNNTVYDPLQPELDSGGGSGGGQIYEGKLTAEGLRFGIVASRFNHALVDRLVEGAIDAIVRHGGREEDITLVRVPGSWEIPVAAGELARKEDIDAVIAIGVLIRGATPHFDYIASEVSKGLADLSLELRKPITFGVITADTLEQAIERAGTKHGNKGWEAALSAIEMANLFKSLR

SEQ ID NO: 7877 - protein, 1307 aa, Artificial Sequence
  SARS-CoV-2/Finland/FIN-313/2020__EPI_ISL_414641 spike protein (1-1147)(K986P_V987P_P1069F) LumSynth construct
MFVFLVLLPLVSSQCVNLTTRTQLPPAYTNSFTRGVYYPDKVFRSSVLHSTQDLFLPFFSNVTWFHAIHVSGTNGTKRFDNPVLPFNDGVYFASTEKSNIIRGWIFGTTLDSKTQSLLIVNNATNVVIKVCEFQFCNDPFLGVYYHKNNKSWMESEFRVYSSANNCTFEYVSQPFLMDLEGKQGNFKNLREFVFKNIDGYFKIYSKHTPINLVRDLPQGFSALEPLVDLPIGINITRFKTLLALHRSYLTPGDSSSGWTAGAAAYYVGYLQPRTFLLKYNENGTITDAVDCALDPLSETKCTLKSFTVEKGIYQTSNFRVQPTESIVRFPNITNLCPFGEVFNATRFASVYAWNRKRISNCVADYSVLYNSASFSTFKCYGVSPTKLNDLCFTNVYADSFVIRGDEVRQIAPGQTGKIADYNYKLPDDFTGCVIAWNSNNLDSKVGGNYNYLYRLFRKSNLKPFERDISTEIYQAGSTPCNGVEGFNCYFPLQSYGFQPTNGVGYQPYRVVVLSFELLHAPATVCGPKKSTNLVKNKCVNFNFNGLTGTGVLTESNKKFLPFQQFGRDIADTTDAVRDPQTLEILDITPCSFGGVSVITPGTNTSNQVAVLYQGVNCTEVPVAIHADQLTPTWRVYSTGSNVFQTRAGCLIGAEHVNNSYECDIPIGAGICASYQTQTNSPRRARSVASQSIIAYTMSLGAENSVAYSNNSIAIPTNFTISVTTEILPVSMTKTSVDCTMYICGDSTECSNLLLQYGSFCTQLNRALTGIAVEQDKNTQEVFAQVKQIYKTPPIKDFGGFNFSQILPDPSKPSKRSFIEDLLFNKVTLADAGFIKQYGDCLGDIAARDLICAQKFNGLTVLPPLLTDEMIAQYTSALLAGTITSGWTFGAGAALQIPFAMQMAYRFNGIGVTQNVLYENQKLIANQFNSAIGKIQDSLSSTASALGKLQDVVNQNAQALNTLVKQLSSNFGAISSVLNDILSRLDPPEAEVQIDRLITGRLQSLQTYVTQQLIRAAEIRASANLAATKMSECVLGQSKRVDFCGKGYHLMSFPQSAPHGVVFLHVTYVFAQEKNFTTAPAICHDGKAHFPREGVFVSNGTHWFVTQRNFYEPQIITTDNTFVSGNCDVVIGIVNNTVYDPLQPELDSGGGSGGGQIYEGKLTAEGLRFGIVASRFNHALVDRLVEGAIDAIVRHGGREEDITLVRVPGSWEIPVAAGELARKEDIDAVIAIGVLIRGATPHFDYIASEVSKGLADLSLELRKPITFGVITADTLEQAIERAGTKHGNKGWEAALSAIEMANLFKSLR

SEQ ID NO: 7878 - protein, 1307 aa, Artificial Sequence
  SARS-CoV-2/Netherlands/ZuidHolland_2/2020__EPI_ISL_414556 spike protein (1-1147)(K986P_V987P_P1069F) LumSynth construct
MFVFLVLLPLVSSQCVNLTTRTQLPPAYTNSFTRGVYYPDKVFRSSVLHSTQDLFLPFFSNVTWFHAIHVSGTNGTKRFDNPVLPFNDGVYFASTEKSNIIRGWIFGTTLDSKTQSLLIVNNATNVVIKVCEFQFCNDPFLGVYYHKNNKSWMESEFRVYSSANNCTFEYVSQPFLMDLEGKQGNFKNLREFVFKNIDGYFKIYSKHTPINLVRDLPQGFSALEPLVDLPIGINITRFQTLLALHRSYLTPGDSSSGWTAGAAAYYVGYLQPRTFLLKYNENGTITDAVDCALDPLSETKCTLKSFTVEKGIYQTSNFRVQPTESIVRFPNITNLCPFGEVFNATRFASVYAWNRKRISNCVADYSVLYNSASFSTFKCYGVSPTKLNDLCFTNVYADSFVIRGDEVRQIAPGQTGKIADYNYKLPDDFTGCVIAWNSNNLDSKVGGNYNYLYRLFRKSNLKPFERDISTEIYQAGSTPCNGVEGFNCYFPLQSYGFQPTNGVGYQPYRVVVLSFELLHAPATVCGPKKSTNLVKNKCVNFNFNGLTGTGVLTESNKKFLPFQQFGRDIADTTDAVRDPQTLEILDITPCSFGGVSVITPGTNTSNQVAVLYQGVNCTEVPVAIHADQLTPTWRVYSTGSNVFQTRAGCLIGAEHVNNSYECDIPIGAGICASYQTQTNSPRRARSVASQSIIAYTMSLGAENSVAYSNNSIAIPTNFTISVTTEILPVSMTKTSVDCTMYICGDSTECSNLLLQYGSFCTQLNRALTGIALEQDKNTQEVFAQVKQIYKTPPIKDFGGFNFSQILPDPSKPSKRSFIEDLLFNKVTLADAGFIKQYGDCLGDIAARDLICAQKFNGLTVLPPLLTDEMIAQYTSALLAGTITSGWTFGAGAALQIPFAMQMAYRFNGIGVTQNVLYENQKLIANQFNSAIGKIQDSLSSTASALGKLQDVVNQNAQALNTLVKQLSSNFGAISSVLNDILSRLDPPEAEVQIDRLITGRLQSLQTYVTQQLIRAAEIRASANLAATKMSECVLGQSKRVDFCGKGYHLMSFPQSAPHGVVFLHVTYVFAQEKNFTTAPAICHDGKAHFPREGVFVSNGTHWFVTQRNFYEPQIITTDNTFVSGNCDVVIGIVNNTVYDPLQPELDSGGGSGGGQIYEGKLTAEGLRFGIVASRFNHALVDRLVEGAIDAIVRHGGREEDITLVRVPGSWEIPVAAGELARKEDIDAVIAIGVLIRGATPHFDYIASEVSKGLADLSLELRKPITFGVITADTLEQAIERAGTKHGNKGWEAALSAIEMANLFKSLR

SEQ ID NO: 7879 - protein, 1307 aa, Artificial Sequence
  SARS-CoV-2/USA/WA-UW31/2020__EPI_ISL_414618 spike protein (1-1147)(K986P_V987P_P1069F) LumSynth construct
MFVFLVLLPLVSSQCVNLTTRTQLPPAYTNSFTRGVYYPDKVFRSSVLHSTQDLFLPFFSNVTWFHAIHVSGTNGTKRFDNPVLPFNDGVYFASTEKSNIIRGWIFGTTLDSKTQSLLIVNNATNVVIKVCEFQFCNDPFLGVYYHKNNKSWMESEFRVYSSANNCTFEYVSQPFLMDLEGKQGNFKNLREFVFKNIDGYFKIYSKHTPINLVRDLPQGFSALEPLVDLPIGINITRFQTLLALHRSYLTPGDSSSGWTAGAAAYYVGYLQPRTFLLKYNENGTITDAVDCALDPLSETKCTLKSFTVEKGIYQTSNFRVQPTESIVRFPNITNLCPFGEVFNATRFASVYAWNRKRISNCVADYSVLYNSASFSTFKCYGVSPTKLNDLCFTNVYADSFVIRGDEVRQIAPGQTGKIADYNYKLPDDFTGCVIAWNSNNLDSKVGGNYNYLYRLFRKSNLKPFERDISTEIYQAGSTPCNGAEGFNCYFPLQSYGFQPTNGVGYQPYRVVVLSFELLHAPATVCGPKKSTNLVKNKCVNFNFNGLTGTGVLTESNKKFLPFQQFGRDIADTTDAVRDPQTLEILDITPCSFGGVSVITPGTNTSNQVAVLYQDVNCTEVPVAIHADQLTPTWRVYSTGSNVFQTRAGCLIGAEHVNNSYECDIPIGAGICASYQTQTNSPRRARSVASQSIIAYTMSLGAENSVAYSNNSIAIPTNFTISVTTEILPVSMTKTSVDCTMYICGDSTECSNLLLQYGSFCTQLNRALTGIAVEQDKNTQEVFAQVKQIYKTPPIKDFGGFNFSQILPDPSKPSKRSFIEDLLFNKVTLADAGFIKQYGDCLGDIAARDLICAQKFNGLTVLPPLLTDEMIAQYTSALLAGTITSGWTFGAGAALQIPFAMQMAYRFNGIGVTQNVLYENQKLIANQFNSAIGKIQDSLSSTASALGKLQDVVNQNAQALNTLVKQLSSNFGAISSVLNDILSRLDPPEAEVQIDRLITGRLQSLQTYVTQQLIRAAEIRASANLAATKMSECVLGQSKRVDFCGKGYHLMSFPQSAPHGVVFLHVTYVFAQEKNFTTAPAICHDGKAHFPREGVFVSNGTHWFVTQRNFYEPQIITTDNTFVSGNCDVVIGIVNNTVYDPLQPELDSGGGSGGGQIYEGKLTAEGLRFGIVASRFNHALVDRLVEGAIDAIVRHGGREEDITLVRVPGSWEIPVAAGELARKEDIDAVIAIGVLIRGATPHFDYIASEVSKGLADLSLELRKPITFGVITADTLEQAIERAGTKHGNKGWEAALSAIEMANLFKSLR

SEQ ID NO: 7880 - protein, 1307 aa, Artificial Sequence
  SARS-CoV-2/South Korea/SNU01/2020__EPI_ISL_411929 spike protein (1-1147)(K986P_V987P_P1069F) LumSynth construct
MFVFLVLLPLVSSQCVNLTTRTQLPPAYTNSFTRGVYYPDKVFRSSVLHSTQDLFLPFFSNVTWFHAIHVSGTNGTKRFDNPVLPFNDGVYFASTEKSNIIRGWIFGTTLDSKTQSLLIVNNATNVVIKVCEFQFCNDPFLGVYYHKNNKSWMESEFRVYSSANNCTFEYVSQPFLMDLEGKQGNFKNLREFVFKNIDGYFKIYSKHTPINLVRDLPQGFWALEPLVDLPIGINITRFQTLLALHRSYLTPGDSSSGWTAGAAAYYVGYLQPRTFLLKYNENGTITDAVDCALDPLSETKCTLKSFTVEKGIYQTSNFRVQPTESIVRFPNITNLCPFGEVFNATRFASVYAWNRKRISNCVADYSVLYNSASFSTFKCYGVSPTKLNDLCFTNVYADSFVIRGDEVRQIAPGQTGKIADYNYKLPDDFTGCVIAWNSNNLDSKVGGNYNYLYRLFRKSNLKPFERDISTEIYQAGSTPCNGVEGFNCYFPLQSYGFQPTNGVGYQPYRVVVLSFELLHAPATVCGPKKSTNLVKNKCVNFNFNGLTGTGVLTESNKKFLPFQQFGRDIADTTDAVRDPQTLEILDITPCSFGGVSVITPGTNTSNQVAVLYQDVNCTEVPVAIHADQLTPTWRVYSTGSNVFQTRAGCLIGAEHVNNSYECDIPIGAGICASYQTQTNSPRRARSVASQSIIAYTMSLGAENSVAYSNNSIAIPTNFTISVTTEILPVSMTKTSVDCTMYICGDSTECSNLLLQYGSFCTQLNRALTGIAVEQDKNTQEVFAQVKQIYKTPPIKDFGGFNFSQILPDPSKPSKRSFIEDLLFNKVTLADAGFIKQYGDCLGDIAARDLICAQKFNGLTVLPPLLTDEMIAQYTSALLAGTITSGWTFGAGAALQIPFAMQMAYRFNGIGVTQNVLYENQKLIANQFNSAIGKIQDSLSSTASALGKLQDVVNQNAQALNTLVKQLSSNFGAISSVLNDILSRLDPPEAEVQIDRLITGRLQSLQTYVTQQLIRAAEIRASANLAATKMSECVLGQSKRVDFCGKGYHLMSFPQSAPHGVVFLHVTYVFAQEKNFTTAPAICHDGKAHFPREGVFVSNGTHWFVTQRNFYEPQIITTDNTFVSGNCDVVIGIVNNTVYDPLQPELDSGGGSGGGQIYEGKLTAEGLRFGIVASRFNHALVDRLVEGAIDAIVRHGGREEDITLVRVPGSWEIPVAAGELARKEDIDAVIAIGVLIRGATPHFDYIASEVSKGLADLSLELRKPITFGVITADTLEQAIERAGTKHGNKGWEAALSAIEMANLFKSLR

SEQ ID NO: 7881 - protein, 1307 aa, Artificial Sequence
  SARS-CoV-2/China/WF0004/2020__EPI_ISL_413694 spike protein (1-1147)(K986P_V987P_P1069F) LumSynth construct
MFVFLVLLPLVSSQCVNLTTRTQLPPAYTNSFTRGVYYPDKVFRSSVLHSTQDLFLPFFSNVTWFHAIHVSGTNGTKRFDNPVLPFNDGVYFASTEKSNIIRGWIFGTTLDSKTQSLLIVNNATNVVIKVCEFQFCNDPFLGVYYHKNNKSWTESEFRVYSSANNCTFEYVSQPFLMDLEGKQGNFKNLREFVFKNIDGYFKIYSKHTPINLVRDLPQGFSALEPLVDLPIGINITRFQTLLALHRSYLTPGDSSSGWTAGAAAYYVGYLQPRTFLLKYNENGTITDAVDCALDPLSETKCTLKSFTVEKGIYQTSNFRVQPTESIVRFPNITNLCPFGEVFNATRFASVYAWNRKRISNCVADYSVLYNSASFSTFKCYGVSPTKLNDLCFTNVYADSFVIRGDEVRQIAPGQTGKIADYNYKLPDDFTGCVIAWNSNNLDSKVGGNYNYLYRLFRKSNLKPFERDISTEIYQAGSTPCNGVEGFNCYFPLQSYGFQPTNGVGYQPYRVVVLSFELLHAPATVCGPKKSTNLVKNKCVNFNFNGLTGTGVLTESNKKFLPFQQFGRDIADTTDAVRDPQTLEILDITPCSFGGVSVITPGTNTSNQVAVLYQDVNCTEVPVAIHADQLTPTWRVYSTGSNVFQTRAGCLIGAEHVNNSYECDIPIGAGICASYQTQTNSPRRARSVASQSIIAYTMSLGAENSVAYSNNSIAIPTNFTISVTTEILPVSMTKTSVDCTMYICGDSTECSNLLLQYGSFCTQLNRALTGIAVEQDKNTQEVFAQVKQIYKTPPIKDFGGFNFSQILPDPSKPSKRSFIEDLLFNKVTLADAGFIKQYGDCLGDIAARDLICAQKFNGLTVLPPLLTDEMIAQYTSALLAGTITSGWTFGAGAALQIPFAMQMAYRFNGIGVTQNVLYENQKLIANQFNSAIGKIQDSLSSTASALGKLQDVVNQNAQALNTLVKQLSSNFGAISSVLNDILSRLDPPEAEVQIDRLITGRLQSLQTYVTQQLIRAAEIRASANLAATKMSECVLGQSKRFDFCGKGYHLMSFPQSAPHGVVFLHVTYVFAQEKNFTTAPAICHDGKAHFPREGVFVSNGTHWFVTQRNFYEPQIITTDNTFVSGNCDVVIGIVNNTVYDPLQPELDSGGGSGGGQIYEGKLTAEGLRFGIVASRFNHALVDRLVEGAIDAIVRHGGREEDITLVRVPGSWEIPVAAGELARKEDIDAVIAIGVLIRGATPHFDYIASEVSKGLADLSLELRKPITFGVITADTLEQAIERAGTKHGNKGWEAALSAIEMANLFKSLR

SEQ ID NO: 7882 - protein, 1307 aa, Artificial Sequence
  SARS-CoV-2/China/WF0028/2020__EPI_ISL_413791 spike protein (1-1147)(K986P_V987P_P1069F) LumSynth construct
MFVFLVLLPLVSSQCVNLTTRTQLPPAYTNSFTRGVYYPDKVFRSSVLHSTQDLFLPFFSNVTWFHAIHVSGTNGTKRFDNPVLPFNDGVYFASTEKSNIIRGWIFGTTLDSKTQSLLIVNNATNVVIKVCEFQFCNDPFLGVYYHKNNKSWMESEFRVYSSANNCTFEYVSQPFLMDLEGKQGNFKNLREFVFKNIDGYFKIYSKHTPINLVRDLPQGFSALEPLVDLPIGINITRFQTLLALHRSYLTPGDSSSGWTAGAAAYYVGYLQPRTFLLKYNENGTITDAVDCALDPLSETKCTLKSFTVEKGIYQTSNFRVQPTESIVRFPNITNLCPFGEVFNATRFASVYAWNRKRISNCVADYSVLYNSASFSTFKCYGVSPTKLNDLCFTNVYADSFVIRGDEVRQIAPGQTGKIADYNYKLPDDFTGCVIAWNSNNLDSKVGGNYNYLYRLFRKSNLKPFERDISTEIYQAGSTPCNGVEGFNCYFPLQSYGFQPTNGVGYQPYRVVVLSFELLHAPATVCGPKKSTNLVKNKCVNFNFNGLTGTGVLTESNKKFLPFQQFGRDIADTTDAVRDPQTLEILDITPCSFGGVSVITPGTNTSNQVAVLYQDVNCTEVPVAIHADQLTPTWRVYSTGSNVFQTRAGCLIGAEHVNNSYECDIPIGAGICASYQTQTNSPRRARSVASQSIIAYTMSLGAENSVAYSNNSIAIPTNFTISVTTEILPVSMTKTSVDCTMYICGDSTECSNLLLQYGSFCTQLNRALTGIAVEQDKNTQEVFAQVKQIYKTPPIKDFGGFNFSQILPDPSKPSKRSFIEDLLFNKVTLADAGFIKQYGDCLGDIAARDLICAQKFNGLTVLPPLLTDEMIAQYTSALLAGTITSGWTFGAGAALQIPFAMQMAYRFNGIGVTQNVLYENQKLIANQFNSAIGKIQDSLSSTASALGKLQDVVNQNAQALNTLVKQLSSNFGAISSVLNDILSRLDPPEAEVQIDRLITGRLQSLQTYVTQQLIRAAEIRASANLAATKMSECVLGQSKRVDFCGKGYHLMSFPQSAPHGVVFLHVTYVFAQEKNFTTAPAICHDGKAHFPREGVFVSNGTHWFVTQRNFYEPQIITTDNTFVSGNCDVVIGIVNNTVYDPLQPELESGGGSGGGQIYEGKLTAEGLRFGIVASRFNHALVDRLVEGAIDAIVRHGGREEDITLVRVPGSWEIPVAAGELARKEDIDAVIAIGVLIRGATPHFDYIASEVSKGLADLSLELRKPITFGVITADTLEQAIERAGTKHGNKGWEAALSAIEMANLFKSLR

SEQ ID NO: 7883 - protein, 1307 aa, Artificial Sequence
  SARS-CoV-2/2019-nCoV/USA-CruiseA-18/2020__MT159716.1 spike protein (1-1147)(K986P_V987P_P1069F) LumSynth construct
MFVFLVLLPLVSSQCVNLTTRTQLPPAYTNSFTRGVYYPDKVFRSSVLHSTQDLFLPFFSNVTWFHAIHVSGTNGTKRFDNPVLPFNDGVYFASTEKSNIIRGWIFGTTLDSKTQSLLIVNNATNVVIKVCEFQFCNDPFLGVYYHKNNKSWMESELRVYSSANNCTFEYVSQPFLMDLEGKQGNFKNLREFVFKNIDGYFKIYSKHTPINLVRDLPQGFSALEPLVDLPIGINITRFQTLLALHRSYLTPGDSSSGWTAGAAAYYVGYLQPRTFLLKYNENGTITDAVDCALDPLSETKCTLKSFTVEKGIYQTSNFRVQPTESIVRFPNITNLCPFGEVFNATRFASVYAWNRKRISNCVADYSVLYNSASFSTFKCYGVSPTKLNDLCFTNVYADSFVIRGDEVRQIAPGQTGKIADYNYKLPDDFTGCVIAWNSNNLDSKVGGNYNYLYRLFRKSNLKPFERDISTEIYQAGSTPCNGVEGFNCYFPLQSYGFQPTNGVGYQPYRVVVLSFELLHAPATVCGPKKSTNLVKNKCVNFNFNGLTGTGVLTESNKKFLPFQQFGRDIADTTDAVRDPQTLEILDITPCSFGGVSVITPGTNTSNQVAVLYQDVNCTEVPVAIHADQLTPTWRVYSTGSNVFQTRAGCLIGAEHVNNSYECDIPIGAGICASYQTQTNSPRRARSVASQSIIAYTMSLGAENSVAYSNNSIAIPTNFTISVTTEILPVSMTKTSVDCTMYICGDSTECSNLLLQYGSFCTQLNRALTGIAVEQDKNTQEVFAQVKQIYKTPPIKDFGGFNFSQILPDPSKPSKRSFIEDLLFNKVTLADAGFIKQYGDCLGDIAARDLICAQKFNGLTVLPPLLTDEMIAQYTSALLAGTITSGWTFGAGAALQIPFAMQMAYRFNGIGVTQNVLYENQKLIANQFNSAIGKIQDSLSSTASALGKLQDVVNQNAQALNTLVKQLSSNFGAISSVLNDILSRLDPPEAEVQIDRLITGRLQSLQTYVTQQLIRAAEIRASANLAATKMSECVLGQSKRVDFCGKGYHLMSFPQSAPHGVVFLHVTYVFAQEKNFTTAPAICHDGKAHFPREGVFVSNGTHWFVTQRNFYEPQIITTDNTFVSGNCDVVIGIVNNTVYDPLQPELDSGGGSGGGQIYEGKLTAEGLRFGIVASRFNHALVDRLVEGAIDAIVRHGGREEDITLVRVPGSWEIPVAAGELARKEDIDAVIAIGVLIRGATPHFDYIASEVSKGLADLSLELRKPITFGVITADTLEQAIERAGTKHGNKGWEAALSAIEMANLFKSLR

SEQ ID NO: 7884 - protein, 1307 aa, Artificial Sequence
  SARS-CoV-2/SARS-CoV-2/Yunnan-01/human/2020/CHN__MT049951.1 spike protein (1-1147)(K986P_V987P_P1069F) LumSynth construct
MFVFLVLLPLVSSQCVNLTTRTQLPPANTNSFTRGVYYPDKVFRSSVLHSTQDLFLPFFSNVTWFHAIHVSGTNGTKRFDNPVLPFNDGVYFASTEKSNIIRGWIFGTTLDSKTQSLLIVNNATNVVIKVCEFQFCNDPFLGVYYHKNNKSWMESEFRVYSSANNCTFEYVSQPFLMDLEGKQGNFKNLREFVFKNIDGYFKIYSKHTPINLVRDLPQGFSALEPLVDLPIGINITRFQTLLALHRSYLTPGDSSSGWTAGAAAYYVGYLQPRTFLLKYNENGTITDAVDCALDPLSETKCTLKSFTVEKGIYQTSNFRVQPTESIVRFPNITNLCPFGEVFNATRFASVYAWNRKRISNCVADYSVLYNSASFSTFKCYGVSPTKLNDLCFTNVYADSFVIRGDEVRQIAPGQTGKIADYNYKLPDDFTGCVIAWNSNNLDSKVGGNYNYLYRLFRKSNLKPFERDISTEIYQAGSTPCNGVEGFNCYFPLQSYGFQPTNGVGYQPYRVVVLSFELLHAPATVCGPKKSTNLVKNKCVNFNFNGLTGTGVLTESNKKFLPFQQFGRDIADTTDAVRDPQTLEILDITPCSFGGVSVITPGTNTSNQVAVLYQDVNCTEVPVAIHADQLTPTWRVYSTGSNVFQTRAGCLIGAEHVNNSYECDIPIGAGICASYQTQTNSPRRARSVASQSIIAYTMSLGAENSVAYSNNSIAIPTNFTISVTTEILPVSMTKTSVDCTMYICGDSTECSNLLLQYGSFCTQLNRALTGIAVEQDKNTQEVFAQVKQIYKTPPIKDFGGFNFSQILPDPSKPSKRSFIEDLLFNKVTLADAGFIKQYGDCLGDIAARDLICAQKFNGLTVLPPLLTDEMIAQYTSALLAGTITSGWTFGAGAALQIPFAMQMAYRFNGIGVTQNVLYENQKLIANQFNSAIGKIQDSLSSTASALGKLQDVVNQNAQALNTLVKQLSSNFGAISSVLNDILSRLDPPEAEVQIDRLITGRLQSLQTYVTQQLIRAAEIRASANLAATKMSECVLGQSKRVDFCGKGYHLMSFPQSAPHGVVFLHVTYVFAQEKNFTTAPAICHDGKAHFPREGVFVSNGTHWFVTQRNFYEPQIITTDNTFVSGNCDVVIGIVNNTVYDPLQPELDSGGGSGGGQIYEGKLTAEGLRFGIVASRFNHALVDRLVEGAIDAIVRHGGREEDITLVRVPGSWEIPVAAGELARKEDIDAVIAIGVLIRGATPHFDYIASEVSKGLADLSLELRKPITFGVITADTLEQAIERAGTKHGNKGWEAALSAIEMANLFKSLR

SEQ ID NO: 7885 - protein, 1307 aa, Artificial Sequence
  SARS-CoV-2/USA/WA-UW292/2020__EPI_ISL_418077 spike protein (1-1147)(K986P_V987P_P1069F) LumSynth construct
MFVFLVLLPLVSSQCVNLTTRTQLPPAYTNSFTRGVYYPDKVFRSSVLHSTQDLFLPFFSNVTWFHAIHVSGTNGTKRFDNPVLPFNDGVYFASTEKSNIIRGWIFGTTLDSKTQSLLIVNNATNVVIKVCEFQFCNDPFLGVYYHKNNKSWMESEFRVYSSANNCTFEYVSQPFLMDLEGKQGNFKNLREFVFKNIDGYFKIYSKHTPINLVRDLPQGFSALEPLVDLPIGINITRFQTLLALHRSYLTPGDSSSGWTAGAAAYYVGYLQPRTFLLKYNENGTITDAVDCALDPLSETKCTLKSFTVEKGIYQTSNFRVQPTESIVRFPNITNLCPFGEVFNATRFASVYAWNRKRISNCVADYSVLYNSASFSTFKCYGVSPTKLNDLCFTNVYADSFVIRGDEVRQIAPGQTGKIADYNYKLPDDFTGCVIAWNSNNLDSKVGGNYNYLYRLFRKSNLKPFERDISTEIYQASSTPCNGVEGFNCYFPLQSYGFQPTNGVGYQPYRVVVLSFELLHAPATVCGPKKSTNLVKNKCVNFNFNGLTGTGVLTESNKKFLPFQQFGRDIADTTDAVRDPQTLEILDITPCSFGGVSVITPGTNTSNQVAVLYQDVNCTEVPVAIHADQLTPTWRVYSTGSNVFQTRAGCLIGAEHVNNSYECDIPIGAGICASYQTQTNSPRRARSVASQSIIAYTMSLGAENSVAYSNNSIAIPTNFTISVTTEILPVSMTKTSVDCTMYICGDSTECSNLLLQYGSFCTQLNRALTGIAVEQDKNTQEVFAQVKQIYKTPPIKDFGGFNFSQILPDPSKPSKRSFIEDLLFNKVTLADAGFIKQYGDCLGDIAARDLICAQKFNGLTVLPPLLTDEMIAQYTSALLAGTITSGWTFGAGAALQIPFAMQMAYRFNGIGVTQNVLYENQKLIANQFNSAIGKIQDSLSSTASALGKLQDVVNQNAQALNTLVKQLSSNFGAISSVLNDILSRLDPPEAEVQIDRLITGRLQSLQTYVTQQLIRAAEIRASANLAATKMSECVLGQSKRVDFCGKGYHLMSFPQSAPHGVVFLHVTYVFAQEKNFTTAPAICHDGKAHFPREGVFVSNGTHWFVTQRNFYEPQIITTDNTFVSGNCDVVIGIVNNTVYDPLQPELDSGGGSGGGQIYEGKLTAEGLRFGIVASRFNHALVDRLVEGAIDAIVRHGGREEDITLVRVPGSWEIPVAAGELARKEDIDAVIAIGVLIRGATPHFDYIASEVSKGLADLSLELRKPITFGVITADTLEQAIERAGTKHGNKGWEAALSAIEMANLFKSLR

SEQ ID NO: 7886 - protein, 1307 aa, Artificial Sequence
  SARS-CoV-2/Iceland/192/2020__EPI_ISL_417819 spike protein (1-1147)(K986P_V987P_P1069F) LumSynth construct
MFVFFVLLPLVSSQCVNLTTRTQLPPAYTNSFTRGVYYPDKVFRSSVLHSTQDLFLPFFSNVTWFHAIHVSGTNGTKRFDNPVLPFNDGVYFASTEKSNIIRGWIFGTTLDSKTQSLLIVNNATNVVIKVCEFQFCNDPFLGVYYHKNNKSWMESEFRVYSSANNCTFEYVSQPFLMDLEGKQGNFKNLREFVFKNIDGYFKIYSKHTPINLVRDLPQGFSALEPLVDLPIGINITRFQTLLALHRSYLTPGDSSSGWTAGAAAYYVGYLQPRTFLLKYNENGTITDAVDCALDPLSETKCTLKSFTVEKGIYQTSNFRVQPTESIVRFPNITNLCPFGEVFNATRFASVYAWNRKRISNCVADYSVLYNSASFSTFKCYGVSPTKLNDLCFTNVYADSFVIRGDEVRQIAPGQTGKIADYNYKLPDDFTGCVIAWNSNNLDSKVGGNYNYLYRLFRKSNLKPFERDISTEIYQAGSTPCNGVEGFNCYFPLQSYGFQPTNGVGYQPYRVVVLSFELLHAPATVCGPKKSTNLVKNKCVNFNFNGLTGTGVLTESNKKFLPFQQFGRDIADTTDAVRDPQTLEILDITPCSFGGVSVITPGTNTSNQVAVLYQGVNCTEVPVAIHADQLTPTWRVYSTGSNVFQTRAGCLIGAEHVNNSYECDIPIGAGICASYQTQTNSPRRARSVASQSIIAYTMSLGAENSVAYSNNSIAIPTNFTISVTTEILPVSMTKTSVDCTMYICGDSTECSNLLLQYGSFCTQLNRALTGIAVEQDKNTQEVFAQVKQIYKTPPIKDFGGFNFSQILPDPSKPSKRSFIEDLLFNKVTLADAGFIKQYGDCLGDIAARDLICAQKFNGLTVLPPLLTDEMIAQYTSALLAGTITSGWTFGAGAALQIPFAMQMAYRFNGIGVTQNVLYENQKLIANQFNSAIGKIQDSLSSTASALGKLQDVVNQNAQALNTLVKQLSSNFGAISSVLNDILSRLDPPEAEVQIDRLITGRLQSLQTYVTQQLIRAAEIRASANLAATKMSECVLGQSKRVDFCGKGYHLMSFPQSAPHGVVFLHVTYVFAQEKNFTTAPAICHDGKAHFPREGVFVSNGTHWFVTQRNFYEPQIITTDNTFVSGNCDVVIGIVNNTVYDPLQPELDSGGGSGGGQIYEGKLTAEGLRFGIVASRFNHALVDRLVEGAIDAIVRHGGREEDITLVRVPGSWEIPVAAGELARKEDIDAVIAIGVLIRGATPHFDYIASEVSKGLADLSLELRKPITFGVITADTLEQAIERAGTKHGNKGWEAALSAIEMANLFKSLR

SEQ ID NO: 7887 - protein, 1307 aa, Artificial Sequence
  SARS-CoV-2/Belgium/ULG-6939/2020__EPI_ISL_417020 spike protein (1-1147)(K986P_V987P_P1069F) LumSynth construct
MFVFLVLLPLVSSQCVNLTTRTQLPPAYTNSFTRGVYYPDKVFRSSVLHSTQDLFLPFFSNVTWFHAIHVSGTNGTKRFDNPVLPFNDGVYFASTEKSNIIRGWIFGTTLDSKTQSLLIVNNATNVVIKVCEFQFCNDPFLGVYYHKNNKSWMESEFRVYSSANNCTFEYVSQPFLMDLEGKQGNFKNLREFVFKNIDGYFKIYSKHTPINLVRDLPQGFSALEPLVDLPIGINITRFQTLLALHRSYLTPGDSSSGWTAGAAAYYVGYLQPRTFLLKYNENGTITDAVDCALDPLSETKCTLKSFTVEKGIYQTSNFRVQPTESIVRFPNITNLCPFGEVFNATRFASVYAWNRKRISNCVADYSVLYNSASFSTFKCYGVSPTKLNDLCFTNVYADSFVIRGDEVRQIAPGQTGKIADYNYKLPDDFTGCVIAWNSNNLDSKVGGNYNYLYRLFRKSNLKPFERDISTEIYQAGSTPCNGVEGFNCYFPLQSYGFQPTNGVGYQPYRVVVLSFELLHAPATVCGPKKSTNLVKNKCVNFNFNGLTGTGVLTESNKKFLPFQQFGRDIADTTDAVRDPQTLEILDITPCSFGGVSVITPGTNTSNQVAVLYQGVNCTEVPVAIHADQLTPTWRVYSTGSNVFQTRAGCLIGAEHVNNSYECDIPIGAGICASYQTQTNSPRRARSVASQSIIAYTMSLGAENSVVYSNNSIAIPTNFTISVTTEILPVSMTKTSVDCTMYICGDSTECSNLLLQYGSFCTQLNRALTGIAVEQDKNTQEVFAQVKQIYKTPPIKDFGGFNFSQILPDPSKPSKRSFIEDLLFNKVTLADAGFIKQYGDCLGDIAARDLICAQKFNGLTVLPPLLTDEMIAQYTSALLAGTITSGWTFGAGAALQIPFAMQMAYRFNGIGVTQNVLYENQKLIANQFNSAIGKIQDSLSSTASALGKLQDVVNQNAQALNTLVKQLSSNFGAISSVLNDILSRLDPPEAEVQIDRLITGRLQSLQTYVTQQLIRAAEIRASANLAATKMSECVLGQSKRVDFCGKGYHLMSFPQSAPHGVVFLHVTYVFAQEKNFTTAPAICHDGKAHFPREGVFVSNGTHWFVTQRNFYEPQIITTDNTFVSGNCDVVIGIVNNTVYDPLQPELDSGGGSGGGQIYEGKLTAEGLRFGIVASRFNHALVDRLVEGAIDAIVRHGGREEDITLVRVPGSWEIPVAAGELARKEDIDAVIAIGVLIRGATPHFDYIASEVSKGLADLSLELRKPITFGVITADTLEQAIERAGTKHGNKGWEAALSAIEMANLFKSLR

SEQ ID NO: 7888 - protein, 1307 aa, Artificial Sequence
  SARS-CoV-2/France/HF2496/2020__EPI_ISL_418231 spike protein (1-1147)(K986P_V987P_P1069F) LumSynth construct
MFVFLVLLPLVSSQCVNLTTRTQLPPAYTNSFTRGVYYPDKVFRSSVLHSTQDLFLPFFSNVTWFHAIHVSGTNGTKRFDNPVLPFNDGVYFASTEKSNIIRGWIFGTTLDSKTQSLLIVNNATNVVIKVCEFQFCNDPFLGVYYHKNNKSWMESEFRVYSSANNCTFEYVSQPFLMDLEGKQGNFKNLREFVFKNIDGYFKIYSKHTPINLVRDLPQGFSALEPLVDLPIGINITRFQTLLALHRSYLTPGDSSSGWTAGAAAYYVGYLQPRTFLLKYNENGTITDAVDCALDPLSETKCTLKSFTVEKGIYQTSNFRVQPTESIVRFPNITNLCPFGEVFNATRFASVYAWNRKRISNCVADYSVLYNSASFSTFKCYGVSPTKLNDLCFTNVYADSFVIRGDEVRQIAPGQTGKIADYNYKLPDDFTGCVIAWNSNNLDSKVGGNYNYLYRLFRKSNLKPFERDISTEIYQAGSTPCNGVEGFNCYFPLQSYGFQPTNGVGYQPYRVVVLSFELLHAPATVCGPKKSTNLVKNKCVNFNFNGLTGTGVLTESNKKFLPFQQFGRDIADTTDAVRDPQTLEILDITPCSFGGVSVITPGTNTSNQVAVLYQGVNCTEVPVAIHADQLTPTWRVYSTGSNVFQTRAGCLIGAEHVNNSYECDIPIGAGICASYQTQTNSPRRARSVASQSIIAYTMSLGAENSVAYSNNSIAIPTNFTISVTTEILPVSMTKTSVDCTMYICGDSTECSNLLLQYGSFCTQLNRALTGIAVEQDKNTQEVFAQVKQIYKTPPIKDFGGFNFSQILPDPSKPSKRSFIEDLLFNKVTLADAGFIKQYGDCLGDIVARDLICAQKFNGLTVLPPLLTDEMIAQYTSALLAGTITSGWTFGAGAALQIPFAMQMAYRFNGIGVTQNVLYENQKLIANQFNSAIGKIQDSLSSTASALGKLQDVVNQNAQALNTLVKQLSSNFGAISSVLNDILSRLDPPEAEVQIDRLITGRLQSLQTYVTQQLIRAAEIRASANLAATKMSECVLGQSKRVDFCGKGYHLMSFPQSAPHGVVFLHVTYVFAQEKNFTTAPAICHDGKAHFPREGVFVSNGTHWFVTQRNFYEPQIITTDNTFVSGNCDVVIGIVNNTVYDPLQPELDSGGGSGGGQIYEGKLTAEGLRFGIVASRFNHALVDRLVEGAIDAIVRHGGREEDITLVRVPGSWEIPVAAGELARKEDIDAVIAIGVLIRGATPHFDYIASEVSKGLADLSLELRKPITFGVITADTLEQAIERAGTKHGNKGWEAALSAIEMANLFKSLR

SEQ ID NO: 7889 - protein, 1307 aa, Artificial Sequence
  SARS-CoV-2/USA/WA-UW291/2020__EPI_ISL_418076 spike protein (1-1147)(K986P_V987P_P1069F) LumSynth construct
MFVFLVLLPLVSSQCVNLTTRTQLPPAYTNSFTRGVYYPDKVFRSSVLHSTQDLFLPFFSNVTWFHAIHVSGTNGTKRFDNPVLPFNDGVYFASTEKSNIIRGWIFGTTLDSKTQSLLIVNNATNVVIKVCEFQFCNDPFLGVYYHKNNKSWMESEFRVYSSANNCTFEYVSQPFLMDLEGKQGNFKNLREFVFKNIDGYFKIYSKHTPINLVRDLPQGFSALEPLVDLPIGINITRFQTLLALHRSYLTPGDSSSGWTAGAAAYYVGYLQPRTFLLKYNENGTITDAVDCALDPLSETKCTLKSFTVEKGIYQTSNFRVQPTESIVRFPNITNLCPFGEVFNATRFASVYAWNRKRISNCVADYSVLYNSASFSTFKCYGVSPTKLNDLCFTNVYADSFVIRGDEVRQIAPGQTGKIADYNYKLPDDFTGCVIAWNSNNLDSKVGGNYNYLYRLFRKSNLKPFERDISTEIYQAGSTPCNGVEGFNCYFPLQSYGFQPTNGVGYQPYRVVVLSFELLHAPATVCGPKKSTNLVKNKCVNFNFNGLTGTGVLTESNKKFLPFQQFGRDIADTTDAVRDPQTLEILDITPCSFGGVSVITPGTNTSNQVAVLYQGVNCTEVPVAIHADQLTPTWRVYSTGSNVFQTRAGCLIGAEHVNNSYECDIPIGAGICASYQTQTNSPRRARSVASQSIIAYTMSLGAENSVAYSNNSIAIPTNFTISVTTEILPVSMTKTSVDCTMYICGDSTECSNLLLQYGSFCTQLNRALTGIAVEQDKNTQEVFAQVKQIYKTPPIKDFGGFNFSQILPDPSKPSKRSFIEDLLFNKVTLADAGFIKQYGDCLGDIAARDLICAQKFNGLTVLPPLLTDEMIAQYTSALLAGTITSGWTFGAGAALQIPFAMQMAYRFNGIGVTQNVLYENQKLIANQFNSAIGKIQYSLSSTASALGKLQDVVNQNAQALNTLVKQLSSNFGAISSVLNDILSRLDPPEAEVQIDRLITGRLQSLQTYVTQQLIRAAEIRASANLAATKMSECVLGQSKRVDFCGKGYHLMSFPQSAPHGVVFLHVTYVFAQEKNFTTAPAICHDGKAHFPREGVFVSNGTHWFVTQRNFYEPQIITTDNTFVSGNCDVVIGIVNNTVYDPLQPELDSGGGSGGGQIYEGKLTAEGLRFGIVASRFNHALVDRLVEGAIDAIVRHGGREEDITLVRVPGSWEIPVAAGELARKEDIDAVIAIGVLIRGATPHFDYIASEVSKGLADLSLELRKPITFGVITADTLEQAIERAGTKHGNKGWEAALSAIEMANLFKSLR

SEQ ID NO: 7890 - protein, 1307 aa, Artificial Sequence; identical to SEQ ID NO: 7853
  SARS-CoV-2/Portugal/PT0034/2020__EPI_ISL_418019 spike protein (1-1147)(K986P_V987P_P1069F) LumSynth construct

SEQ ID NO: 7891 - protein, 1307 aa, Artificial Sequence; identical to SEQ ID NO: 7845
  SARS-CoV-2/Iceland/202/2020__EPI_ISL_417750 spike protein (1-1147)(K986P_V987P_P1069F) LumSynth construct

SEQ ID NO: 7892 - protein, 1307 aa, Artificial Sequence
  SARS-CoV-2/USA/WA-UW261/2020__EPI_ISL_418046 spike protein (1-1147)(K986P_V987P_P1069F) LumSynth construct
MFVFLVLLPLVSSQCVNLTTRTQLPPAYTNSFTRGVYYPDKVFRSSVLHSTQDLFLPFFSNVTWFHAIHVSGTNGTKRFDNPVLPFNDGVYFASTEKSNIIRGWIFGTTLDSKTQSLLIVNNATNVVIKVCEFQFCNDPFLGVYYHKNNKSWMESEFRVYSSANNCTFEYVSQPFLMDLEGKQGNFKNLREFVFKNIDGYFKIYSKHTPINLVRDLPQGFSALEPLVDLPIGINITRFQTLLALHRSYLTPGDSSSGWTAGAAAYYVGYLQPRTFLLKYNENGTITDAVDCALDPLSETKCTLKSFTVEKGIYQTSNFRVQPTESIVRFPNITNLCPFGEVFNATRFTSVYAWNRKRISNCVADYSVLYNSASFSTFKCYGVSPTKLNDLCFTNVYADSFVIRGDEVRQIAPGQTGKIADYNYKLPDDFTGCVIAWNSNNLDSKVGGNYNYLYRLFRKSNLKPFERDISTEIYQAGSTPCNGVEGFNCYFPLQSYGFQPTNGVGYQPYRVVVLSFELLHAPATVCGPKKSTNLVKNKCVNFNFNGLTGTGVLTESNKKFLPFQQFGRDIADTTDAVRDPQTLEILDITPCSFGGVSVITPGTNTSNQVAVLYQDVNCTEVPVAIHADQLTPTWRVYSTGSNVFQTRAGCLIGAEHVNNSYECDIPIGAGICASYQTQTNSPRRARSVASQSIIAYTMSLGAENSVAYSNNSIAIPTNFTISVTTEILPVSMTKTSVDCTMYICGDSTECSNLLLQYGSFCTQLNRALTGIAVEQDKNTQEVFAQVKQIYKTPPIKDFGGFNFSQILPDPSKPSKRSFIEDLLFNKVTLADAGFIKQYGDCLGDIAARDLICAQKFNGLTVLPPLLTDEMIAQYTSALLAGTITSGWTFGAGAALQIPFAMQMAYRFNGIGVTQNVLYENQKLIANQFNSAIGKIQDSLSSTASALGKLQDVVNQNAQALNTLVKQLSSNFGAISSVLNDILSRLDPPEAEVQIDRLITGRLQSLQTYVTQQLIRAAEIRASANLAATKMSECVLGQSKRVDFCGKGYHLMSFPQSAPHGVVFLHVTYVFAQEKNFTTAPAICHDGKAHFPREGVFVSNGTHWFVTQRNFYEPQIITTDNTFVSGNCDVVIGIVNNTVYDPLQPELDSGGGSGGGQIYEGKLTAEGLRFGIVASRFNHALVDRLVEGAIDAIVRHGGREEDITLVRVPGSWEIPVAAGELARKEDIDAVIAIGVLIRGATPHFDYIASEVSKGLADLSLELRKPITFGVITADTLEQAIERAGTKHGNKGWEAALSAIEMANLFKSLR

SEQ ID NO: 7893 - protein, 1307 aa, Artificial Sequence
  SARS-CoV-2/Portugal/PT0035/2020__EPI_ISL_418020 spike protein (1-1147)(K986P_V987P_P1069F) LumSynth construct
MFVFLVLLPLVSSQCVNLTTRTQLPPAYTNSFTRGVYYPDKVFRSSVLHSTQDLFLPFFSNVTWFHAIHVSGTNGTKRFDNPVLPFNDGVYFASTEKSNIIRGWIFGTTLDSKTQSLLIVNNATNVVIKVCEFQFCNDPFLGVYYHKNNKSWMESEFRVYSSANNCTFEYVSQPFLMDLEGKQGNFKNLREFVFKNIDGYFKIYSKHTPINLVRDLPQGFSALEPLVDLPIGINITRFQTLLALHRSYLTPGDSSSGWTAGAAAYYVGYLQPRTFLLKYNENGTITDAVDCALDPLSETKCTLKSFTVEKGIYQTSNFRVQPTESIVRFPNITNLCPFGEVFNATRFASVYAWNRKRISNCVADYSVLYNSASFSTFKCYGVSPTKLNDLCFTNVYADSFVIRGDEVRQIAPGQTGKIADYNYKLPDDFTGCVIAWNSNNLDSKVGGNYNYLYRLFRKSNLKPFERDISTEIYQAGSTPCNGVEGFNCYFPLQSYGFQPTNGVGYQPYRVVVLSFELLHAPATVCGPKKSTNLVKNKCVNFNFNGLTGTGVLTESNKKFLPFQQFGRDIADTTDAVRDPQTLEILDITPCSFGGVSVITPGTNTSNQVAVLYQDVNCTEVPVAIHADQLTPTWRVYSTGSNVFQTRAGCLIGAEHVNNSYECDIPIGAGICASYQTQTNSPRRARSVASQSIIAYTMSLGAENSVAYSNNSIAIPTNFTISVTTEILPVSMTKTSVDCTMYICGDSTECSNLLLQYGSFCTQLNRALTGIAVEQDKNTQEVFAQVKQIYKTPPIKDFGGFNFSQILPDPSKPSKRSFIEDLLFNKVTLADAGFIKQYGDCLGDISARDLICAQKFNGLTVLPPLLTDEMIAQYTSALLAGTITSGWTFGAGAALQIPFAMQMAYRFNGIGVTQNVLYENQKLIANQFNSAIGKIQDSLSSTASALGKLQDVVNQNAQALNTLVKQLSSNFGAISSVLNDILSRLDPPEAEVQIDRLITGRLQSLQTYVTQQLIRAAEIRASANLAATKMSECVLGQSKRVDFCGKGYHLMSFPQSAPHGVVFLHVTYVFAQEKNFTTAPAICHDGKAHFPREGVFVSNGTHWFVTQRNFYEPQIITTDNTFVSGNCDVVIGIVNNTVYDPLQPELDSGGGSGGGQIYEGKLTAEGLRFGIVASRFNHALVDRLVEGAIDAIVRHGGREEDITLVRVPGSWEIPVAAGELARKEDIDAVIAIGVLIRGATPHFDYIASEVSKGLADLSLELRKPITFGVITADTLEQAIERAGTKHGNKGWEAALSAIEMANLFKSLR

SEQ ID NO: 7894 - protein, 1307 aa, Artificial Sequence
  SARS-CoV-2/USA/NY-NYUMC7/2020__EPI_ISL_418192 spike protein (1-1147)(K986P_V987P_P1069F) LumSynth construct
MFVFLVLLPLVSSQCVNLTTRTQLPPAYTNSFTRGVYYPDKVFRSSVLHSTQDLFLPFFSNVTWFHAIHVSGTNGTKRFDNPVLPFNDGVYFASTEKSNIIRGWIFGTTLDSKTQSLLIVNNATNVVIKVCEFQFCNDPFLGVYHHKNNKSWMESEFRVYSSANNCTFEYVSQPFLMDLEGKQGNFKNLREFVFKNIDGYFKIYSKHTPINLVRDLPQGFSALEPLVDLPIGINITRFQTLLALHRSYLTPGDSSSGWTAGAAAYYVGYLQPRTFLLKYNENGTITDAVDCALDPLSETKCTLKSFTVEKGIYQTSNFRVQPTESIVRFPNITNLCPFGEVFNATRFASVYAWNRKRISNCVADYSVLYNSASFSTFKCYGVSPTKLNDLCFTNVYADSFVIRGDEVRQIAPGQTGKIADYNYKLPDDFTGCVIAWNSNNLDSKVGGNYNYLYRLFRKSNLKPFERDISTEIYQAGSTPCNGVEGFNCYFPLQSYGFQPTNGVGYQPYRVVVLSFELLHAPATVCGPKKSTNLVKNKCVNFNFNGLTGTGVLTESNKKFLPFQQFGRDIADTTDAVRDPQTLEILDITPCSFGGVSVITPGTNTSNQVAVLYQGVNCTEVPVAIHADQLTPTWRVYSTGSNVFQTRAGCLIGAEHVNNSYECDIPIGAGICASYQTQTNSPRRARSVASQSIIAYTMSLGAENSVAYSNNSIAIPTNFTISVTTEILPVSMTKTSVDCTMYICGDSTECSNLLLQYGSFCTQLNRALTGIAVEQDKNTQEVFAQVKQIYKTPPIKDFGGFNFSQILPDPSKPSKRSFIEDLLFNKVTLADAGFIKQYGDCLGDIAARDLICAQKFNGLTVLPPLLTDEMIAQYTSALLAGTITSGWTFGAGAALQIPFAMQMAYRFNGIGVTQNVLYENQKLIANQFNSAIGKIQDSLSSTASALGKLQDVVNQNAQALNTLVKQLSSNFGAISSVLNDILSRLDPPEAEVQIDRLITGRLQSLQTYVTQQLIRAAEIRASANLAATKMSECVLGQSKRVDFCGKGYHLMSFPQSAPHGVVFLHVTYVFAQEKNFTTAPAICHDGKAHFPREGVFVSNGTHWFVTQRNFYEPQIITTDNTFVSGNCDVVIGIVNNTVYDPLQPELDSGGGSGGGQIYEGKLTAEGLRFGIVASRFNHALVDRLVEGAIDAIVRHGGREEDITLVRVPGSWEIPVAAGELARKEDIDAVIAIGVLIRGATPHFDYIASEVSKGLADLSLELRKPITFGVITADTLEQAIERAGTKHGNKGWEAALSAIEMANLFKSLR

SEQ ID NO: 7895 - protein, 1307 aa, Artificial Sequence
  SARS-CoV-2/Iceland/189/2020__EPI_ISL_417709 spike protein (1-1147)(K986P_V987P_P1069F) LumSynth construct
MFVFLVLLPLVSSQCVNLTTRTQLPPAYTNSFTRGVYYPDKVFRSSVLHSTQDLFLPFFSNVTWFHAIHVSGTNGTKRFDNPVLPFNDGVYFASTEKSNIIRGWIFGTTLDSKTQSLLIVNNATNVVIKVCEFQFCNDPFLGVYYHKNNKSWMESEFRVYSSANNCTFEYVSQPFLMDLEGKQGNFKNLREFVFKNIDGYFKIYSKHTPINLVRDLPQGFSALEPLVDLPIGINITRFQTLLALHRSYLTPGDSSSGWTAGAAAYYVGYLQPRTFLLKYNENGTITDAVDCALDPLSETKCTLKSFTVEKGIYQTSNFRVQPTESIVRFPNITNLCPFGEVFNATRFASVYAWNRKRISNCVADYSVLYNSASFSTFKCYGVSPTKLNDLCFTNVYADSFVIRGDEVRQIAPGQTGKIADYNYKLPDDFTGCVIAWNSNNLDSKVGGNYNYLYRLFRKSNLKPFERDISTEIYQAGSTPCNGVEGFNCYFPLQSYGFQPTNGVGYQPYRVVVLSFELLHAPATVCGPKKSTNLVKNKCVNFNFNGLTGTGVLTESNKKFLPFQQFGRDIADTTDAVRDPQTLEILDITPCSFGGVSVITPGTNTSNQVAVLYQGVNCTEVPVAIHADQLTPTWRVYSTGSNVFQTRAGCLIGAEHVNNSYECDIPIGAGICASYQTQTNSPRRARSVASQSIIAYTMSLGAENSVAYSNNSIAIPTNFTISVTTEILPVSMTKTSVDCTMYICGDSTECSNLLLQYGSFCTQLNRALTGIAVEQDKNTQEVFAQVKQIYKTPPIKDFGGFNFSQILPDPSKPSKRSFIEDLLFNKVTLADAGFTKQYGDCLGDIAARDLICAQKFNGLTVLPPLLTDEMIAQYTSALLAGTITSGWTFGAGAALQIPFAMQMAYRFNGIGVTQNVLYENQKLIANQFNSAIGKIQDSLSSTASALGKLQDVVNQNAQALNTLVKQLSSNFGAISSVLNDILSRLDPPEAEVQIDRLITGRLQSLQTYVTQQLIRAAEIRASANLAATKMSECVLGQSKRVDFCGKGYHLMSFPQSAPHGVVFLHVTYVFAQEKNFTTAPAICHDGKAHFPREGVFVSNGTHWFVTQRNFYEPQIITTDNTFVSGNCDVVIGIVNNTVYDPLQPELDSGGGSGGGQIYEGKLTAEGLRFGIVASRFNHALVDRLVEGAIDAIVRHGGREEDITLVRVPGSWEIPVAAGELARKEDIDAVIAIGVLIRGATPHFDYIASEVSKGLADLSLELRKPITFGVITADTLEQAIERAGTKHGNKGWEAALSAIEMANLFKSLR

SEQ ID NO: 7896 - protein, 1307 aa, Artificial Sequence
  SARS-CoV-2/Australia/NSW56/2020__EPI_ISL_417408 spike protein (1-1147)(K986P_V987P_P1069F) LumSynth construct
MFVFLVLLPLVSSQCVNLTTRTQLPPAYTNSFTRGVYYPDKVFRSSVLHSTQDLFLPFFSNVTWFHAIHVSGTNGTKRFDNPVLPFNDGVYFASTEKSNIIRGWIFGTTLDSKTQSLLIVNNATNVVIKVCEFQFCNDPFLGVYYHKNNKSWMESEFRVYSSANNCTFEYVSQPFLMDLEGKQGNFKNLREFVFKNIDGYFKIYSKHTPINLVRDLPQGFSALEPLVDLPIGINITRFQTLLALHRSYLTPGDSSSGWTAGAAAYYVGYLQPRTFLLKYNENGTITDAVDCALDPLSETKCTLKSFTVEKGIYQTSNFRVQPTESIVRFPNITNLCPFGEVFNATRFASVYAWNRKRISNCVADYSVLYNSASFSTFKCYGVSPTKLNDLCFTNVYADSFVIRGDEVRQIAPGQTGKIADYNYKLPDDFTGCVIAWNSNNLDSKVGGNYNYLYRLFRKSNLKPFERDISTEIYQAGSTPCNGVEGFNCYFPLQSYGFQPTNGVGYQPYRVVVLSFELLHAPATVCGPKKSTNLVKNKCVNFNFNGLTGTGVLTESNKKFLPFQQFGRDIADTTDAVRDPQTLEILDITPCSFGGVSVITPGTNTSNQVAVLYQDVNCTEVPVAIHADQLTPTWRVYSTGSNVFQTRAGCLIGAEHVNNSYECDIPIGAGICASYQTQTNSPRRARSVASQSIIAYTMSLGAENSVAYSNNSIAIPTNFTISVTTEILPVSMTKTSVDCTMYICGDSTECSNLLLQYGSFCTQLNRALTGIAVEQDKNTQEVFAQVKQIYKTPPIKDFGGFNFSQILPDSSKPSKRSFIEDLLFNKVTLADAGFIKQYGDCLGDIAARDLICAQKFNGLTVLPPLLTDEMIAQYTSALLAGTITSGWTFGAGAALQIPFAMQMAYRFNGIGVTQNVLYENQKLIANQFNSAIGKIQDSLSSTASALGKLQDVVNQNAQALNTLVKQLSSNFGAISSVLNDILSRLDPPEAEVQIDRLITGRLQSLQTYVTQQLIRAAEIRASANLAATKMSECVLGQSKRVDFCGKGYHLMSFPQSAPHGVVFLHVTYVFAQEKNFTTAPAICHDGKAHFPREGVFVSNGTHWFVTQRNFYEPQIITTDNTFVSGNCDVVIGIVNNTVYDPLQPELDSGGGSGGGQIYEGKLTAEGLRFGIVASRFNHALVDRLVEGAIDAIVRHGGREEDITLVRVPGSWEIPVAAGELARKEDIDAVIAIGVLIRGATPHFDYIASEVSKGLADLSLELRKPITFGVITADTLEQAIERAGTKHGNKGWEAALSAIEMANLFKSLR

SEQ ID NO: 7897 - protein, 1307 aa, Artificial Sequence
  SARS-CoV-2/Iceland/280/2020__EPI_ISL_417608 spike protein (1-1147)(K986P_V987P_P1069F) LumSynth construct
MFVFLVLLPLVSSQCVNLTTRTQLPPAYTNSFTRGVYYPDKVFRSSVLHSTQDLFLPFFSNVTWFHAIHVSGTNGTKRFDNPVLPFNDGVYFASTEKSNIIRGWIFGTTLDSKTQSLLIVNNATNVVIKVCEFQFCNDPFLGVYYHKNNKSWMESEFRVYSSANNCTFEYVSQPFLMDLEGKQGNFKNLREFVFKNIDGYFKIYSKHTPINLVRDLPQGFSALEPLVDLPIGINITRFQTLLALHRSYLTPGDSSSGWTAGAAAYYVGYLQPRTFLLKYNENGTITDAVDCALDPLSETKCTLKSFTVEKGIYQTSNFRVQPTESIVRFPNITNLCPFGEVFNATRFASVYAWNRKRISNCVADYSVLYNSASFSTFKCYGVSPTKLNDLCFTNVYADSFVIRGDEVRQIAPGQTGKIADYNYKLPDDFTGCVIAWNSNNLDSKVGGNYNYLYRLFRKSNLKPFERDISTEIYQAGSTPCNGVEGFNCYFPLQSYGFQPTNGVGYQPYRVVVLSFELLHAPATVCGPKKSTNLVKNKCVNFNFNGLTGTGVLTESNKKFLPFQQFGRDIADTTDAVRDPQTLEILDITPCSFGGVSVITPGTNTSNQVAVLYQGVNCTEVPVAIHADQLTPTWRVYSTGSNVFQTRAGCLIGAEHVNNSYECDIPIGAGICASYHTQTNSPRRARSVASQSIIAYTMSLGAENSVAYSNNSIAIPTNFTISVTTEILPVSMTKTSVDCTMYICGDSTECSNLLLQYGSFCTQLNRALTGIAVEQDKNTQEVFAQVKQIYKTPPIKDFGGFNFSQILPDPSKPSKRSFIEDLLFNKVTLADAGFIKQYGDCLGDIAARDLICAQKFNGLTVLPPLLTDEMIAQYTSALLAGTITSGWTFGAGAALQIPFAMQMAYRFNGIGVTQNVLYENQKLIANQFNSAIGKIQDSLSSTASALGKLQDVVNQNAQALNTLVKQLSSNFGAISSVLNDILSRLDPPEAEVQIDRLITGRLQSLQTYVTQQLIRAAEIRASANLAATKMSECVLGQSKRVDFCGKGYHLMSFPQSAPHGVVFLHVTYVFAQEKNFTTAPAICHDGKAHFPREGVFVSNGTHWFVTQRNFYEPQIITTDNTFVSGNCDVVIGIVNNTVYDPLQPELDSGGGSGGGQIYEGKLTAEGLRFGIVASRFNHALVDRLVEGAIDAIVRHGGREEDITLVRVPGSWEIPVAAGELARKEDIDAVIAIGVLIRGATPHFDYIASEVSKGLADLSLELRKPITFGVITADTLEQAIERAGTKHGNKGWEAALSAIEMANLFKSLR

SEQ ID NO: 7898 - protein, 1307 aa, Artificial Sequence; identical to SEQ ID NO: 7853
  SARS-CoV-2/Iceland/247/2020__EPI_ISL_417575 spike protein (1-1147)(K986P_V987P_P1069F) LumSynth construct

SEQ ID NO: 7899 - protein, 1307 aa, Artificial Sequence
  SARS-CoV-2/Iceland/238/2020__EPI_ISL_417566 spike protein (1-1147)(K986P_V987P_P1069F) LumSynth construct
MFVFLVLLPLVSSQCVNLTTRTQLPPAYTNSFTRGVYYPDKVFRSSVLHSTQDLFLPFFSNVTWFHAIHVSGTNGTKRFDNPVLPFNDGVYFASTEKSNIIRGWIFGTTLDSKTQSLLIVNNATNVVIKVCEFQFCNDPFLGVYYHKNNKSWMESEFRVYSSANNCTFEYVSQPFLMDLEGKQGNFKNLREFVFKNIDGYFKIYSKHTPINLVRDLPQGFSALEPLVDLPIGINITRFQTLLALHRSYLTPGDSSSGWTAGAAAYYVGYLQPRTFLLKYNENGTITDAVDCALDPLSETKCTLKSFTVEKGIYQTSNFRVQPTESIVRFPNITNLCPFGEVFNATRFASVYAWNRKRISNCVADYSVLYNSASFSTFKCYGVSPTKLNDLCFTNVYADSFVIRGDEVRQIAPGQTGKIADYNYKLPDDFTGCVIAWNSNNLDSKVGGNYNYLYRLFRKSNLKPFERDISTEIYQAGSTPCNGVEGFNCYFPLQSYGFQPTNGVGYQPYRVVVLSFELLHAPATVCGPKKSTNLVKNKCVNFNFNGLTGTGVLTESNKKFLPFQQFGRDIADTTDAVRDPQTLEILDITPCSFGGVSVITPGTNTSNQVAVLYQGVNCTEVPVAIHADQLTPTWRVYSTGSNVFQTRAGCLIGAEHVNNSYECDIPIGAGICASYQTQTNSPRRARSVASQSIIAYTMSLGAENSVAYSNNSIAIPTNFTISVTTEILPVSMTKTSVDCTMYICGDSTECSNLLLQYGSFCTQLNRALTGIAVEQDKNTQEVFAQVKQIYKTPPIKDFGGFNFSQILPDPSKPSKRSFIEDLLFNKVTLADVGFIKQYGDCLGDIAARDLICAQKFNGLTVLPPLLTDEMIAQYTSALLAGTITSGWTFGAGAALQIPFAMQMAYRFNGIGVTQNVLYENQKLIANQFNSAIGKIQDSLSSTASALGKLQDVVNQNAQALNTLVKQLSSNFGAISSVLNDILSRLDPPEAEVQIDRLITGRLQSLQTYVTQQLIRAAEIRASANLAATKMSECVLGQSKRVDFCGKGYHLMSFPQSAPHGVVFLHVTYVFAQEKNFTTAPAICHDGKAHFPREGVFVSNGTHWFVTQRNFYEPQIITTDNTFVSGNCDVVIGIVNNTVYDPLQPELDSGGGSGGGQIYEGKLTAEGLRFGIVASRFNHALVDRLVEGAIDAIVRHGGREEDITLVRVPGSWEIPVAAGELARKEDIDAVIAIGVLIRGATPHFDYIASEVSKGLADLSLELRKPITFGVITADTLEQAIERAGTKHGNKGWEAALSAIEMANLFKSLR

SEQ ID NO: 7900 - protein, 1307 aa, Artificial Sequence
  SARS-CoV-2/Greece/16/2020__EPI_ISL_418265 spike protein (1-1147)(K986P_V987P_P1069F) LumSynth construct
MFVFLVLLPLVSSQCVNLTTRTQLPPAYTNSFTRGVYYPDKVFRSSVLHSTQDLFLPFFSNVTWFHAIHVSGTNGTKRFDNPVLPFNDGVYFASTEKSNIIRGWIFGTTLDSKTQSLLIVNNATNVVIKVCEFQFCNDPFLGVYYHKNNKSWMESEFRVYSSANNCTFEYVSQPFLMDLEGKQGNFKNLREFVFKNVDGYFKIYSKHTPINLVRDLPQGFSALEPLVDLPIGINITRFQTLLALHRSYLTPGDSSSGWTAGAAAYYVGYLQPRTFLLKYNENGTITDAVDCALDPLSETKCTLKSFTVEKGIYQTSNFRVQPTESIVRFPNITNLCPFGEVFNATRFASVYAWNRKRISNCVADYSVLYNSASFSTFKCYGVSPTKLNDLCFTNVYADSFVIRGDEVRQIAPGQTGKIADYNYKLPDDFTGCVIAWNSNNLDSKVGGNYNYLYRLFRKSNLKPFERDISTEIYQAGSTPCNGVEGFNCYFPLQSYGFQPTNGVGYQPYRVVVLSFELLHAPATVCGPKKSTNLVKNKCVNFNFNGLTGTGVLTESNKKFLPFQQFGRDIADTTDAVRDPQTLEILDITPCSFGGVSVITPGTNTSNQVAVLYQDVNCTEVPVAIHADQLTPTWRVYSTGSNVFQTRAGCLIGAEHVNNSYECDIPIGAGICASYQTQTNSPRRARSVASQSIIAYTMSLGAENSVAYSNNSIAIPTNFTISVTTEILPVSMTKTSVDCTMYICGDSTECSNLLLQYGSFCTQLNRALTGIAVEQDKNTQEVFAQVKQIYKTPPIKDFGGFNFSQILPDPSKPSKRSFIEDLLFNKVTLADAGFIKQYGDCLGDIAARDLICAQKFNGLTVLPPLLTDEMIAQYTSALLAGTITSGWTFGAGAALQIPFAMQMAYRFNGIGVTQNVLYENQKLIANQFNSAIGKIQDSLSSTASALGKLQDVVNQNAQALNTLVKQLSSNFGAISSVLNDILSRLDPPEAEVQIDRLITGRLQSLQTYVTQQLIRAAEIRASANLAATKMSECVLGQSKRVDFCGKGYHLMSFPQSAPHGVVFLHVTYVFAQEKNFTTAPAICHDGKAHFPREGVFVSNGTHWFVTQRNFYEPQIITTDNTFVSGNCDVVIGIVNNTVYDPLQPELDSGGGSGGGQIYEGKLTAEGLRFGIVASRFNHALVDRLVEGAIDAIVRHGGREEDITLVRVPGSWEIPVAAGELARKEDIDAVIAIGVLIRGATPHFDYIASEVSKGLADLSLELRKPITFGVITADTLEQAIERAGTKHGNKGWEAALSAIEMANLFKSLR

SEQ ID NO: 7901 - protein, 1307 aa, Artificial Sequence
  SARS-CoV-2/Iceland/319/2020__EPI_ISL_417648 spike protein (1-1147)(K986P_V987P_P1069F) LumSynth construct
MFVFLVLLPLVSSQCVNLTTRTQLPPAYTNSFTRGVYYPDKVFRSSVLHSTQDLFLPFFSNVTWFHAIHVSGTNGTKRFDNPVLPFNDGVYFASTEKSNIIRGWIFGTTLDSKTQSLLIVNNATNVVIKVCEFQFCNDPFLGVYYHKNNKSWMESEFRVYSSANNCTFEYVSQPFLIDLEGKQGNFKNLREFVFKNIDGYFKIYSKHTPINLVRDLPQGFSALEPLVDLPIGINITRFQTLLALHRSYLTPGDSSSGWTAGAAAYYVGYLQPRTFLLKYNENGTITDAVDCALDPLSETKCTLKSFTVEKGIYQTSNFRVQPTESIVRFPNITNLCPFGEVFNATRFASVYAWNRKRISNCVADYSVLYNSASFSTFKCYGVSPTKLNDLCFTNVYADSFVIRGDEVRQIAPGQTGKIADYNYKLPDDFTGCVIAWNSNNLDSKVGGNYNYLYRLFRKSNLKPFERDISTEIYQAGSTPCNGVEGFNCYFPLQSYGFQPTNGVGYQPYRVVVLSFELLHAPATVCGPKKSTNLVKNKCVNFNFNGLTGTGVLTESNKKFLPFQQFGRDIADTTDAVRDPQTLEILDITPCSFGGVSVITPGTNTSNQVAVLYQGVNCTEVPVAIHADQLTPTWRVYSTGSNVFQTRAGCLIGAEHVNNSYECDIPIGAGICASYQTQTNSPRRARSVASQSIIAYTMSLGAENSVAYSNNSIAIPTNFTISVTTEILPVSMTKTSVDCTMYICGDSTECSNLLLQYGSFCTQLNRALTGIAVEQDKNTQEVFAQVKQIYKTPPIKDFGGFNFSQILPDPSKPSKRSFIEDLLFNKVTLADAGFIKQYGDCLGDIAARDLICAQKFNGLTVLPPLLTDEMIAQYTSALLAGTITSGWTFGAGAALQIPFAMQMAYRFNGIGVTQNVLYENQKLIANQFNSAIGKIQDSLSSTASALGKLQDVVNQNAQALNTLVKQLSSNFGAISSVLNDILSRLDPPEAEVQIDRLITGRLQSLQTYVTQQLIRAAEIRASANLAATKMSECVLGQSKRVDFCGKGYHLMSFPQSAPHGVVFLHVTYVFAQEKNFTTAPAICHDGKAHFPREGVFVSNGTHWFVTQRNFYEPQIITTDNTFVSGNCDVVIGIVNNTVYDPLQPELDSGGGSGGGQIYEGKLTAEGLRFGIVASRFNHALVDRLVEGAIDAIVRHGGREEDITLVRVPGSWEIPVAAGELARKEDIDAVIAIGVLIRGATPHFDYIASEVSKGLADLSLELRKPITFGVITADTLEQAIERAGTKHGNKGWEAALSAIEMANLFKSLR

SEQ ID NO: 7902 - protein, 1307 aa, Artificial Sequence
  SARS-CoV-2/Congo/94/2020__EPI_ISL_417947 spike protein (1-1147)(K986P_V987P_P1069F) LumSynth construct
MFVFLVLLPLVSSQCVNLTTRTQLPPAYTNSFTRGVYYPDKVFRSSVLHSTQDLFLPFFSNVTWFHAIHVSGTNGTKRFDNPVLPFNDGVYFASTEKSNIIRGWIFGTTLDSKTQSLLIVNNATNVVIKVCEFQFCNDPFLGVYYHKNNKSWMESEFRVYSSANNCTFEYVSQPFLMDLEGKQGNFKNLREFVFKNIDGYFKIYSKHTPINLVRDLPQGFSALEPLVDLPIGINITRFQTLLALHRSYLTPGDSSSGWTAGAAAYYVGYLQPRTFLLKYNENGTITDAVDCALDPLSETKCTLKSFTVEKGIYQTSNFRVQPTESIVRFPNITNLCPFGEVFNATRFASVYAWNRKRISNCVADYSVLYNSASFSTFKCYGVSPTKLNDLCFTNVYADSFVIRGDEVRQIAPGQTGKIADYNYKLPDDFTGCVIAWNSNNLDSKVGGNYNYLYRLFRKSNLKPFERDISTEIYQAGSTPCNGVEGFNCYFPLQSYGFQPTNGVGYQPYRVVVLSFELLHAPATVCGPKKSTNLVKNKCVNFNFNGLTGTGVLTESNKKFLPFQQFGRDIADTTDAVRDPQTLEILDITPCSFGGVSVITPGTNTSNQVAVLYQGVNCTEVPVAIHADQLTPTWRVYSTGSNVFQTRAGCLIGAEHVNNSYECDIPIGAGICASYQTQTNSPRRARSVASQSIIAYTMSLGAENSVAYSNNSIAIPTNFTISVTTEILPVSMTKTSVDCTMYICGDSTECSNLLLQYGSFCTQLNRALTGIAVEQDKNTQEVFAQVKQIYKTPPIKDFGGFNFSQILPDPSKPSKRSFIEDILFNKVTLADAGFIKQYGDCLGDIAARDLICAQKFNGLTVLPPLLTDEMIAQYTSALLAGTITSGWTFGAGAALQIPFAMQMAYRFNGIGVTQNVLYENQKLIANQFNSAIGKIQDSLSSTASALGKLQDVVNQNAQALNTLVKQLSSNFGAISSVLNDILSRLDPPEAEVQIDRLITGRLQSLQTYVTQQLIRAAEIRASANLAATKMSECVLGQSKRVDFCGKGYHLMSFPQSAPHGVVFLHVTYVFAQEKNFTTAPAICHDGKAHFPREGVFVSNGTHWFVTQRNFYEPQIITTDNTFVSGNCDVVIGIVNNTVYDPLQPELDSGGGSGGGQIYEGKLTAEGLRFGIVASRFNHALVDRLVEGAIDAIVRHGGREEDITLVRVPGSWEIPVAAGELARKEDIDAVIAIGVLIRGATPHFDYIASEVSKGLADLSLELRKPITFGVITADTLEQAIERAGTKHGNKGWEAALSAIEMANLFKSLR

SEQ ID NO: 7903 - protein, 1307 aa, Artificial Sequence
  SARS-CoV-2/Congo/158/2020__EPI_ISL_417950 spike protein (1-1147)(K986P_V987P_P1069F) LumSynth construct
MFVFLVLLPLVSSQCVNLTTRTQLPPAYTNSFTRGVYYPDKVFRSSVLHSTQDLFLPFFSNVTWFHAIHVSGTNGTKRFDNPVLPFNDGVYFASTEKSNIIRGWIFGTTLDSKTQSLLIVNNATNVVIKVCEFQFCNDPFLGVYYHKNNKSWMESEFRVYSSANNCTFEYVSQPFLMDLEGKQGNFKNLREFVFKNIDGYFKIYSKHTPINLVRDLPQGFSALEPLVDLPIGINITRFQTLLALHRSYLTPGDSSSGWTAGAAAYYVGYLQPRTFLLKYNENGTITDAVDCALDPLSETKCTLKSFTVEKGIYQTSNFRVQPTESIVRFPNITNLCPFGEVFNATRFASVYAWNRKRISNCVADYSVLYNSASFSTFKCYGVSPTKLNDLCFTNVYADSFVIRGDEVRQIAPGQTGKIADYNYKLPDDFTGCVIAWNSNNLDSKVGGNYNYLYRLFRKSNLKPFERDISTEIYQAGSTPCNGVEGFNCYFPLQSYGFQPTNGVGYQPYRVVVLSFELLHAPATVCGPKKSTNLVKNKCVNFNFNGLTGTGVLTESNKKFLPFQQFGRDIADTTDAVRDPQTLEILDITPCSFGGVSVITPGTNTSNQVAVLYQDVNCTEVPVAIHADQLTPTWRVYSTGSNVFQTRAGCLIGAEHVNNSYECDIPIGAGICASYQTQTNSPRRARSVASQSIIAYTMSLGAENSVAYSNNSIAIPTNFTISVTTEILPVSMTKTSVDCTMYICGDSTECSNLLLQYGSFCTQLNRALTGIAVEQDKNTQEVFAQVKQIYKTPPIKDFGGFNFSQILPDPSKPSKRSFIEDLLFNKVTLADAGFIKQYGDCLGDIAARDLICAQKFNGLTVLPPLLTDEMIAQYTSALLAGTITSGWTFGAGAALQIPFAMQMAYRFNGIGVTQNVLYENQKLIANQFNSAIGKIQDSLSSTASALGKLQDVVNQNAQALNTLVKQLSSNFGAISSVLNDILSRLDPPEAEVQIDRLITGRLQSLQTYVTQQLIRAAEIRASANLAATKMSECVLGQSKRVDFCGKGYHLMSFPQSAPHGVVFLHVTYVFAQEKNFTTAPAICHDGKAHFPREGVFVSNGTHWFVTQRNFYEPQIITTDNTFLSGNCDVVIGIVNNTVYDPLQPELDSGGGSGGGQIYEGKLTAEGLRFGIVASRFNHALVDRLVEGAIDAIVRHGGREEDITLVRVPGSWEIPVAAGELARKEDIDAVIAIGVLIRGATPHFDYIASEVSKGLADLSLELRKPITFGVITADTLEQAIERAGTKHGNKGWEAALSAIEMANLFKSLR

SEQ ID NO: 7904 - protein, 1307 aa, Artificial Sequence
  SARS-CoV-2/USA/UT-00034/2020__EPI_ISL_417977 spike protein (1-1147)(K986P_V987P_P1069F) LumSynth construct
MFVFLVLLPLVSSQCVNLTTRTQLPPAYTNSFTRGVYYPDKVFRSSVLHSTQDLFLPFFSNVTWFHAIHVSGTNGTKRFDNPVLPFNDGVYFASTEKSNIIRGWIFGTTLDSKTQSLLIVNNATNVVIKVCEFQFCNDPFLGVYYYKNNKSWMESEFRVYSSANNCTFEYVSQPFLMDLEGKQGNFKNLREFVFKNIDGYFKIYSKHTPINLVRDLPQGFSALEPLVDLPIGINITRFQTLLALHRSYLTPGDSSSGWTAGAAAYYVGYLQPRTFLLKYNENGTITDAVDCALDPLSETKCTLKSFTVEKGIYQTSNFRVQPTESIVRFPNITNLCPFGEVFNATRFASVYAWNRKRISNCVADYSVLYNSASFSTFKCYGVSPTKLNDLCFTNVYADSFVIRGDEVRQIAPGQTGKIADYNYKLPDDFTGCVIAWNSNNLDSKVGGNYNYLYRLFRKSNLKPFERDISTEIYQAGSTPCNGVEGFNCYFPLQSYGFQPTNGVGYQPYRVVVLSFELLHAPATVCGPKKSTNLVKNKCVNFNFNGLTGTGVLTESNKKFLPFQQFGRDIADTTDAVRDPQTLEILDITPCSFGGVSVITPGTNTSNQVAVLYQGVNCTEVPVAIHADQLTPTWRVYSTGSNVFQTRAGCLIGAEHVNNSYECDIPIGAGICASYQTQTNSPRRARSVASQSIIAYTMSLGAENSVAYSNNSIAIPTNFTISVTTEILPVSMTKTSVDCTMYICGDSTECSNLLLQYGSFCTQLNRALTGIAVEQDKNTQEVFAQVKQIYKTPPIKDFGGFNFSQILPDPSKPSKRSFIEDLLFNKVTLADAGFIKQYGDCLGDIAARDLICAQKFNGLTVLPPLLTDEMIAQYTSALLAGTITSGWTFGAGAALQIPFAMQMAYRFNGIGVTQNVLYENQKLIANQFNSAIGKIQDSLSSTASALGKLQDVVNQNAQALNTLVKQLSSNFGAISSVLNDILSRLDPPEAEVQIDRLITGRLQSLQTYVTQQLIRAAEIRASANLAATKMSECVLGQSKRVDFCGKGYHLMSFPQSAPHGVVFLHVTYVFAQEKNFTTAPAICHDGKAHFPREGVFVSNGTHWFVTQRNFYEPQIITTDNTFVSGNCDVVIGIVNNTVYDPLQPELDSGGGSGGGQIYEGKLTAEGLRFGIVASRFNHALVDRLVEGAIDAIVRHGGREEDITLVRVPGSWEIPVAAGELARKEDIDAVIAIGVLIRGATPHFDYIASEVSKGLADLSLELRKPITFGVITADTLEQAIERAGTKHGNKGWEAALSAIEMANLFKSLR

SEQ ID NO: 7905 - protein, 1307 aa, Artificial Sequence
  SARS-CoV-2/USA/UT-00033/2020__EPI_ISL_417976 spike protein (1-1147)(K986P_V987P_P1069F) LumSynth construct
MFVFLVLLPLVSSQCVNLTTRTQLPPAYTNSFTRGVYYPDKVFRSSVLHSTQDLFLPFFSNVTWFHAIHVSGTNGTKRFDNPVLPFNDGVYFASTEKSNIIRGWIFGTTLDSKTQSLLIVNNATNVVIKVCEFQFCNDPFLGVYYHKNNKSWMESEFRVYSSANNCTFEYVSQPFLMDLEGKQGNFKNLREFVFKNIDGYFKIYSKHTPINLVRDLPQGFSALEPLVDLPIGINITRFQTLLALHRSYLTPGDSSSGLTAGAAAYYVGYLQPRTFLLKYNENGTITDAVDCALDPLSETKCTLKSFTVEKGIYQTSNFRVQPTESIVRFPNITNLCPFGEVFNATRFASVYAWNRKRISNCVADYSVLYNSASFSTFKCYGVSPTKLNDLCFTNVYADSFVIRGDEVRQIAPGQTGKIADYNYKLPDDFTGCVIAWNSNNLDSKVGGNYNYLYRLFRKSNLKPFERDISTEIYQAGSTPCNGVEGFNCYFPLQSYGFQPTNGVGYQPYRVVVLSFELLHAPATVCGPKKSTNLVKNKCVNFNFNGLTGTGVLTESNKKFLPFQQFGRDIADTTDAVRDPQTLEILDITPCSFGGVSVITPGTNTSNQVAVLYQGVNCTEVPVAIHADQLTPTWRVYSTGSNVFQTRAGCLIGAEHVNNSYECDIPIGAGICASYQTQTNSPRRARSVASQSIIAYTMSLGAENSVAYSNNSIAIPTNFTISVTTEILPVSMTKTSVDCTMYICGDSTECSNLLLQYGSFCTQLNRALTGIAVEQDKNTQEVFAQVKQIYKTPPIKDFGGFNFSQILPDPSKPSKRSFIEDLLFNKVTLADAGFIKQYGDCLGDIAARDLICAQKFNGLTVLPPLLTDEMIAQYTSALLAGTITSGWTFGAGAALQIPFAMQMAYRFNGIGVTQNVLYENQKLIANQFNSAIGKIQDSLSSTASALGKLQDVVNQNAQALNTLVKQLSSNFGAISSVLNDILSRLDPPEAEVQIDRLITGRLQSLQTYVTQQLIRAAEIRASANLAATKMSECVLGQSKRVDFCGKGYHLMSFPQSAPHGVVFLHVTYVFAQEKNFTTAPAICHDGKAHFPREGVFVSNGTHWFVTQRNFYEPQIITTDNTFVSGNCDVVIGIVNNTVYDPLQPELDSGGGSGGGQIYEGKLTAEGLRFGIVASRFNHALVDRLVEGAIDAIVRHGGREEDITLVRVPGSWEIPVAAGELARKEDIDAVIAIGVLIRGATPHFDYIASEVSKGLADLSLELRKPITFGVITADTLEQAIERAGTKHGNKGWEAALSAIEMANLFKSLR

SEQ ID NO: 7906 - protein, 1307 aa, Artificial Sequence
  SARS-CoV-2/USA/WI-13/2020__EPI_ISL_417516 spike protein (1-1147)(K986P_V987P_P1069F) LumSynth construct
MFVFLVLLPLVSSQCVNLTTRTQLPPAYTNSFTRGVYYPDKVFRSSVLHSTQDLFLPFFSNVTWFHAIHVSGTNGTKRFDNPVLPFNDGVYFASTEKSNIIRGWIFGTTLDSKTQSLLIVNNATNVVIKVCEFQFCNDPFLGVYYHKNNKSWMESEFRVYSSANNCTFEYVSQPFLMDLEGKQGNFKNLREFVFKNIDGYFKIYSKHTPINLVRDLPQGFSALEPLVDLPIGINITRFQTLLALHRSYLTPGDSSSGWTAGAAAYYVGYLQPRTFLLKYNENGTITDAVDCALDPLSETKCTLKSFTVEKGIYQTSNFRVLPTESIVRFPNITNLCPFGEVFNATRFASVYAWNRKRISNCVADYSVLYNSASFSTFKCYGVSPTKLNDLCFTNVYADSFVIRGDEVRQIAPGQTGKIADYNYKLPDDFTGCVIAWNSNNLDSKVGGNYNYLYRLFRKSNLKPFERDISTEIYQAGSTPCNGVEGFNCYFPLQSYGFQPTNGVGYQPYRVVVLSFELLHAPATVCGPKKSTNLVKNKCVNFNFNGLTGTGVLTESNKKFLPFQQFGRDIADTTDAVRDPQTLEILDITPCSFGGVSVITPGTNTSNQVAVLYQGVNCTEVPVAIHADQLTPTWRVYSTGSNVFQTRAGCLIGAEHVNNSYECDIPIGAGICASYQTQTNSPRRARSVASQSIIAYTMSLGAENSVAYSNNSIAIPTNFTISVTTEILPVSMTKTSVDCTMYICGDSTECSNLLLQYGSFCTQLNRALTGIAVEQDKNTQEVFAQVKQIYKTPPIKDFGGFNFSQILPDPSKPSKRSFIEDLLFNKVTLADAGFIKQYGDCLGDIAARDLICAQKFNGLTVLPPLLTDEMIAQYTSALLAGTITSGWTFGAGAALQIPFAMQMAYRFNGIGVTQNVLYENQKLIANQFNSAIGKIQDSLSSTASALGKLQDVVNQNAQALNTLVKQLSSNFGAISSVLNDILSRLDPPEAEVQIDRLITGRLQSLQTYVTQQLIRAAEIRASANLAATKMSECVLGQSKRVDFCGKGYHLMSFPQSAPHGVVFLHVTYVFAQEKNFTTAPAICHDGKAHFPREGVFVSNGTHWFVTQRNFYEPQIITTDNTFVSGNCDVVIGIVNNTVYDPLQPELDSGGGSGGGQIYEGKLTAEGLRFGIVASRFNHALVDRLVEGAIDAIVRHGGREEDITLVRVPGSWEIPVAAGELARKEDIDAVIAIGVLIRGATPHFDYIASEVSKGLADLSLELRKPITFGVITADTLEQAIERAGTKHGNKGWEAALSAIEMANLFKSLR

SEQ ID NO: 7907 - protein, 1306 aa, Artificial Sequence
  SARS-CoV-2/India/1-27/2020__EPI_ISL_413522 spike protein (1-1146)(K985P_V986P_P1068F) LumSynth construct
MFVFLVLLPLVSSQCVNLTTRTQLPPAYTNSFTRGVYYPDKVFRSSVLHSTQDLFLPFFSNVTWFHAIHVSGTNGTKRFDNPVLPFNDGVYFASTEKSNIIRGWIFGTTLDSKTQSLLIVNNATNVVIKVCEFQFCNDPFLGVYHKNNKSWMESEFRVYSSANNCTFEYVSQPFLMDLEGKQGNFKNLREFVFKNIDGYFKIYSKHTPINLVRDLPQGFSALEPLVDLPIGINITRFQTLLALHRSYLTPGDSSSGWTAGAAAYYVGYLQPRTFLLKYNENGTITDAVDCALDPLSETKCTLKSFTVEKGIYQTSNFRVQPTESIVRFPNITNLCPFGEVFNATRFASVYAWNRKRISNCVADYSVLYNSASFSTFKCYGVSPTKLNDLCFTNVYADSFVIRGDEVIQIAPGQTGKIADYNYKLPDDFTGCVIAWNSNNLDSKVGGNYNYLYRLFRKSNLKPFERDISTEIYQAGSTPCNGVEGFNCYFPLQSYGFQPTNGVGYQPYRVVVLSFELLHAPATVCGPKKSTNLVKNKCVNFNFNGLTGTGVLTESNKKFLPFQQFGRDIADTTDAVRDPQTLEILDITPCSFGGVSVITPGTNTSNQVAVLYQDVNCTEVPVAIHADQLTPTWRVYSTGSNVFQTRAGCLIGAEHVNNSYECDIPIGAGICASYQTQTNSPRRARSVASQSIIAYTMSLGAENSVAYSNNSIAIPTNFTISVTTEILPVSMTKTSVDCTMYICGDSTECSNLLLQYGSFCTQLNRALTGIAVEQDKNTQEVFAQVKQIYKTPPIKDFGGFNFSQILPDPSKPSKRSFIEDLLFNKVTLADAGFIKQYGDCLGDIAARDLICAQKFNGLTVLPPLLTDEMIAQYTSALLAGTITSGWTFGAGAALQIPFAMQMAYRFNGIGVTQNVLYENQKLIANQFNSAIGKIQDSLSSTASALGKLQDVVNQNAQALNTLVKQLSSNFGAISSVLNDILSRLDPPEAEVQIDRLITGRLQSLQTYVTQQLIRAAEIRASANLAATKMSECVLGQSKRVDFCGKGYHLMSFPQSAPHGVVFLHVTYVFAQEKNFTTAPAICHDGKAHFPREGVFVSNGTHWFVTQRNFYEPQIITTDNTFVSGNCDVVIGIVNNTVYDPLQPELDSGGGSGGGQIYEGKLTAEGLRFGIVASRFNHALVDRLVEGAIDAIVRHGGREEDITLVRVPGSWEIPVAAGELARKEDIDAVIAIGVLIRGATPHFDYIASEVSKGLADLSLELRKPITFGVITADTLEQAIERAGTKHGNKGWEAALSAIEMANLFKSLR

SEQ ID NO: 7908 - protein, 1301 aa, Artificial Sequence
  SARS-CoV-2/pangolin/Guangxi/P4L/2017__EPI_ISL_410538 spike protein (1-1141)(K980P_V981P_P1063F) LumSynth construct
MFVFLFVLPLVSSQCVNLTTRTGIPPGYTNSSTRGVYYPDKVFRSSILHLTQDLFLPFFSNVTWFNTINYQGGFKKFDNPVLPFNDGVYFASTEKSNIIRGWIFGTTLDARTQSLLIVNNATNVVIKVCEFQFCTDPFLGVYYHNNNKTWVENEFRVYSSANNCTFEYISQPFLMDLEGKQGNFKNLREFVFKNVDGYFKIYSKHTPIDLVRDLPRGFAALEPLVDLPIGINITRFQTLLALHRSYLTPGNLESGWTTGAAAYYVGYLQQRTFLLSYNQNGTITDAVDCSLDPLSETKCTLKSLTVEKGIYQTSNFRVQPTISIVRFPNITNLCPFGEVFNASKFASVYAWNRKRISNCVADYSVLYNSTSFSTFKCYGVSPTKLNDLCFTNVYADSFVVKGDEVRQIAPGQTGVIADYNYKLPDDFTGCVIAWNSVKQDALTGGNYGYLYRLFRKSKLKPFERDISTEIYQAGSTPCNGQVGLNCYYPLERYGFHPTTGVNYQPFRVVVLSFELLNGPATVCGPKLSTTLVKDKCVNFNFNGLTGTGVLTTSKKQFLPFQQFGRDISDTTDAVRDPQTLEILDITPCSFGGVSVITPGTNTSNQVAVLYQDVNCTEVPMAIHAEQLTPAWRVYSAGANVFQTRAGCLVGAEHVNNSYECDIPVGAGICASYHSMSSLRSVNQRSIIAYTMSLGAENSVAYSNNSIAIPTNFTISVTTEILPVSMTKTSVDCTMYICGDSIECSNLLLQYGSFCTQLNRALTGIAVEQDKNTQEVFAQVKQIYKTPPIKDFGGFNFSQILPDPSKPSKRSFIEDLLFNKVTLADAGFIKQYGDCLGDIAARDLICAQKFNGLTVLPPLLTDEMIAQYTSALLAGTITSGWTFGAGAALQIPFAMQMAYRFNGIGVTQNVLYENQKLIANQFNSAIGKIQDSLSSTASALGKLQDVVNQNAQALNTLVKQLSSNFGAISSVLNDILSRLDPPEAEVQIDRLITGRLQSLQTYVTQQLIRAAEIRASANLAATKMSECVLGQSKRVDFCGKGYHLMSFPQSAPHGVVFLHVTYVFAQEKNFTTAPAICHEGKAHFPREGVFVSNGTHWFITQRNFYEPQIITTDNTFVSGSCDVVIGIVNNTVYDPLQPELDSGGGSGGGQIYEGKLTAEGLRFGIVASRFNHALVDRLVEGAIDAIVRHGGREEDITLVRVPGSWEIPVAAGELARKEDIDAVIAIGVLIRGATPHFDYIASEVSKGLADLSLELRKPITFGVITADTLEQAIERAGTKHGNKGWEAALSAIEMANLFKSLR

SEQ ID NO: 7909 - protein, 1301 aa, Artificial Sequence
  SARS-CoV-2/pangolin/Guangxi/P5L/2017__EPI_ISL_410540 spike protein (1-1141)(K980P_V981P_P1063F) LumSynth construct
MFVFLFVLPLVSSQCVNLTTRTGIPPGYTNSSTRGVYYPDKVFRSSILHLTQDLFLPFFSNVTWFNTINYQGGFKKFDNPVLPFNDGVYFASTEKSNIIRGWIFGTTLDARTQSLLIVNNATNVVIKVCEFQFCTDPFLGVYYHNNNKTWVENEFRVYSSANNCTFEYISQPFLMDLEGKQGNFKNLREFVFKNVDGYFKIYSKHTPIDLVRDLPRGFAALEPLVDLPIGINITRFQTLLALHRSYLTPGKLESGWTTGAAAYYVGYLQQRTFLLSYNQNGTITDAVDCSLDPLSETKCTLKSLTVEKGIYQTSNFRVQPTISIVRFPNITNLCPFGEVFNASKFASVYAWNRKRISNCVADYSVLYNSTSFSTFKCYGVSPTKLNDLCFTNVYADSFVVKGDEVRQIAPGQTGVIADYNYKLPDDFTGCVIAWNSVKQDALTGGNYGYLYRLFRKSKLKPFERDISTEIYQAGSTPCNGQVGLNCYYPLERYGFHPTTGVNYQPFRVVVLSFELLNGPATVCGPKLSTTLVKDKCVNFNFNGLTGTGVLTTSKKQFLPFQQFGRDISDTTDAVRDPQTLEILDITPCSFGGVSVITPGTNTSNQVAVLYQDVNCTEVPMAIHAEQLTPAWRVYSAGANVFQTRAGCLVGAEHVNNSYECDIPVGAGICASYHSMSSFRSVNQRSIIAYTMSLGAENSVAYSNNSIAIPTNFTISVTTEILPVSMTKTSVDCTMYICGDSIECSNLLLQYGSFCTQLNRALTGIAVEQDKNTQEVFAQVKQIYKTPPIKDFGGFNFSQILPDPSKPSKRSFIEDLLFNKVTLADAGFIKQYGDCLGDIAARDLICAQKFNGLTVLPPLLTDEMIAQYTSALLAGTITSGWTFGAGAALQIPFAMQMAYRFNGIGVTQNVLYENQKLIANQFNSAIGKIQDSLSSTASALGKLQDVVNQNAQALNTLVKQLSSNFGAISSVLNDILSRLDPPEAEVQIDRLITGRLQSLQTYVTQQLIRAAEIRASANLAATKMSECVLGQSKRVDFCGKGYHLMSFPQSAPHGVVFLHVTYVFAQEKNFTTAPAICHEGKAHFPREGVFVSNGTHWFITQRNFYEPQIITTDNTFVSGSCDVVIGIVNNTVYDPLQPELDSGGGSGGGQIYEGKLTAEGLRFGIVASRFNHALVDRLVEGAIDAIVRHGGREEDITLVRVPGSWEIPVAAGELARKEDIDAVIAIGVLIRGATPHFDYIASEVSKGLADLSLELRKPITFGVITADTLEQAIERAGTKHGNKGWEAALSAIEMANLFKSLR

SEQ ID NO: 7910 - protein, 1301 aa, Artificial Sequence
  SARS-CoV-2/pangolin/Guangxi/P5E/2017__EPI_ISL_410541 spike protein (1-1141)(K980P_V981P_P1063F) LumSynth construct
MFVFLFVLPLVSSQCVNLTTRTGIPPGYTNSSTRGVYYPDKVFRSSILHLTQDLFLPFFSNVTWFNTITYQGGSKKFDNPVLPFNDGVYFASTEKSNIIRGWIFGTTLDARTQSLLIVNNATNVVIKVCEFQFCTDPFLGVYYHNNNKTWVENEFRVYSSANNCTFEYISQPFLMDLEGKQGNFKNLREFVFKNVDGYFKIYSKHTPIDLVRDLPRGFAALEPLVDLPIGINITRFQTLLALHRSYLTPGKLESGWTTGAAAYYVGYLQQRTFLLSYNQNGTITDAVDCSLDPLSETKCTLKSLTVEKGIYQTSNFRVQPTISIVRFPNITNLCPFGEVFNASKFASVYAWNRKRISNCVADYSVLYNSTSFSTFKCYGVSPTKLNDLCFTNVYADSFVVKGDEVRQIAPGQTGVIADYNYKLPDDFTGCVIAWNSVKQDALTGDNYGYLYRLFRKSKLKPFERDISTEIYQAGSTPCNGQVGLNCYYPLERYGFHPTTGVNYQPFRVVVLSFELLNGPATVCGPKLSTTLVKDKCVNFNFNGLTGTGVLTTSKKQFLPFQQFGRDISDTTDAVRDPQTLEILDITPCSFGGVSVITPGTNTSNQVAVLYQDVNCTEVPMAIHAEQLTPAWRVYSAGANVFQTRAGCLVGAEHVNNSYECDIPVGAGICASYHSMSSFRSVNQRSIIAYTMSLGAENSVAYSNNSIAIPTNFTISVTTEILPVSMTKTSVDCTMYICGDSIECSNLLLQYGSFCTQLNRALTGIAVEQDKNTQEVFAQVKQIYKTPPIKDFGGFNFSQILPDPSKPSKRSFIEDLLFNKVTLADAGFIKQYGDCLGDIAARDLICAQKFNGLTVLPPLLTDEMIAQYTSALLAGTITSGWTFGAGAALQIPFAMQMAYRFNGIGVTQNVLYENQKLIANQFNSAIGKIQDSLSSTASALGKLQDVVNQNAQALNTLVKQLSSNFGAISSVLNDILSRLDPPEAEVQIDRLITGRLQSLQTYVTQQLIRAAEIRASANLAATKMSECVLGQSKRVDFCGKGYHLMSFPQSAPHGVVFLHVTYVFAQEKNFTTAPAICHEGKAHFPREGVFVSNGTHWFITQRNFYEPQIITTDNTFVSGSCDVVIGIVNNTVYDPLQPELDSGGGSGGGQIYEGKLTAEGLRFGIVASRFNHALVDRLVEGAIDAIVRHGGREEDITLVRVPGSWEIPVAAGELARKEDIDAVIAIGVLIRGATPHFDYIASEVSKGLADLSLELRKPITFGVITADTLEQAIERAGTKHGNKGWEAALSAIEMANLFKSLR

SEQ ID NO: 7911 - protein, 1299 aa, Artificial Sequence
  SARS-CoV-2/pangolin/Guangxi/P1E/2017__EPI_ISL_410539 spike protein (1-1139)(K978P_V979P_P1061F) LumSynth construct
MFVFLFVLPLVSSQCVNLTTRTGIQPGYTNSSTRGVYYPDKVFRSSILHLTQDLFLPFFSNVTWFNTINYQGGFKKFDNPVLPFNDGVYFASTEKSNIIRGWIFGTTLDARTQSLLIVNNATNVVIKVCEFQFCTDPFLGVYYHNNNKTWVENEFRVYSSANNCTFEYISQPFLMDLEGKQGNFKNLREFVFKNVDGYFKIYSKHTPIDLVRDLPRGFAALEPLVDLPIGINITRFQTLLALHRSYLTPGKLESGWTTGAAAYYVGYLQQRTFLLSYNQNGTITDAVDCSLDPLSETKCTLKSLTVEKGIYQTSNFRVQPTISIVRFPNITNLCPFGEVFNASKFASVYAWNRKRISNCVADYSVLYNSTSFSTFKCYGVSPTKLNDLCFTNVYADSFVVKGDEVRQIAPGQTGVIADYNYKLPDDFTGCVIAWNSVKQDALTGGNYLYRLFRKSKLKPFERDISTEIYQAGSTPCNGQVGLNCYYPLERYGFHPTTGVNYQPFRVVVLSFELLNGPATVCGPKLSTTLVKDKCVNFNFNGLTGTGVLTTSKKQFLPFQQFGRDISDTTDAVRDPQTLEILDITPCSFGGVSVITPGTNTSNQVAVLYQDVNCTEVPMAIHAEQLTPAWRVYSAGANVFQTRAGCLVGAEHVNNSYECDIPVGAGICASYHSMSSLRSVNQRSIIAYTMSLGAENSVAYSNNSIAIPTNFTISVTTEILPVSMTKTSVDCTMYICGDSIECSNLLLQYGSFCTQLNRALTGIAVEQDKNTQEVFAQVKQIYKTPPIKDFGGFNFSQILPDPSKPSKRSFIEDLLFNKVTLADAGFIKQYGDCLGDIAARDLICAQKFNGLTVLPPLLTDEMIAQYTSALLAGTITSGWTFGAGAALQIPFAMQMAYRFNGIGVTQNVLYENQKLIANQFNSAIGKIQDSLSSTASALGKLQDVVNQNAQALNTLVKQLSSNFGAISSVLNDILSRLDPPEAEVQIDRLITGRLQSLQTYVTQQLIRAAEIRASANLAATKMSECVLGQSKRVDFCGKGYHLMSFPQSAPHGVVFLHVTYVFAQEKNFTTAPAICHEGKAHFPREGVFVSNGTHWFITQRNFYEPQIITTDNTFVSGSCDVVIGIVNNTVYDPLQPELDSGGGSGGGQIYEGKLTAEGLRFGIVASRFNHALVDRLVEGAIDAIVRHGGREEDITLVRVPGSWEIPVAAGELARKEDIDAVIAIGVLIRGATPHFDYIASEVSKGLADLSLELRKPITFGVITADTLEQAIERAGTKHGNKGWEAALSAIEMANLFKSLR

SEQ ID NO: 7912 - protein, 1307 aa, Artificial Sequence
  SARS-CoV-2/Wuhan/WIV05/2019__EPI_ISL_402128 spike protein (1-1147)(K986P_V987P_ H1048Q_H1064N_ H1083N_H1101N) LumSynth construct
MFVFLVLLPLVSSQCVNLTTRTQLPPAYTNSFTRGVYYPDKVFRSSVLHSTQDLFLPFFSNVTWFHAIHVSGTNGTKRFDNPVLPFNDGVYFASTEKSNIIRGWIFGTTLDSKTQSLLIVNNATNVVIKVCEFQFCNDPFLGVYYHKNNKSWMESEFRVYSSANNCTFEYVSQPFLMDLEGKQGNFKNLREFVFKNIDGYFKIYSKHTPINLVRDLPQGFSALEPLVDLPIGINITRFQTLLALHRSYLTPGDSSSGWTAGAAAYYVGYLQPRTFLLKYNENGTITDAVDCALDPLSETKCTLKSFTVEKGIYQTSNFRVQPTESIVRFPNITNLCPFGEVFNATRFASVYAWNRKRISNCVADYSVLYNSASFSTFKCYGVSPTKLNDLCFTNVYADSFVIRGDEVRQIAPGQTGKIADYNYKLPDDFTGCVIAWNSNNLDSKVGGNYNYLYRLFRKSNLKPFERDISTEIYQAGSTPCNGVEGFNCYFPLQSYGFQPTNGVGYQPYRVVVLSFELLHAPATVCGPKKSTNLVKNKCVNFNFNGLTGTGVLTESNKKFLPFQQFGRDIADTTDAVRDPQTLEILDITPCSFGGVSVITPGTNTSNQVAVLYQDVNCTEVPVAIHADQLTPTWRVYSTGSNVFQTRAGCLIGAEHVNNSYECDIPIGAGICASYQTQTNSPRRARSVASQSIIAYTMSLGAENSVAYSNNSIAIPTNFTISVTTEILPVSMTKTSVDCTMYICGDSTECSNLLLQYGSFCTQLNRALTGIAVEQDKNTQEVFAQVKQIYKTPPIKDFGGFNFSQILPDPSKPSKRSFIEDLLFNKVTLADAGFIKQYGDCLGDIAARDLICAQKFNGLTVLPPLLTDEMIAQYTSALLAGTITSGWTFGAGAALQIPFAMQMAYRFNGIGVTQNVLYENQKLIANQFNSAIGKIQDSLSSTASALGKLQDVVNQNAQALNTLVKQLSSNFGAISSVLNDILSRLDPPEAEVQIDRLITGRLQSLQTYVTQQLIRAAEIRASANLAATKMSECVLGQSKRVDFCGKGYQLMSFPQSAPHGVVFLNVTYVPAQEKNFTTAPAICNDGKAHFPREGVFVSNGTNWFVTQRNFYEPQIITTDNTFVSGNCDVVIGIVNNTVYDPLQPELDSGGGSGGGQIYEGKLTAEGLRFGIVASRFNHALVDRLVEGAIDAIVRHGGREEDITLVRVPGSWEIPVAAGELARKEDIDAVIAIGVLIRGATPHFDYIASEVSKGLADLSLELRKPITFGVITADTLEQAIERAGTKHGNKGWEAALSAIEMANLFKSLR

SEQ ID NO: 7913 - protein, 1303 aa, Artificial Sequence
  SARS-CoV-2/bat/Yunnan/RaTG13/2013__EPI_ISL_402131 spike protein (1-1143)(K982P_V983P_ H1044Q_H1060N_ H1079N_H1097N) LumSynth construct
MFVFLVLLPLVSSQCVNLTTRTQLPPAYTNSSTRGVYYPDKVFRSSVLHLTQDLFLPFFSNVTWFHAIHVSGTNGIKRFDNPVLPFNDGVYFASTEKSNIIRGWIFGTTLDSKTQSLLIVNNATNVVIKVCEFQFCNDPFLGVYYHKNNKSWMESEFRVYSSANNCTFEYVSQPFLMDLEGKQGNFKNLREFVFKNIDGYFKIYSKHTPINLVRDLPPGFSALEPLVDLPIGINITRFQTLLALHRSYLTPGDSSSGWTAGAAAYYVGYLQPRTFLLKYNENGTITDAVDCALDPLSETKCTLKSFTVEKGIYQTSNFRVQPTDSIVRFPNITNLCPFGEVFNATTFASVYAWNRKRISNCVADYSVLYNSTSFSTFKCYGVSPTKLNDLCFTNVYADSFVITGDEVRQIAPGQTGKIADYNYKLPDDFTGCVIAWNSKHIDAKEGGNFNYLYRLFRKANLKPFERDISTEIYQAGSKPCNGQTGLNCYYPLYRYGFYPTDGVGHQPYRVVVLSFELLNAPATVCGPKKSTNLVKNKCVNFNFNGLTGTGVLTESNKKFLPFQQFGRDIADTTDAVRDPQTLEILDITPCSFGGVSVITPGTNASNQVAVLYQDVNCTEVPVAIHADQLTPTWRVYSTGSNVFQTRAGCLIGAEHVNNSYECDIPIGAGICASYQTQTNSRSVASQSIIAYTMSLGAENSVAYSNNSIAIPTNFTISVTTEILPVSMTKTSVDCTMYICGDSTECSNLLLQYGSFCTQLNRALTGIAVEQDKNTQEVFAQVKQIYKTPPIKDFGGFNFSQILPDPSKPSKRSFIEDLLFNKVTLADAGFIKQYGDCLGDIAARDLICAQKFNGLTVLPPLLTDEMIAQYTSALLAGTITSGWTFGAGAALQIPFAMQMAYRFNGIGVTQNVLYENQKLIANQFNSAIGKIQDSLSSTASALGKLQDVVNQNAQALNTLVKQLSSNFGAISSVLNDILSRLDPPEAEVQIDRLITGRLQSLQTYVTQQLIRAAEIRASANLAATKMSECVLGQSKRVDFCGKGYQLMSFPQSAPHGVVFLNVTYVPAQEKNFTTAPAICNDGKAHFPREGVFVSNGTNWFVTQRNFYEPQIITTDNTFVSGSCDVVIGIVNNTVYDPLQPELDSGGGSGGGQIYEGKLTAEGLRFGIVASRFNHALVDRLVEGAIDAIVRHGGREEDITLVRVPGSWEIPVAAGELARKEDIDAVIAIGVLIRGATPHFDYIASEVSKGLADLSLELRKPITFGVITADTLEQAIERAGTKHGNKGWEAALSAIEMANLFKSLR

SEQ ID NO: 7914 - protein, 1307 aa, Artificial Sequence
  SARS-CoV-2/Wuhan/HBCDC-HB-01/2019__EPI_ISL_402132 spike protein (1-1147)(K986P_V987P_ H1048Q_H1064N_ H1083N_H1101N) LumSynth construct
MFVFLVLLPLVSSQCVNLTTRTQLPPAYTNSITRGVYYPDKVFRSSVLHSTQDLFLPFFSNVTWFHAIHVSGTNGTKRFDNPVLPFNDGVYFASTEKSNIIRGWIFGTTLDSKTQSLLIVNNATNVVIKVCEFQFCNDPFLGVYYHKNNKSWMESEFRVYSSANNCTFEYVSQPFLMDLEGKQGNFKNLREFVFKNIDGYFKIYSKHTPINLVRDLPQGFSALEPLVDLPIGINITRFQTLLALHRSYLTPGDSSSGWTAGAAAYYVGYLQPRTFLLKYNENGTITDAVDCALDPLSETKCTLKSFTVEKGIYQTSNFRVQPTESIVRFPNITNLCPFGEVFNATRFASVYAWNRKRISNCVADYSVLYNSASFSTFKCYGVSPTKLNDLCFTNVYADSFVIRGDEVRQIAPGQTGKIADYNYKLPDDFTGCVIAWNSNNLDSKVGGNYNYLYRLFRKSNLKPFERDISTEIYQAGSTPCNGVEGFNCYFPLQSYGFQPTNGVGYQPYRVVVLSFELLHAPATVCGPKKSTNLVKNKCVNFNFNGLTGTGVLTESNKKFLPFQQFGRDIADTTDAVRDPQTLEILDITPCSFGGVSVITPGTNTSNQVAVLYQDVNCTEVPVAIHADQLTPTWRVYSTGSNVFQTRAGCLIGAEHVNNSYECDIPIGAGICASYQTQTNSPRRARSVASQSIIAYTMSLGAENSVAYSNNSIAIPTNFTISVTTEILPVSMTKTSVDCTMYICGDSTECSNLLLQYGSFCTQLNRALTGIAVEQDKNTQEVFAQVKQIYKTPPIKDFGGFNFSQILPDPSKPSKRSFIEDLLFNKVTLADAGFIKQYGDCLGDIAARDLICAQKFNGLTVLPPLLTDEMIAQYTSALLAGTITSGWTFGAGAALQIPFAMQMAYRFNGIGVTQNVLYENQKLIANQFNSAIGKIQDSLSSTASALGKLQDVVNQNAQALNTLVKQLSSNFGAISSVLNDILSRLDPPEAEVQIDRLITGRLQSLQTYVTQQLIRAAEIRASANLAATKMSECVLGQSKRVDFCGKGYQLMSFPQSAPHGVVFLNVTYVPAQEKNFTTAPAICNDGKAHFPREGVFVSNGTNWFVTQRNFYEPQIITTDNTFVSGNCDVVIGIVNNTVYDPLQPELDSGGGSGGGQIYEGKLTAEGLRFGIVASRFNHALVDRLVEGAIDAIVRHGGREEDITLVRVPGSWEIPVAAGELARKEDIDAVIAIGVLIRGATPHFDYIASEVSKGLADLSLELRKPITFGVITADTLEQAIERAGTKHGNKGWEAALSAIEMANLFKSLR

SEQ ID NO: 7915 - protein, 1307 aa, Artificial Sequence
  SARS-CoV-2/Guangdong/20SF028/2020__EPI_ISL_403936 spike protein (1-1147)(K986P_V987P_ H1048Q_H1064N_ H1083N_H1101N) LumSynth construct
MFVFLVLLPLVSSQCVNLTTRTQLPPAYTNSFTRGVYYPDKVFRSSVLYSTQDLFLPFFSNVTWFHAIHVSGTNGTKRFDNPVLPFNDGVYFASTEKSNIIRGWIFGTTLDSKTQSLLIVNNATNVVIKVCEFQFCNDPFLGVYYHKNNKSWMESEFRVYSSANNCTFEYVSQPFLMDLEGKQGNFKNLREFVFKNIDGYFKIYSKHTPINLVRDLPQGFSALEPLVDLPIGINITRFQTLLALHRSYLTPGDSSSGWTAGAAAYYVGYLQPRTFLLKYNENGTITDAVDCALDPLSETKCTLKSFTVEKGIYQTSNFRVQPTESIVRFPNITNLCPFGEVFNATRFASVYAWNRKRISNCVADYSVLYNSASFSTFKCYGVSPTKLNDLCFTNVYADSFVIRGDEVRQIAPGQTGKIADYNYKLPDDFTGCVIAWNSNNLDSKVGGNYNYLYRLFRKSNLKPFERDISTEIYQAGSTPCNGVEGFNCYFPLQSYGFQPTNGVGYQPYRVVVLSFELLHAPATVCGPKKSTNLVKNKCVNFNFNGLTGTGVLTESNKKFLPFQQFGRDIADTTDAVRDPQTLEILDITPCSFGGVSVITPGTNTSNQVAVLYQDVNCTEVPVAIHADQLTPTWRVYSTGSNVFQTRAGCLIGAEHVNNSYECDIPIGAGICASYQTQTNSPRRARSVASQSIIAYTMSLGAENSVAYSNNSIAIPTNFTISVTTEILPVSMTKTSVDCTMYICGDSTECSNLLLQYGSFCTQLNRALTGIAVEQDKNTQEVFAQVKQIYKTPPIKDFGGFNFSQILPDPSKPSKRSFIEDLLFNKVTLADAGFIKQYGDCLGDIAARDLICAQKFNGLTVLPPLLTDEMIAQYTSALLAGTITSGWTFGAGAALQIPFAMQMAYRFNGIGVTQNVLYENQKLIANQFNSAIGKIQDSLSSTASALGKLQDVVNQNAQALNTLVKQLSSNFGAISSVLNDILSRLDPPEAEVQIDRLITGRLQSLQTYVTQQLIRAAEIRASANLAATKMSECVLGQSKRVDFCGKGYQLMSFPQSAPHGVVFLNVTYVPAQEKNFTTAPAICNDGKAHFPREGVFVSNGTNWFVTQRNFYEPQIITTDNTFVSGNCDVVIGIVNNTVYDPLQPELDSGGGSGGGQIYEGKLTAEGLRFGIVASRFNHALVDRLVEGAIDAIVRHGGREEDITLVRVPGSWEIPVAAGELARKEDIDAVIAIGVLIRGATPHFDYIASEVSKGLADLSLELRKPITFGVITADTLEQAIERAGTKHGNKGWEAALSAIEMANLFKSLR

SEQ ID NO: 7916 - protein, 1307 aa, Artificial Sequence
  SARS-CoV-2/Shenzhen/SZTH-001/2020__EPI_ISL_406592 spike protein (1-1147)(K986P_V987P_ H1048Q_H1064N_ H1083N_H1101N) LumSynth construct
MFVFLVLLPLVSSQCVNLTTRTQLPPAYTNSFTRGVYYPDKVFRSSVLHSTQDLFLPFFSNVTWFHAIHVSGTNGTKRFDNPVLPFNDGVYFASTEKSNIIRGWIFGTTLDSKTQSLLIVNNATNVVIKVCEFQFCNDPFLGVYYHKNNKSWMESEFRVYSSANNCTFEYVSQPFLMDLEGKQGNFKNLREFVFKNIDGYFKIYSKHTPINLVRDLPQGFSALEPLVDLPIGINITRFQTLLALHRSYLTPGDSSSGWTAGAAAYYVGYLQPRTFLLKYNENGTITDAVDCALDPLSETKCTLKSFTVEKGIYQTSNFRVQPTESIVRFPNITNLCPFGEVFNATRFASVYAWNRKRISNCVADYSVLYNSASFSTFKCYGVSPTKLNDLCFTNVYADSFVIRGDEVRQIAPGQTGKIADYNYKLPDDFTGCVIAWNSNNLDSKVGGNYNYLYRLFRKSNLKPFERDISTEIYQAGSTPCNGVEGFNCYFPLQSYGFQPTNGVGYQPYRVVVLSFELLHAPATVCGPKKSTNLVKNKCVNFNFNGLTGTGVLTESNKKFLPFQQFGRDIADTTDAVRDPQTLEILDITPCSFGGVSVITPGTNTSNQVAVLYQDVNCTEVPVAIHADQLTPTWRVYSTGSNVFQTRAGCLIGAEHVNNSYECDIPIGAGICASYQTQTNSPRRARSVASQSIIAYTMSLGAENSVAYSNNSIAIPTNFTISVTTEILPVSMTKTSVDCTMYICGDSTECSNLLLQYGSFCTQLNRALTGIAVEQDKNTQEVFAQVKQIYKTPPIKDFGGFNFSQILPDPSKPSKRSFIEDLLFNKVTLADAGFIKQYGDCLGDIAARDLICAQKFNGLTVLPPLLTDEMIAQYTSALLAGTITSGWTFGAGAALQIPFAMQMAYRFNGIGVTQNVLYENQKLIANQFNSAIGKIQDSLSSTASALGKLQDVVNQNAQALNTLVKQLSSNFGAISSVLNDILSRLDPPEAEVQIDRLITGRLQSLQTYVTQQLIRAAEIRASANLAATKMSECVLGQSKRVDFCGKGYQLMSFPQSAPHGVVFLNVTYVPAQEKNFTTAPAICNDGKAHFPREGVFVSNGTNWFVTQRNFYEPQIITTDNTFVSGNCDVLIGIVNNTVYDPLQPELDSGGGSGGGQIYEGKLTAEGLRFGIVASRFNHALVDRLVEGAIDAIVRHGGREEDITLVRVPGSWEIPVAAGELARKEDIDAVIAIGVLIRGATPHFDYIASEVSKGLADLSLELRKPITFGVITADTLEQAIERAGTKHGNKGWEAALSAIEMANLFKSLR

SEQ ID NO: 7917 - protein, 1307 aa, Artificial Sequence
  SARS-CoV-2/Shenzhen/SZTH-004/2020__EPI_ISL_406595 spike protein (1-1147)(K986P_V987P_ H1048Q_H1064N_ H1083N_H1101N) LumSynth construct
MFVFLVLLPLVSSQCVNLTTRTQLPPAYTNSFTRGVYYPDKVFRSSVLHSTQDLFLPFFSNVTWFHAIHVSGTNGTKRFDNPVLPFNDGVYFASTEKSNIIRGWIFGTTLDSKTQSLLIVNNATNVVIKVCEFQFCNDPFLGVYYHKNNKSWMESEFRVYSSANNCTFEYVSQPFLMDLEGKQGNFKNLREFVFKNIDGYFKIYSKHTPINLVRDLPQGFSALEPLVDLPIGINITRFQTLLALHRSYLTPGDSSSGWTAGAAAYYVGYLQPRTFLLKYNENGTITDAVDCALDPLSETKCTLKSFTVEKGIYQTSNFRVQPTESIVRFPNITNLCPFGEVFNATRFASVYAWDRKRISNCVAYYSVLYNSASFSTFKCYGVSPTKLNDLCFTNVYADSFVIRGDEVRQIAPGQTGKIADYNYKLPDDFTGCVIAWNSNNLDSKVGGNYNYLYRLFRKSNLKPFERDISTEIYQAGSTPCNGVEGFNCYFPLQSYGFQPTNGVGYQPYRVVVLSFELLHAPATVCGPKKSTNLVKNKCVNFNFNGLTGTGVLTESNKKFLPFQQFGRDIADTTDAVRDPQTLEILDITPCSFGGVSVITPGTNTSNQVAVLYQDVNCTEVPVAIHADQLTPTWRVYSTGSNVFQTRAGCLIGAEHVNNSYECDIPIGAGICASYQTQTNSPRRARSVASQSIIAYTMSLGAENSVAYSNNSIAIPTNFTISVTTEILPVSMTKTSVDCTMYICGDSTECSNLLLQYGSFCTQLNRALTGIAVEQDKNTQEVFAQVKQIYKTPPIKDFGGFNFSQILPDPSKPSKRSFIEDLLFNKVTLADAGFIKQYGDCLGDIAARDLICAQKFNGLTVLPPLLTDEMIAQYTSALLAGTITSGWTFGAGAALQIPFAMQMAYRFNGIGVTQNVLYENQKLIANQFNSAIGKIQDSLSSTASALGKLQDVVNQNAQALNTLVKQLSSNFGAISSVLNDILSRLDPPEAEVQIDRLITGRLQSLQTYVTQQLIRAAEIRASANLAATKMSECVLGQSKRVDFCGKGYQLMSFPQSAPHGVVFLNVTYVPAQEKNFTTAPAICNDGKAHFPREGVFVSNGTNWFVTQRNFYEPQIITTDNTFVSGNCDVVIGIVNNTVYDPLQPELDSGGGSGGGQIYEGKLTAEGLRFGIVASRFNHALVDRLVEGAIDAIVRHGGREEDITLVRVPGSWEIPVAAGELARKEDIDAVIAIGVLIRGATPHFDYIASEVSKGLADLSLELRKPITFGVITADTLEQAIERAGTKHGNKGWEAALSAIEMANLFKSLR

SEQ ID NO: 7918 - protein, 1307 aa, Artificial Sequence
  SARS-CoV-2/France/IDF0372/2020__EPI_ISL_406596 spike protein (1-1147)(K986P_V987P_ H1048Q_H1064N_ H1083N_H1101N) LumSynth construct
MFVFLVLLPLVSSQCVNLTTRTQLPPAYTNSFTRGVYYPDKVFRSSVLHSTQDLFLPFFSNVTWFHAIHVSGTNGTKRFDNPVLPFNDGVYFASTEKSNIIRGWIFGTTLDSKTQSLLIVNNATNVVIKVCEFQFCNDPFLGVYYHKNNKSWMESEFRVYSSANNCTFEYVSQPFLMDLEGKQGNFKNLREFVFKNIDGYFKIYSKHTPINLVRDLPQGFSALEPLVDLPIGINITRFQTLLALHRSYLTPGDSSSGWTAGAAAYYVGYLQPRTFLLKYNENGTITDAVDCALDPLSETKCTLKSFTVEKGIYQTSNFRVQPTESIVRFPNITNLCPFGEVFNATRFASVYAWNRKRISNCVADYSFLYNSASFSTFKCYGVSPTKLNDLCFTNVYADSFVIRGDEVRQIAPGQTGKIADYNYKLPDDFTGCVIAWNSNNLDSKVGGNYNYLYRLFRKSNLKPFERDISTEIYQAGSTPCNGVEGFNCYFPLQSYGFQPTNGVGYQPYRVVVLSFELLHAPATVCGPKKSTNLVKNKCVNFNFNGLTGTGVLTESNKKFLPFQQFGRDIADTTDAVRDPQTLEILDITPCSFGGVSVITPGTNTSNQVAVLYQDVNCTEVPVAIHADQLTPTWRVYSTGSNVFQTRAGCLIGAEHVNNSYECDIPIGAGICASYQTQTNSPRRARSVASQSIIAYTMSLGAENSVAYSNNSIAIPTNFTISVTTEILPVSMTKTSVDCTMYICGDSTECSNLLLQYGSFCTQLNRALTGIAVEQDKNTQEVFAQVKQIYKTPPIKDFGGFNFSQILPDPSKPSKRSFIEDLLFNKVTLADAGFIKQYGDCLGDIAARDLICAQKFNGLTVLPPLLTDEMIAQYTSALLAGTITSGWTFGAGAALQIPFAMQMAYRFNGIGVTQNVLYENQKLIANQFNSAIGKIQDSLSSTASALGKLQDVVNQNAQALNTLVKQLSSNFGAISSVLNDILSRLDPPEAEVQIDRLITGRLQSLQTYVTQQLIRAAEIRASANLAATKMSECVLGQSKRVDFCGKGYQLMSFPQSAPHGVVFLNVTYVPAQEKNFTTAPAICNDGKAHFPREGVFVSNGTNWFVTQRNFYEPQIITTDNTFVSGNCDVVIGIVNNTVYDPLQPELDSGGGSGGGQIYEGKLTAEGLRFGIVASRFNHALVDRLVEGAIDAIVRHGGREEDITLVRVPGSWEIPVAAGELARKEDIDAVIAIGVLIRGATPHFDYIASEVSKGLADLSLELRKPITFGVITADTLEQAIERAGTKHGNKGWEAALSAIEMANLFKSLR

SEQ ID NO: 7919 - protein, 1307 aa, Artificial Sequence
  SARS-CoV-2/Australia/VIC01/2020__EPI_ISL_406844 spike protein (1-1147)(K986P_V987P_ H1048Q_H1064N_ H1083N_H1101N) LumSynth construct
MFVFLVLLPLVSSQCVNLTTRTQLPPAYTNSFTRGVYYPDKVFRSSVLHSTQDLFLPFFSNVTWFHAIHVSGTNGTKRFDNPVLPFNDGVYFASTEKSNIIRGWIFGTTLDSKTQSLLIVNNATNVVIKVCEFQFCNDPFLGVYYHKNNKSWMESEFRVYSSANNCTFEYVSQPFLMDLEGKQGNFKNLREFVFKNIDGYFKIYSKHTPINLVRDLPQGFSALEPLVDLPIGINITRFQTLLALHRRYLTPGDSSSGWTAGAAAYYVGYLQPRTFLLKYNENGTITDAVDCALDPLSETKCTLKSFTVEKGIYQTSNFRVQPTESIVRFPNITNLCPFGEVFNATRFASVYAWNRKRISNCVADYSVLYNSASFSTFKCYGVSPTKLNDLCFTNVYADSFVIRGDEVRQIAPGQTGKIADYNYKLPDDFTGCVIAWNSNNLDSKVGGNYNYLYRLFRKSNLKPFERDISTEIYQAGSTPCNGVEGFNCYFPLQSYGFQPTNGVGYQPYRVVVLSFELLHAPATVCGPKKSTNLVKNKCVNFNFNGLTGTGVLTESNKKFLPFQQFGRDIADTTDAVRDPQTLEILDITPCSFGGVSVITPGTNTSNQVAVLYQDVNCTEVPVAIHADQLTPTWRVYSTGSNVFQTRAGCLIGAEHVNNSYECDIPIGAGICASYQTQTNSPRRARSVASQSIIAYTMSLGAENSVAYSNNSIAIPTNFTISVTTEILPVSMTKTSVDCTMYICGDSTECSNLLLQYGSFCTQLNRALTGIAVEQDKNTQEVFAQVKQIYKTPPIKDFGGFNFSQILPDPSKPSKRSFIEDLLFNKVTLADAGFIKQYGDCLGDIAARDLICAQKFNGLTVLPPLLTDEMIAQYTSALLAGTITSGWTFGAGAALQIPFAMQMAYRFNGIGVTQNVLYENQKLIANQFNSAIGKIQDSLSSTASALGKLQDVVNQNAQALNTLVKQLSSNFGAISSVLNDILSRLDPPEAEVQIDRLITGRLQSLQTYVTQQLIRAAEIRASANLAATKMSECVLGQSKRVDFCGKGYQLMSFPQSAPHGVVFLNVTYVPAQEKNFTTAPAICNDGKAHFPREGVFVSNGTNWFVTQRNFYEPQIITTDNTFVSGNCDVVIGIVNNTVYDPLQPELDSGGGSGGGQIYEGKLTAEGLRFGIVASRFNHALVDRLVEGAIDAIVRHGGREEDITLVRVPGSWEIPVAAGELARKEDIDAVIAIGVLIRGATPHFDYIASEVSKGLADLSLELRKPITFGVITADTLEQAIERAGTKHGNKGWEAALSAIEMANLFKSLR

SEQ ID NO: 7920 - protein, 1307 aa, Artificial Sequence
  SARS-CoV-2/Germany/BavPat1/2020__EPI_ISL_406862 spike protein (1-1147)(K986P_V987P_ H1048Q_H1064N_ H1083N_H1101N) LumSynth construct
MFVFLVLLPLVSSQCVNLTTRTQLPPAYTNSFTRGVYYPDKVFRSSVLHSTQDLFLPFFSNVTWFHAIHVSGTNGTKRFDNPVLPFNDGVYFASTEKSNIIRGWIFGTTLDSKTQSLLIVNNATNVVIKVCEFQFCNDPFLGVYYHKNNKSWMESEFRVYSSANNCTFEYVSQPFLMDLEGKQGNFKNLREFVFKNIDGYFKIYSKHTPINLVRDLPQGFSALEPLVDLPIGINITRFQTLLALHRSYLTPGDSSSGWTAGAAAYYVGYLQPRTFLLKYNENGTITDAVDCALDPLSETKCTLKSFTVEKGIYQTSNFRVQPTESIVRFPNITNLCPFGEVFNATRFASVYAWNRKRISNCVADYSVLYNSASFSTFKCYGVSPTKLNDLCFTNVYADSFVIRGDEVRQIAPGQTGKIADYNYKLPDDFTGCVIAWNSNNLDSKVGGNYNYLYRLFRKSNLKPFERDISTEIYQAGSTPCNGVEGFNCYFPLQSYGFQPTNGVGYQPYRVVVLSFELLHAPATVCGPKKSTNLVKNKCVNFNFNGLTGTGVLTESNKKFLPFQQFGRDIADTTDAVRDPQTLEILDITPCSFGGVSVITPGTNTSNQVAVLYQGVNCTEVPVAIHADQLTPTWRVYSTGSNVFQTRAGCLIGAEHVNNSYECDIPIGAGICASYQTQTNSPRRARSVASQSIIAYTMSLGAENSVAYSNNSIAIPTNFTISVTTEILPVSMTKTSVDCTMYICGDSTECSNLLLQYGSFCTQLNRALTGIAVEQDKNTQEVFAQVKQIYKTPPIKDFGGFNFSQILPDPSKPSKRSFIEDLLFNKVTLADAGFIKQYGDCLGDIAARDLICAQKFNGLTVLPPLLTDEMIAQYTSALLAGTITSGWTFGAGAALQIPFAMQMAYRFNGIGVTQNVLYENQKLIANQFNSAIGKIQDSLSSTASALGKLQDVVNQNAQALNTLVKQLSSNFGAISSVLNDILSRLDPPEAEVQIDRLITGRLQSLQTYVTQQLIRAAEIRASANLAATKMSECVLGQSKRVDFCGKGYQLMSFPQSAPHGVVFLNVTYVPAQEKNFTTAPAICNDGKAHFPREGVFVSNGTNWFVTQRNFYEPQIITTDNTFVSGNCDVVIGIVNNTVYDPLQPELDSGGGSGGGQIYEGKLTAEGLRFGIVASRFNHALVDRLVEGAIDAIVRHGGREEDITLVRVPGSWEIPVAAGELARKEDIDAVIAIGVLIRGATPHFDYIASEVSKGLADLSLELRKPITFGVITADTLEQAIERAGTKHGNKGWEAALSAIEMANLFKSLR

SEQ ID NO: 7921 - protein, 1307 aa, Artificial Sequence
  SARS-CoV-2/Wuhan/HBCDC-HB-02/2020__EPI_ISL_412978 spike protein (1-1147)(K986P_V987P_ H1048Q_H1064N_ H1083N_H1101N) LumSynth construct
MFVFLVLLPLVSSQCVNLTTRTQLPPAYTNSFTRGVYYPDKVFRSSVLHSTQDLFLPFFSNVTWFHAIHVSGTNGTKRFDNPVLPFNDGVYFASTEKSNIIRGWIFGTTLDSKTQSLLIVNNATNVVIKVCEFQFCNDPFLGVYYHKNNKSWMESEFRVYSSANNCTFEYVSQPFLMDLEGKQGNFKNLREFVFKNIDGYFKIYSKHTPINLVRDLPQGFSALEPLVDLPIGINITRFQTLLALHRSYLTPGDSSSGWTAGAAAYYVGYLQPRTFLLKYNENGTITDAVDCALDPLSETKCTLKSFTVEKGIYQTSNFRVQPTESIVRFPNITNLCPFGEVFNATRFASVYAWNRKRISNCVADYSVLYNSASFSTFKCYGVSPTKLNDLCFTNVYADSFVIRGDEVRQIAPGQTGKIADYNYKLPDDFTGCVIAWNSNNLDSKVGGNYNYLYRLFRKSNLKPFERDISTEIYQAGSTPCNGVEGFNCYFPLQSYGFQPTNGVGYQPYRVVVLSFELLHAPATVCGPKKSTNLVKNKCVNFNFNGLTGTGVLTESNKKFLPFQQFGRDIADTTDAVRDPQTLEILDITPCSFGGVSVITPGTNTSNQVAVLYQDVNCTEVPVAIHADQLTPTWRVYSTGSNVFQTRAGCLIGAEHVNNSYECDIPIGAGICASYQTQTNSPRRARSVASQSIIAYTMSLGAENSVAYSNNSIAIPTNFTISVTTEILPVSMTKTSVDCTMYICGDSTECSNFLLQYGSFCTQLNRALTGIAVEQDKNTQEVFAQVKQIYKTPPIKDFGGFNFSQILPDPSKPSKRSFIEDLLFNKVTLADAGFIKQYGDCLGDIAARDLICAQKFNGLTVLPPLLTDEMIAQYTSALLAGTITSGWTFGAGAALQIPFAMQMAYRFNGIGVTQNVLYENQKLIANQFNSAIGKIQDSLSSTASALGKLQDVVNQNAQALNTLVKQLSSNFGAISSVLNDILSRLDPPEAEVQIDRLITGRLQSLQTYVTQQLIRAAEIRASANLAATKMSECVLGQSKRVDFCGKGYQLMSFPQSAPHGVVFLNVTYVPAQEKNFTTAPAICNDGKAHFPREGVFVSNGTNWFVTQRNFYEPQIITTDNTFVSGNCDVVIGIVNNTVYDPLQPELDSGGGSGGGQIYEGKLTAEGLRFGIVASRFNHALVDRLVEGAIDAIVRHGGREEDITLVRVPGSWEIPVAAGELARKEDIDAVIAIGVLIRGATPHFDYIASEVSKGLADLSLELRKPITFGVITADTLEQAIERAGTKHGNKGWEAALSAIEMANLFKSLR

SEQ ID NO: 7922 - protein, 1307 aa, Artificial Sequence
  SARS-CoV-2/Australia/QLD02/2020__EPI_ISL_407896 spike protein (1-1147)(K986P_V987P_ H1048Q_H1064N_ H1083N_H1101N) LumSynth construct
MFVFLVLLPLVSSQCVNLTTRTQLPPAYTNSFTRGVYYPDKVFRSSVLHSTQDLFLPFFSNVTWFHAIHVSGTNGTKRFDNPVLPFNDGVYFASTEKSNIIRGWIFGTTLDSKTQSLLIVNNATNVVIKVCEFQFCNDPFLGVYYHKNNKSWMESEFRVYSSANNCTFEYVSQPFLMDLEGKQGNFKNLREFVFKNIDGYFKIYSKHTPINLVRDLPQGFSALEPLVDLPIGINITRFQTLLALHRSYLTPGDSSSGWTAGAAAYYVGYLQPRTFLLKYNENGTITDAVDCALDPLSETKCTLKSFTVEKGIYQTSNFRVQPTESIVRFPNITNLCPFGEVFNATRFASVYAWNRKRISNCVADYSVLYNSASFSTFKCYGVSPTKLNDLCFTNVYADSFVIRGDEVRQIAPGQTGKIADYNYKLPDDFTGCVIAWNSNNLDSKVGGNYNYLYRLFRKSNLKPFERDISTEIYQAGSTPCNGVEGFNCYFPLQSYGFQPTNGVGYQPYRVVVLSFELLHAPATVCGPKKSTNLVKNKCVNFNFNGLTGTGVLTESNKKFLPFQQFGRDIADTTDAVRDPQTLEILDITPCSFGGVSVITPGTNTSNQVAVLYQDVNCTEVPVAIHADQLTPTWRVYSTGSNVFQTRAGCLIGAEHVNNSYECDIPIGAGICASYQTQTNSPRRARSVASQSIIAYTMSLGAENSVAYSNNSIAIPTNFTISVTTEILPVSMTKTSVDCTMYICGDSTECSNLLLQYGSFCTQLNRALTGIAVEQDKNTQEVFAQVKQIYKTPPIKDFGGFNFSQILPDPSKPSKRSFIEDLLFNKVTLADAGFIKQYGDCLGDIAARDLICAQKFNGLTVLPPLLTDEMIAQYTSALLAGTITSGWTFGAGAALQIPFAMQMAYRFNGIGVTQNVLYENQKLIANQFNSAIGKIQDSLSSTASALGKLQDVVNQNAQALNTLVKQLSSNFGAISSVLNDILSRLDPPEAEVQIDRLITGRLQSLQTYVTQQLIRAAEIRASANLAATKMSECVLGQSKRVDFCGKGYQLMSFPQSAPHGVVFLNVTYVPAQEKNFTTAPAICNDGKAHFPREGVFVSNGTNWFVTQRNFYEPQIITTDNTFVSGNCDVVIGIVNNTVYDPLQLELDSGGGSGGGQIYEGKLTAEGLRFGIVASRFNHALVDRLVEGAIDAIVRHGGREEDITLVRVPGSWEIPVAAGELARKEDIDAVIAIGVLIRGATPHFDYIASEVSKGLADLSLELRKPITFGVITADTLEQAIERAGTKHGNKGWEAALSAIEMANLFKSLR

SEQ ID NO: 7923 - protein, 1307 aa, Artificial Sequence
  SARS-CoV-2/India/1-31/2020__EPI_ISL_413523 spike protein (1-1147)(K986P_V987P_ H1048Q_H1064N_ H1083N_H1101N) LumSynth construct
MFVFLVLLPLVSSQCVNLTTRTQLPPAYTNSFTRGVYYPDKVFRSSVLHSTQDLFLPFFSNVTWFHAIHVSGTNGTKRFDNPVLPFNDGVYFASTEKSNIIRGWIFGTTLDSKTQSLLIVNNATNVVIKVCEFQFCNDPFLGVYYHKNNKSWMESEFRVYSSANNCTFEYVSQPFLMDLEGKQGNFKNLREFVFKNIDGYFKIYSKHTPINLVRDLPQGFSALEPLVDLPIGINITRFQTLLALHRSYLTPGDSSSGWTAGAAAYYVGYLQPRTFLLKYNENGTITDAVDCALDPLSETKCTLKSFTVEKGIYQTSNFRVQPTESIVRFPNITNLCPFGEVFNATRFASVYAWNRKRISNCVADYSVLYNSASFSTFKCYGVSPTKLNDLCFTNVYADSFVIRGDEVRQIAPGQTGKIADYNYKLPDDFTGCVIAWNSNNLDSKVGGNYNYLYRLFRKSNLKPFERDISTEIYQAGSTPCNGVEGFNCYFPLQSYGFQPTNGVGYQPYRVVVLSFELLHAPATVCGPKKSTNLVKNKCVNFNFNGLTGTGVLTESNKKFLPFQQFGRDIADTTDAVRDPQTLEILDITPCSFGGVSVITPGTNTSNQVAVLYQDVNCTEVPVAIHADQLTPTWRVYSTGSNVFQTRAGCLIGAEHVNNSYECDIPIGAGICASYQTQTNSPRRARSVASQSIIAYTMSLGAENSVAYSNNSIAIPTNFTISVTTEILPVSMTKTSVDCTMYICGDSTECSNLLLQYGSFCTQLNRALTGIAVEQDKNTQEVFAQVKQIYKTPPIKDFGGFNFSQILPDPSKPSKRSFIEDLLFNKVTLADAGFIKQYGDCLGDIAARDLICAQKFNGLTVLPPLLTDEMIAQYTSALLAGTITSGWTFGAGAALQIPFAMQMAYRFNGIGVTQNVLYENQKLIANQFNSVIGKIQDSLSSTASALGKLQDVVNQNAQALNTLVKQLSSNFGAISSVLNDILSRLDPPEAEVQIDRLITGRLQSLQTYVTQQLIRAAEIRASANLAATKMSECVLGQSKRVDFCGKGYQLMSFPQSAPHGVVFLNVTYVPAQEKNFTTAPAICNDGKAHFPREGVFVSNGTNWFVTQRNFYEPQIITTDNTFVSGNCDVVIGIVNNTVYDPLQPELDSGGGSGGGQIYEGKLTAEGLRFGIVASRFNHALVDRLVEGAIDAIVRHGGREEDITLVRVPGSWEIPVAAGELARKEDIDAVIAIGVLIRGATPHFDYIASEVSKGLADLSLELRKPITFGVITADTLEQAIERAGTKHGNKGWEAALSAIEMANLFKSLR

SEQ ID NO: 7924 - protein, 1307 aa, Artificial Sequence
  SARS-CoV-2/Guangdong/GD2020087-P0008/2020__EPI_ISL_413863 spike protein (1-1147)(K986P_V987P_ H1048Q_H1064N_ H1083N_H1101N) LumSynth construct
MFVFLVLLPLVSSQCVNLTTRTQLPPAYTNSFTRGVYYPDKVFRSSVLHSTQDLFLPFFSNVTWFHAIHVSGTNGTKRFDNPVLPFNDGVYFASTEKSNIIRGWIFGTTLDSKTQSLLIVNNATNVVIKVCEFQFCNDPFLGVYYHKNNKSWMESEFRVYSSANNCTFEYVSQPFLMDLEGKQGNFKNLREFVFKNIDGYFKIYSKHTPINLVRDLPQGFSALEPLVDLPIGINITRFQTLLALHRSYLTPGDSSSGWTAGAAAYYVGYLQPRTFLLKYNENGTITDAVDCALDPLSETKCTLKSFTVEKGIYQTSNFRVQPTESIVRFPNITNLCPFGEVFNATRFASVYAWNRKRISNCVADYSVLYNSASFSTFKCYGVSPTKLNDLCFTNVYADSFVIRGDEVREIAPGQTGKIADYNYKLPDDFTGCVIAWNSNNLDSKVGGNYNYLYRLFRKSNLKPFERDISTEIYQAGSTPCNGVEGFNCYFPLQSYGFQPTNGVGYQPYRVVVLSFELLHAPATVCGPKKSTNLVKNKCVNFNFNGLTGTGVLTESNKKFLPFQQFGRDIADTTDAVRDPQTLEILDITPCSFGGVSVITPGTNTSNQVAVLYQDVNCTEVPVAIHADQLTPTWRVYSTGSNVFQTRAGCLIGAEHVNNSYECDIPIGAGICASYQTQTNSPRRARSVASQSIIAYTMSLGAENSVAYSNNSIAIPTNFTISVTTEILPVSMTKTSVDCTMYICGDSTECSNLLLQYGSFCTQLNRALTGIAVEQDKNTQEVFAQVKQIYKTPPIKDFGGFNFSQILPDPSKPSKRSFIEDLLFNKVTLADAGFIKQYGDCLGDIAARDLICAQKFNGLTVLPPLLTDEMIAQYTSALLAGTITSGWTFGAGAALQIPFAMQMAYRFNGIGVTQNVLYENQKLIANQFNSAIGKIQDSLSSTASALGKLQDVVNQNAQALNTLVKQLSSNFGAISSVLNDILSRLDPPEAEVQIDRLITGRLQSLQTYVTQQLIRAAEIRASANLAATKMSECVLGQSKRVDFCGKGYQLMSFPQSAPHGVVFLNVTYVPAQEKNFTTAPAICNDGKAHFPREGVFVSNGTNWFVTQRNFYEPQIITTDNTFVSGNCDVVIGIVNNTVYDPLQPELDSGGGSGGGQIYEGKLTAEGLRFGIVASRFNHALVDRLVEGAIDAIVRHGGREEDITLVRVPGSWEIPVAAGELARKEDIDAVIAIGVLIRGATPHFDYIASEVSKGLADLSLELRKPITFGVITADTLEQAIERAGTKHGNKGWEAALSAIEMANLFKSLR

SEQ ID NO: 7925 - protein, 1307 aa, Artificial Sequence
  SARS-CoV-2/Sweden/01/2020__EPI_ISL_411951 spike protein (1-1147)(K986P_V987P_ H1048Q_H1064N_ H1083N_H1101N) LumSynth construct
MFVFLVLLPLVSSQCVNLTTRTQLPPAYTNSFTRGVYYPDKVFRSSVLHSTQDLFLPFFSNVTWFHAIHVSGTNGTKRFDNPVLPFNDGVYFASTEKSNIIRGWIFGTTLDSKTQSLLIVNNATNVVIKVCEFQFCNDPFLGVYYHKNNKSWMESEFRVYSSANNCTFEYVSQPFLMDLEGKQGNFKNLREFVFKNIDGYFKIYSKHTPINLVRDLPQGFSALEPLVDLPIGINITRFQTLLALHRSYLTPGDSSSGWTAGAAAYYVGYLQPRTFLLKYNENGTITDAVDCALDPLSETKCTLKSFTVEKGIYQTSNFRVQPTESIVRFPNITNLCPFGEVFNATRFASVYAWNRKRISNCVADYSVLYNSASFSTFKCYGVSPTKLNDLCFTNVYADSFVIRGDEVRQIAPGQTGKIADYNYKLPDDFTGCVIAWNSNNLDSKVGGNYNYLYRLFRKSNLKPFERDISTEIYQAGSTPCNGVEGFNCYFPLQSYGFQPTNGVGYQPYRVVVLSFELLHAPATVCGPKKSTNLVKNKCVNFNFNGLTGTGVLTESNKKFLPFQQFGRDIADTTDAVRDPQTLEILDITPCSFGGVSVITPGTNTSNQVAVLYQDVNCTEVPVAIHADQLTPTWRVYSTGSNVFQTRAGCLIGAEHVNNSYECDIPIGAGICASYQTQTNSPRRARSVASQSIIAYTMSLGAENSVAYSNNSIAIPTNFTISVTTEILPVSMTKTSVDCTMYICGDSTECSNLLLQYGSFCTQLNRALTGIAVEQDKNTQEVFAQVKQIYKTPPIKDCGGFNFSQILPDPSKPSKRSFIEDLLFNKVTLADAGFIKQYGDCLGDIAARDLICAQKFNGLTVLPPLLTDEMIAQYTSALLAGTITSGWTFGAGAALQIPFAMQMAYRFNGIGVTQNVLYENQKLIANQFNSAIGKIQDSLSSTASALGKLQDVVNQNAQALNTLVKQLSSNFGAISSVLNDILSRLDPPEAEVQIDRLITGRLQSLQTYVTQQLIRAAEIRASANLAATKMSECVLGQSKRVDFCGKGYQLMSFPQSAPHGVVFLNVTYVPAQEKNFTTAPAICNDGKAHFPREGVFVSNGTNWFVTQRNFYEPQIITTDNTFVSGNCDVVIGIVNNTVYDPLQPELDSGGGSGGGQIYEGKLTAEGLRFGIVASRFNHALVDRLVEGAIDAIVRHGGREEDITLVRVPGSWEIPVAAGELARKEDIDAVIAIGVLIRGATPHFDYIASEVSKGLADLSLELRKPITFGVITADTLEQAIERAGTKHGNKGWEAALSAIEMANLFKSLR

SEQ ID NO: 7926 - protein, 1307 aa, Artificial Sequence
  SARS-CoV-2/Tianmen/HBCDC-HB-07/2020__EPI_ISL_412983 spike protein (1-1147)(K986P_V987P_ H1048Q_H1064N_ H1083N_H1101N) LumSynth construct
MFVFLVLLPLVSSQCVNLTTRTQLPPAYTNSFTRGVYYPDKVFRSSVLHSTQDLFLPFFSNVTWFHAIHVSGTNGTKRFDNPVLPFNDGVYFASTEKSNIIRGWIFGTTLDSKTQSLLIVNNATNVVIKVCEFQFCNDPFLGVYYHKNNKSWMESEFRVYSSANNCTFEYVSQPFLMDLEGKQGNFKNLREFVFKNIDGYFKIYSKHTPINLVRDLPQGFSALEPLVDLPIGINITRFQTLLALHRSYLTPGDSSSGWTAGAAAYYVGYLQPRTFLLKYNENGTITDAVDCALDPLSETKCTLKSFTVEKGIYQTSNFRVQPTESIVRFPNITNLCPFGEVFNATRFASVYAWNRKRISNCVADYSVLYNSASFSTFKCYGVSPTKLNDLCFTNVYADSFVIRGDEVRQIAPGQTGKIADYNYKLPDDFTGCVIAWNSNNLDSKVGGNYNYLYRLFRKSNLKPFERDISTEIYQAGSTPCNGVEGFNCYFPLQSYGFQPTNGVGYQPYRVVVLSFELLHAPATVCGPKKSTNLVKNKCVNFNFNGLTGTGVLTESNKKFLPFQQFGRDIADTTDAVRDPQTLEILDITPCSFGGVSVITPGTNTSNQVAVLYQDLNCTEVPVAIHADQLTPTWRVYSTGSNVFQTRAGCLIGAEHVNNSYECDIPIGAGICASYQTQTNSPRRARSVASQSIIAYTMSLGAENSVAYSNNSIAIPTNFTISVTTEILPVSMTKTSVDCTMYICGDSTECSNLLLQYGSFCTQLNRALTGIAVEQDKNTQEVFAQVKQIYKTPPIKDFGGFNFSQILPDPSKPSKRSFIEDLLFNKVTLADAGFIKQYGDCLGDIAARDLICAQKFNGLTVLPPLLTDEMIAQYTSALLAGTITSGWTFGAGAALQIPFAMQMAYRFNGIGVTQNVLYENQKLIANQFNSAIGKIQDSLSSTASALGKLQDVVNQNAQALNTLVKQLSSNFGAISSVLNDILSRLDPPEAEVQIDRLITGRLQSLQTYVTQQLIRAAEIRASANLAATKMSECVLGQSKRVDFCGKGYQLMSFPQSAPHGVVFLNVTYVPAQEKNFTTAPAICNDGKAHFPREGVFVSNGTNWFVTQRNFYEPQIITTDNTFVSGNCDVVIGIVNNTVYDPLQPELDSGGGSGGGQIYEGKLTAEGLRFGIVASRFNHALVDRLVEGAIDAIVRHGGREEDITLVRVPGSWEIPVAAGELARKEDIDAVIAIGVLIRGATPHFDYIASEVSKGLADLSLELRKPITFGVITADTLEQAIERAGTKHGNKGWEAALSAIEMANLFKSLR

SEQ ID NO: 7927 - protein, 1307 aa, Artificial Sequence
  SARS-CoV-2/Hong Kong/case42_VM20002493/2020__EPI_ISL_414527 spike protein (1-1147)(K986P_V987P_ H1048Q_H1064N_ H1083N_H1101N) LumSynth construct
MFVFLVLLPLVSSQCVNLTTRTQLPPAYTNSFTRGVYYPDKVFRSSVLHSTQDLFLPFFSNVTWFHAIHVSGTNGTKRFDNPVLPFNDGVYFASTEKSNIIRGWIFGTTLDSKTQSLLIVNNATNVVIKVCEFQFCNDPFLGVYYHKNNKSWMESEFRVYSSANNCTFEYVSQPFLMDLEGKQGNFKNLREFVFKNIDGYFKIYSKHTPINLVRDLPQGFSALEPLVDLPIGINITRFQTLLALHRSYLTPGDSSSGWTAGAAAYYVGYLQPRTFLLKYNENGTITDAVDCALDPLSETKCTLKSFTVEKGIYQTSNFRVQPTESIVRFPNITNLCPFGEVFNATRFASVYAWNRKRISNCVADYSVLYNSASFSTFKCYGVSPTKLNDLCFTNVYADSFVIRGDEVRQIAPGQTGKIADYNYKLPDDFTGCVIAWNSNNLDSKVGGNYNYLYRLFRKSNLKPFERDISTEIYQAGSTPCNGVEGFNCYFPLQSYGFQPTNGVGYQPYRVVVLSFELLHAPATVCGPKKSTNLVKNKCVNFNFNGLTGTGVLTESNKKFLPFQQFGRDIADTTDAVRDPQTLEILDITPCSFGGVSVITPGTNTSNQVAVLYQDVNCTEVPVAIHADQLTPTWRVYSTGSNVFQTRAGCLIGAEHVNNSYECDIPIGAGICASYQTQTNSPRRARSVASQSIIAYTMSLGAENSVAYSNNSIAIPTNFAISVTTEILPVSMTKTSVDCTMYICGDSTECSNLLLQYGSFCTQLNRALTGIAVEQDKNTQEVFAQVKQIYKTPPIKDFGGFNFSQILPDPSKPSKRSFIEDLLFNKVTLADAGFIKQYGDCLGDIAARDLICAQKFNGLTVLPPLLTDEMIAQYTSALLAGTITSGWTFGAGAALQIPFAMQMAYRFNGIGVTQNVLYENQKLIANQFNSAIGKIQDSLSSTASALGKLQDVVNQNAQALNTLVKQLSSNFGAISSVLNDILSRLDPPEAEVQIDRLITGRLQSLQTYVTQQLIRAAEIRASANLAATKMSECVLGQSKRVDFCGKGYQLMSFPQSAPHGVVFLNVTYVPAQEKNFTTAPAICNDGKAHFPREGVFVSNGTNWFVTQRNFYEPQIITTDNTFVSGNCDVVIGIVNNTVYDPLQPELDSGGGSGGGQIYEGKLTAEGLRFGIVASRFNHALVDRLVEGAIDAIVRHGGREEDITLVRVPGSWEIPVAAGELARKEDIDAVIAIGVLIRGATPHFDYIASEVSKGLADLSLELRKPITFGVITADTLEQAIERAGTKHGNKGWEAALSAIEMANLFKSLR

SEQ ID NO: 7928 - protein, 1307 aa, Artificial Sequence
  SARS-CoV-2/USA/CruiseA-23/2020__EPI_ISL_414482 spike protein (1-1147)(K986P_V987P_ H1048Q_H1064N_ H1083N_H1101N) LumSynth construct
MFVFLVLLPLVSSQCVNLTTRTQLPPAYTNSFTRGVYYPDKVFRSSVLHSTQDLFLPFFSNVTWFHAIHVSGTNGTKRFDNPVLPFNDGVYFASTEKSNIIRGWIFGTTLDSKTQSLLIVNNATNVVIKVCEFQFCNDPFLGVYYHKNNKSWMESEFRVYSSANNCTFEYVSQPFLMDLEVKQGNFKNLREFVFKNIDGYFKIYSKHTPINLVRDLPQGFSALEPLVDLPIGINITRFQTLLALHRSYLTPGDSSSGWTAGAAAYYVGYLQPRTFLLKYNENGTITDAVDCALDPLSETKCTLKSFTVEKGIYQTSNFRVQPTESIVRFPNITNLCPFGEVFNATRFASVYAWNRKRISNCVADYSVLYNSASFSTFKCYGVSPTKLNDLCFTNVYADSFVIRGDEVRQIAPGQTGKIADYNYKLPDDFTGCVIAWNSNNLDSKVGGNYNYLYRLFRKSNLKPFERDISTEIYQAGSTPCNGVEGFNCYFPLQSYGFQPTNGVGYQPYRVVVLSFELLHAPATVCGPKKSTNLVKNKCVNFNFNGLTGTGVLTESNKKFLPFQQFGRDIADTTDAVRDPQTLEILDITPCSFGGVSVITPGTNTSNQVAVLYQDVNCTEVPVAIHADQLTPTWRVYSTGSNVFQTRAGCLIGAEHVNNSYECDIPIGAGICASYQTQTNSPRRARSVASQSIIAYTMSLGAENSVAYSNNSIAIPTNFTISVTTEILPVSMTKTSVDCTMYICGDSTECSNLLLQYGSFCTQLNRALTGIAVEQDKNTQEVFAQVKQIYKTPPIKDFGGFNFSQILPDPSKPSKRSFIEDLLFNKVTLADAGFIKQYGDCLGDIAARDLICAQKFNGLTVLPPLLTDEMIAQYTSALLAGTITSGWTFGAGAALQIPFAMQMAYRFNGIGVTQNVLYENQKLIANQFNSAIGKIQDSLSSTASALGKLQDVVNQNAQALNTLVKQLSSNFGAISSVLNDILSRLDPPEAEVQIDRLITGRLQSLQTYVTQQLIRAAEIRASANLAATKMSECVLGQSKRVDFCGKGYQLMSFPQSAPHGVVFLNVTYVPAQEKNFTTAPAICNDGKAHFPREGVFVSNGTNWFVTQRNFYEPQIITTDNTFVSGNCDVVIGIVNNTVYDPLQPELDSGGGSGGGQIYEGKLTAEGLRFGIVASRFNHALVDRLVEGAIDAIVRHGGREEDITLVRVPGSWEIPVAAGELARKEDIDAVIAIGVLIRGATPHFDYIASEVSKGLADLSLELRKPITFGVITADTLEQAIERAGTKHGNKGWEAALSAIEMANLFKSLR

SEQ ID NO: 7929 - protein, 1307 aa, Artificial Sequence
  SARS-CoV-2/Hong Kong/case85_VM20002868/2020__EPI_ISL_414519 spike protein (1-1147)(K986P_V987P_ H1048Q_H1064N_ H1083N_H1101N) LumSynth construct
MFVFLVLVPLVSSQCVNLTTRTQLPPAYTNSFTRGVYYPDKVFRSSVLHSTQDLFLPFFSNVTWFHAIHVSGTNGTKRFDNPVLPFNDGVYFASTEKSNIIRGWIFGTTLDSKTQSLLIVNNATNVVIKVCEFQFCNDPFLGVYYHKNNKSWMESEFRVYSSANNCTFEYVSQPFLMDLEGKQGNFKNLREFVFKNIDGYFKIYSKHTPINLVRDLPQGFSALEPLVDLPIGINITRFQTLLALHRSYLTPGDSSSGWTAGAAAYYVGYLQPRTFLLKYNENGTITDAVDCALDPLSETKCTLKSFTVEKGIYQTSNFRVQPTESIVRFPNITNLCPFGEVFNATRFASVYAWNRKRISNCVADYSVLYNSASFSTFKCYGVSPTKLNDLCFTNVYADSFVIRGDEVRQIAPGQTGKIADYNYKLPDDFTGCVIAWNSNNLDSKVGGNYNYLYRLFRKSNLKPFERDISTEIYQAGSTPCNGVEGFNCYFPLQSYGFQPTNGVGYQPYRVVVLSFELLHAPATVCGPKKSTNLVKNKCVNFNFNGLTGTGVLTESNKKFLPFQQFGRDIADTTDAVRDPQTLEILDITPCSFGGVSVITPGTNTSNQVAVLYQDVNCTEVPVAIHADQLTPTWRVYSTGSNVFQTRAGCLIGAEHVNNSYECDIPIGAGICASYQTQTNSPRRARSVASQSIIAYTMSLGAENSVAYSNNSIAIPTNFTISVTTEILPVSMTKTSVDCTMYICGDSTECSNLLLQYGSFCTQLNRALTGIAVEQDKNTQEVFAQVKQIYKTPPIKDFGGFNFSQILPDPSKPSKRSFIEDLLFNKVTLADAGFIKQYGDCLGDIAARDLICAQKFNGLTVLPPLLTDEMIAQYTSALLAGTITSGWTFGAGAALQIPFAMQMAYRFNGIGVTQNVLYENQKLIANQFNSAIGKIQDSLSSTASALGKLQDVVNQNAQALNTLVKQLSSNFGAISSVLNDILSRLDPPEAEVQIDRLITGRLQSLQTYVTQQLIRAAEIRASANLAATKMSECVLGQSKRVDFCGKGYQLMSFPQSAPHGVVFLNVTYVPAQEKNFTTAPAICNDGKAHFPREGVFVSNGTNWFVTQRNFYEPQIITTDNTFVSGNCDVVIGIVNNTVYDPLQPELDSGGGSGGGQIYEGKLTAEGLRFGIVASRFNHALVDRLVEGAIDAIVRHGGREEDITLVRVPGSWEIPVAAGELARKEDIDAVIAIGVLIRGATPHFDYIASEVSKGLADLSLELRKPITFGVITADTLEQAIERAGTKHGNKGWEAALSAIEMANLFKSLR

SEQ ID NO: 7930 - protein, 1307 aa, Artificial Sequence; identical to SEQ ID NO: 7920
  SARS-CoV-2/England/200990660/2020__EPI_ISL_414523 spike protein (1-1147)(K986P_V987P_ H1048Q_H1064N_ H1083N_H1101N) LumSynth construct

SEQ ID NO: 7931 - protein, 1307 aa, Artificial Sequence
  SARS-CoV-2/Australia/NSW09/2020__EPI_ISL_413595 spike protein (1-1147)(K986P_V987P_ H1048Q_H1064N_ H1083N_H1101N) LumSynth construct
MFVFLVLLPLVSSQCVNLTTRTQLPPAYTNSFTRGVYYPDKVFRSSVLHSTQDLFLPFFSNVTWFHAIHVSGTNGTKRFDNPVLPFNDGVYFASTEKSNIIRGWIFGTTLDSKTQSLLIVNNATNVVIKVCEFQFCNDPFLGVYYHKNNKSWMESEFRVYSSANNCTFEYVSQPFLMDLEGKQGNFKNLREFVFKNIDGYFKIYSKHTPINLVRDLPQGFSALEPLVDLPIGINITRFQTLLALHRSYLTPGDSSSGWTAGAAAYYVGYLQPRTFLLKYNENGTITDAVDCALDPLSETKCTLKSFTVEKGIYQTSNFRVQPTESIVRFPNITNLCPFGEVFNATRFASVYAWNRKRISNCVADYSVLYNSASFSTFKCYGVSPTKLNDLCFTNVYADSFVIRGDEVRQIAPGQTGKIADYNYKLPDDFTGCVIAWNSNNLDSKVGGNYNYLYRLFRKSNLKPFERDISTEIYQAGSTPCNGVEGFNCYFPLQSYGFQPTNGVGYQPYRVVVLSFELLHAPATVCGPKKSTNLVKNKCVNFNFNGLTGTGVLTESNKKFLPFQQFGRDIADTTDAVRDPQTLEILDITPCSFGGVSVITPGTNTSNQVAVLYQDVNCTEVPVAIHADQLTPTWRVYSTGSNVFQTRAGCLIGAEHVNNSYECDIPIGAGICASYQTQTNSPRRARSVASQSIIAYTMSLGAENSVAYSNNSIAIPTNFTISVTTEILPVSMTKTSVDCTMYICGDSTECSNLLLQYGSFCTQLNRALTGIAVEQDKNTQEVFAQVKQIYKTPPIKDFGGFNFSQILPDPSKPSKRSFIEDLLFNKVTLADAGFIKQYGDCLGDIAARDLICAQKFNGLTVLPPLLTDEMIAQYTSALLAGTITSGWTFGAGAALQIPFAMQMAYRFNGIGVTQNVLYENQKLIANQFNSAIGKIQDSLSFTASALGKLQDVVNQNAQALNTLVKQLSSNFGAISSVLNDILSRLDPPEAEVQIDRLITGRLQSLQTYVTQQLIRAAEIRASANLAATKMSECVLGQSKRVDFCGKGYQLMSFPQSAPHGVVFLNVTYVPAQEKNFTTAPAICNDGKAHFPREGVFVSNGTNWFVTQRNFYEPQIITTDNTFVSGNCDVVIGIVNNTVYDPLQPELDSGGGSGGGQIYEGKLTAEGLRFGIVASRFNHALVDRLVEGAIDAIVRHGGREEDITLVRVPGSWEIPVAAGELARKEDIDAVIAIGVLIRGATPHFDYIASEVSKGLADLSLELRKPITFGVITADTLEQAIERAGTKHGNKGWEAALSAIEMANLFKSLR

SEQ ID NO: 7932 - protein, 1307 aa, Artificial Sequence; identical to SEQ ID NO: 7912
  SARS-CoV-2/Australia/NSW10/2020__EPI_ISL_413596 spike protein (1-1147)(K986P_V987P_ H1048Q_H1064N_ H1083N_H1101N) LumSynth construct

SEQ ID NO: 7933 - protein, 1307 aa, Artificial Sequence
  SARS-CoV-2/Switzerland/1000477797/2020__EPI_ISL_413023 spike protein (1-1147)(K986P_V987P_ H1048Q_H1064N_ H1083N_H1101N) LumSynth construct
MFVFLVLLPLVSSQCVNLTTRTQLPPAYTNSFTRGVYYPDKVFRSSVLHSTQDLFLPFFSNVTWFHAIHVSGTNGTKRFDNPVLPFNDGVYFASTEKSNIIRGWIFGTTLDSKTQSLLIVNNATNVVIKVCEFQFCNDPFLGVYYHKNNKSWMESEFRVYSSANNCTFEYVSQPFLMDLEGKQGNFKNLREFVFKNIDGYFNIYSKHTPINLVRDLPQGFSALEPLVDLPIGINITRFQTLLALHRSYLTPGDSSSGWTAGAAAYYVGYLQPRTFLLKYNENGTITDAVDCALDPLSETKCTLKSFTVEKGIYQTSNFRVQPTESIVRFPNITNLCPFGEVFNATRFASVYAWNRKRISNCVADYSVLYNSASFSTFKCYGVSPTKLNDLCFTNVYADSFVIRGDEVRQIAPGQTGKIADYNYKLPDDFTGCVIAWNSNNLDSKVGGNYNYLYRLFRKSNLKPFERDISTEIYQAGSTPCNGVEGFNCYFPLQSYGFQPTNGVGYQPYRVVVLSFELLHAPATVCGPKKSTNLVKNKCVNFNFNGLTGTGVLTESNKKFLPFQQFGRDIADTTDAVRDPQTLEILDITPCSFGGVSVITPGTNTSNQVAVLYQGVNCTEVPVAIHADQLTPTWRVYSTGSNVFQTRAGCLIGAEHVNNSYECDIPIGAGICASYQTQTNSPRRARSVASQSIIAYTMSLGAENSVAYSNNSIAIPTNFTISVTTEILPVSMTKTSVDCTMYICGDSTECSNLLLQYGSFCTQLNRALTGIAVEQDKNTQEVFAQVKQIYKTPPIKDFGGFNFSQILPDPSKPSKRSFIEDLLFNKVTLADAGFIKQYGDCLGDIAARDLICAQKFNGLTVLPPLLTDEMIAQYTSALLAGTITSGWTFGAGAALQIPFAMQMAYRFNGIGVTQNVLYENQKLIANQFNSAIGKIQDSLSSTASALGKLQDVVNQNAQALNTLVKQLSSNFGAISSVLNDILSRLDPPEAEVQIDRLITGRLQSLQTYVTQQLIRAAEIRASANLAATKMSECVLGQSKRVDFCGKGYQLMSFPQSAPHGVVFLNVTYVPAQEKNFTTAPAICNDGKAHFPREGVFVSNGTNWFVTQRNFYEPQIITTDNTFVSGNCDVVIGIVNNTVYDPLQPELDSGGGSGGGQIYEGKLTAEGLRFGIVASRFNHALVDRLVEGAIDAIVRHGGREEDITLVRVPGSWEIPVAAGELARKEDIDAVIAIGVLIRGATPHFDYIASEVSKGLADLSLELRKPITFGVITADTLEQAIERAGTKHGNKGWEAALSAIEMANLFKSLR

SEQ ID NO: 7934 - protein, 1307 aa, Artificial Sequence
  SARS-CoV-2/Belgium/BA-02291/2020__EPI_ISL_415159 spike protein (1-1147)(K986P_V987P_ H1048Q_H1064N_ H1083N_H1101N) LumSynth construct
MFVFLVLLPLVSSQCVNLTTRTQLPPAYTNSFTRGVYYPDKVFRSSVLHSTQDLFLPFFSNVTWFHAIHVSGTNGTKRFDNPVLPFNDGVYFASTEKSNIIRGWIFGTTLDSKTQSLLIVNNATNVVIKVCEFQFCNDPFLGVYYHKNNKSWMESEFRVYSSANNCTFEYVSQPFLMDLEGKQGNFKNLREFVFKNIDGYFKIYSKHTPINLVRDLPQGFSALEPLVDLPIGINITRFQTLLALHRSYLTPGDSSSGWTAGAAAYYVGYLQPRTFLLKYNENGTITDAVDCALDPLSETKCTLKSFTVEKGIYQTSNFRVQPTESIVRFPNITNLCPFGEVFNATRFASVYAWNRKRISNCVADYSVLYNSASFSTFKCYGVSPTKLNDLCFTNVYADSFVIRGDEVRQIAPGQTGKIADYNYKLPDDFTGCVIAWNSNNLDSKVGGNYNYLYRLFRRSNLKPFERDISTEIYQAGSTPCNGVEGFNCYFPLQSYGFQPTNGVGYQPYRVVVLSFELLPAPATVCGPKKSTNLVKNKCVNFNFNGLTGTGVLTESNKKFLPFQQFGRDIADTTDAVRDPQTLEILDITPCSFGGVSVITPGTNTSNQVAVLYQGVNCTEVPVAIHADQLTPTWRVYSTGSNVFQTRAGCLIGAEHVNNSYECDIPIGAGICASYQTQTNSPRRARSVASQSIIAYTMSLGAENSVAYSNNSIAIPTNFTISVTTEILPVSMTKTSVDCTMYICGDSTECSNLLLQYGSFCTQLNRALTGIAVEQDKNTQEVFAQVKQIYKTPPIKDFGGFNFSQILPDPSKPSKRSFIEDLLFNKVTLADAGFIKQYGDCLGDIAARDLICAQKFNGLTVLPPLLTDEMIAQYTSALLAGTITSGWTFGAGAALQIPFAMQMAYRFNGIGVTQNVLYENQKLIANQFNSAIGKIQDSLSSAAPALGKLQDVVNQNAQALNTLVKQLSSNFGAISSVLNDILSRLDPPEAEVQIDRLITGRLQSLQTYVTQQLIRAAEIRASANLAATKMSECVLGQSKRVDFCGKGYQLMSFPQSAPHGVVFLNVTYVPAQEKNFTTAPAICNDGKAHFPREGVFVSNGTNWFVTQRNFYEPQIITTDNTFVSGNCDVVIGIVNNTVYDPLQPELDSGGGSGGGQIYEGKLTAEGLRFGIVASRFNHALVDRLVEGAIDAIVRHGGREEDITLVRVPGSWEIPVAAGELARKEDIDAVIAIGVLIRGATPHFDYIASEVSKGLADLSLELRKPITFGVITADTLEQAIERAGTKHGNKGWEAALSAIEMANLFKSLR

SEQ ID NO: 7935 - protein, 1307 aa, Artificial Sequence
  SARS-CoV-2/USA/WA8-UW5/2020__EPI_ISL_413486 spike protein (1-1147)(K986P_V987P_ H1048Q_H1064N_ H1083N_H1101N) LumSynth construct
MFVFLVLLPLVSSQCVNLTTRTQLPPAYTNSFTRGVYYPDKVFRSSVLHSTQDLFLPFFSNVTWFHAIHVSGTNGTKRFDNPVLPFNDGVYFASTEKSNIIRGWIFGTTLDSKTQSLLIVNNATNVVIKVCEFQFCNDPFLGVYYHKNNKSWMESEFRVYSSANNCTFEYVSQPFLMDLEGKQGNFKNLREFVFKNIDGYFKIYSKHTPINLVRDLPQGFSALEPLVDLPIGINITRFQTLLALHRSYLTPGDSSSGWTAGAAAYYVGYLQPRTFLLKYNENGTITDAVDCALDPLSETKCTLKSFTVEKGIYQTSNFRVQPTESIVRFPNITNLCPFGEVFNATRFASVYAWNRKRISNCVADYSVLYNSASFSTFKCYGVSPTKLNDLCFTNVYADSFVIRGDEVRQIAPGQTGKIADYNYKLPDDFTGCVIAWNSNNLDSKVGGNYNYLYRLFRKSNLKPFERDISTEIYQAGSTPCNGVEGFNCYFPLQSYGFQPTNGVGYQPYRVVVLSFELLHAPATVCGPKKSTNLVKNKCVNFNFNGLTGTGVLTESNKKFLPFQQFGRDIADTTDAVRDPQTLEILDITPCSFGGVSVITPGTNTSNQVAVLYQDVNCTEVPVAIHADQLTPTWRVYSTGSNVFQTRAGCLIGAEYVNNSYECDIPIGAGICASYQTQTNSPRRARSVASQSIIAYTMSLGAENSVAYSNNSIAIPTNFTISVTTEILPVSMTKTSVDCTMYICGDSTECSNLLLQYGSFCTQLNRALTGIAVEQDKNTQEVFAQVKQIYKTPPIKDFGGFNFSQILPDPSKPSKRSFIEDLLFNKVTLADAGFIKQYGDCLGDIAARDLICAQKFNGLTVLPPLLTDEMIAQYTSALLAGTITSGWTFGAGAALQIPFAMQMAYRFNGIGVTQNVLYENQKLIANQFNSAIGKIQDSLSSTASALGKLQDVVNQNAQALNTLVKQLSSNFGAISSVLNDILSRLDPPEAEVQIDRLITGRLQSLQTYVTQQLIRAAEIRASANLAATKMSECVLGQSKRVDFCGKGYQLMSFPQSAPHGVVFLNVTYVPAQEKNFTTAPAICNDGKAHFPREGVFVSNGTNWFVTQRNFYEPQIITTDNTFVSGNCDVVIGIVNNTVYDPLQPELDSGGGSGGGQIYEGKLTAEGLRFGIVASRFNHALVDRLVEGAIDAIVRHGGREEDITLVRVPGSWEIPVAAGELARKEDIDAVIAIGVLIRGATPHFDYIASEVSKGLADLSLELRKPITFGVITADTLEQAIERAGTKHGNKGWEAALSAIEMANLFKSLR

SEQ ID NO: 7936 - protein, 1307 aa, Artificial Sequence
  SARS-CoV-2/England/20102000506/2020__EPI_ISL_415147 spike protein (1-1147)(K986P_V987P_ H1048Q_H1064N_ H1083N_H1101N) LumSynth construct
MFVFLVLLPLVSSQCVNLTTRTQLPPAYTNSFTRGVYYPDKVFRSSVLHSTQDLFLPFFSNVTWFHAIHVSGTNGTKRFDNPVLPFNDGVYFASTEKSNIIRGWIFGTTLDSKTQSLLIVNNATNVVIKVCEFQFCNDPFLGVYYHKNNKSWMESEFRVYSSANNCTFEYVSQPFLMDLEGKQGNFKNLREFVFKNIDGYFKIYSKHTPINLVRDLPQGFSALEPLVDLPIGINITRFQTLLALHRSYLTPGDSSSGWTAGAAAYYVGYLQPRTFLLKYNENGTITDAVDCALDPLSETKCTLKSFTVEKGIYQTSNFRVQPTESIVRFPNITNLCPFGEVFNATRFASVYAWNRKRISNCVADYSVLYNSASFSTFKCYGVSPTKLNDLCFTNVYADSFVIRGDEVRQIAPGQTGKIADYNYKLPDDFTGCVIAWNSNNLDSKVGGNYNYLYRLFRKSNLKPFERDISTEIYQAGSTPCNGVEGFNCYFPLQSYGFQPTNGVGYQPYRVVVLSFELLHAPATVCGPKKSTNLVKNKCVNFNFNGLTGTGVLTESNKKFLPFQQFGRDIADTTDAVRDPQTLEILDITPCSFGGVSVITPGTNTSNQVAVLYQGVNCTEVPVAIHADQLTPTWRVYSTGSNVFQTRAGCLIGAEHVNNSYECDIPIGAGICASYQTQTNSPRRARSVASQSIIAYTMSLGAENSVAYSNNSIAIPTNFTISVTTEILPVSMTKTSVDCTMYICGDSTECSNLLLQYGSFCTQLNRALTGIAVEQDKNTQEVFAQVKQIYKTPPIKDFGGFNFSQILPDPSKPSKRSFIEDLLFNKVTLADAGFIKQYGYCLGDIAARDLICAQKFNGLTVLPPLLTDEMIAQYTSALLAGTITSGWTFGAGAALQIPFAMQMAYRFNGIGVTQNVLYENQKLIANQFNSAIGKIQDSLSSTASALGKLQDVVNQNAQALNTLVKQLSSNFGAISSVLNDILSRLDPPEAEVQIDRLITGRLQSLQTYVTQQLIRAAEIRASANLAATKMSECVLGQSKRVDFCGKGYQLMSFPQSAPHGVVFLNVTYVPAQEKNFTTAPAICNDGKAHFPREGVFVSNGTNWFVTQRNFYEPQIITTDNTFVSGNCDVVIGIVNNTVYDPLQPELDSGGGSGGGQIYEGKLTAEGLRFGIVASRFNHALVDRLVEGAIDAIVRHGGREEDITLVRVPGSWEIPVAAGELARKEDIDAVIAIGVLIRGATPHFDYIASEVSKGLADLSLELRKPITFGVITADTLEQAIERAGTKHGNKGWEAALSAIEMANLFKSLR

SEQ ID NO: 7937 - protein, 1307 aa, Artificial Sequence
  SARS-CoV-2/Belgium/VAG-03013/2020__EPI_ISL_415155 spike protein (1-1147)(K986P_V987P_ H1048Q_H1064N_ H1083N_H1101N) LumSynth construct
MFVFLVLLPLVSSQCVNLTTRTQLPPAYTNSFTRGVYYPDKVFRSSVLHSTQDLFLPFFSNVTWFHAIHVSGTNGTKRFDNPVLPFNDGVYFASTEKSNIIRGWIFGTTLDSKTQSLLIVNNATNVVIKVCEFQFCNDPFLGVYYHKNNKSWMESEFRVYSSANNCTFEYVSQPFLMDLEGKQGNFKNLREFVFKNIDGYFKIYSKHTPINLVRDLPQGFSALEPLVDLPIGINITRFQTLLALHRSYLTPGDSSSGWTAGAAAYYVGYLQPRTFLLKYNENGTITDAVDCALDPLSETKCTLKSFTVEKGIYQTSNFRVQPTESIVRFPNITNLCPFGEVFNATRFASVYAWNRKRISNCVADYSVLYNSASFSTFKCYGVSPTKLNDLCFTNVYADSFVIRGDEVRQIAPGQTGKIADYNYKLPDDFTGCVIAWNSNNLDSKVGGNYNYLYRLFRKSNLKPFERDISTEIYQAGSTPCNGVEGFNCYFPLQSYGFQPTNGVGYQPYRVVVLSFELLHAPATVCGPKKSTNLVKNKCVNFNFNGLTGTGVLTESNKKFLPFQQFGRDIADTTDAVRDPQTLEILDITPCSFGGVSVITPGTNTSNQVAVLYQGVNCTEVPVAIHADQLTPTWRVYSTGSNVFQTRAGCLIGAEHVNNSYECDIPIGAGICASYQTQTNSPRRARSVASQSIIAYTMSLGAENSVAYSNNSIAIPTNFTISVTTEILPVSMTKTSVDCTMYICGDSTECSNLLLQYGSFCTQLNRALTGIAVEQDKNTQEVFAQVKQIYKTPPIKDFGGFNFSQILPDPSKPSKRSFIEDLLFNKVTLADAGFIKQYGDCLGDIAARDLICAQKFNGLTVLPPLLTDEMIAQYTSALLAGTITSGWTFGAGAALQIPFAMQMAYRFNGIGVTQNVLYENQKLIANQFNSAIGKIQDSLSSTATALGKLQDVVNQNAQALNTLVKQLSSNFGAISSVLNDILSRLDPPEAEVQIDRLITGRLQSLQTYVTQQLIRAAEIRASANLAATKMSECVLGQSKRVDFCGKGYQLMSFPQSAPHGVVFLNVTYVPAQEKNFTTAPAICNDGKAHFPREGVFVSNGTNWFVTQRNFYEPQIITTDNTFVSGNCDVVIGIVNNTVYDPLQPELDSGGGSGGGQIYEGKLTAEGLRFGIVASRFNHALVDRLVEGAIDAIVRHGGREEDITLVRVPGSWEIPVAAGELARKEDIDAVIAIGVLIRGATPHFDYIASEVSKGLADLSLELRKPITFGVITADTLEQAIERAGTKHGNKGWEAALSAIEMANLFKSLR

SEQ ID NO: 7938 - protein, 1307 aa, Artificial Sequence
  SARS-CoV-2/Belgium/BC-03016/2020__EPI_ISL_415157 spike protein (1-1147)(K986P_V987P_ H1048Q_H1064N_ H1083N_H1101N) LumSynth construct
MFVFLVLLPLVSSQCVNLTTRTQLPPAYTNSFTRGVYYPDKVFRSSVLHSTQDLFLPFFSNVTWFHAIHVSGTNGTKRFDNPVLPFNDGVYFASTEKSNIIRGWIFGTTLDSKTQSLLIVNNATNVVIKVCEFQFCNDPFLGVYYHKNNKSWMESEFRVYSSANNCTFEYVSQPFLMDLEGKQGNFKNLREFVFKNIDGYFKIYSKHTPINLVRDLPQGFSALEPLVDLPIGINITRFQTLLALHRSYLTPGDSSSGWTAGAAAYYVGYLQPRTFLLKYNENGTITDAVDCALDPLSETKCTLKSFTVEKGIYQTSNFRVQPTESIVRFPNITNLCPFGEVFNATRFASVYAWNRKRISNCVADYSVLYNSASFSTFKCYGVSPTKLNDLCFTNVYADSFVIRGDEVRQIAPGQTGKIADYNYKLPDDFTGCVIAWNSNNLDSKVGGNYNYLYRLFRKSNLKPFERDISTEIYQAGSTPCNGVEGFNCYFPLQSYGFQPTNGVGYQPYRVVVLSFELLHAPATVCGPKKSTNLVKNKCVNFNFNGLTGTGVLTESNKKFLPFQQFGRDIADTTDAVRDPQTLEILDITPCSFGGVSVITPGTNTSNQVAVLYQGVNCTEVPVAIHADQLTPTWRVYSTGSNVFQTRAGCLIGAEHVNNSYECDIPIGAGICASYQTQTNSPRRARSVASQSIIAYTMSLGAENSVAYSNNSIAIPTNFTISVTTEILPVSMTKTSVDCTMYICGDSTECSNLLLQYGSFCTQLNRALTGIAVEQDKNTQEVFAQVKQIYKTPPIKDFGGFNFSQILPDPSKPSKRSFIEDLLFNKVTLADAGFIKQYGDCLGDIAARDLICAQKFNGLTVLPPLLTDEMIAQYTSALLAGTITSGWTFGAGAALQIPFAMQMAYRFNGIGVTQNVLYENQKLIANQFNSAIGKIQDSLSSTAPALGKLQDVVNQNAQALNTLVKQLSSNFGAISSVLNDILSRLDPPEAEVQIDRLITGRLQSLQTYVTQQLIRAAEIRASANLAATKMSECVLGQSKRVDFCGKGYQLMSFPQSAPHGVVFLNVTYVPAQEKNFTTAPAICNDGKAHFPREGVFVSNGTNWFVTQRNFYEPQIITTDNTFVSGNCDVVIGIVNNTVYDPLQPELDSGGGSGGGQIYEGKLTAEGLRFGIVASRFNHALVDRLVEGAIDAIVRHGGREEDITLVRVPGSWEIPVAAGELARKEDIDAVIAIGVLIRGATPHFDYIASEVSKGLADLSLELRKPITFGVITADTLEQAIERAGTKHGNKGWEAALSAIEMANLFKSLR

SEQ ID NO: 7939 - protein, 1307 aa, Artificial Sequence
  SARS-CoV-2/Germany/BavPat3/2020__EPI_ISL_414521 spike protein (1-1147)(K986P_V987P_ H1048Q_H1064N_ H1083N_H1101N) LumSynth construct
MFVFLVLLPLVSSQCVNLTTRTQLPPAYTNSFTRGVYYPDKVFRSSVLHSTQDLFLPFFSNVTWFHAIHVSGTNGTKRFDNPVLPFNDGVYFASTEKSNIIRGWIFGTTLDSKTQSLLIVNNATNVVIKVCEFQFCNDPFLGVYYHKNNKSWMESEFRVYSSANNCTFEYVSQPFLMDLEGKQGNFKNLREFVFKNIDGYFKIYSKHTPINLVRDLPQGFSALEPLVDLPIGINITRFQTLLALHRSYLTPGDSSSGWTAGAAAYYVGYLQPRTFLLKYNENGTITDAVDCALDPLSETKCTLKSFTVEKGIYQTSNFRVQPTESIVRFPNITNLCPFGEVFNATRFASVYAWNRKRISNCVADYSVLYNSASFSTFKCYGVSPTKLNDLCFTNVYADSFVIRGDEVRQIAPGQTGKIADYNYKLPDDFTGCVIAWNSNNLDSKVGGNYNYLYRLFRKSNLKPFERDISTEIYQAGSTPCNGVEGFNCYFPLQSYGFQPTNGVGYQPYRVVVLSFELLHAPATVCGPKKSTNLVKNKCVNFNFNGLTGTGVLTESNKKFLPFQQFGRDIADTTDAVRDPQTLEILDITPCSFGGVSVITPGTNTSNQVAVLYQDVNCTEVPVAIHADQLTPTWRVYSTGSNVFQTRAGCLIGAEHVNNSYECDIPIGAGICASYQTQTNSPRRARSVASQSIIAYTMSLGAENSVAYSNNSIAIPTNFTISVTTEILPVSMTKTSVDCTMYICGDSTECSNLLLQYGSFCTQLNRALTGIAVEQDKNTQQVFAQVKQIYKTPPIKDFGGFNFSQILPDPSKPSKRSFIEDLLFNKVTLADAGFIKQYGDCLGDIAARDLICAQKFNGLTVLPPLLTDEMIAQYTSALLAGTITSGWTFGAGAALQIPFAMQMAYRFNGIGVTQNVLYENQKLIANQFNSAIGKIQDSLSSTASALGKLQDVVNQNAQALNTLVKQLSSNFGAISSVLNDILSRLDPPEAEVQIDRLITGRLQSLQTYVTQQLIRAAEIRASANLAATKMSECVLGQSKRVDFCGKGYQLMSFPQSAPHGVVFLNVTYVPAQEKNFTTAPAICNDGKAHFPREGVFVSNGTNWFVTQRNFYEPQIITTDNTFVSGNCDVVIGIVNNTVYDPLQPELDSGGGSGGGQIYEGKLTAEGLRFGIVASRFNHALVDRLVEGAIDAIVRHGGREEDITLVRVPGSWEIPVAAGELARKEDIDAVIAIGVLIRGATPHFDYIASEVSKGLADLSLELRKPITFGVITADTLEQAIERAGTKHGNKGWEAALSAIEMANLFKSLR

SEQ ID NO: 7940 - protein, 1307 aa, Artificial Sequence
  SARS-CoV-2/France/HF1805/2020__EPI_ISL_414628 spike protein (1-1147)(K986P_V987P_ H1048Q_H1064N_ H1083N_H1101N) LumSynth construct
MFVFLVLLPLVSSQCVNLTTRTQLPPAYTNSFTRGVYYPDKVFRSSVLHSTQDLFLPFFSNVTWFHAIHVSGTNGTKRFDNPVLPFNDGVYFASTEKSNIIRGWIFGTTLDSKTQSLLIVNNATNVVIKVCEFQFCNDPFLGVYYHKNNKSWMESEFRVYSSANNCTFEYVSQPFLMDLEGKQGNFKNLREFVFKNIDGYFKIYSKHTPINLVRDLPQGFSALEPLVDLPIGINITRFQTLLALHRSYLTPGDSSSGWTAGAAAYYVGYLQPRTFLLKYNENGTITDAVDCALDPLSETKCTLKSFTVEKGIYQTSNFRVQPTESIVRFPNITNLCPFGEVFNATRFASVYAWNRKRISNCVADYSVLYNSASFSTFKCYGVSPTKLNDLCFTNVYADSFVIRGDEVRQIAPGQTGKIADYNYKLPDDFTGCVIAWNSNNLDSKVGGNYNYLYRLFRKSNLKPFERDISTEIYQAGSTPCNGVEGFNCYFPLQSYGFQPTNGVGYQPYRVVVLSFELLHAPATVCGPKKSTNLVKNKCVNFNFNGLTGTGVLTESNKKFLPFQQFGRDIADTTDAVRDPQTLEILDITPCSFGGVSVITPGTNTSNQVAVLYQGVNCTEVPVAIHADQLTPTWRVYSTGSNVFQTRAGCLIGAEHVNNSYECDIPIGAGICASYQTQTNSPRRARSVASQSIIAYTMSLGAENSVAYSNNSIAIPTNFTISVTTEILPVSMTKTSVDCTMYICGDSTECSNLLLQYGSFCTQLNRALTGIAVEQDKNTQEVFAQVKQIYKTPPIKDFGGFNFSQILPDPSKPSKRSFIEDLLFNKVTLADAGFIKQYGDCLGDIAARDLICAQKFNGLTVLPPLLTDEMIAQYTSALLAGTITSGWTFGAGAALQIPFAMQMAYRFNGIGVTQNVLYENQKLIANQFNSAIGKIQDSLSSTASALGKLQDVVNQNAQALNTLVKQLSSNFGAISSVLNDILSRLDPPEAEVQIDRLITGRLQSLQTYVTQQLIRAAEIRASANLAATKMSECVLGQSKRVDFCGKGYQLMSFPQSAPHGVVFLNVTYVPAQEKNFTTAPAICNDGKAHFPREGVFVSNGTNWFVTQRNFYEPQIITTDNTFVSGNCDVVIGVVNNTVYDPLQPELDSGGGSGGGQIYEGKLTAEGLRFGIVASRFNHALVDRLVEGAIDAIVRHGGREEDITLVRVPGSWEIPVAAGELARKEDIDAVIAIGVLIRGATPHFDYIASEVSKGLADLSLELRKPITFGVITADTLEQAIERAGTKHGNKGWEAALSAIEMANLFKSLR

SEQ ID NO: 7941 - protein, 1307 aa, Artificial Sequence
  SARS-CoV-2/Netherlands/ZuidHolland_9/2020__EPI_ISL_414445 spike protein (1-1147)(K986P_V987P_ H1048Q_H1064N_ H1083N_H1101N) LumSynth construct
MFVFLVLLPLVSSQCVNLTTRTQLPPAYTNSFTRGVYYPDKVFRSSVLHSTQDLFLPFFSNVTWFHAIHVSGTNGTKRFDNPVLPFNDGVYFASTEKSNIIRGWIFGTTLDSKTQSLLIVNNATNVVIKVCEFQFCNDPFLGVYYHKNNKSWMESEFRVYSSANNCTFEYVSQPFLMDLEGKQGNFKNLREFVFKNIDGYFKIYSKHTPINLVRDLPQGFSALEPLVDLPIGINITRFQTLLALHRSYLTPGDSSSGWTAGAAAYYVGYLQPRTFLLKYNENGTITDAVDCALDPLSETKCTLKSFTVEKGIYQTSNFRVQPTESIVRFPNITNLCPFGEVFNATRFASVYAWNRKRISNCVADYSVLYNSASFSTFKCYGVSPTKLNDLCFTNVYADSFVIRGDEVRQIAPGQTGKIADYNYKLPDDFTGCVIAWNSNNLDSKVGGNYNYLYRLFRKSNLKPFERDISTEIYQAGSTPCNGVEGFNCYFPLQSYGFQPTNGVGYQPYRVVVLSFELLHAPATVCGPKKSTNLVKNKCVNFNFNGLTGTGVLTESNKKFLPFQQFGRDIADTTDAVRDPQTLEILDITPCSFGGVSVITPGTNTSNQVAVLYQGVNCTEVPVAIHADQLTPTWRVYSTGSNVFQTRAGCLIGAEHVNNSYECDIPIGAGICASYQTQTNSPRRARSVASQSIIAYTMSLGAENSVAYSNNSIAIPTNFTISVTTEILPVSMTKTSVDCTMYICGDSTECSNLLLQYGSFCTQLNRALTGIAVEQDKNTQEVFAQVKQIYKTPPIKDFGGFNFSQILPDPSKPSKRSFIEDLLFNKVTLADAGFIKQYGDCLGDIAARDLICVQKFNGLTVLPPLLTDEMIAQYTSALLAGTITSGWTFGAGAALQIPFAMQMAYRFNGIGVTQNVLYENQKLIANQFNSAIGKIQDSLSSTASALGKLQDVVNQNAQALNTLVKQLSSNFGAISSVLNDILSRLDPPEAEVQIDRLITGRLQSLQTYVTQQLIRAAEIRASANLAATKMSECVLGQSKRVDFCGKGYQLMSFPQSAPHGVVFLNVTYVPAQEKNFTTAPAICNDGKAHFPREGVFVSNGTNWFVTQRNFYEPQIITTDNTFVSGNCDVVIGIVNNTVYDPLQPELDSGGGSGGGQIYEGKLTAEGLRFGIVASRFNHALVDRLVEGAIDAIVRHGGREEDITLVRVPGSWEIPVAAGELARKEDIDAVIAIGVLIRGATPHFDYIASEVSKGLADLSLELRKPITFGVITADTLEQAIERAGTKHGNKGWEAALSAIEMANLFKSLR

SEQ ID NO: 7942 - protein, 1307 aa, Artificial Sequence
  SARS-CoV-2/Finland/FIN03032020A/2020__EPI_ISL_413602 spike protein (1-1147)(K986P_V987P_ H1048Q_H1064N_ H1083N_H1101N) LumSynth construct
MFVFLVLLPLVSSQCVNLTTRTQLPPAYTNSFTRGVYYPDKVFRSSVLHSTQDLFLPFFSNVTWFHAIHVSGTNGTKRFDNPVLPFNDGVYFASTEKSNIIRGWIFGTTLDSKTQSLLIVNNATNVVIKVCEFQFCNDPFLGVYYHKNNKSWMESEFRVYSSANNCTFEYVSQPFLMDLEGKQGNFKNLREFVFKNIDGYFKIYSKHTPINLVRDLPQGFSALEPLVDLPIGINITRFQTLLALHRSYLTPGDSSSGWTAGAAAYYVGYLQPRTFLLKYNENGTITDAVDCALDPLSETKCTLKSFTVEKGIYQTSNFRVQPTESIVRFPNITNLCPFGEVFNATRFASVYAWNRKRISNCVADYSVLYNSASFSTFKCYGVSPTKLNDLCFTNVYADSFVIRGDEVRQIAPGQTGKIADYNYKLPDDFTGCVISWNSNNLDSKVGGNYNYLYRLFRKSNLKPFERDISTEIYQAGSTPCNGVEGFNCYFPLQSYGFQPTNGVGYQPYRVVVLSFELLHAPATVCGPKKSTNLVKNKCVNFNFNGLTGTGVLTESNKKFLPFQQFGRDIADTTDAVRDPQTLEILDITPCSFGGVSVITPGTNTSNQVAVLYQGVNCTEVPVAIHADQLTPTWRVYSTGSNVFQTRAGCLIGAEHVNNSYECDIPIGAGICASYQTQTNSPRRARSVASQSIIAYTMSLGAENSVAYSNNSIAIPTNFTISVTTEILPVSMTKTSVDCTMYICGDSTECSNLLLQYGSFCTQLNRALTGIAVEQDKNTQEVFAQVKQIYKTPPIKDFGGFNFSQILPDPSKPSKRSFIEDLLFNKVTLADAGFIKQYGDCLGDIAARDLICAQKFNGLTVLPPLLTDEMIAQYTSALLAGTITSGWTFGAGAALQIPFAMQMAYRFNGIGVTQNVLYENQKLIANQFNSAIGKIQDSLSSTASALGKLQDVVNQNAQALNTLVKQLSSNFGAISSVLNDILSRLDPPEAEVQIDRLITGRLQSLQTYVTQQLIRAAEIRASANLAATKMSECVLGQSKRVDFCGKGYQLMSFPQSAPHGVVFLNVTYVPAQEKNFTTAPAICNDGKAHFPREGVFVSNGTNWFVTQRNFYEPQIITTDNTFVSGNCDVVIGIVNNTVYDPLQPELDSGGGSGGGQIYEGKLTAEGLRFGIVASRFNHALVDRLVEGAIDAIVRHGGREEDITLVRVPGSWEIPVAAGELARKEDIDAVIAIGVLIRGATPHFDYIASEVSKGLADLSLELRKPITFGVITADTLEQAIERAGTKHGNKGWEAALSAIEMANLFKSLR

SEQ ID NO: 7943 - protein, 1307 aa, Artificial Sequence
  SARS-CoV-2/France/GE1977/2020__EPI_ISL_414632 spike protein (1-1147)(K986P_V987P_ H1048Q_H1064N_ H1083N_H1101N) LumSynth construct
MFVFLVLLPLVSSQCVNLTTRTQLPPAYTNSFTRGVYYPDKVFRSSVLHSTQDLFLPFFSNVTWFHAIHVSGTNGTKRFDNPVLPFNDGVYFASTEKSNIIRGWIFGTTLDSKTQSLLIVNNATNVVIKVCEFQFCNDPFLGVYYHKNNKSWMESEFRVYSSANNCTFEYVSQPFLMDLEGKQGNFKNLREFVFKNIDGYFKIYSKHTPINLVRDLPQGFSALEPLVDLPIGINITRFQTLLALHRSYLTPGDSSSGWTAGAAAYYVGYLQPRTFLLKYNENGTITDAVDCALDPLSETKCTLKSFTVEKGIYQTSNFRVQPTESIVRFPNITNLCPFGEVFNATRFASVYAWNRKRISNCVADYSVLYNSASFSTFKCYGVSPTKLNDLCFTNVYADSFVIRGDEVRQIAPGQTGKIADYNYKLPDDFTGCVIAWNSNNLDSKVGGNYNYLYRLFRKSNLKPFERDISTEIYQAGSTPCNGVEGFNCYFPLQSYGFQPTNGVGYQPYRVVVLSFELLHAPATVCGPKKSTNLVKNKCVNFNFNGLTGTGVLTESNKKFLPFQQFGRDIADTTDAVRDPQTLEILDITPCSFGGVSVITPGTNTSNQVAVLYQGVNCTEVPVAIHADQLTPTWRVYSTGSNVFQTRAGCLIGAEHVNNSYECDIPIGAGICASYQTQTNSPRRARSVASQSIIAYTMSLGAENSVAYSNNSIAIPTNFTISVTTEILPVSMTKTSVDCTMYICGDSTECSNLLLQYGSFCTQLNRALTGIAVEQDKNTQEVFAQVKQIYKTPPIKDFGGFNFSQILPDPSKPSKRSFIEDLLFNKVTLADAGFIKQYGDCLGDIAARDLICAQKFNGLTVLPPLLTDEMIAQYTSALLAGTITSGWTFGAGAALQIPFAMQMAYRFNGIGVTQNVLYENQKLIANQFNSAIGKIQDSLFSTASALGKLQDVVNQNAQALNTLVKQLSSNFGAISSVLNDILSRLDPPEAEVQIDRLITGRLQSLQTYVTQQLIRAAEIRASANLAATKMSECVLGQSKRVDFCGKGYQLMSFPQSAPHGVVFLNVTYVPAQEKNFTTAPAICNDGKAHFPREGVFVSNGTNWFVTQRNFYEPQIITTDNTFVSGNCDVVIGIVNNTVYDPLQPELDSGGGSGGGQIYEGKLTAEGLRFGIVASRFNHALVDRLVEGAIDAIVRHGGREEDITLVRVPGSWEIPVAAGELARKEDIDAVIAIGVLIRGATPHFDYIASEVSKGLADLSLELRKPITFGVITADTLEQAIERAGTKHGNKGWEAALSAIEMANLFKSLR

SEQ ID NO: 7944 - protein, 1307 aa, Artificial Sequence
  SARS-CoV-2/Finland/FIN-313/2020__EPI_ISL_414641 spike protein (1-1147)(K986P_V987P_ H1048Q_H1064N_ H1083N_H1101N) LumSynth construct
MFVFLVLLPLVSSQCVNLTTRTQLPPAYTNSFTRGVYYPDKVFRSSVLHSTQDLFLPFFSNVTWFHAIHVSGTNGTKRFDNPVLPFNDGVYFASTEKSNIIRGWIFGTTLDSKTQSLLIVNNATNVVIKVCEFQFCNDPFLGVYYHKNNKSWMESEFRVYSSANNCTFEYVSQPFLMDLEGKQGNFKNLREFVFKNIDGYFKIYSKHTPINLVRDLPQGFSALEPLVDLPIGINITRFKTLLALHRSYLTPGDSSSGWTAGAAAYYVGYLQPRTFLLKYNENGTITDAVDCALDPLSETKCTLKSFTVEKGIYQTSNFRVQPTESIVRFPNITNLCPFGEVFNATRFASVYAWNRKRISNCVADYSVLYNSASFSTFKCYGVSPTKLNDLCFTNVYADSFVIRGDEVRQIAPGQTGKIADYNYKLPDDFTGCVIAWNSNNLDSKVGGNYNYLYRLFRKSNLKPFERDISTEIYQAGSTPCNGVEGFNCYFPLQSYGFQPTNGVGYQPYRVVVLSFELLHAPATVCGPKKSTNLVKNKCVNFNFNGLTGTGVLTESNKKFLPFQQFGRDIADTTDAVRDPQTLEILDITPCSFGGVSVITPGTNTSNQVAVLYQGVNCTEVPVAIHADQLTPTWRVYSTGSNVFQTRAGCLIGAEHVNNSYECDIPIGAGICASYQTQTNSPRRARSVASQSIIAYTMSLGAENSVAYSNNSIAIPTNFTISVTTEILPVSMTKTSVDCTMYICGDSTECSNLLLQYGSFCTQLNRALTGIAVEQDKNTQEVFAQVKQIYKTPPIKDFGGFNFSQILPDPSKPSKRSFIEDLLFNKVTLADAGFIKQYGDCLGDIAARDLICAQKFNGLTVLPPLLTDEMIAQYTSALLAGTITSGWTFGAGAALQIPFAMQMAYRFNGIGVTQNVLYENQKLIANQFNSAIGKIQDSLSSTASALGKLQDVVNQNAQALNTLVKQLSSNFGAISSVLNDILSRLDPPEAEVQIDRLITGRLQSLQTYVTQQLIRAAEIRASANLAATKMSECVLGQSKRVDFCGKGYQLMSFPQSAPHGVVFLNVTYVPAQEKNFTTAPAICNDGKAHFPREGVFVSNGTNWFVTQRNFYEPQIITTDNTFVSGNCDVVIGIVNNTVYDPLQPELDSGGGSGGGQIYEGKLTAEGLRFGIVASRFNHALVDRLVEGAIDAIVRHGGREEDITLVRVPGSWEIPVAAGELARKEDIDAVIAIGVLIRGATPHFDYIASEVSKGLADLSLELRKPITFGVITADTLEQAIERAGTKHGNKGWEAALSAIEMANLFKSLR

SEQ ID NO: 7945 - protein, 1307 aa, Artificial Sequence
  SARS-CoV-2/Netherlands/ZuidHolland_2/2020__EPI_ISL_414556 spike protein (1-1147)(K986P_V987P_ H1048Q_H1064N_ H1083N_H1101N) LumSynth construct
MFVFLVLLPLVSSQCVNLTTRTQLPPAYTNSFTRGVYYPDKVFRSSVLHSTQDLFLPFFSNVTWFHAIHVSGTNGTKRFDNPVLPFNDGVYFASTEKSNIIRGWIFGTTLDSKTQSLLIVNNATNVVIKVCEFQFCNDPFLGVYYHKNNKSWMESEFRVYSSANNCTFEYVSQPFLMDLEGKQGNFKNLREFVFKNIDGYFKIYSKHTPINLVRDLPQGFSALEPLVDLPIGINITRFQTLLALHRSYLTPGDSSSGWTAGAAAYYVGYLQPRTFLLKYNENGTITDAVDCALDPLSETKCTLKSFTVEKGIYQTSNFRVQPTESIVRFPNITNLCPFGEVFNATRFASVYAWNRKRISNCVADYSVLYNSASFSTFKCYGVSPTKLNDLCFTNVYADSFVIRGDEVRQIAPGQTGKIADYNYKLPDDFTGCVIAWNSNNLDSKVGGNYNYLYRLFRKSNLKPFERDISTEIYQAGSTPCNGVEGFNCYFPLQSYGFQPTNGVGYQPYRVVVLSFELLHAPATVCGPKKSTNLVKNKCVNFNFNGLTGTGVLTESNKKFLPFQQFGRDIADTTDAVRDPQTLEILDITPCSFGGVSVITPGTNTSNQVAVLYQGVNCTEVPVAIHADQLTPTWRVYSTGSNVFQTRAGCLIGAEHVNNSYECDIPIGAGICASYQTQTNSPRRARSVASQSIIAYTMSLGAENSVAYSNNSIAIPTNFTISVTTEILPVSMTKTSVDCTMYICGDSTECSNLLLQYGSFCTQLNRALTGIALEQDKNTQEVFAQVKQIYKTPPIKDFGGFNFSQILPDPSKPSKRSFIEDLLFNKVTLADAGFIKQYGDCLGDIAARDLICAQKFNGLTVLPPLLTDEMIAQYTSALLAGTITSGWTFGAGAALQIPFAMQMAYRFNGIGVTQNVLYENQKLIANQFNSAIGKIQDSLSSTASALGKLQDVVNQNAQALNTLVKQLSSNFGAISSVLNDILSRLDPPEAEVQIDRLITGRLQSLQTYVTQQLIRAAEIRASANLAATKMSECVLGQSKRVDFCGKGYQLMSFPQSAPHGVVFLNVTYVPAQEKNFTTAPAICNDGKAHFPREGVFVSNGTNWFVTQRNFYEPQIITTDNTFVSGNCDVVIGIVNNTVYDPLQPELDSGGGSGGGQIYEGKLTAEGLRFGIVASRFNHALVDRLVEGAIDAIVRHGGREEDITLVRVPGSWEIPVAAGELARKEDIDAVIAIGVLIRGATPHFDYIASEVSKGLADLSLELRKPITFGVITADTLEQAIERAGTKHGNKGWEAALSAIEMANLFKSLR

SEQ ID NO: 7946 - protein, 1307 aa, Artificial Sequence
  SARS-CoV-2/USA/WA-UW31/2020__EPI_ISL_414618 spike protein (1-1147)(K986P_V987P_ H1048Q_H1064N_ H1083N_H1101N) LumSynth construct
MFVFLVLLPLVSSQCVNLTTRTQLPPAYTNSFTRGVYYPDKVFRSSVLHSTQDLFLPFFSNVTWFHAIHVSGTNGTKRFDNPVLPFNDGVYFASTEKSNIIRGWIFGTTLDSKTQSLLIVNNATNVVIKVCEFQFCNDPFLGVYYHKNNKSWMESEFRVYSSANNCTFEYVSQPFLMDLEGKQGNFKNLREFVFKNIDGYFKIYSKHTPINLVRDLPQGFSALEPLVDLPIGINITRFQTLLALHRSYLTPGDSSSGWTAGAAAYYVGYLQPRTFLLKYNENGTITDAVDCALDPLSETKCTLKSFTVEKGIYQTSNFRVQPTESIVRFPNITNLCPFGEVFNATRFASVYAWNRKRISNCVADYSVLYNSASFSTFKCYGVSPTKLNDLCFTNVYADSFVIRGDEVRQIAPGQTGKIADYNYKLPDDFTGCVIAWNSNNLDSKVGGNYNYLYRLFRKSNLKPFERDISTEIYQAGSTPCNGAEGFNCYFPLQSYGFQPTNGVGYQPYRVVVLSFELLHAPATVCGPKKSTNLVKNKCVNFNFNGLTGTGVLTESNKKFLPFQQFGRDIADTTDAVRDPQTLEILDITPCSFGGVSVITPGTNTSNQVAVLYQDVNCTEVPVAIHADQLTPTWRVYSTGSNVFQTRAGCLIGAEHVNNSYECDIPIGAGICASYQTQTNSPRRARSVASQSIIAYTMSLGAENSVAYSNNSIAIPTNFTISVTTEILPVSMTKTSVDCTMYICGDSTECSNLLLQYGSFCTQLNRALTGIAVEQDKNTQEVFAQVKQIYKTPPIKDFGGFNFSQILPDPSKPSKRSFIEDLLFNKVTLADAGFIKQYGDCLGDIAARDLICAQKFNGLTVLPPLLTDEMIAQYTSALLAGTITSGWTFGAGAALQIPFAMQMAYRFNGIGVTQNVLYENQKLIANQFNSAIGKIQDSLSSTASALGKLQDVVNQNAQALNTLVKQLSSNFGAISSVLNDILSRLDPPEAEVQIDRLITGRLQSLQTYVTQQLIRAAEIRASANLAATKMSECVLGQSKRVDFCGKGYQLMSFPQSAPHGVVFLNVTYVPAQEKNFTTAPAICNDGKAHFPREGVFVSNGTNWFVTQRNFYEPQIITTDNTFVSGNCDVVIGIVNNTVYDPLQPELDSGGGSGGGQIYEGKLTAEGLRFGIVASRFNHALVDRLVEGAIDAIVRHGGREEDITLVRVPGSWEIPVAAGELARKEDIDAVIAIGVLIRGATPHFDYIASEVSKGLADLSLELRKPITFGVITADTLEQAIERAGTKHGNKGWEAALSAIEMANLFKSLR

SEQ ID NO: 7947 - protein, 1307 aa, Artificial Sequence
  SARS-CoV-2/South Korea/SNU01/2020__EPI_ISL_411929 spike protein (1-1147)(K986P_V987P_ H1048Q_H1064N_ H1083N_H1101N) LumSynth construct
MFVFLVLLPLVSSQCVNLTTRTQLPPAYTNSFTRGVYYPDKVFRSSVLHSTQDLFLPFFSNVTWFHAIHVSGTNGTKRFDNPVLPFNDGVYFASTEKSNIIRGWIFGTTLDSKTQSLLIVNNATNVVIKVCEFQFCNDPFLGVYYHKNNKSWMESEFRVYSSANNCTFEYVSQPFLMDLEGKQGNFKNLREFVFKNIDGYFKIYSKHTPINLVRDLPQGFWALEPLVDLPIGINITRFQTLLALHRSYLTPGDSSSGWTAGAAAYYVGYLQPRTFLLKYNENGTITDAVDCALDPLSETKCTLKSFTVEKGIYQTSNFRVQPTESIVRFPNITNLCPFGEVFNATRFASVYAWNRKRISNCVADYSVLYNSASFSTFKCYGVSPTKLNDLCFTNVYADSFVIRGDEVRQIAPGQTGKIADYNYKLPDDFTGCVIAWNSNNLDSKVGGNYNYLYRLFRKSNLKPFERDISTEIYQAGSTPCNGVEGFNCYFPLQSYGFQPTNGVGYQPYRVVVLSFELLHAPATVCGPKKSTNLVKNKCVNFNFNGLTGTGVLTESNKKFLPFQQFGRDIADTTDAVRDPQTLEILDITPCSFGGVSVITPGTNTSNQVAVLYQDVNCTEVPVAIHADQLTPTWRVYSTGSNVFQTRAGCLIGAEHVNNSYECDIPIGAGICASYQTQTNSPRRARSVASQSIIAYTMSLGAENSVAYSNNSIAIPTNFTISVTTEILPVSMTKTSVDCTMYICGDSTECSNLLLQYGSFCTQLNRALTGIAVEQDKNTQEVFAQVKQIYKTPPIKDFGGFNFSQILPDPSKPSKRSFIEDLLFNKVTLADAGFIKQYGDCLGDIAARDLICAQKFNGLTVLPPLLTDEMIAQYTSALLAGTITSGWTFGAGAALQIPFAMQMAYRFNGIGVTQNVLYENQKLIANQFNSAIGKIQDSLSSTASALGKLQDVVNQNAQALNTLVKQLSSNFGAISSVLNDILSRLDPPEAEVQIDRLITGRLQSLQTYVTQQLIRAAEIRASANLAATKMSECVLGQSKRVDFCGKGYQLMSFPQSAPHGVVFLNVTYVPAQEKNFTTAPAICNDGKAHFPREGVFVSNGTNWFVTQRNFYEPQIITTDNTFVSGNCDVVIGIVNNTVYDPLQPELDSGGGSGGGQIYEGKLTAEGLRFGIVASRFNHALVDRLVEGAIDAIVRHGGREEDITLVRVPGSWEIPVAAGELARKEDIDAVIAIGVLIRGATPHFDYIASEVSKGLADLSLELRKPITFGVITADTLEQAIERAGTKHGNKGWEAALSAIEMANLFKSLR

SEQ ID NO: 7948 - protein, 1307 aa, Artificial Sequence
  SARS-CoV-2/China/WF0004/2020__EPI_ISL_413694 spike protein (1-1147)(K986P_V987P_ H1048Q_H1064N_ H1083N_H1101N) LumSynth construct
MFVFLVLLPLVSSQCVNLTTRTQLPPAYTNSFTRGVYYPDKVFRSSVLHSTQDLFLPFFSNVTWFHAIHVSGTNGTKRFDNPVLPFNDGVYFASTEKSNIIRGWIFGTTLDSKTQSLLIVNNATNVVIKVCEFQFCNDPFLGVYYHKNNKSWTESEFRVYSSANNCTFEYVSQPFLMDLEGKQGNFKNLREFVFKNIDGYFKIYSKHTPINLVRDLPQGFSALEPLVDLPIGINITRFQTLLALHRSYLTPGDSSSGWTAGAAAYYVGYLQPRTFLLKYNENGTITDAVDCALDPLSETKCTLKSFTVEKGIYQTSNFRVQPTESIVRFPNITNLCPFGEVFNATRFASVYAWNRKRISNCVADYSVLYNSASFSTFKCYGVSPTKLNDLCFTNVYADSFVIRGDEVRQIAPGQTGKIADYNYKLPDDFTGCVIAWNSNNLDSKVGGNYNYLYRLFRKSNLKPFERDISTEIYQAGSTPCNGVEGFNCYFPLQSYGFQPTNGVGYQPYRVVVLSFELLHAPATVCGPKKSTNLVKNKCVNFNFNGLTGTGVLTESNKKFLPFQQFGRDIADTTDAVRDPQTLEILDITPCSFGGVSVITPGTNTSNQVAVLYQDVNCTEVPVAIHADQLTPTWRVYSTGSNVFQTRAGCLIGAEHVNNSYECDIPIGAGICASYQTQTNSPRRARSVASQSIIAYTMSLGAENSVAYSNNSIAIPTNFTISVTTEILPVSMTKTSVDCTMYICGDSTECSNLLLQYGSFCTQLNRALTGIAVEQDKNTQEVFAQVKQIYKTPPIKDFGGFNFSQILPDPSKPSKRSFIEDLLFNKVTLADAGFIKQYGDCLGDIAARDLICAQKFNGLTVLPPLLTDEMIAQYTSALLAGTITSGWTFGAGAALQIPFAMQMAYRFNGIGVTQNVLYENQKLIANQFNSAIGKIQDSLSSTASALGKLQDVVNQNAQALNTLVKQLSSNFGAISSVLNDILSRLDPPEAEVQIDRLITGRLQSLQTYVTQQLIRAAEIRASANLAATKMSECVLGQSKRFDFCGKGYQLMSFPQSAPHGVVFLNVTYVPAQEKNFTTAPAICNDGKAHFPREGVFVSNGTNWFVTQRNFYEPQIITTDNTFVSGNCDVVIGIVNNTVYDPLQPELDSGGGSGGGQIYEGKLTAEGLRFGIVASRFNHALVDRLVEGAIDAIVRHGGREEDITLVRVPGSWEIPVAAGELARKEDIDAVIAIGVLIRGATPHFDYIASEVSKGLADLSLELRKPITFGVITADTLEQAIERAGTKHGNKGWEAALSAIEMANLFKSLR

SEQ ID NO: 7949 - protein, 1307 aa, Artificial Sequence
  SARS-CoV-2/China/WF0028/2020__EPI_ISL_413791 spike protein (1-1147)(K986P_V987P_ H1048Q_H1064N_ H1083N_H1101N) LumSynth construct
MFVFLVLLPLVSSQCVNLTTRTQLPPAYTNSFTRGVYYPDKVFRSSVLHSTQDLFLPFFSNVTWFHAIHVSGTNGTKRFDNPVLPFNDGVYFASTEKSNIIRGWIFGTTLDSKTQSLLIVNNATNVVIKVCEFQFCNDPFLGVYYHKNNKSWMESEFRVYSSANNCTFEYVSQPFLMDLEGKQGNFKNLREFVFKNIDGYFKIYSKHTPINLVRDLPQGFSALEPLVDLPIGINITRFQTLLALHRSYLTPGDSSSGWTAGAAAYYVGYLQPRTFLLKYNENGTITDAVDCALDPLSETKCTLKSFTVEKGIYQTSNFRVQPTESIVRFPNITNLCPFGEVFNATRFASVYAWNRKRISNCVADYSVLYNSASFSTFKCYGVSPTKLNDLCFTNVYADSFVIRGDEVRQIAPGQTGKIADYNYKLPDDFTGCVIAWNSNNLDSKVGGNYNYLYRLFRKSNLKPFERDISTEIYQAGSTPCNGVEGFNCYFPLQSYGFQPTNGVGYQPYRVVVLSFELLHAPATVCGPKKSTNLVKNKCVNFNFNGLTGTGVLTESNKKFLPFQQFGRDIADTTDAVRDPQTLEILDITPCSFGGVSVITPGTNTSNQVAVLYQDVNCTEVPVAIHADQLTPTWRVYSTGSNVFQTRAGCLIGAEHVNNSYECDIPIGAGICASYQTQTNSPRRARSVASQSIIAYTMSLGAENSVAYSNNSIAIPTNFTISVTTEILPVSMTKTSVDCTMYICGDSTECSNLLLQYGSFCTQLNRALTGIAVEQDKNTQEVFAQVKQIYKTPPIKDFGGFNFSQILPDPSKPSKRSFIEDLLFNKVTLADAGFIKQYGDCLGDIAARDLICAQKFNGLTVLPPLLTDEMIAQYTSALLAGTITSGWTFGAGAALQIPFAMQMAYRFNGIGVTQNVLYENQKLIANQFNSAIGKIQDSLSSTASALGKLQDVVNQNAQALNTLVKQLSSNFGAISSVLNDILSRLDPPEAEVQIDRLITGRLQSLQTYVTQQLIRAAEIRASANLAATKMSECVLGQSKRVDFCGKGYQLMSFPQSAPHGVVFLNVTYVPAQEKNFTTAPAICNDGKAHFPREGVFVSNGTNWFVTQRNFYEPQIITTDNTFVSGNCDVVIGIVNNTVYDPLQPELESGGGSGGGQIYEGKLTAEGLRFGIVASRFNHALVDRLVEGAIDAIVRHGGREEDITLVRVPGSWEIPVAAGELARKEDIDAVIAIGVLIRGATPHFDYIASEVSKGLADLSLELRKPITFGVITADTLEQAIERAGTKHGNKGWEAALSAIEMANLFKSLR

SEQ ID NO: 7950 - protein, 1307 aa, Artificial Sequence
  SARS-CoV-2/2019-nCoV/USA-CruiseA-18/2020__MT159716.1 spike protein (1-1147)(K986P_V987P_ H1048Q_H1064N_ H1083N_H1101N) LumSynth construct
MFVFLVLLPLVSSQCVNLTTRTQLPPAYTNSFTRGVYYPDKVFRSSVLHSTQDLFLPFFSNVTWFHAIHVSGTNGTKRFDNPVLPFNDGVYFASTEKSNIIRGWIFGTTLDSKTQSLLIVNNATNVVIKVCEFQFCNDPFLGVYYHKNNKSWMESELRVYSSANNCTFEYVSQPFLMDLEGKQGNFKNLREFVFKNIDGYFKIYSKHTPINLVRDLPQGFSALEPLVDLPIGINITRFQTLLALHRSYLTPGDSSSGWTAGAAAYYVGYLQPRTFLLKYNENGTITDAVDCALDPLSETKCTLKSFTVEKGIYQTSNFRVQPTESIVRFPNITNLCPFGEVFNATRFASVYAWNRKRISNCVADYSVLYNSASFSTFKCYGVSPTKLNDLCFTNVYADSFVIRGDEVRQIAPGQTGKIADYNYKLPDDFTGCVIAWNSNNLDSKVGGNYNYLYRLFRKSNLKPFERDISTEIYQAGSTPCNGVEGFNCYFPLQSYGFQPTNGVGYQPYRVVVLSFELLHAPATVCGPKKSTNLVKNKCVNFNFNGLTGTGVLTESNKKFLPFQQFGRDIADTTDAVRDPQTLEILDITPCSFGGVSVITPGTNTSNQVAVLYQDVNCTEVPVAIHADQLTPTWRVYSTGSNVFQTRAGCLIGAEHVNNSYECDIPIGAGICASYQTQTNSPRRARSVASQSIIAYTMSLGAENSVAYSNNSIAIPTNFTISVTTEILPVSMTKTSVDCTMYICGDSTECSNLLLQYGSFCTQLNRALTGIAVEQDKNTQEVFAQVKQIYKTPPIKDFGGFNFSQILPDPSKPSKRSFIEDLLFNKVTLADAGFIKQYGDCLGDIAARDLICAQKFNGLTVLPPLLTDEMIAQYTSALLAGTITSGWTFGAGAALQIPFAMQMAYRFNGIGVTQNVLYENQKLIANQFNSAIGKIQDSLSSTASALGKLQDVVNQNAQALNTLVKQLSSNFGAISSVLNDILSRLDPPEAEVQIDRLITGRLQSLQTYVTQQLIRAAEIRASANLAATKMSECVLGQSKRVDFCGKGYQLMSFPQSAPHGVVFLNVTYVPAQEKNFTTAPAICNDGKAHFPREGVFVSNGTNWFVTQRNFYEPQIITTDNTFVSGNCDVVIGIVNNTVYDPLQPELDSGGGSGGGQIYEGKLTAEGLRFGIVASRFNHALVDRLVEGAIDAIVRHGGREEDITLVRVPGSWEIPVAAGELARKEDIDAVIAIGVLIRGATPHFDYIASEVSKGLADLSLELRKPITFGVITADTLEQAIERAGTKHGNKGWEAALSAIEMANLFKSLR

SEQ ID NO: 7951 - protein, 1307 aa, Artificial Sequence
  SARS-CoV-2/SARS-CoV-2/Yunnan-01/human/2020/CHN__MT049951.1 spike protein (1-1147)(K986P_V987P_ H1048Q_H1064N_ H1083N_H1101N) LumSynth construct
MFVFLVLLPLVSSQCVNLTTRTQLPPANTNSFTRGVYYPDKVFRSSVLHSTQDLFLPFFSNVTWFHAIHVSGTNGTKRFDNPVLPFNDGVYFASTEKSNIIRGWIFGTTLDSKTQSLLIVNNATNVVIKVCEFQFCNDPFLGVYYHKNNKSWMESEFRVYSSANNCTFEYVSQPFLMDLEGKQGNFKNLREFVFKNIDGYFKIYSKHTPINLVRDLPQGFSALEPLVDLPIGINITRFQTLLALHRSYLTPGDSSSGWTAGAAAYYVGYLQPRTFLLKYNENGTITDAVDCALDPLSETKCTLKSFTVEKGIYQTSNFRVQPTESIVRFPNITNLCPFGEVFNATRFASVYAWNRKRISNCVADYSVLYNSASFSTFKCYGVSPTKLNDLCFTNVYADSFVIRGDEVRQIAPGQTGKIADYNYKLPDDFTGCVIAWNSNNLDSKVGGNYNYLYRLFRKSNLKPFERDISTEIYQAGSTPCNGVEGFNCYFPLQSYGFQPTNGVGYQPYRVVVLSFELLHAPATVCGPKKSTNLVKNKCVNFNFNGLTGTGVLTESNKKFLPFQQFGRDIADTTDAVRDPQTLEILDITPCSFGGVSVITPGTNTSNQVAVLYQDVNCTEVPVAIHADQLTPTWRVYSTGSNVFQTRAGCLIGAEHVNNSYECDIPIGAGICASYQTQTNSPRRARSVASQSIIAYTMSLGAENSVAYSNNSIAIPTNFTISVTTEILPVSMTKTSVDCTMYICGDSTECSNLLLQYGSFCTQLNRALTGIAVEQDKNTQEVFAQVKQIYKTPPIKDFGGFNFSQILPDPSKPSKRSFIEDLLFNKVTLADAGFIKQYGDCLGDIAARDLICAQKFNGLTVLPPLLTDEMIAQYTSALLAGTITSGWTFGAGAALQIPFAMQMAYRFNGIGVTQNVLYENQKLIANQFNSAIGKIQDSLSSTASALGKLQDVVNQNAQALNTLVKQLSSNFGAISSVLNDILSRLDPPEAEVQIDRLITGRLQSLQTYVTQQLIRAAEIRASANLAATKMSECVLGQSKRVDFCGKGYQLMSFPQSAPHGVVFLNVTYVPAQEKNFTTAPAICNDGKAHFPREGVFVSNGTNWFVTQRNFYEPQIITTDNTFVSGNCDVVIGIVNNTVYDPLQPELDSGGGSGGGQIYEGKLTAEGLRFGIVASRFNHALVDRLVEGAIDAIVRHGGREEDITLVRVPGSWEIPVAAGELARKEDIDAVIAIGVLIRGATPHFDYIASEVSKGLADLSLELRKPITFGVITADTLEQAIERAGTKHGNKGWEAALSAIEMANLFKSLR

SEQ ID NO: 7952 - protein, 1307 aa, Artificial Sequence
  SARS-CoV-2/USA/WA-UW292/2020__EPI_ISL_418077 spike protein (1-1147)(K986P_V987P_ H1048Q_H1064N_ H1083N_H1101N) LumSynth construct
MFVFLVLLPLVSSQCVNLTTRTQLPPAYTNSFTRGVYYPDKVFRSSVLHSTQDLFLPFFSNVTWFHAIHVSGTNGTKRFDNPVLPFNDGVYFASTEKSNIIRGWIFGTTLDSKTQSLLIVNNATNVVIKVCEFQFCNDPFLGVYYHKNNKSWMESEFRVYSSANNCTFEYVSQPFLMDLEGKQGNFKNLREFVFKNIDGYFKIYSKHTPINLVRDLPQGFSALEPLVDLPIGINITRFQTLLALHRSYLTPGDSSSGWTAGAAAYYVGYLQPRTFLLKYNENGTITDAVDCALDPLSETKCTLKSFTVEKGIYQTSNFRVQPTESIVRFPNITNLCPFGEVFNATRFASVYAWNRKRISNCVADYSVLYNSASFSTFKCYGVSPTKLNDLCFTNVYADSFVIRGDEVRQIAPGQTGKIADYNYKLPDDFTGCVIAWNSNNLDSKVGGNYNYLYRLFRKSNLKPFERDISTEIYQASSTPCNGVEGFNCYFPLQSYGFQPTNGVGYQPYRVVVLSFELLHAPATVCGPKKSTNLVKNKCVNFNFNGLTGTGVLTESNKKFLPFQQFGRDIADTTDAVRDPQTLEILDITPCSFGGVSVITPGTNTSNQVAVLYQDVNCTEVPVAIHADQLTPTWRVYSTGSNVFQTRAGCLIGAEHVNNSYECDIPIGAGICASYQTQTNSPRRARSVASQSIIAYTMSLGAENSVAYSNNSIAIPTNFTISVTTEILPVSMTKTSVDCTMYICGDSTECSNLLLQYGSFCTQLNRALTGIAVEQDKNTQEVFAQVKQIYKTPPIKDFGGFNFSQILPDPSKPSKRSFIEDLLFNKVTLADAGFIKQYGDCLGDIAARDLICAQKFNGLTVLPPLLTDEMIAQYTSALLAGTITSGWTFGAGAALQIPFAMQMAYRFNGIGVTQNVLYENQKLIANQFNSAIGKIQDSLSSTASALGKLQDVVNQNAQALNTLVKQLSSNFGAISSVLNDILSRLDPPEAEVQIDRLITGRLQSLQTYVTQQLIRAAEIRASANLAATKMSECVLGQSKRVDFCGKGYQLMSFPQSAPHGVVFLNVTYVPAQEKNFTTAPAICNDGKAHFPREGVFVSNGTNWFVTQRNFYEPQIITTDNTFVSGNCDVVIGIVNNTVYDPLQPELDSGGGSGGGQIYEGKLTAEGLRFGIVASRFNHALVDRLVEGAIDAIVRHGGREEDITLVRVPGSWEIPVAAGELARKEDIDAVIAIGVLIRGATPHFDYIASEVSKGLADLSLELRKPITFGVITADTLEQAIERAGTKHGNKGWEAALSAIEMANLFKSLR

SEQ ID NO: 7953 - protein, 1307 aa, Artificial Sequence
  SARS-CoV-2/Iceland/192/2020__EPI_ISL_417819 spike protein (1-1147)(K986P_V987P_ H1048Q_H1064N_ H1083N_H1101N) LumSynth construct
MFVFFVLLPLVSSQCVNLTTRTQLPPAYTNSFTRGVYYPDKVFRSSVLHSTQDLFLPFFSNVTWFHAIHVSGTNGTKRFDNPVLPFNDGVYFASTEKSNIIRGWIFGTTLDSKTQSLLIVNNATNVVIKVCEFQFCNDPFLGVYYHKNNKSWMESEFRVYSSANNCTFEYVSQPFLMDLEGKQGNFKNLREFVFKNIDGYFKIYSKHTPINLVRDLPQGFSALEPLVDLPIGINITRFQTLLALHRSYLTPGDSSSGWTAGAAAYYVGYLQPRTFLLKYNENGTITDAVDCALDPLSETKCTLKSFTVEKGIYQTSNFRVQPTESIVRFPNITNLCPFGEVFNATRFASVYAWNRKRISNCVADYSVLYNSASFSTFKCYGVSPTKLNDLCFTNVYADSFVIRGDEVRQIAPGQTGKIADYNYKLPDDFTGCVIAWNSNNLDSKVGGNYNYLYRLFRKSNLKPFERDISTEIYQAGSTPCNGVEGFNCYFPLQSYGFQPTNGVGYQPYRVVVLSFELLHAPATVCGPKKSTNLVKNKCVNFNFNGLTGTGVLTESNKKFLPFQQFGRDIADTTDAVRDPQTLEILDITPCSFGGVSVITPGTNTSNQVAVLYQGVNCTEVPVAIHADQLTPTWRVYSTGSNVFQTRAGCLIGAEHVNNSYECDIPIGAGICASYQTQTNSPRRARSVASQSIIAYTMSLGAENSVAYSNNSIAIPTNFTISVTTEILPVSMTKTSVDCTMYICGDSTECSNLLLQYGSFCTQLNRALTGIAVEQDKNTQEVFAQVKQIYKTPPIKDFGGFNFSQILPDPSKPSKRSFIEDLLFNKVTLADAGFIKQYGDCLGDIAARDLICAQKFNGLTVLPPLLTDEMIAQYTSALLAGTITSGWTFGAGAALQIPFAMQMAYRFNGIGVTQNVLYENQKLIANQFNSAIGKIQDSLSSTASALGKLQDVVNQNAQALNTLVKQLSSNFGAISSVLNDILSRLDPPEAEVQIDRLITGRLQSLQTYVTQQLIRAAEIRASANLAATKMSECVLGQSKRVDFCGKGYQLMSFPQSAPHGVVFLNVTYVPAQEKNFTTAPAICNDGKAHFPREGVFVSNGTNWFVTQRNFYEPQIITTDNTFVSGNCDVVIGIVNNTVYDPLQPELDSGGGSGGGQIYEGKLTAEGLRFGIVASRFNHALVDRLVEGAIDAIVRHGGREEDITLVRVPGSWEIPVAAGELARKEDIDAVIAIGVLIRGATPHFDYIASEVSKGLADLSLELRKPITFGVITADTLEQAIERAGTKHGNKGWEAALSAIEMANLFKSLR

SEQ ID NO: 7954 - protein, 1307 aa, Artificial Sequence
  SARS-CoV-2/Belgium/ULG-6939/2020__EPI_ISL_417020 spike protein (1-1147)(K986P_V987P_ H1048Q_H1064N_ H1083N_H1101N) LumSynth construct
MFVFLVLLPLVSSQCVNLTTRTQLPPAYTNSFTRGVYYPDKVFRSSVLHSTQDLFLPFFSNVTWFHAIHVSGTNGTKRFDNPVLPFNDGVYFASTEKSNIIRGWIFGTTLDSKTQSLLIVNNATNVVIKVCEFQFCNDPFLGVYYHKNNKSWMESEFRVYSSANNCTFEYVSQPFLMDLEGKQGNFKNLREFVFKNIDGYFKIYSKHTPINLVRDLPQGFSALEPLVDLPIGINITRFQTLLALHRSYLTPGDSSSGWTAGAAAYYVGYLQPRTFLLKYNENGTITDAVDCALDPLSETKCTLKSFTVEKGIYQTSNFRVQPTESIVRFPNITNLCPFGEVFNATRFASVYAWNRKRISNCVADYSVLYNSASFSTFKCYGVSPTKLNDLCFTNVYADSFVIRGDEVRQIAPGQTGKIADYNYKLPDDFTGCVIAWNSNNLDSKVGGNYNYLYRLFRKSNLKPFERDISTEIYQAGSTPCNGVEGFNCYFPLQSYGFQPTNGVGYQPYRVVVLSFELLHAPATVCGPKKSTNLVKNKCVNFNFNGLTGTGVLTESNKKFLPFQQFGRDIADTTDAVRDPQTLEILDITPCSFGGVSVITPGTNTSNQVAVLYQGVNCTEVPVAIHADQLTPTWRVYSTGSNVFQTRAGCLIGAEHVNNSYECDIPIGAGICASYQTQTNSPRRARSVASQSIIAYTMSLGAENSVVYSNNSIAIPTNFTISVTTEILPVSMTKTSVDCTMYICGDSTECSNLLLQYGSFCTQLNRALTGIAVEQDKNTQEVFAQVKQIYKTPPIKDFGGFNFSQILPDPSKPSKRSFIEDLLFNKVTLADAGFIKQYGDCLGDIAARDLICAQKFNGLTVLPPLLTDEMIAQYTSALLAGTITSGWTFGAGAALQIPFAMQMAYRFNGIGVTQNVLYENQKLIANQFNSAIGKIQDSLSSTASALGKLQDVVNQNAQALNTLVKQLSSNFGAISSVLNDILSRLDPPEAEVQIDRLITGRLQSLQTYVTQQLIRAAEIRASANLAATKMSECVLGQSKRVDFCGKGYQLMSFPQSAPHGVVFLNVTYVPAQEKNFTTAPAICNDGKAHFPREGVFVSNGTNWFVTQRNFYEPQIITTDNTFVSGNCDVVIGIVNNTVYDPLQPELDSGGGSGGGQIYEGKLTAEGLRFGIVASRFNHALVDRLVEGAIDAIVRHGGREEDITLVRVPGSWEIPVAAGELARKEDIDAVIAIGVLIRGATPHFDYIASEVSKGLADLSLELRKPITFGVITADTLEQAIERAGTKHGNKGWEAALSAIEMANLFKSLR

SEQ ID NO: 7955 - protein, 1307 aa, Artificial Sequence
  SARS-CoV-2/France/HF2496/2020__EPI_ISL_418231 spike protein (1-1147)(K986P_V987P_ H1048Q_H1064N_ H1083N_H1101N) LumSynth construct
MFVFLVLLPLVSSQCVNLTTRTQLPPAYTNSFTRGVYYPDKVFRSSVLHSTQDLFLPFFSNVTWFHAIHVSGTNGTKRFDNPVLPFNDGVYFASTEKSNIIRGWIFGTTLDSKTQSLLIVNNATNVVIKVCEFQFCNDPFLGVYYHKNNKSWMESEFRVYSSANNCTFEYVSQPFLMDLEGKQGNFKNLREFVFKNIDGYFKIYSKHTPINLVRDLPQGFSALEPLVDLPIGINITRFQTLLALHRSYLTPGDSSSGWTAGAAAYYVGYLQPRTFLLKYNENGTITDAVDCALDPLSETKCTLKSFTVEKGIYQTSNFRVQPTESIVRFPNITNLCPFGEVFNATRFASVYAWNRKRISNCVADYSVLYNSASFSTFKCYGVSPTKLNDLCFTNVYADSFVIRGDEVRQIAPGQTGKIADYNYKLPDDFTGCVIAWNSNNLDSKVGGNYNYLYRLFRKSNLKPFERDISTEIYQAGSTPCNGVEGFNCYFPLQSYGFQPTNGVGYQPYRVVVLSFELLHAPATVCGPKKSTNLVKNKCVNFNFNGLTGTGVLTESNKKFLPFQQFGRDIADTTDAVRDPQTLEILDITPCSFGGVSVITPGTNTSNQVAVLYQGVNCTEVPVAIHADQLTPTWRVYSTGSNVFQTRAGCLIGAEHVNNSYECDIPIGAGICASYQTQTNSPRRARSVASQSIIAYTMSLGAENSVAYSNNSIAIPTNFTISVTTEILPVSMTKTSVDCTMYICGDSTECSNLLLQYGSFCTQLNRALTGIAVEQDKNTQEVFAQVKQIYKTPPIKDFGGFNFSQILPDPSKPSKRSFIEDLLFNKVTLADAGFIKQYGDCLGDIVARDLICAQKFNGLTVLPPLLTDEMIAQYTSALLAGTITSGWTFGAGAALQIPFAMQMAYRFNGIGVTQNVLYENQKLIANQFNSAIGKIQDSLSSTASALGKLQDVVNQNAQALNTLVKQLSSNFGAISSVLNDILSRLDPPEAEVQIDRLITGRLQSLQTYVTQQLIRAAEIRASANLAATKMSECVLGQSKRVDFCGKGYQLMSFPQSAPHGVVFLNVTYVPAQEKNFTTAPAICNDGKAHFPREGVFVSNGTNWFVTQRNFYEPQIITTDNTFVSGNCDVVIGIVNNTVYDPLQPELDSGGGSGGGQIYEGKLTAEGLRFGIVASRFNHALVDRLVEGAIDAIVRHGGREEDITLVRVPGSWEIPVAAGELARKEDIDAVIAIGVLIRGATPHFDYIASEVSKGLADLSLELRKPITFGVITADTLEQAIERAGTKHGNKGWEAALSAIEMANLFKSLR

SEQ ID NO: 7956 - protein, 1307 aa, Artificial Sequence
  SARS-CoV-2/USA/WA-UW291/2020__EPI_ISL_418076 spike protein (1-1147)(K986P_V987P_ H1048Q_H1064N_ H1083N_H1101N) LumSynth construct
MFVFLVLLPLVSSQCVNLTTRTQLPPAYTNSFTRGVYYPDKVFRSSVLHSTQDLFLPFFSNVTWFHAIHVSGTNGTKRFDNPVLPFNDGVYFASTEKSNIIRGWIFGTTLDSKTQSLLIVNNATNVVIKVCEFQFCNDPFLGVYYHKNNKSWMESEFRVYSSANNCTFEYVSQPFLMDLEGKQGNFKNLREFVFKNIDGYFKIYSKHTPINLVRDLPQGFSALEPLVDLPIGINITRFQTLLALHRSYLTPGDSSSGWTAGAAAYYVGYLQPRTFLLKYNENGTITDAVDCALDPLSETKCTLKSFTVEKGIYQTSNFRVQPTESIVRFPNITNLCPFGEVFNATRFASVYAWNRKRISNCVADYSVLYNSASFSTFKCYGVSPTKLNDLCFTNVYADSFVIRGDEVRQIAPGQTGKIADYNYKLPDDFTGCVIAWNSNNLDSKVGGNYNYLYRLFRKSNLKPFERDISTEIYQAGSTPCNGVEGFNCYFPLQSYGFQPTNGVGYQPYRVVVLSFELLHAPATVCGPKKSTNLVKNKCVNFNFNGLTGTGVLTESNKKFLPFQQFGRDIADTTDAVRDPQTLEILDITPCSFGGVSVITPGTNTSNQVAVLYQGVNCTEVPVAIHADQLTPTWRVYSTGSNVFQTRAGCLIGAEHVNNSYECDIPIGAGICASYQTQTNSPRRARSVASQSIIAYTMSLGAENSVAYSNNSIAIPTNFTISVTTEILPVSMTKTSVDCTMYICGDSTECSNLLLQYGSFCTQLNRALTGIAVEQDKNTQEVFAQVKQIYKTPPIKDFGGFNFSQILPDPSKPSKRSFIEDLLFNKVTLADAGFIKQYGDCLGDIAARDLICAQKFNGLTVLPPLLTDEMIAQYTSALLAGTITSGWTFGAGAALQIPFAMQMAYRFNGIGVTQNVLYENQKLIANQFNSAIGKIQYSLSSTASALGKLQDVVNQNAQALNTLVKQLSSNFGAISSVLNDILSRLDPPEAEVQIDRLITGRLQSLQTYVTQQLIRAAEIRASANLAATKMSECVLGQSKRVDFCGKGYQLMSFPQSAPHGVVFLNVTYVPAQEKNFTTAPAICNDGKAHFPREGVFVSNGTNWFVTQRNFYEPQIITTDNTFVSGNCDVVIGIVNNTVYDPLQPELDSGGGSGGGQIYEGKLTAEGLRFGIVASRFNHALVDRLVEGAIDAIVRHGGREEDITLVRVPGSWEIPVAAGELARKEDIDAVIAIGVLIRGATPHFDYIASEVSKGLADLSLELRKPITFGVITADTLEQAIERAGTKHGNKGWEAALSAIEMANLFKSLR

SEQ ID NO: 7957 - protein, 1307 aa, Artificial Sequence; identical to SEQ ID NO: 7920
  SARS-CoV-2/Portugal/PT0034/2020__EPI_ISL_418019 spike protein (1-1147)(K986P_V987P_ H1048Q_H1064N_ H1083N_H1101N) LumSynth construct

SEQ ID NO: 7958 - protein, 1307 aa, Artificial Sequence; identical to SEQ ID NO: 7912
  SARS-CoV-2/Iceland/202/2020__EPI_ISL_417750 spike protein (1-1147)(K986P_V987P_ H1048Q_H1064N_ H1083N_H1101N) LumSynth construct

SEQ ID NO: 7959 - protein, 1307 aa, Artificial Sequence
  SARS-CoV-2/USA/WA-UW261/2020__EPI_ISL_418046 spike protein (1-1147)(K986P_V987P_ H1048Q_H1064N_ H1083N_H1101N) LumSynth construct
MFVFLVLLPLVSSQCVNLTTRTQLPPAYTNSFTRGVYYPDKVFRSSVLHSTQDLFLPFFSNVTWFHAIHVSGTNGTKRFDNPVLPFNDGVYFASTEKSNIIRGWIFGTTLDSKTQSLLIVNNATNVVIKVCEFQFCNDPFLGVYYHKNNKSWMESEFRVYSSANNCTFEYVSQPFLMDLEGKQGNFKNLREFVFKNIDGYFKIYSKHTPINLVRDLPQGFSALEPLVDLPIGINITRFQTLLALHRSYLTPGDSSSGWTAGAAAYYVGYLQPRTFLLKYNENGTITDAVDCALDPLSETKCTLKSFTVEKGIYQTSNFRVQPTESIVRFPNITNLCPFGEVFNATRFTSVYAWNRKRISNCVADYSVLYNSASFSTFKCYGVSPTKLNDLCFTNVYADSFVIRGDEVRQIAPGQTGKIADYNYKLPDDFTGCVIAWNSNNLDSKVGGNYNYLYRLFRKSNLKPFERDISTEIYQAGSTPCNGVEGFNCYFPLQSYGFQPTNGVGYQPYRVVVLSFELLHAPATVCGPKKSTNLVKNKCVNFNFNGLTGTGVLTESNKKFLPFQQFGRDIADTTDAVRDPQTLEILDITPCSFGGVSVITPGTNTSNQVAVLYQDVNCTEVPVAIHADQLTPTWRVYSTGSNVFQTRAGCLIGAEHVNNSYECDIPIGAGICASYQTQTNSPRRARSVASQSIIAYTMSLGAENSVAYSNNSIAIPTNFTISVTTEILPVSMTKTSVDCTMYICGDSTECSNLLLQYGSFCTQLNRALTGIAVEQDKNTQEVFAQVKQIYKTPPIKDFGGFNFSQILPDPSKPSKRSFIEDLLFNKVTLADAGFIKQYGDCLGDIAARDLICAQKFNGLTVLPPLLTDEMIAQYTSALLAGTITSGWTFGAGAALQIPFAMQMAYRFNGIGVTQNVLYENQKLIANQFNSAIGKIQDSLSSTASALGKLQDVVNQNAQALNTLVKQLSSNFGAISSVLNDILSRLDPPEAEVQIDRLITGRLQSLQTYVTQQLIRAAEIRASANLAATKMSECVLGQSKRVDFCGKGYQLMSFPQSAPHGVVFLNVTYVPAQEKNFTTAPAICNDGKAHFPREGVFVSNGTNWFVTQRNFYEPQIITTDNTFVSGNCDVVIGIVNNTVYDPLQPELDSGGGSGGGQIYEGKLTAEGLRFGIVASRFNHALVDRLVEGAIDAIVRHGGREEDITLVRVPGSWEIPVAAGELARKEDIDAVIAIGVLIRGATPHFDYIASEVSKGLADLSLELRKPITFGVITADTLEQAIERAGTKHGNKGWEAALSAIEMANLFKSLR

SEQ ID NO: 7960 - protein, 1307 aa, Artificial Sequence
  SARS-CoV-2/Portugal/PT0035/2020__EPI_ISL_418020 spike protein (1-1147)(K986P_V987P_ H1048Q_H1064N_ H1083N_H1101N) LumSynth construct
MFVFLVLLPLVSSQCVNLTTRTQLPPAYTNSFTRGVYYPDKVFRSSVLHSTQDLFLPFFSNVTWFHAIHVSGTNGTKRFDNPVLPFNDGVYFASTEKSNIIRGWIFGTTLDSKTQSLLIVNNATNVVIKVCEFQFCNDPFLGVYYHKNNKSWMESEFRVYSSANNCTFEYVSQPFLMDLEGKQGNFKNLREFVFKNIDGYFKIYSKHTPINLVRDLPQGFSALEPLVDLPIGINITRFQTLLALHRSYLTPGDSSSGWTAGAAAYYVGYLQPRTFLLKYNENGTITDAVDCALDPLSETKCTLKSFTVEKGIYQTSNFRVQPTESIVRFPNITNLCPFGEVFNATRFASVYAWNRKRISNCVADYSVLYNSASFSTFKCYGVSPTKLNDLCFTNVYADSFVIRGDEVRQIAPGQTGKIADYNYKLPDDFTGCVIAWNSNNLDSKVGGNYNYLYRLFRKSNLKPFERDISTEIYQAGSTPCNGVEGFNCYFPLQSYGFQPTNGVGYQPYRVVVLSFELLHAPATVCGPKKSTNLVKNKCVNFNFNGLTGTGVLTESNKKFLPFQQFGRDIADTTDAVRDPQTLEILDITPCSFGGVSVITPGTNTSNQVAVLYQDVNCTEVPVAIHADQLTPTWRVYSTGSNVFQTRAGCLIGAEHVNNSYECDIPIGAGICASYQTQTNSPRRARSVASQSIIAYTMSLGAENSVAYSNNSIAIPTNFTISVTTEILPVSMTKTSVDCTMYICGDSTECSNLLLQYGSFCTQLNRALTGIAVEQDKNTQEVFAQVKQIYKTPPIKDFGGFNFSQILPDPSKPSKRSFIEDLLFNKVTLADAGFIKQYGDCLGDISARDLICAQKFNGLTVLPPLLTDEMIAQYTSALLAGTITSGWTFGAGAALQIPFAMQMAYRFNGIGVTQNVLYENQKLIANQFNSAIGKIQDSLSSTASALGKLQDVVNQNAQALNTLVKQLSSNFGAISSVLNDILSRLDPPEAEVQIDRLITGRLQSLQTYVTQQLIRAAEIRASANLAATKMSECVLGQSKRVDFCGKGYQLMSFPQSAPHGVVFLNVTYVPAQEKNFTTAPAICNDGKAHFPREGVFVSNGTNWFVTQRNFYEPQIITTDNTFVSGNCDVVIGIVNNTVYDPLQPELDSGGGSGGGQIYEGKLTAEGLRFGIVASRFNHALVDRLVEGAIDAIVRHGGREEDITLVRVPGSWEIPVAAGELARKEDIDAVIAIGVLIRGATPHFDYIASEVSKGLADLSLELRKPITFGVITADTLEQAIERAGTKHGNKGWEAALSAIEMANLFKSLR

SEQ ID NO: 7961 - protein, 1307 aa, Artificial Sequence
  SARS-CoV-2/USA/NY-NYUMC7/2020__EPI_ISL_418192 spike protein (1-1147)(K986P_V987P_ H1048Q_H1064N_ H1083N_H1101N) LumSynth construct
MFVFLVLLPLVSSQCVNLTTRTQLPPAYTNSFTRGVYYPDKVFRSSVLHSTQDLFLPFFSNVTWFHAIHVSGTNGTKRFDNPVLPFNDGVYFASTEKSNIIRGWIFGTTLDSKTQSLLIVNNATNVVIKVCEFQFCNDPFLGVYHHKNNKSWMESEFRVYSSANNCTFEYVSQPFLMDLEGKQGNFKNLREFVFKNIDGYFKIYSKHTPINLVRDLPQGFSALEPLVDLPIGINITRFQTLLALHRSYLTPGDSSSGWTAGAAAYYVGYLQPRTFLLKYNENGTITDAVDCALDPLSETKCTLKSFTVEKGIYQTSNFRVQPTESIVRFPNITNLCPFGEVFNATRFASVYAWNRKRISNCVADYSVLYNSASFSTFKCYGVSPTKLNDLCFTNVYADSFVIRGDEVRQIAPGQTGKIADYNYKLPDDFTGCVIAWNSNNLDSKVGGNYNYLYRLFRKSNLKPFERDISTEIYQAGSTPCNGVEGFNCYFPLQSYGFQPTNGVGYQPYRVVVLSFELLHAPATVCGPKKSTNLVKNKCVNFNFNGLTGTGVLTESNKKFLPFQQFGRDIADTTDAVRDPQTLEILDITPCSFGGVSVITPGTNTSNQVAVLYQGVNCTEVPVAIHADQLTPTWRVYSTGSNVFQTRAGCLIGAEHVNNSYECDIPIGAGICASYQTQTNSPRRARSVASQSIIAYTMSLGAENSVAYSNNSIAIPTNFTISVTTEILPVSMTKTSVDCTMYICGDSTECSNLLLQYGSFCTQLNRALTGIAVEQDKNTQEVFAQVKQIYKTPPIKDFGGFNFSQILPDPSKPSKRSFIEDLLFNKVTLADAGFIKQYGDCLGDIAARDLICAQKFNGLTVLPPLLTDEMIAQYTSALLAGTITSGWTFGAGAALQIPFAMQMAYRFNGIGVTQNVLYENQKLIANQFNSAIGKIQDSLSSTASALGKLQDVVNQNAQALNTLVKQLSSNFGAISSVLNDILSRLDPPEAEVQIDRLITGRLQSLQTYVTQQLIRAAEIRASANLAATKMSECVLGQSKRVDFCGKGYQLMSFPQSAPHGVVFLNVTYVPAQEKNFTTAPAICNDGKAHFPREGVFVSNGTNWFVTQRNFYEPQIITTDNTFVSGNCDVVIGIVNNTVYDPLQPELDSGGGSGGGQIYEGKLTAEGLRFGIVASRFNHALVDRLVEGAIDAIVRHGGREEDITLVRVPGSWEIPVAAGELARKEDIDAVIAIGVLIRGATPHFDYIASEVSKGLADLSLELRKPITFGVITADTLEQAIERAGTKHGNKGWEAALSAIEMANLFKSLR

SEQ ID NO: 7962 - protein, 1307 aa, Artificial Sequence
  SARS-CoV-2/Iceland/189/2020__EPI_ISL_417709 spike protein (1-1147)(K986P_V987P_ H1048Q_H1064N_ H1083N_H1101N) LumSynth construct
MFVFLVLLPLVSSQCVNLTTRTQLPPAYTNSFTRGVYYPDKVFRSSVLHSTQDLFLPFFSNVTWFHAIHVSGTNGTKRFDNPVLPFNDGVYFASTEKSNIIRGWIFGTTLDSKTQSLLIVNNATNVVIKVCEFQFCNDPFLGVYYHKNNKSWMESEFRVYSSANNCTFEYVSQPFLMDLEGKQGNFKNLREFVFKNIDGYFKIYSKHTPINLVRDLPQGFSALEPLVDLPIGINITRFQTLLALHRSYLTPGDSSSGWTAGAAAYYVGYLQPRTFLLKYNENGTITDAVDCALDPLSETKCTLKSFTVEKGIYQTSNFRVQPTESIVRFPNITNLCPFGEVFNATRFASVYAWNRKRISNCVADYSVLYNSASFSTFKCYGVSPTKLNDLCFTNVYADSFVIRGDEVRQIAPGQTGKIADYNYKLPDDFTGCVIAWNSNNLDSKVGGNYNYLYRLFRKSNLKPFERDISTEIYQAGSTPCNGVEGFNCYFPLQSYGFQPTNGVGYQPYRVVVLSFELLHAPATVCGPKKSTNLVKNKCVNFNFNGLTGTGVLTESNKKFLPFQQFGRDIADTTDAVRDPQTLEILDITPCSFGGVSVITPGTNTSNQVAVLYQGVNCTEVPVAIHADQLTPTWRVYSTGSNVFQTRAGCLIGAEHVNNSYECDIPIGAGICASYQTQTNSPRRARSVASQSIIAYTMSLGAENSVAYSNNSIAIPTNFTISVTTEILPVSMTKTSVDCTMYICGDSTECSNLLLQYGSFCTQLNRALTGIAVEQDKNTQEVFAQVKQIYKTPPIKDFGGFNFSQILPDPSKPSKRSFIEDLLFNKVTLADAGFTKQYGDCLGDIAARDLICAQKFNGLTVLPPLLTDEMIAQYTSALLAGTITSGWTFGAGAALQIPFAMQMAYRFNGIGVTQNVLYENQKLIANQFNSAIGKIQDSLSSTASALGKLQDVVNQNAQALNTLVKQLSSNFGAISSVLNDILSRLDPPEAEVQIDRLITGRLQSLQTYVTQQLIRAAEIRASANLAATKMSECVLGQSKRVDFCGKGYQLMSFPQSAPHGVVFLNVTYVPAQEKNFTTAPAICNDGKAHFPREGVFVSNGTNWFVTQRNFYEPQIITTDNTFVSGNCDVVIGIVNNTVYDPLQPELDSGGGSGGGQIYEGKLTAEGLRFGIVASRFNHALVDRLVEGAIDAIVRHGGREEDITLVRVPGSWEIPVAAGELARKEDIDAVIAIGVLIRGATPHFDYIASEVSKGLADLSLELRKPITFGVITADTLEQAIERAGTKHGNKGWEAALSAIEMANLFKSLR

SEQ ID NO: 7963 - protein, 1307 aa, Artificial Sequence
  SARS-CoV-2/Australia/NSW56/2020__EPI_ISL_417408 spike protein (1-1147)(K986P_V987P_ H1048Q_H1064N_ H1083N_H1101N) LumSynth construct
MFVFLVLLPLVSSQCVNLTTRTQLPPAYTNSFTRGVYYPDKVFRSSVLHSTQDLFLPFFSNVTWFHAIHVSGTNGTKRFDNPVLPFNDGVYFASTEKSNIIRGWIFGTTLDSKTQSLLIVNNATNVVIKVCEFQFCNDPFLGVYYHKNNKSWMESEFRVYSSANNCTFEYVSQPFLMDLEGKQGNFKNLREFVFKNIDGYFKIYSKHTPINLVRDLPQGFSALEPLVDLPIGINITRFQTLLALHRSYLTPGDSSSGWTAGAAAYYVGYLQPRTFLLKYNENGTITDAVDCALDPLSETKCTLKSFTVEKGIYQTSNFRVQPTESIVRFPNITNLCPFGEVFNATRFASVYAWNRKRISNCVADYSVLYNSASFSTFKCYGVSPTKLNDLCFTNVYADSFVIRGDEVRQIAPGQTGKIADYNYKLPDDFTGCVIAWNSNNLDSKVGGNYNYLYRLFRKSNLKPFERDISTEIYQAGSTPCNGVEGFNCYFPLQSYGFQPTNGVGYQPYRVVVLSFELLHAPATVCGPKKSTNLVKNKCVNFNFNGLTGTGVLTESNKKFLPFQQFGRDIADTTDAVRDPQTLEILDITPCSFGGVSVITPGTNTSNQVAVLYQDVNCTEVPVAIHADQLTPTWRVYSTGSNVFQTRAGCLIGAEHVNNSYECDIPIGAGICASYQTQTNSPRRARSVASQSIIAYTMSLGAENSVAYSNNSIAIPTNFTISVTTEILPVSMTKTSVDCTMYICGDSTECSNLLLQYGSFCTQLNRALTGIAVEQDKNTQEVFAQVKQIYKTPPIKDFGGFNFSQILPDSSKPSKRSFIEDLLFNKVTLADAGFIKQYGDCLGDIAARDLICAQKFNGLTVLPPLLTDEMIAQYTSALLAGTITSGWTFGAGAALQIPFAMQMAYRFNGIGVTQNVLYENQKLIANQFNSAIGKIQDSLSSTASALGKLQDVVNQNAQALNTLVKQLSSNFGAISSVLNDILSRLDPPEAEVQIDRLITGRLQSLQTYVTQQLIRAAEIRASANLAATKMSECVLGQSKRVDFCGKGYQLMSFPQSAPHGVVFLNVTYVPAQEKNFTTAPAICNDGKAHFPREGVFVSNGTNWFVTQRNFYEPQIITTDNTFVSGNCDVVIGIVNNTVYDPLQPELDSGGGSGGGQIYEGKLTAEGLRFGIVASRFNHALVDRLVEGAIDAIVRHGGREEDITLVRVPGSWEIPVAAGELARKEDIDAVIAIGVLIRGATPHFDYIASEVSKGLADLSLELRKPITFGVITADTLEQAIERAGTKHGNKGWEAALSAIEMANLFKSLR

SEQ ID NO: 7964 - protein, 1307 aa, Artificial Sequence
  SARS-CoV-2/Iceland/280/2020__EPI_ISL_417608 spike protein (1-1147)(K986P_V987P_ H1048Q_H1064N_ H1083N_H1101N) LumSynth construct
MFVFLVLLPLVSSQCVNLTTRTQLPPAYTNSFTRGVYYPDKVFRSSVLHSTQDLFLPFFSNVTWFHAIHVSGTNGTKRFDNPVLPFNDGVYFASTEKSNIIRGWIFGTTLDSKTQSLLIVNNATNVVIKVCEFQFCNDPFLGVYYHKNNKSWMESEFRVYSSANNCTFEYVSQPFLMDLEGKQGNFKNLREFVFKNIDGYFKIYSKHTPINLVRDLPQGFSALEPLVDLPIGINITRFQTLLALHRSYLTPGDSSSGWTAGAAAYYVGYLQPRTFLLKYNENGTITDAVDCALDPLSETKCTLKSFTVEKGIYQTSNFRVQPTESIVRFPNITNLCPFGEVFNATRFASVYAWNRKRISNCVADYSVLYNSASFSTFKCYGVSPTKLNDLCFTNVYADSFVIRGDEVRQIAPGQTGKIADYNYKLPDDFTGCVIAWNSNNLDSKVGGNYNYLYRLFRKSNLKPFERDISTEIYQAGSTPCNGVEGFNCYFPLQSYGFQPTNGVGYQPYRVVVLSFELLHAPATVCGPKKSTNLVKNKCVNFNFNGLTGTGVLTESNKKFLPFQQFGRDIADTTDAVRDPQTLEILDITPCSFGGVSVITPGTNTSNQVAVLYQGVNCTEVPVAIHADQLTPTWRVYSTGSNVFQTRAGCLIGAEHVNNSYECDIPIGAGICASYHTQTNSPRRARSVASQSIIAYTMSLGAENSVAYSNNSIAIPTNFTISVTTEILPVSMTKTSVDCTMYICGDSTECSNLLLQYGSFCTQLNRALTGIAVEQDKNTQEVFAQVKQIYKTPPIKDFGGFNFSQILPDPSKPSKRSFIEDLLFNKVTLADAGFIKQYGDCLGDIAARDLICAQKFNGLTVLPPLLTDEMIAQYTSALLAGTITSGWTFGAGAALQIPFAMQMAYRFNGIGVTQNVLYENQKLIANQFNSAIGKIQDSLSSTASALGKLQDVVNQNAQALNTLVKQLSSNFGAISSVLNDILSRLDPPEAEVQIDRLITGRLQSLQTYVTQQLIRAAEIRASANLAATKMSECVLGQSKRVDFCGKGYQLMSFPQSAPHGVVFLNVTYVPAQEKNFTTAPAICNDGKAHFPREGVFVSNGTNWFVTQRNFYEPQIITTDNTFVSGNCDVVIGIVNNTVYDPLQPELDSGGGSGGGQIYEGKLTAEGLRFGIVASRFNHALVDRLVEGAIDAIVRHGGREEDITLVRVPGSWEIPVAAGELARKEDIDAVIAIGVLIRGATPHFDYIASEVSKGLADLSLELRKPITFGVITADTLEQAIERAGTKHGNKGWEAALSAIEMANLFKSLR

SEQ ID NO: 7965 - protein, 1307 aa, Artificial Sequence; identical to SEQ ID NO: 7920
  SARS-CoV-2/Iceland/247/2020__EPI_ISL_417575 spike protein (1-1147)(K986P_V987P_ H1048Q_H1064N_ H1083N_H1101N) LumSynth construct

SEQ ID NO: 7966 - protein, 1307 aa, Artificial Sequence
  SARS-CoV-2/Iceland/238/2020__EPI_ISL_417566 spike protein (1-1147)(K986P_V987P_ H1048Q_H1064N_ H1083N_H1101N) LumSynth construct
MFVFLVLLPLVSSQCVNLTTRTQLPPAYTNSFTRGVYYPDKVFRSSVLHSTQDLFLPFFSNVTWFHAIHVSGTNGTKRFDNPVLPFNDGVYFASTEKSNIIRGWIFGTTLDSKTQSLLIVNNATNVVIKVCEFQFCNDPFLGVYYHKNNKSWMESEFRVYSSANNCTFEYVSQPFLMDLEGKQGNFKNLREFVFKNIDGYFKIYSKHTPINLVRDLPQGFSALEPLVDLPIGINITRFQTLLALHRSYLTPGDSSSGWTAGAAAYYVGYLQPRTFLLKYNENGTITDAVDCALDPLSETKCTLKSFTVEKGIYQTSNFRVQPTESIVRFPNITNLCPFGEVFNATRFASVYAWNRKRISNCVADYSVLYNSASFSTFKCYGVSPTKLNDLCFTNVYADSFVIRGDEVRQIAPGQTGKIADYNYKLPDDFTGCVIAWNSNNLDSKVGGNYNYLYRLFRKSNLKPFERDISTEIYQAGSTPCNGVEGFNCYFPLQSYGFQPTNGVGYQPYRVVVLSFELLHAPATVCGPKKSTNLVKNKCVNFNFNGLTGTGVLTESNKKFLPFQQFGRDIADTTDAVRDPQTLEILDITPCSFGGVSVITPGTNTSNQVAVLYQGVNCTEVPVAIHADQLTPTWRVYSTGSNVFQTRAGCLIGAEHVNNSYECDIPIGAGICASYQTQTNSPRRARSVASQSIIAYTMSLGAENSVAYSNNSIAIPTNFTISVTTEILPVSMTKTSVDCTMYICGDSTECSNLLLQYGSFCTQLNRALTGIAVEQDKNTQEVFAQVKQIYKTPPIKDFGGFNFSQILPDPSKPSKRSFIEDLLFNKVTLADVGFIKQYGDCLGDIAARDLICAQKFNGLTVLPPLLTDEMIAQYTSALLAGTITSGWTFGAGAALQIPFAMQMAYRFNGIGVTQNVLYENQKLIANQFNSAIGKIQDSLSSTASALGKLQDVVNQNAQALNTLVKQLSSNFGAISSVLNDILSRLDPPEAEVQIDRLITGRLQSLQTYVTQQLIRAAEIRASANLAATKMSECVLGQSKRVDFCGKGYQLMSFPQSAPHGVVFLNVTYVPAQEKNFTTAPAICNDGKAHFPREGVFVSNGTNWFVTQRNFYEPQIITTDNTFVSGNCDVVIGIVNNTVYDPLQPELDSGGGSGGGQIYEGKLTAEGLRFGIVASRFNHALVDRLVEGAIDAIVRHGGREEDITLVRVPGSWEIPVAAGELARKEDIDAVIAIGVLIRGATPHFDYIASEVSKGLADLSLELRKPITFGVITADTLEQAIERAGTKHGNKGWEAALSAIEMANLFKSLR

SEQ ID NO: 7967 - protein, 1307 aa, Artificial Sequence
  SARS-CoV-2/Greece/16/2020__EPI_ISL_418265 spike protein (1-1147)(K986P_V987P_ H1048Q_H1064N_ H1083N_H1101N) LumSynth construct
MFVFLVLLPLVSSQCVNLTTRTQLPPAYTNSFTRGVYYPDKVFRSSVLHSTQDLFLPFFSNVTWFHAIHVSGTNGTKRFDNPVLPFNDGVYFASTEKSNIIRGWIFGTTLDSKTQSLLIVNNATNVVIKVCEFQFCNDPFLGVYYHKNNKSWMESEFRVYSSANNCTFEYVSQPFLMDLEGKQGNFKNLREFVFKNVDGYFKIYSKHTPINLVRDLPQGFSALEPLVDLPIGINITRFQTLLALHRSYLTPGDSSSGWTAGAAAYYVGYLQPRTFLLKYNENGTITDAVDCALDPLSETKCTLKSFTVEKGIYQTSNFRVQPTESIVRFPNITNLCPFGEVFNATRFASVYAWNRKRISNCVADYSVLYNSASFSTFKCYGVSPTKLNDLCFTNVYADSFVIRGDEVRQIAPGQTGKIADYNYKLPDDFTGCVIAWNSNNLDSKVGGNYNYLYRLFRKSNLKPFERDISTEIYQAGSTPCNGVEGFNCYFPLQSYGFQPTNGVGYQPYRVVVLSFELLHAPATVCGPKKSTNLVKNKCVNFNFNGLTGTGVLTESNKKFLPFQQFGRDIADTTDAVRDPQTLEILDITPCSFGGVSVITPGTNTSNQVAVLYQDVNCTEVPVAIHADQLTPTWRVYSTGSNVFQTRAGCLIGAEHVNNSYECDIPIGAGICASYQTQTNSPRRARSVASQSIIAYTMSLGAENSVAYSNNSIAIPTNFTISVTTEILPVSMTKTSVDCTMYICGDSTECSNLLLQYGSFCTQLNRALTGIAVEQDKNTQEVFAQVKQIYKTPPIKDFGGFNFSQILPDPSKPSKRSFIEDLLFNKVTLADAGFIKQYGDCLGDIAARDLICAQKFNGLTVLPPLLTDEMIAQYTSALLAGTITSGWTFGAGAALQIPFAMQMAYRFNGIGVTQNVLYENQKLIANQFNSAIGKIQDSLSSTASALGKLQDVVNQNAQALNTLVKQLSSNFGAISSVLNDILSRLDPPEAEVQIDRLITGRLQSLQTYVTQQLIRAAEIRASANLAATKMSECVLGQSKRVDFCGKGYQLMSFPQSAPHGVVFLNVTYVPAQEKNFTTAPAICNDGKAHFPREGVFVSNGTNWFVTQRNFYEPQIITTDNTFVSGNCDVVIGIVNNTVYDPLQPELDSGGGSGGGQIYEGKLTAEGLRFGIVASRFNHALVDRLVEGAIDAIVRHGGREEDITLVRVPGSWEIPVAAGELARKEDIDAVIAIGVLIRGATPHFDYIASEVSKGLADLSLELRKPITFGVITADTLEQAIERAGTKHGNKGWEAALSAIEMANLFKSLR

SEQ ID NO: 7968 - protein, 1307 aa, Artificial Sequence
  SARS-CoV-2/Iceland/319/2020__EPI_ISL_417648 spike protein (1-1147)(K986P_V987P_ H1048Q_H1064N_ H1083N_H1101N) LumSynth construct
MFVFLVLLPLVSSQCVNLTTRTQLPPAYTNSFTRGVYYPDKVFRSSVLHSTQDLFLPFFSNVTWFHAIHVSGTNGTKRFDNPVLPFNDGVYFASTEKSNIIRGWIFGTTLDSKTQSLLIVNNATNVVIKVCEFQFCNDPFLGVYYHKNNKSWMESEFRVYSSANNCTFEYVSQPFLIDLEGKQGNFKNLREFVFKNIDGYFKIYSKHTPINLVRDLPQGFSALEPLVDLPIGINITRFQTLLALHRSYLTPGDSSSGWTAGAAAYYVGYLQPRTFLLKYNENGTITDAVDCALDPLSETKCTLKSFTVEKGIYQTSNFRVQPTESIVRFPNITNLCPFGEVFNATRFASVYAWNRKRISNCVADYSVLYNSASFSTFKCYGVSPTKLNDLCFTNVYADSFVIRGDEVRQIAPGQTGKIADYNYKLPDDFTGCVIAWNSNNLDSKVGGNYNYLYRLFRKSNLKPFERDISTEIYQAGSTPCNGVEGFNCYFPLQSYGFQPTNGVGYQPYRVVVLSFELLHAPATVCGPKKSTNLVKNKCVNFNFNGLTGTGVLTESNKKFLPFQQFGRDIADTTDAVRDPQTLEILDITPCSFGGVSVITPGTNTSNQVAVLYQGVNCTEVPVAIHADQLTPTWRVYSTGSNVFQTRAGCLIGAEHVNNSYECDIPIGAGICASYQTQTNSPRRARSVASQSIIAYTMSLGAENSVAYSNNSIAIPTNFTISVTTEILPVSMTKTSVDCTMYICGDSTECSNLLLQYGSFCTQLNRALTGIAVEQDKNTQEVFAQVKQIYKTPPIKDFGGFNFSQILPDPSKPSKRSFIEDLLFNKVTLADAGFIKQYGDCLGDIAARDLICAQKFNGLTVLPPLLTDEMIAQYTSALLAGTITSGWTFGAGAALQIPFAMQMAYRFNGIGVTQNVLYENQKLIANQFNSAIGKIQDSLSSTASALGKLQDVVNQNAQALNTLVKQLSSNFGAISSVLNDILSRLDPPEAEVQIDRLITGRLQSLQTYVTQQLIRAAEIRASANLAATKMSECVLGQSKRVDFCGKGYQLMSFPQSAPHGVVFLNVTYVPAQEKNFTTAPAICNDGKAHFPREGVFVSNGTNWFVTQRNFYEPQIITTDNTFVSGNCDVVIGIVNNTVYDPLQPELDSGGGSGGGQIYEGKLTAEGLRFGIVASRFNHALVDRLVEGAIDAIVRHGGREEDITLVRVPGSWEIPVAAGELARKEDIDAVIAIGVLIRGATPHFDYIASEVSKGLADLSLELRKPITFGVITADTLEQAIERAGTKHGNKGWEAALSAIEMANLFKSLR

SEQ ID NO: 7969 - protein, 1307 aa, Artificial Sequence
  SARS-CoV-2/Congo/94/2020__EPI_ISL_417947 spike protein (1-1147)(K986P_V987P_ H1048Q_H1064N_ H1083N_H1101N) LumSynth construct
MFVFLVLLPLVSSQCVNLTTRTQLPPAYTNSFTRGVYYPDKVFRSSVLHSTQDLFLPFFSNVTWFHAIHVSGTNGTKRFDNPVLPFNDGVYFASTEKSNIIRGWIFGTTLDSKTQSLLIVNNATNVVIKVCEFQFCNDPFLGVYYHKNNKSWMESEFRVYSSANNCTFEYVSQPFLMDLEGKQGNFKNLREFVFKNIDGYFKIYSKHTPINLVRDLPQGFSALEPLVDLPIGINITRFQTLLALHRSYLTPGDSSSGWTAGAAAYYVGYLQPRTFLLKYNENGTITDAVDCALDPLSETKCTLKSFTVEKGIYQTSNFRVQPTESIVRFPNITNLCPFGEVFNATRFASVYAWNRKRISNCVADYSVLYNSASFSTFKCYGVSPTKLNDLCFTNVYADSFVIRGDEVRQIAPGQTGKIADYNYKLPDDFTGCVIAWNSNNLDSKVGGNYNYLYRLFRKSNLKPFERDISTEIYQAGSTPCNGVEGFNCYFPLQSYGFQPTNGVGYQPYRVVVLSFELLHAPATVCGPKKSTNLVKNKCVNFNFNGLTGTGVLTESNKKFLPFQQFGRDIADTTDAVRDPQTLEILDITPCSFGGVSVITPGTNTSNQVAVLYQGVNCTEVPVAIHADQLTPTWRVYSTGSNVFQTRAGCLIGAEHVNNSYECDIPIGAGICASYQTQTNSPRRARSVASQSIIAYTMSLGAENSVAYSNNSIAIPTNFTISVTTEILPVSMTKTSVDCTMYICGDSTECSNLLLQYGSFCTQLNRALTGIAVEQDKNTQEVFAQVKQIYKTPPIKDFGGFNFSQILPDPSKPSKRSFIEDILFNKVTLADAGFIKQYGDCLGDIAARDLICAQKFNGLTVLPPLLTDEMIAQYTSALLAGTITSGWTFGAGAALQIPFAMQMAYRFNGIGVTQNVLYENQKLIANQFNSAIGKIQDSLSSTASALGKLQDVVNQNAQALNTLVKQLSSNFGAISSVLNDILSRLDPPEAEVQIDRLITGRLQSLQTYVTQQLIRAAEIRASANLAATKMSECVLGQSKRVDFCGKGYQLMSFPQSAPHGVVFLNVTYVPAQEKNFTTAPAICNDGKAHFPREGVFVSNGTNWFVTQRNFYEPQIITTDNTFVSGNCDVVIGIVNNTVYDPLQPELDSGGGSGGGQIYEGKLTAEGLRFGIVASRFNHALVDRLVEGAIDAIVRHGGREEDITLVRVPGSWEIPVAAGELARKEDIDAVIAIGVLIRGATPHFDYIASEVSKGLADLSLELRKPITFGVITADTLEQAIERAGTKHGNKGWEAALSAIEMANLFKSLR

SEQ ID NO: 7970 - protein, 1307 aa, Artificial Sequence
  SARS-CoV-2/Congo/158/2020__EPI_ISL_417950 spike protein (1-1147)(K986P_V987P_ H1048Q_H1064N_ H1083N_H1101N) LumSynth construct
MFVFLVLLPLVSSQCVNLTTRTQLPPAYTNSFTRGVYYPDKVFRSSVLHSTQDLFLPFFSNVTWFHAIHVSGTNGTKRFDNPVLPFNDGVYFASTEKSNIIRGWIFGTTLDSKTQSLLIVNNATNVVIKVCEFQFCNDPFLGVYYHKNNKSWMESEFRVYSSANNCTFEYVSQPFLMDLEGKQGNFKNLREFVFKNIDGYFKIYSKHTPINLVRDLPQGFSALEPLVDLPIGINITRFQTLLALHRSYLTPGDSSSGWTAGAAAYYVGYLQPRTFLLKYNENGTITDAVDCALDPLSETKCTLKSFTVEKGIYQTSNFRVQPTESIVRFPNITNLCPFGEVFNATRFASVYAWNRKRISNCVADYSVLYNSASFSTFKCYGVSPTKLNDLCFTNVYADSFVIRGDEVRQIAPGQTGKIADYNYKLPDDFTGCVIAWNSNNLDSKVGGNYNYLYRLFRKSNLKPFERDISTEIYQAGSTPCNGVEGFNCYFPLQSYGFQPTNGVGYQPYRVVVLSFELLHAPATVCGPKKSTNLVKNKCVNFNFNGLTGTGVLTESNKKFLPFQQFGRDIADTTDAVRDPQTLEILDITPCSFGGVSVITPGTNTSNQVAVLYQDVNCTEVPVAIHADQLTPTWRVYSTGSNVFQTRAGCLIGAEHVNNSYECDIPIGAGICASYQTQTNSPRRARSVASQSIIAYTMSLGAENSVAYSNNSIAIPTNFTISVTTEILPVSMTKTSVDCTMYICGDSTECSNLLLQYGSFCTQLNRALTGIAVEQDKNTQEVFAQVKQIYKTPPIKDFGGFNFSQILPDPSKPSKRSFIEDLLFNKVTLADAGFIKQYGDCLGDIAARDLICAQKFNGLTVLPPLLTDEMIAQYTSALLAGTITSGWTFGAGAALQIPFAMQMAYRFNGIGVTQNVLYENQKLIANQFNSAIGKIQDSLSSTASALGKLQDVVNQNAQALNTLVKQLSSNFGAISSVLNDILSRLDPPEAEVQIDRLITGRLQSLQTYVTQQLIRAAEIRASANLAATKMSECVLGQSKRVDFCGKGYQLMSFPQSAPHGVVFLNVTYVPAQEKNFTTAPAICNDGKAHFPREGVFVSNGTNWFVTQRNFYEPQIITTDNTFLSGNCDVVIGIVNNTVYDPLQPELDSGGGSGGGQIYEGKLTAEGLRFGIVASRFNHALVDRLVEGAIDAIVRHGGREEDITLVRVPGSWEIPVAAGELARKEDIDAVIAIGVLIRGATPHFDYIASEVSKGLADLSLELRKPITFGVITADTLEQAIERAGTKHGNKGWEAALSAIEMANLFKSLR

SEQ ID NO: 7971 - protein, 1307 aa, Artificial Sequence
  SARS-CoV-2/USA/UT-00034/2020__EPI_ISL_417977 spike protein (1-1147)(K986P_V987P_ H1048Q_H1064N_ H1083N_H1101N) LumSynth construct
MFVFLVLLPLVSSQCVNLTTRTQLPPAYTNSFTRGVYYPDKVFRSSVLHSTQDLFLPFFSNVTWFHAIHVSGTNGTKRFDNPVLPFNDGVYFASTEKSNIIRGWIFGTTLDSKTQSLLIVNNATNVVIKVCEFQFCNDPFLGVYYYKNNKSWMESEFRVYSSANNCTFEYVSQPFLMDLEGKQGNFKNLREFVFKNIDGYFKIYSKHTPINLVRDLPQGFSALEPLVDLPIGINITRFQTLLALHRSYLTPGDSSSGWTAGAAAYYVGYLQPRTFLLKYNENGTITDAVDCALDPLSETKCTLKSFTVEKGIYQTSNFRVQPTESIVRFPNITNLCPFGEVFNATRFASVYAWNRKRISNCVADYSVLYNSASFSTFKCYGVSPTKLNDLCFTNVYADSFVIRGDEVRQIAPGQTGKIADYNYKLPDDFTGCVIAWNSNNLDSKVGGNYNYLYRLFRKSNLKPFERDISTEIYQAGSTPCNGVEGFNCYFPLQSYGFQPTNGVGYQPYRVVVLSFELLHAPATVCGPKKSTNLVKNKCVNFNFNGLTGTGVLTESNKKFLPFQQFGRDIADTTDAVRDPQTLEILDITPCSFGGVSVITPGTNTSNQVAVLYQGVNCTEVPVAIHADQLTPTWRVYSTGSNVFQTRAGCLIGAEHVNNSYECDIPIGAGICASYQTQTNSPRRARSVASQSIIAYTMSLGAENSVAYSNNSIAIPTNFTISVTTEILPVSMTKTSVDCTMYICGDSTECSNLLLQYGSFCTQLNRALTGIAVEQDKNTQEVFAQVKQIYKTPPIKDFGGFNFSQILPDPSKPSKRSFIEDLLFNKVTLADAGFIKQYGDCLGDIAARDLICAQKFNGLTVLPPLLTDEMIAQYTSALLAGTITSGWTFGAGAALQIPFAMQMAYRFNGIGVTQNVLYENQKLIANQFNSAIGKIQDSLSSTASALGKLQDVVNQNAQALNTLVKQLSSNFGAISSVLNDILSRLDPPEAEVQIDRLITGRLQSLQTYVTQQLIRAAEIRASANLAATKMSECVLGQSKRVDFCGKGYQLMSFPQSAPHGVVFLNVTYVPAQEKNFTTAPAICNDGKAHFPREGVFVSNGTNWFVTQRNFYEPQIITTDNTFVSGNCDVVIGIVNNTVYDPLQPELDSGGGSGGGQIYEGKLTAEGLRFGIVASRFNHALVDRLVEGAIDAIVRHGGREEDITLVRVPGSWEIPVAAGELARKEDIDAVIAIGVLIRGATPHFDYIASEVSKGLADLSLELRKPITFGVITADTLEQAIERAGTKHGNKGWEAALSAIEMANLFKSLR

SEQ ID NO: 7972 - protein, 1307 aa, Artificial Sequence
  SARS-CoV-2/USA/UT-00033/2020__EPI_ISL_417976 spike protein (1-1147)(K986P_V987P_ H1048Q_H1064N_ H1083N_H1101N) LumSynth construct
MFVFLVLLPLVSSQCVNLTTRTQLPPAYTNSFTRGVYYPDKVFRSSVLHSTQDLFLPFFSNVTWFHAIHVSGTNGTKRFDNPVLPFNDGVYFASTEKSNIIRGWIFGTTLDSKTQSLLIVNNATNVVIKVCEFQFCNDPFLGVYYHKNNKSWMESEFRVYSSANNCTFEYVSQPFLMDLEGKQGNFKNLREFVFKNIDGYFKIYSKHTPINLVRDLPQGFSALEPLVDLPIGINITRFQTLLALHRSYLTPGDSSSGLTAGAAAYYVGYLQPRTFLLKYNENGTITDAVDCALDPLSETKCTLKSFTVEKGIYQTSNFRVQPTESIVRFPNITNLCPFGEVFNATRFASVYAWNRKRISNCVADYSVLYNSASFSTFKCYGVSPTKLNDLCFTNVYADSFVIRGDEVRQIAPGQTGKIADYNYKLPDDFTGCVIAWNSNNLDSKVGGNYNYLYRLFRKSNLKPFERDISTEIYQAGSTPCNGVEGFNCYFPLQSYGFQPTNGVGYQPYRVVVLSFELLHAPATVCGPKKSTNLVKNKCVNFNFNGLTGTGVLTESNKKFLPFQQFGRDIADTTDAVRDPQTLEILDITPCSFGGVSVITPGTNTSNQVAVLYQGVNCTEVPVAIHADQLTPTWRVYSTGSNVFQTRAGCLIGAEHVNNSYECDIPIGAGICASYQTQTNSPRRARSVASQSIIAYTMSLGAENSVAYSNNSIAIPTNFTISVTTEILPVSMTKTSVDCTMYICGDSTECSNLLLQYGSFCTQLNRALTGIAVEQDKNTQEVFAQVKQIYKTPPIKDFGGFNFSQILPDPSKPSKRSFIEDLLFNKVTLADAGFIKQYGDCLGDIAARDLICAQKFNGLTVLPPLLTDEMIAQYTSALLAGTITSGWTFGAGAALQIPFAMQMAYRFNGIGVTQNVLYENQKLIANQFNSAIGKIQDSLSSTASALGKLQDVVNQNAQALNTLVKQLSSNFGAISSVLNDILSRLDPPEAEVQIDRLITGRLQSLQTYVTQQLIRAAEIRASANLAATKMSECVLGQSKRVDFCGKGYQLMSFPQSAPHGVVFLNVTYVPAQEKNFTTAPAICNDGKAHFPREGVFVSNGTNWFVTQRNFYEPQIITTDNTFVSGNCDVVIGIVNNTVYDPLQPELDSGGGSGGGQIYEGKLTAEGLRFGIVASRFNHALVDRLVEGAIDAIVRHGGREEDITLVRVPGSWEIPVAAGELARKEDIDAVIAIGVLIRGATPHFDYIASEVSKGLADLSLELRKPITFGVITADTLEQAIERAGTKHGNKGWEAALSAIEMANLFKSLR

SEQ ID NO: 7973 - protein, 1307 aa, Artificial Sequence
  SARS-CoV-2/USA/WI-13/2020__EPI_ISL_417516 spike protein (1-1147)(K986P_V987P_ H1048Q_H1064N_ H1083N_H1101N) LumSynth construct
MFVFLVLLPLVSSQCVNLTTRTQLPPAYTNSFTRGVYYPDKVFRSSVLHSTQDLFLPFFSNVTWFHAIHVSGTNGTKRFDNPVLPFNDGVYFASTEKSNIIRGWIFGTTLDSKTQSLLIVNNATNVVIKVCEFQFCNDPFLGVYYHKNNKSWMESEFRVYSSANNCTFEYVSQPFLMDLEGKQGNFKNLREFVFKNIDGYFKIYSKHTPINLVRDLPQGFSALEPLVDLPIGINITRFQTLLALHRSYLTPGDSSSGWTAGAAAYYVGYLQPRTFLLKYNENGTITDAVDCALDPLSETKCTLKSFTVEKGIYQTSNFRVLPTESIVRFPNITNLCPFGEVFNATRFASVYAWNRKRISNCVADYSVLYNSASFSTFKCYGVSPTKLNDLCFTNVYADSFVIRGDEVRQIAPGQTGKIADYNYKLPDDFTGCVIAWNSNNLDSKVGGNYNYLYRLFRKSNLKPFERDISTEIYQAGSTPCNGVEGFNCYFPLQSYGFQPTNGVGYQPYRVVVLSFELLHAPATVCGPKKSTNLVKNKCVNFNFNGLTGTGVLTESNKKFLPFQQFGRDIADTTDAVRDPQTLEILDITPCSFGGVSVITPGTNTSNQVAVLYQGVNCTEVPVAIHADQLTPTWRVYSTGSNVFQTRAGCLIGAEHVNNSYECDIPIGAGICASYQTQTNSPRRARSVASQSIIAYTMSLGAENSVAYSNNSIAIPTNFTISVTTEILPVSMTKTSVDCTMYICGDSTECSNLLLQYGSFCTQLNRALTGIAVEQDKNTQEVFAQVKQIYKTPPIKDFGGFNFSQILPDPSKPSKRSFIEDLLFNKVTLADAGFIKQYGDCLGDIAARDLICAQKFNGLTVLPPLLTDEMIAQYTSALLAGTITSGWTFGAGAALQIPFAMQMAYRFNGIGVTQNVLYENQKLIANQFNSAIGKIQDSLSSTASALGKLQDVVNQNAQALNTLVKQLSSNFGAISSVLNDILSRLDPPEAEVQIDRLITGRLQSLQTYVTQQLIRAAEIRASANLAATKMSECVLGQSKRVDFCGKGYQLMSFPQSAPHGVVFLNVTYVPAQEKNFTTAPAICNDGKAHFPREGVFVSNGTNWFVTQRNFYEPQIITTDNTFVSGNCDVVIGIVNNTVYDPLQPELDSGGGSGGGQIYEGKLTAEGLRFGIVASRFNHALVDRLVEGAIDAIVRHGGREEDITLVRVPGSWEIPVAAGELARKEDIDAVIAIGVLIRGATPHFDYIASEVSKGLADLSLELRKPITFGVITADTLEQAIERAGTKHGNKGWEAALSAIEMANLFKSLR

SEQ ID NO: 7974 - protein, 1306 aa, Artificial Sequence
  SARS-CoV-2/India/1-27/2020__EPI_ISL_413522 spike protein (1-1146)(K985P_V986P_ H1047Q_H1063N_ H1082N_H1100N) LumSynth construct
MFVFLVLLPLVSSQCVNLTTRTQLPPAYTNSFTRGVYYPDKVFRSSVLHSTQDLFLPFFSNVTWFHAIHVSGTNGTKRFDNPVLPFNDGVYFASTEKSNIIRGWIFGTTLDSKTQSLLIVNNATNVVIKVCEFQFCNDPFLGVYHKNNKSWMESEFRVYSSANNCTFEYVSQPFLMDLEGKQGNFKNLREFVFKNIDGYFKIYSKHTPINLVRDLPQGFSALEPLVDLPIGINITRFQTLLALHRSYLTPGDSSSGWTAGAAAYYVGYLQPRTFLLKYNENGTITDAVDCALDPLSETKCTLKSFTVEKGIYQTSNFRVQPTESIVRFPNITNLCPFGEVFNATRFASVYAWNRKRISNCVADYSVLYNSASFSTFKCYGVSPTKLNDLCFTNVYADSFVIRGDEVIQIAPGQTGKIADYNYKLPDDFTGCVIAWNSNNLDSKVGGNYNYLYRLFRKSNLKPFERDISTEIYQAGSTPCNGVEGFNCYFPLQSYGFQPTNGVGYQPYRVVVLSFELLHAPATVCGPKKSTNLVKNKCVNFNFNGLTGTGVLTESNKKFLPFQQFGRDIADTTDAVRDPQTLEILDITPCSFGGVSVITPGTNTSNQVAVLYQDVNCTEVPVAIHADQLTPTWRVYSTGSNVFQTRAGCLIGAEHVNNSYECDIPIGAGICASYQTQTNSPRRARSVASQSIIAYTMSLGAENSVAYSNNSIAIPTNFTISVTTEILPVSMTKTSVDCTMYICGDSTECSNLLLQYGSFCTQLNRALTGIAVEQDKNTQEVFAQVKQIYKTPPIKDFGGFNFSQILPDPSKPSKRSFIEDLLFNKVTLADAGFIKQYGDCLGDIAARDLICAQKFNGLTVLPPLLTDEMIAQYTSALLAGTITSGWTFGAGAALQIPFAMQMAYRFNGIGVTQNVLYENQKLIANQFNSAIGKIQDSLSSTASALGKLQDVVNQNAQALNTLVKQLSSNFGAISSVLNDILSRLDPPEAEVQIDRLITGRLQSLQTYVTQQLIRAAEIRASANLAATKMSECVLGQSKRVDFCGKGYQLMSFPQSAPHGVVFLNVTYVPAQEKNFTTAPAICNDGKAHFPREGVFVSNGTNWFVTQRNFYEPQIITTDNTFVSGNCDVVIGIVNNTVYDPLQPELDSGGGSGGGQIYEGKLTAEGLRFGIVASRFNHALVDRLVEGAIDAIVRHGGREEDITLVRVPGSWEIPVAAGELARKEDIDAVIAIGVLIRGATPHFDYIASEVSKGLADLSLELRKPITFGVITADTLEQAIERAGTKHGNKGWEAALSAIEMANLFKSLR

SEQ ID NO: 7975 - protein, 1301 aa, Artificial Sequence
  SARS-CoV-2/pangolin/Guangxi/P4L/2017__EPI_ISL_410538 spike protein (1-1141)(K980P_V981P_ H1042Q_H1058N_ H1077N_H1095N) LumSynth construct
MFVFLFVLPLVSSQCVNLTTRTGIPPGYTNSSTRGVYYPDKVFRSSILHLTQDLFLPFFSNVTWFNTINYQGGFKKFDNPVLPFNDGVYFASTEKSNIIRGWIFGTTLDARTQSLLIVNNATNVVIKVCEFQFCTDPFLGVYYHNNNKTWVENEFRVYSSANNCTFEYISQPFLMDLEGKQGNFKNLREFVFKNVDGYFKIYSKHTPIDLVRDLPRGFAALEPLVDLPIGINITRFQTLLALHRSYLTPGNLESGWTTGAAAYYVGYLQQRTFLLSYNQNGTITDAVDCSLDPLSETKCTLKSLTVEKGIYQTSNFRVQPTISIVRFPNITNLCPFGEVFNASKFASVYAWNRKRISNCVADYSVLYNSTSFSTFKCYGVSPTKLNDLCFTNVYADSFVVKGDEVRQIAPGQTGVIADYNYKLPDDFTGCVIAWNSVKQDALTGGNYGYLYRLFRKSKLKPFERDISTEIYQAGSTPCNGQVGLNCYYPLERYGFHPTTGVNYQPFRVVVLSFELLNGPATVCGPKLSTTLVKDKCVNFNFNGLTGTGVLTTSKKQFLPFQQFGRDISDTTDAVRDPQTLEILDITPCSFGGVSVITPGTNTSNQVAVLYQDVNCTEVPMAIHAEQLTPAWRVYSAGANVFQTRAGCLVGAEHVNNSYECDIPVGAGICASYHSMSSLRSVNQRSIIAYTMSLGAENSVAYSNNSIAIPTNFTISVTTEILPVSMTKTSVDCTMYICGDSIECSNLLLQYGSFCTQLNRALTGIAVEQDKNTQEVFAQVKQIYKTPPIKDFGGFNFSQILPDPSKPSKRSFIEDLLFNKVTLADAGFIKQYGDCLGDIAARDLICAQKFNGLTVLPPLLTDEMIAQYTSALLAGTITSGWTFGAGAALQIPFAMQMAYRFNGIGVTQNVLYENQKLIANQFNSAIGKIQDSLSSTASALGKLQDVVNQNAQALNTLVKQLSSNFGAISSVLNDILSRLDPPEAEVQIDRLITGRLQSLQTYVTQQLIRAAEIRASANLAATKMSECVLGQSKRVDFCGKGYQLMSFPQSAPHGVVFLNVTYVPAQEKNFTTAPAICNEGKAHFPREGVFVSNGTNWFITQRNFYEPQIITTDNTFVSGSCDVVIGIVNNTVYDPLQPELDSGGGSGGGQIYEGKLTAEGLRFGIVASRFNHALVDRLVEGAIDAIVRHGGREEDITLVRVPGSWEIPVAAGELARKEDIDAVIAIGVLIRGATPHFDYIASEVSKGLADLSLELRKPITFGVITADTLEQAIERAGTKHGNKGWEAALSAIEMANLFKSLR

SEQ ID NO: 7976 - protein, 1301 aa, Artificial Sequence
  SARS-CoV-2/pangolin/Guangxi/P5L/2017__EPI_ISL_410540 spike protein (1-1141)(K980P_V981P_ H1042Q_H1058N_ H1077N_H1095N) LumSynth construct
MFVFLFVLPLVSSQCVNLTTRTGIPPGYTNSSTRGVYYPDKVFRSSILHLTQDLFLPFFSNVTWFNTINYQGGFKKFDNPVLPFNDGVYFASTEKSNIIRGWIFGTTLDARTQSLLIVNNATNVVIKVCEFQFCTDPFLGVYYHNNNKTWVENEFRVYSSANNCTFEYISQPFLMDLEGKQGNFKNLREFVFKNVDGYFKIYSKHTPIDLVRDLPRGFAALEPLVDLPIGINITRFQTLLALHRSYLTPGKLESGWTTGAAAYYVGYLQQRTFLLSYNQNGTITDAVDCSLDPLSETKCTLKSLTVEKGIYQTSNFRVQPTISIVRFPNITNLCPFGEVFNASKFASVYAWNRKRISNCVADYSVLYNSTSFSTFKCYGVSPTKLNDLCFTNVYADSFVVKGDEVRQIAPGQTGVIADYNYKLPDDFTGCVIAWNSVKQDALTGGNYGYLYRLFRKSKLKPFERDISTEIYQAGSTPCNGQVGLNCYYPLERYGFHPTTGVNYQPFRVVVLSFELLNGPATVCGPKLSTTLVKDKCVNFNFNGLTGTGVLTTSKKQFLPFQQFGRDISDTTDAVRDPQTLEILDITPCSFGGVSVITPGTNTSNQVAVLYQDVNCTEVPMAIHAEQLTPAWRVYSAGANVFQTRAGCLVGAEHVNNSYECDIPVGAGICASYHSMSSFRSVNQRSIIAYTMSLGAENSVAYSNNSIAIPTNFTISVTTEILPVSMTKTSVDCTMYICGDSIECSNLLLQYGSFCTQLNRALTGIAVEQDKNTQEVFAQVKQIYKTPPIKDFGGFNFSQILPDPSKPSKRSFIEDLLFNKVTLADAGFIKQYGDCLGDIAARDLICAQKFNGLTVLPPLLTDEMIAQYTSALLAGTITSGWTFGAGAALQIPFAMQMAYRFNGIGVTQNVLYENQKLIANQFNSAIGKIQDSLSSTASALGKLQDVVNQNAQALNTLVKQLSSNFGAISSVLNDILSRLDPPEAEVQIDRLITGRLQSLQTYVTQQLIRAAEIRASANLAATKMSECVLGQSKRVDFCGKGYQLMSFPQSAPHGVVFLNVTYVPAQEKNFTTAPAICNEGKAHFPREGVFVSNGTNWFITQRNFYEPQIITTDNTFVSGSCDVVIGIVNNTVYDPLQPELDSGGGSGGGQIYEGKLTAEGLRFGIVASRFNHALVDRLVEGAIDAIVRHGGREEDITLVRVPGSWEIPVAAGELARKEDIDAVIAIGVLIRGATPHFDYIASEVSKGLADLSLELRKPITFGVITADTLEQAIERAGTKHGNKGWEAALSAIEMANLFKSLR

SEQ ID NO: 7977 - protein, 1301 aa, Artificial Sequence
  SARS-CoV-2/pangolin/Guangxi/P5E/2017__EPI_ISL_410541 spike protein (1-1141)(K980P_V981P_ H1042Q_H1058N_ H1077N_H1095N) LumSynth construct
MFVFLFVLPLVSSQCVNLTTRTGIPPGYTNSSTRGVYYPDKVFRSSILHLTQDLFLPFFSNVTWFNTITYQGGSKKFDNPVLPFNDGVYFASTEKSNIIRGWIFGTTLDARTQSLLIVNNATNVVIKVCEFQFCTDPFLGVYYHNNNKTWVENEFRVYSSANNCTFEYISQPFLMDLEGKQGNFKNLREFVFKNVDGYFKIYSKHTPIDLVRDLPRGFAALEPLVDLPIGINITRFQTLLALHRSYLTPGKLESGWTTGAAAYYVGYLQQRTFLLSYNQNGTITDAVDCSLDPLSETKCTLKSLTVEKGIYQTSNFRVQPTISIVRFPNITNLCPFGEVFNASKFASVYAWNRKRISNCVADYSVLYNSTSFSTFKCYGVSPTKLNDLCFTNVYADSFVVKGDEVRQIAPGQTGVIADYNYKLPDDFTGCVIAWNSVKQDALTGDNYGYLYRLFRKSKLKPFERDISTEIYQAGSTPCNGQVGLNCYYPLERYGFHPTTGVNYQPFRVVVLSFELLNGPATVCGPKLSTTLVKDKCVNFNFNGLTGTGVLTTSKKQFLPFQQFGRDISDTTDAVRDPQTLEILDITPCSFGGVSVITPGTNTSNQVAVLYQDVNCTEVPMAIHAEQLTPAWRVYSAGANVFQTRAGCLVGAEHVNNSYECDIPVGAGICASYHSMSSFRSVNQRSIIAYTMSLGAENSVAYSNNSIAIPTNFTISVTTEILPVSMTKTSVDCTMYICGDSIECSNLLLQYGSFCTQLNRALTGIAVEQDKNTQEVFAQVKQIYKTPPIKDFGGFNFSQILPDPSKPSKRSFIEDLLFNKVTLADAGFIKQYGDCLGDIAARDLICAQKFNGLTVLPPLLTDEMIAQYTSALLAGTITSGWTFGAGAALQIPFAMQMAYRFNGIGVTQNVLYENQKLIANQFNSAIGKIQDSLSSTASALGKLQDVVNQNAQALNTLVKQLSSNFGAISSVLNDILSRLDPPEAEVQIDRLITGRLQSLQTYVTQQLIRAAEIRASANLAATKMSECVLGQSKRVDFCGKGYQLMSFPQSAPHGVVFLNVTYVPAQEKNFTTAPAICNEGKAHFPREGVFVSNGTNWFITQRNFYEPQIITTDNTFVSGSCDVVIGIVNNTVYDPLQPELDSGGGSGGGQIYEGKLTAEGLRFGIVASRFNHALVDRLVEGAIDAIVRHGGREEDITLVRVPGSWEIPVAAGELARKEDIDAVIAIGVLIRGATPHFDYIASEVSKGLADLSLELRKPITFGVITADTLEQAIERAGTKHGNKGWEAALSAIEMANLFKSLR

SEQ ID NO: 7978 - protein, 1299 aa, Artificial Sequence
  SARS-CoV-2/pangolin/Guangxi/P1E/2017__EPI_ISL_410539 spike protein (1-1139)(K978P_V979P_ H1040Q_H1056N_ H1075N_H1093N) LumSynth construct
MFVFLFVLPLVSSQCVNLTTRTGIQPGYTNSSTRGVYYPDKVFRSSILHLTQDLFLPFFSNVTWFNTINYQGGFKKFDNPVLPFNDGVYFASTEKSNIIRGWIFGTTLDARTQSLLIVNNATNVVIKVCEFQFCTDPFLGVYYHNNNKTWVENEFRVYSSANNCTFEYISQPFLMDLEGKQGNFKNLREFVFKNVDGYFKIYSKHTPIDLVRDLPRGFAALEPLVDLPIGINITRFQTLLALHRSYLTPGKLESGWTTGAAAYYVGYLQQRTFLLSYNQNGTITDAVDCSLDPLSETKCTLKSLTVEKGIYQTSNFRVQPTISIVRFPNITNLCPFGEVFNASKFASVYAWNRKRISNCVADYSVLYNSTSFSTFKCYGVSPTKLNDLCFTNVYADSFVVKGDEVRQIAPGQTGVIADYNYKLPDDFTGCVIAWNSVKQDALTGGNYLYRLFRKSKLKPFERDISTEIYQAGSTPCNGQVGLNCYYPLERYGFHPTTGVNYQPFRVVVLSFELLNGPATVCGPKLSTTLVKDKCVNFNFNGLTGTGVLTTSKKQFLPFQQFGRDISDTTDAVRDPQTLEILDITPCSFGGVSVITPGTNTSNQVAVLYQDVNCTEVPMAIHAEQLTPAWRVYSAGANVFQTRAGCLVGAEHVNNSYECDIPVGAGICASYHSMSSLRSVNQRSIIAYTMSLGAENSVAYSNNSIAIPTNFTISVTTEILPVSMTKTSVDCTMYICGDSIECSNLLLQYGSFCTQLNRALTGIAVEQDKNTQEVFAQVKQIYKTPPIKDFGGFNFSQILPDPSKPSKRSFIEDLLFNKVTLADAGFIKQYGDCLGDIAARDLICAQKFNGLTVLPPLLTDEMIAQYTSALLAGTITSGWTFGAGAALQIPFAMQMAYRFNGIGVTQNVLYENQKLIANQFNSAIGKIQDSLSSTASALGKLQDVVNQNAQALNTLVKQLSSNFGAISSVLNDILSRLDPPEAEVQIDRLITGRLQSLQTYVTQQLIRAAEIRASANLAATKMSECVLGQSKRVDFCGKGYQLMSFPQSAPHGVVFLNVTYVPAQEKNFTTAPAICNEGKAHFPREGVFVSNGTNWFITQRNFYEPQIITTDNTFVSGSCDVVIGIVNNTVYDPLQPELDSGGGSGGGQIYEGKLTAEGLRFGIVASRFNHALVDRLVEGAIDAIVRHGGREEDITLVRVPGSWEIPVAAGELARKEDIDAVIAIGVLIRGATPHFDYIASEVSKGLADLSLELRKPITFGVITADTLEQAIERAGTKHGNKGWEAALSAIEMANLFKSLR

SEQ ID NO: 7979 - protein, 1307 aa, Artificial Sequence
  SARS-CoV-2/Wuhan/WIV05/2019__EPI_ISL_402128 spike protein (1-1147)(I712C_T1077C) LumSynth construct
MFVFLVLLPLVSSQCVNLTTRTQLPPAYTNSFTRGVYYPDKVFRSSVLHSTQDLFLPFFSNVTWFHAIHVSGTNGTKRFDNPVLPFNDGVYFASTEKSNIIRGWIFGTTLDSKTQSLLIVNNATNVVIKVCEFQFCNDPFLGVYYHKNNKSWMESEFRVYSSANNCTFEYVSQPFLMDLEGKQGNFKNLREFVFKNIDGYFKIYSKHTPINLVRDLPQGFSALEPLVDLPIGINITRFQTLLALHRSYLTPGDSSSGWTAGAAAYYVGYLQPRTFLLKYNENGTITDAVDCALDPLSETKCTLKSFTVEKGIYQTSNFRVQPTESIVRFPNITNLCPFGEVFNATRFASVYAWNRKRISNCVADYSVLYNSASFSTFKCYGVSPTKLNDLCFTNVYADSFVIRGDEVRQIAPGQTGKIADYNYKLPDDFTGCVIAWNSNNLDSKVGGNYNYLYRLFRKSNLKPFERDISTEIYQAGSTPCNGVEGFNCYFPLQSYGFQPTNGVGYQPYRVVVLSFELLHAPATVCGPKKSTNLVKNKCVNFNFNGLTGTGVLTESNKKFLPFQQFGRDIADTTDAVRDPQTLEILDITPCSFGGVSVITPGTNTSNQVAVLYQDVNCTEVPVAIHADQLTPTWRVYSTGSNVFQTRAGCLIGAEHVNNSYECDIPIGAGICASYQTQTNSPRRARSVASQSIIAYTMSLGAENSVAYSNNSCAIPTNFTISVTTEILPVSMTKTSVDCTMYICGDSTECSNLLLQYGSFCTQLNRALTGIAVEQDKNTQEVFAQVKQIYKTPPIKDFGGFNFSQILPDPSKPSKRSFIEDLLFNKVTLADAGFIKQYGDCLGDIAARDLICAQKFNGLTVLPPLLTDEMIAQYTSALLAGTITSGWTFGAGAALQIPFAMQMAYRFNGIGVTQNVLYENQKLIANQFNSAIGKIQDSLSSTASALGKLQDVVNQNAQALNTLVKQLSSNFGAISSVLNDILSRLDKVEAEVQIDRLITGRLQSLQTYVTQQLIRAAEIRASANLAATKMSECVLGQSKRVDFCGKGYHLMSFPQSAPHGVVFLHVTYVPAQEKNFTCAPAICHDGKAHFPREGVFVSNGTHWFVTQRNFYEPQIITTDNTFVSGNCDVVIGIVNNTVYDPLQPELDSGGGSGGGQIYEGKLTAEGLRFGIVASRFNHALVDRLVEGAIDAIVRHGGREEDITLVRVPGSWEIPVAAGELARKEDIDAVIAIGVLIRGATPHFDYIASEVSKGLADLSLELRKPITFGVITADTLEQAIERAGTKHGNKGWEAALSAIEMANLFKSLR

SEQ ID NO: 7980 - protein, 1303 aa, Artificial Sequence
  SARS-CoV-2/bat/Yunnan/RaTG13/2013__EPI_ISL_402131 spike protein (1-1143)(I708C_T1073C) LumSynth construct
MFVFLVLLPLVSSQCVNLTTRTQLPPAYTNSSTRGVYYPDKVFRSSVLHLTQDLFLPFFSNVTWFHAIHVSGTNGIKRFDNPVLPFNDGVYFASTEKSNIIRGWIFGTTLDSKTQSLLIVNNATNVVIKVCEFQFCNDPFLGVYYHKNNKSWMESEFRVYSSANNCTFEYVSQPFLMDLEGKQGNFKNLREFVFKNIDGYFKIYSKHTPINLVRDLPPGFSALEPLVDLPIGINITRFQTLLALHRSYLTPGDSSSGWTAGAAAYYVGYLQPRTFLLKYNENGTITDAVDCALDPLSETKCTLKSFTVEKGIYQTSNFRVQPTDSIVRFPNITNLCPFGEVFNATTFASVYAWNRKRISNCVADYSVLYNSTSFSTFKCYGVSPTKLNDLCFTNVYADSFVITGDEVRQIAPGQTGKIADYNYKLPDDFTGCVIAWNSKHIDAKEGGNFNYLYRLFRKANLKPFERDISTEIYQAGSKPCNGQTGLNCYYPLYRYGFYPTDGVGHQPYRVVVLSFELLNAPATVCGPKKSTNLVKNKCVNFNFNGLTGTGVLTESNKKFLPFQQFGRDIADTTDAVRDPQTLEILDITPCSFGGVSVITPGTNASNQVAVLYQDVNCTEVPVAIHADQLTPTWRVYSTGSNVFQTRAGCLIGAEHVNNSYECDIPIGAGICASYQTQTNSRSVASQSIIAYTMSLGAENSVAYSNNSCAIPTNFTISVTTEILPVSMTKTSVDCTMYICGDSTECSNLLLQYGSFCTQLNRALTGIAVEQDKNTQEVFAQVKQIYKTPPIKDFGGFNFSQILPDPSKPSKRSFIEDLLFNKVTLADAGFIKQYGDCLGDIAARDLICAQKFNGLTVLPPLLTDEMIAQYTSALLAGTITSGWTFGAGAALQIPFAMQMAYRFNGIGVTQNVLYENQKLIANQFNSAIGKIQDSLSSTASALGKLQDVVNQNAQALNTLVKQLSSNFGAISSVLNDILSRLDKVEAEVQIDRLITGRLQSLQTYVTQQLIRAAEIRASANLAATKMSECVLGQSKRVDFCGKGYHLMSFPQSAPHGVVFLHVTYVPAQEKNFTCAPAICHDGKAHFPREGVFVSNGTHWFVTQRNFYEPQIITTDNTFVSGSCDVVIGIVNNTVYDPLQPELDSGGGSGGGQIYEGKLTAEGLRFGIVASRFNHALVDRLVEGAIDAIVRHGGREEDITLVRVPGSWEIPVAAGELARKEDIDAVIAIGVLIRGATPHFDYIASEVSKGLADLSLELRKPITFGVITADTLEQAIERAGTKHGNKGWEAALSAIEMANLFKSLR

SEQ ID NO: 7981 - protein, 1307 aa, Artificial Sequence
  SARS-CoV-2/Wuhan/HBCDC-HB-01/2019__EPI_ISL_402132 spike protein (1-1147)(I712C_T1077C) LumSynth construct
MFVFLVLLPLVSSQCVNLTTRTQLPPAYTNSITRGVYYPDKVFRSSVLHSTQDLFLPFFSNVTWFHAIHVSGTNGTKRFDNPVLPFNDGVYFASTEKSNIIRGWIFGTTLDSKTQSLLIVNNATNVVIKVCEFQFCNDPFLGVYYHKNNKSWMESEFRVYSSANNCTFEYVSQPFLMDLEGKQGNFKNLREFVFKNIDGYFKIYSKHTPINLVRDLPQGFSALEPLVDLPIGINITRFQTLLALHRSYLTPGDSSSGWTAGAAAYYVGYLQPRTFLLKYNENGTITDAVDCALDPLSETKCTLKSFTVEKGIYQTSNFRVQPTESIVRFPNITNLCPFGEVFNATRFASVYAWNRKRISNCVADYSVLYNSASFSTFKCYGVSPTKLNDLCFTNVYADSFVIRGDEVRQIAPGQTGKIADYNYKLPDDFTGCVIAWNSNNLDSKVGGNYNYLYRLFRKSNLKPFERDISTEIYQAGSTPCNGVEGFNCYFPLQSYGFQPTNGVGYQPYRVVVLSFELLHAPATVCGPKKSTNLVKNKCVNFNFNGLTGTGVLTESNKKFLPFQQFGRDIADTTDAVRDPQTLEILDITPCSFGGVSVITPGTNTSNQVAVLYQDVNCTEVPVAIHADQLTPTWRVYSTGSNVFQTRAGCLIGAEHVNNSYECDIPIGAGICASYQTQTNSPRRARSVASQSIIAYTMSLGAENSVAYSNNSCAIPTNFTISVTTEILPVSMTKTSVDCTMYICGDSTECSNLLLQYGSFCTQLNRALTGIAVEQDKNTQEVFAQVKQIYKTPPIKDFGGFNFSQILPDPSKPSKRSFIEDLLFNKVTLADAGFIKQYGDCLGDIAARDLICAQKFNGLTVLPPLLTDEMIAQYTSALLAGTITSGWTFGAGAALQIPFAMQMAYRFNGIGVTQNVLYENQKLIANQFNSAIGKIQDSLSSTASALGKLQDVVNQNAQALNTLVKQLSSNFGAISSVLNDILSRLDKVEAEVQIDRLITGRLQSLQTYVTQQLIRAAEIRASANLAATKMSECVLGQSKRVDFCGKGYHLMSFPQSAPHGVVFLHVTYVPAQEKNFTCAPAICHDGKAHFPREGVFVSNGTHWFVTQRNFYEPQIITTDNTFVSGNCDVVIGIVNNTVYDPLQPELDSGGGSGGGQIYEGKLTAEGLRFGIVASRFNHALVDRLVEGAIDAIVRHGGREEDITLVRVPGSWEIPVAAGELARKEDIDAVIAIGVLIRGATPHFDYIASEVSKGLADLSLELRKPITFGVITADTLEQAIERAGTKHGNKGWEAALSAIEMANLFKSLR

SEQ ID NO: 7982 - protein, 1307 aa, Artificial Sequence
  SARS-CoV-2/Guangdong/20SF028/2020__EPI_ISL_403936 spike protein (1-1147)(I712C_T1077C) LumSynth construct
MFVFLVLLPLVSSQCVNLTTRTQLPPAYTNSFTRGVYYPDKVFRSSVLYSTQDLFLPFFSNVTWFHAIHVSGTNGTKRFDNPVLPFNDGVYFASTEKSNIIRGWIFGTTLDSKTQSLLIVNNATNVVIKVCEFQFCNDPFLGVYYHKNNKSWMESEFRVYSSANNCTFEYVSQPFLMDLEGKQGNFKNLREFVFKNIDGYFKIYSKHTPINLVRDLPQGFSALEPLVDLPIGINITRFQTLLALHRSYLTPGDSSSGWTAGAAAYYVGYLQPRTFLLKYNENGTITDAVDCALDPLSETKCTLKSFTVEKGIYQTSNFRVQPTESIVRFPNITNLCPFGEVFNATRFASVYAWNRKRISNCVADYSVLYNSASFSTFKCYGVSPTKLNDLCFTNVYADSFVIRGDEVRQIAPGQTGKIADYNYKLPDDFTGCVIAWNSNNLDSKVGGNYNYLYRLFRKSNLKPFERDISTEIYQAGSTPCNGVEGFNCYFPLQSYGFQPTNGVGYQPYRVVVLSFELLHAPATVCGPKKSTNLVKNKCVNFNFNGLTGTGVLTESNKKFLPFQQFGRDIADTTDAVRDPQTLEILDITPCSFGGVSVITPGTNTSNQVAVLYQDVNCTEVPVAIHADQLTPTWRVYSTGSNVFQTRAGCLIGAEHVNNSYECDIPIGAGICASYQTQTNSPRRARSVASQSIIAYTMSLGAENSVAYSNNSCAIPTNFTISVTTEILPVSMTKTSVDCTMYICGDSTECSNLLLQYGSFCTQLNRALTGIAVEQDKNTQEVFAQVKQIYKTPPIKDFGGFNFSQILPDPSKPSKRSFIEDLLFNKVTLADAGFIKQYGDCLGDIAARDLICAQKFNGLTVLPPLLTDEMIAQYTSALLAGTITSGWTFGAGAALQIPFAMQMAYRFNGIGVTQNVLYENQKLIANQFNSAIGKIQDSLSSTASALGKLQDVVNQNAQALNTLVKQLSSNFGAISSVLNDILSRLDKVEAEVQIDRLITGRLQSLQTYVTQQLIRAAEIRASANLAATKMSECVLGQSKRVDFCGKGYHLMSFPQSAPHGVVFLHVTYVPAQEKNFTCAPAICHDGKAHFPREGVFVSNGTHWFVTQRNFYEPQIITTDNTFVSGNCDVVIGIVNNTVYDPLQPELDSGGGSGGGQIYEGKLTAEGLRFGIVASRFNHALVDRLVEGAIDAIVRHGGREEDITLVRVPGSWEIPVAAGELARKEDIDAVIAIGVLIRGATPHFDYIASEVSKGLADLSLELRKPITFGVITADTLEQAIERAGTKHGNKGWEAALSAIEMANLFKSLR

SEQ ID NO: 7983 - protein, 1307 aa, Artificial Sequence
  SARS-CoV-2/Shenzhen/SZTH-001/2020__EPI_ISL_406592 spike protein (1-1147)(I712C_T1077C) LumSynth construct
MFVFLVLLPLVSSQCVNLTTRTQLPPAYTNSFTRGVYYPDKVFRSSVLHSTQDLFLPFFSNVTWFHAIHVSGTNGTKRFDNPVLPFNDGVYFASTEKSNIIRGWIFGTTLDSKTQSLLIVNNATNVVIKVCEFQFCNDPFLGVYYHKNNKSWMESEFRVYSSANNCTFEYVSQPFLMDLEGKQGNFKNLREFVFKNIDGYFKIYSKHTPINLVRDLPQGFSALEPLVDLPIGINITRFQTLLALHRSYLTPGDSSSGWTAGAAAYYVGYLQPRTFLLKYNENGTITDAVDCALDPLSETKCTLKSFTVEKGIYQTSNFRVQPTESIVRFPNITNLCPFGEVFNATRFASVYAWNRKRISNCVADYSVLYNSASFSTFKCYGVSPTKLNDLCFTNVYADSFVIRGDEVRQIAPGQTGKIADYNYKLPDDFTGCVIAWNSNNLDSKVGGNYNYLYRLFRKSNLKPFERDISTEIYQAGSTPCNGVEGFNCYFPLQSYGFQPTNGVGYQPYRVVVLSFELLHAPATVCGPKKSTNLVKNKCVNFNFNGLTGTGVLTESNKKFLPFQQFGRDIADTTDAVRDPQTLEILDITPCSFGGVSVITPGTNTSNQVAVLYQDVNCTEVPVAIHADQLTPTWRVYSTGSNVFQTRAGCLIGAEHVNNSYECDIPIGAGICASYQTQTNSPRRARSVASQSIIAYTMSLGAENSVAYSNNSCAIPTNFTISVTTEILPVSMTKTSVDCTMYICGDSTECSNLLLQYGSFCTQLNRALTGIAVEQDKNTQEVFAQVKQIYKTPPIKDFGGFNFSQILPDPSKPSKRSFIEDLLFNKVTLADAGFIKQYGDCLGDIAARDLICAQKFNGLTVLPPLLTDEMIAQYTSALLAGTITSGWTFGAGAALQIPFAMQMAYRFNGIGVTQNVLYENQKLIANQFNSAIGKIQDSLSSTASALGKLQDVVNQNAQALNTLVKQLSSNFGAISSVLNDILSRLDKVEAEVQIDRLITGRLQSLQTYVTQQLIRAAEIRASANLAATKMSECVLGQSKRVDFCGKGYHLMSFPQSAPHGVVFLHVTYVPAQEKNFTCAPAICHDGKAHFPREGVFVSNGTHWFVTQRNFYEPQIITTDNTFVSGNCDVLIGIVNNTVYDPLQPELDSGGGSGGGQIYEGKLTAEGLRFGIVASRFNHALVDRLVEGAIDAIVRHGGREEDITLVRVPGSWEIPVAAGELARKEDIDAVIAIGVLIRGATPHFDYIASEVSKGLADLSLELRKPITFGVITADTLEQAIERAGTKHGNKGWEAALSAIEMANLFKSLR

SEQ ID NO: 7984 - protein, 1307 aa, Artificial Sequence
  SARS-CoV-2/Shenzhen/SZTH-004/2020__EPI_ISL_406595 spike protein (1-1147)(I712C_T1077C) LumSynth construct
MFVFLVLLPLVSSQCVNLTTRTQLPPAYTNSFTRGVYYPDKVFRSSVLHSTQDLFLPFFSNVTWFHAIHVSGTNGTKRFDNPVLPFNDGVYFASTEKSNIIRGWIFGTTLDSKTQSLLIVNNATNVVIKVCEFQFCNDPFLGVYYHKNNKSWMESEFRVYSSANNCTFEYVSQPFLMDLEGKQGNFKNLREFVFKNIDGYFKIYSKHTPINLVRDLPQGFSALEPLVDLPIGINITRFQTLLALHRSYLTPGDSSSGWTAGAAAYYVGYLQPRTFLLKYNENGTITDAVDCALDPLSETKCTLKSFTVEKGIYQTSNFRVQPTESIVRFPNITNLCPFGEVFNATRFASVYAWDRKRISNCVAYYSVLYNSASFSTFKCYGVSPTKLNDLCFTNVYADSFVIRGDEVRQIAPGQTGKIADYNYKLPDDFTGCVIAWNSNNLDSKVGGNYNYLYRLFRKSNLKPFERDISTEIYQAGSTPCNGVEGFNCYFPLQSYGFQPTNGVGYQPYRVVVLSFELLHAPATVCGPKKSTNLVKNKCVNFNFNGLTGTGVLTESNKKFLPFQQFGRDIADTTDAVRDPQTLEILDITPCSFGGVSVITPGTNTSNQVAVLYQDVNCTEVPVAIHADQLTPTWRVYSTGSNVFQTRAGCLIGAEHVNNSYECDIPIGAGICASYQTQTNSPRRARSVASQSIIAYTMSLGAENSVAYSNNSCAIPTNFTISVTTEILPVSMTKTSVDCTMYICGDSTECSNLLLQYGSFCTQLNRALTGIAVEQDKNTQEVFAQVKQIYKTPPIKDFGGFNFSQILPDPSKPSKRSFIEDLLFNKVTLADAGFIKQYGDCLGDIAARDLICAQKFNGLTVLPPLLTDEMIAQYTSALLAGTITSGWTFGAGAALQIPFAMQMAYRFNGIGVTQNVLYENQKLIANQFNSAIGKIQDSLSSTASALGKLQDVVNQNAQALNTLVKQLSSNFGAISSVLNDILSRLDKVEAEVQIDRLITGRLQSLQTYVTQQLIRAAEIRASANLAATKMSECVLGQSKRVDFCGKGYHLMSFPQSAPHGVVFLHVTYVPAQEKNFTCAPAICHDGKAHFPREGVFVSNGTHWFVTQRNFYEPQIITTDNTFVSGNCDVVIGIVNNTVYDPLQPELDSGGGSGGGQIYEGKLTAEGLRFGIVASRFNHALVDRLVEGAIDAIVRHGGREEDITLVRVPGSWEIPVAAGELARKEDIDAVIAIGVLIRGATPHFDYIASEVSKGLADLSLELRKPITFGVITADTLEQAIERAGTKHGNKGWEAALSAIEMANLFKSLR

SEQ ID NO: 7985 - protein, 1307 aa, Artificial Sequence
  SARS-CoV-2/France/IDF0372/2020__EPI_ISL_406596 spike protein (1-1147)(I712C_T1077C) LumSynth construct
MFVFLVLLPLVSSQCVNLTTRTQLPPAYTNSFTRGVYYPDKVFRSSVLHSTQDLFLPFFSNVTWFHAIHVSGTNGTKRFDNPVLPFNDGVYFASTEKSNIIRGWIFGTTLDSKTQSLLIVNNATNVVIKVCEFQFCNDPFLGVYYHKNNKSWMESEFRVYSSANNCTFEYVSQPFLMDLEGKQGNFKNLREFVFKNIDGYFKIYSKHTPINLVRDLPQGFSALEPLVDLPIGINITRFQTLLALHRSYLTPGDSSSGWTAGAAAYYVGYLQPRTFLLKYNENGTITDAVDCALDPLSETKCTLKSFTVEKGIYQTSNFRVQPTESIVRFPNITNLCPFGEVFNATRFASVYAWNRKRISNCVADYSFLYNSASFSTFKCYGVSPTKLNDLCFTNVYADSFVIRGDEVRQIAPGQTGKIADYNYKLPDDFTGCVIAWNSNNLDSKVGGNYNYLYRLFRKSNLKPFERDISTEIYQAGSTPCNGVEGFNCYFPLQSYGFQPTNGVGYQPYRVVVLSFELLHAPATVCGPKKSTNLVKNKCVNFNFNGLTGTGVLTESNKKFLPFQQFGRDIADTTDAVRDPQTLEILDITPCSFGGVSVITPGTNTSNQVAVLYQDVNCTEVPVAIHADQLTPTWRVYSTGSNVFQTRAGCLIGAEHVNNSYECDIPIGAGICASYQTQTNSPRRARSVASQSIIAYTMSLGAENSVAYSNNSCAIPTNFTISVTTEILPVSMTKTSVDCTMYICGDSTECSNLLLQYGSFCTQLNRALTGIAVEQDKNTQEVFAQVKQIYKTPPIKDFGGFNFSQILPDPSKPSKRSFIEDLLFNKVTLADAGFIKQYGDCLGDIAARDLICAQKFNGLTVLPPLLTDEMIAQYTSALLAGTITSGWTFGAGAALQIPFAMQMAYRFNGIGVTQNVLYENQKLIANQFNSAIGKIQDSLSSTASALGKLQDVVNQNAQALNTLVKQLSSNFGAISSVLNDILSRLDKVEAEVQIDRLITGRLQSLQTYVTQQLIRAAEIRASANLAATKMSECVLGQSKRVDFCGKGYHLMSFPQSAPHGVVFLHVTYVPAQEKNFTCAPAICHDGKAHFPREGVFVSNGTHWFVTQRNFYEPQIITTDNTFVSGNCDVVIGIVNNTVYDPLQPELDSGGGSGGGQIYEGKLTAEGLRFGIVASRFNHALVDRLVEGAIDAIVRHGGREEDITLVRVPGSWEIPVAAGELARKEDIDAVIAIGVLIRGATPHFDYIASEVSKGLADLSLELRKPITFGVITADTLEQAIERAGTKHGNKGWEAALSAIEMANLFKSLR

SEQ ID NO: 7986 - protein, 1307 aa, Artificial Sequence
  SARS-CoV-2/Australia/VIC01/2020__EPI_ISL_406844 spike protein (1-1147)(I712C_T1077C) LumSynth construct
MFVFLVLLPLVSSQCVNLTTRTQLPPAYTNSFTRGVYYPDKVFRSSVLHSTQDLFLPFFSNVTWFHAIHVSGTNGTKRFDNPVLPFNDGVYFASTEKSNIIRGWIFGTTLDSKTQSLLIVNNATNVVIKVCEFQFCNDPFLGVYYHKNNKSWMESEFRVYSSANNCTFEYVSQPFLMDLEGKQGNFKNLREFVFKNIDGYFKIYSKHTPINLVRDLPQGFSALEPLVDLPIGINITRFQTLLALHRRYLTPGDSSSGWTAGAAAYYVGYLQPRTFLLKYNENGTITDAVDCALDPLSETKCTLKSFTVEKGIYQTSNFRVQPTESIVRFPNITNLCPFGEVFNATRFASVYAWNRKRISNCVADYSVLYNSASFSTFKCYGVSPTKLNDLCFTNVYADSFVIRGDEVRQIAPGQTGKIADYNYKLPDDFTGCVIAWNSNNLDSKVGGNYNYLYRLFRKSNLKPFERDISTEIYQAGSTPCNGVEGFNCYFPLQSYGFQPTNGVGYQPYRVVVLSFELLHAPATVCGPKKSTNLVKNKCVNFNFNGLTGTGVLTESNKKFLPFQQFGRDIADTTDAVRDPQTLEILDITPCSFGGVSVITPGTNTSNQVAVLYQDVNCTEVPVAIHADQLTPTWRVYSTGSNVFQTRAGCLIGAEHVNNSYECDIPIGAGICASYQTQTNSPRRARSVASQSIIAYTMSLGAENSVAYSNNSCAIPTNFTISVTTEILPVSMTKTSVDCTMYICGDSTECSNLLLQYGSFCTQLNRALTGIAVEQDKNTQEVFAQVKQIYKTPPIKDFGGFNFSQILPDPSKPSKRSFIEDLLFNKVTLADAGFIKQYGDCLGDIAARDLICAQKFNGLTVLPPLLTDEMIAQYTSALLAGTITSGWTFGAGAALQIPFAMQMAYRFNGIGVTQNVLYENQKLIANQFNSAIGKIQDSLSSTASALGKLQDVVNQNAQALNTLVKQLSSNFGAISSVLNDILSRLDKVEAEVQIDRLITGRLQSLQTYVTQQLIRAAEIRASANLAATKMSECVLGQSKRVDFCGKGYHLMSFPQSAPHGVVFLHVTYVPAQEKNFTCAPAICHDGKAHFPREGVFVSNGTHWFVTQRNFYEPQIITTDNTFVSGNCDVVIGIVNNTVYDPLQPELDSGGGSGGGQIYEGKLTAEGLRFGIVASRFNHALVDRLVEGAIDAIVRHGGREEDITLVRVPGSWEIPVAAGELARKEDIDAVIAIGVLIRGATPHFDYIASEVSKGLADLSLELRKPITFGVITADTLEQAIERAGTKHGNKGWEAALSAIEMANLFKSLR

SEQ ID NO: 7987 - protein, 1307 aa, Artificial Sequence
  SARS-CoV-2/Germany/BavPat1/2020__EPI_ISL_406862 spike protein (1-1147)(I712C_T1077C) LumSynth construct
MFVFLVLLPLVSSQCVNLTTRTQLPPAYTNSFTRGVYYPDKVFRSSVLHSTQDLFLPFFSNVTWFHAIHVSGTNGTKRFDNPVLPFNDGVYFASTEKSNIIRGWIFGTTLDSKTQSLLIVNNATNVVIKVCEFQFCNDPFLGVYYHKNNKSWMESEFRVYSSANNCTFEYVSQPFLMDLEGKQGNFKNLREFVFKNIDGYFKIYSKHTPINLVRDLPQGFSALEPLVDLPIGINITRFQTLLALHRSYLTPGDSSSGWTAGAAAYYVGYLQPRTFLLKYNENGTITDAVDCALDPLSETKCTLKSFTVEKGIYQTSNFRVQPTESIVRFPNITNLCPFGEVFNATRFASVYAWNRKRISNCVADYSVLYNSASFSTFKCYGVSPTKLNDLCFTNVYADSFVIRGDEVRQIAPGQTGKIADYNYKLPDDFTGCVIAWNSNNLDSKVGGNYNYLYRLFRKSNLKPFERDISTEIYQAGSTPCNGVEGFNCYFPLQSYGFQPTNGVGYQPYRVVVLSFELLHAPATVCGPKKSTNLVKNKCVNFNFNGLTGTGVLTESNKKFLPFQQFGRDIADTTDAVRDPQTLEILDITPCSFGGVSVITPGTNTSNQVAVLYQGVNCTEVPVAIHADQLTPTWRVYSTGSNVFQTRAGCLIGAEHVNNSYECDIPIGAGICASYQTQTNSPRRARSVASQSIIAYTMSLGAENSVAYSNNSCAIPTNFTISVTTEILPVSMTKTSVDCTMYICGDSTECSNLLLQYGSFCTQLNRALTGIAVEQDKNTQEVFAQVKQIYKTPPIKDFGGFNFSQILPDPSKPSKRSFIEDLLFNKVTLADAGFIKQYGDCLGDIAARDLICAQKFNGLTVLPPLLTDEMIAQYTSALLAGTITSGWTFGAGAALQIPFAMQMAYRFNGIGVTQNVLYENQKLIANQFNSAIGKIQDSLSSTASALGKLQDVVNQNAQALNTLVKQLSSNFGAISSVLNDILSRLDKVEAEVQIDRLITGRLQSLQTYVTQQLIRAAEIRASANLAATKMSECVLGQSKRVDFCGKGYHLMSFPQSAPHGVVFLHVTYVPAQEKNFTCAPAICHDGKAHFPREGVFVSNGTHWFVTQRNFYEPQIITTDNTFVSGNCDVVIGIVNNTVYDPLQPELDSGGGSGGGQIYEGKLTAEGLRFGIVASRFNHALVDRLVEGAIDAIVRHGGREEDITLVRVPGSWEIPVAAGELARKEDIDAVIAIGVLIRGATPHFDYIASEVSKGLADLSLELRKPITFGVITADTLEQAIERAGTKHGNKGWEAALSAIEMANLFKSLR

SEQ ID NO: 7988 - protein, 1307 aa, Artificial Sequence
  SARS-CoV-2/Wuhan/HBCDC-HB-02/2020__EPI_ISL_412978 spike protein (1-1147)(I712C_T1077C) LumSynth construct
MFVFLVLLPLVSSQCVNLTTRTQLPPAYTNSFTRGVYYPDKVFRSSVLHSTQDLFLPFFSNVTWFHAIHVSGTNGTKRFDNPVLPFNDGVYFASTEKSNIIRGWIFGTTLDSKTQSLLIVNNATNVVIKVCEFQFCNDPFLGVYYHKNNKSWMESEFRVYSSANNCTFEYVSQPFLMDLEGKQGNFKNLREFVFKNIDGYFKIYSKHTPINLVRDLPQGFSALEPLVDLPIGINITRFQTLLALHRSYLTPGDSSSGWTAGAAAYYVGYLQPRTFLLKYNENGTITDAVDCALDPLSETKCTLKSFTVEKGIYQTSNFRVQPTESIVRFPNITNLCPFGEVFNATRFASVYAWNRKRISNCVADYSVLYNSASFSTFKCYGVSPTKLNDLCFTNVYADSFVIRGDEVRQIAPGQTGKIADYNYKLPDDFTGCVIAWNSNNLDSKVGGNYNYLYRLFRKSNLKPFERDISTEIYQAGSTPCNGVEGFNCYFPLQSYGFQPTNGVGYQPYRVVVLSFELLHAPATVCGPKKSTNLVKNKCVNFNFNGLTGTGVLTESNKKFLPFQQFGRDIADTTDAVRDPQTLEILDITPCSFGGVSVITPGTNTSNQVAVLYQDVNCTEVPVAIHADQLTPTWRVYSTGSNVFQTRAGCLIGAEHVNNSYECDIPIGAGICASYQTQTNSPRRARSVASQSIIAYTMSLGAENSVAYSNNSCAIPTNFTISVTTEILPVSMTKTSVDCTMYICGDSTECSNFLLQYGSFCTQLNRALTGIAVEQDKNTQEVFAQVKQIYKTPPIKDFGGFNFSQILPDPSKPSKRSFIEDLLFNKVTLADAGFIKQYGDCLGDIAARDLICAQKFNGLTVLPPLLTDEMIAQYTSALLAGTITSGWTFGAGAALQIPFAMQMAYRFNGIGVTQNVLYENQKLIANQFNSAIGKIQDSLSSTASALGKLQDVVNQNAQALNTLVKQLSSNFGAISSVLNDILSRLDKVEAEVQIDRLITGRLQSLQTYVTQQLIRAAEIRASANLAATKMSECVLGQSKRVDFCGKGYHLMSFPQSAPHGVVFLHVTYVPAQEKNFTCAPAICHDGKAHFPREGVFVSNGTHWFVTQRNFYEPQIITTDNTFVSGNCDVVIGIVNNTVYDPLQPELDSGGGSGGGQIYEGKLTAEGLRFGIVASRFNHALVDRLVEGAIDAIVRHGGREEDITLVRVPGSWEIPVAAGELARKEDIDAVIAIGVLIRGATPHFDYIASEVSKGLADLSLELRKPITFGVITADTLEQAIERAGTKHGNKGWEAALSAIEMANLFKSLR

SEQ ID NO: 7989 - protein, 1307 aa, Artificial Sequence
  SARS-CoV-2/Australia/QLD02/2020__EPI_ISL_407896 spike protein (1-1147)(I712C_T1077C) LumSynth construct
MFVFLVLLPLVSSQCVNLTTRTQLPPAYTNSFTRGVYYPDKVFRSSVLHSTQDLFLPFFSNVTWFHAIHVSGTNGTKRFDNPVLPFNDGVYFASTEKSNIIRGWIFGTTLDSKTQSLLIVNNATNVVIKVCEFQFCNDPFLGVYYHKNNKSWMESEFRVYSSANNCTFEYVSQPFLMDLEGKQGNFKNLREFVFKNIDGYFKIYSKHTPINLVRDLPQGFSALEPLVDLPIGINITRFQTLLALHRSYLTPGDSSSGWTAGAAAYYVGYLQPRTFLLKYNENGTITDAVDCALDPLSETKCTLKSFTVEKGIYQTSNFRVQPTESIVRFPNITNLCPFGEVFNATRFASVYAWNRKRISNCVADYSVLYNSASFSTFKCYGVSPTKLNDLCFTNVYADSFVIRGDEVRQIAPGQTGKIADYNYKLPDDFTGCVIAWNSNNLDSKVGGNYNYLYRLFRKSNLKPFERDISTEIYQAGSTPCNGVEGFNCYFPLQSYGFQPTNGVGYQPYRVVVLSFELLHAPATVCGPKKSTNLVKNKCVNFNFNGLTGTGVLTESNKKFLPFQQFGRDIADTTDAVRDPQTLEILDITPCSFGGVSVITPGTNTSNQVAVLYQDVNCTEVPVAIHADQLTPTWRVYSTGSNVFQTRAGCLIGAEHVNNSYECDIPIGAGICASYQTQTNSPRRARSVASQSIIAYTMSLGAENSVAYSNNSCAIPTNFTISVTTEILPVSMTKTSVDCTMYICGDSTECSNLLLQYGSFCTQLNRALTGIAVEQDKNTQEVFAQVKQIYKTPPIKDFGGFNFSQILPDPSKPSKRSFIEDLLFNKVTLADAGFIKQYGDCLGDIAARDLICAQKFNGLTVLPPLLTDEMIAQYTSALLAGTITSGWTFGAGAALQIPFAMQMAYRFNGIGVTQNVLYENQKLIANQFNSAIGKIQDSLSSTASALGKLQDVVNQNAQALNTLVKQLSSNFGAISSVLNDILSRLDKVEAEVQIDRLITGRLQSLQTYVTQQLIRAAEIRASANLAATKMSECVLGQSKRVDFCGKGYHLMSFPQSAPHGVVFLHVTYVPAQEKNFTCAPAICHDGKAHFPREGVFVSNGTHWFVTQRNFYEPQIITTDNTFVSGNCDVVIGIVNNTVYDPLQLELDSGGGSGGGQIYEGKLTAEGLRFGIVASRFNHALVDRLVEGAIDAIVRHGGREEDITLVRVPGSWEIPVAAGELARKEDIDAVIAIGVLIRGATPHFDYIASEVSKGLADLSLELRKPITFGVITADTLEQAIERAGTKHGNKGWEAALSAIEMANLFKSLR

SEQ ID NO: 7990 - protein, 1307 aa, Artificial Sequence
  SARS-CoV-2/India/1-31/2020__EPI_ISL_413523 spike protein (1-1147)(I712C_T1077C) LumSynth construct
MFVFLVLLPLVSSQCVNLTTRTQLPPAYTNSFTRGVYYPDKVFRSSVLHSTQDLFLPFFSNVTWFHAIHVSGTNGTKRFDNPVLPFNDGVYFASTEKSNIIRGWIFGTTLDSKTQSLLIVNNATNVVIKVCEFQFCNDPFLGVYYHKNNKSWMESEFRVYSSANNCTFEYVSQPFLMDLEGKQGNFKNLREFVFKNIDGYFKIYSKHTPINLVRDLPQGFSALEPLVDLPIGINITRFQTLLALHRSYLTPGDSSSGWTAGAAAYYVGYLQPRTFLLKYNENGTITDAVDCALDPLSETKCTLKSFTVEKGIYQTSNFRVQPTESIVRFPNITNLCPFGEVFNATRFASVYAWNRKRISNCVADYSVLYNSASFSTFKCYGVSPTKLNDLCFTNVYADSFVIRGDEVRQIAPGQTGKIADYNYKLPDDFTGCVIAWNSNNLDSKVGGNYNYLYRLFRKSNLKPFERDISTEIYQAGSTPCNGVEGFNCYFPLQSYGFQPTNGVGYQPYRVVVLSFELLHAPATVCGPKKSTNLVKNKCVNFNFNGLTGTGVLTESNKKFLPFQQFGRDIADTTDAVRDPQTLEILDITPCSFGGVSVITPGTNTSNQVAVLYQDVNCTEVPVAIHADQLTPTWRVYSTGSNVFQTRAGCLIGAEHVNNSYECDIPIGAGICASYQTQTNSPRRARSVASQSIIAYTMSLGAENSVAYSNNSCAIPTNFTISVTTEILPVSMTKTSVDCTMYICGDSTECSNLLLQYGSFCTQLNRALTGIAVEQDKNTQEVFAQVKQIYKTPPIKDFGGFNFSQILPDPSKPSKRSFIEDLLFNKVTLADAGFIKQYGDCLGDIAARDLICAQKFNGLTVLPPLLTDEMIAQYTSALLAGTITSGWTFGAGAALQIPFAMQMAYRFNGIGVTQNVLYENQKLIANQFNSVIGKIQDSLSSTASALGKLQDVVNQNAQALNTLVKQLSSNFGAISSVLNDILSRLDKVEAEVQIDRLITGRLQSLQTYVTQQLIRAAEIRASANLAATKMSECVLGQSKRVDFCGKGYHLMSFPQSAPHGVVFLHVTYVPAQEKNFTCAPAICHDGKAHFPREGVFVSNGTHWFVTQRNFYEPQIITTDNTFVSGNCDVVIGIVNNTVYDPLQPELDSGGGSGGGQIYEGKLTAEGLRFGIVASRFNHALVDRLVEGAIDAIVRHGGREEDITLVRVPGSWEIPVAAGELARKEDIDAVIAIGVLIRGATPHFDYIASEVSKGLADLSLELRKPITFGVITADTLEQAIERAGTKHGNKGWEAALSAIEMANLFKSLR

SEQ ID NO: 7991 - protein, 1307 aa, Artificial Sequence
  SARS-CoV-2/Guangdong/GD2020087-P0008/2020__EPI_ISL_413863 spike protein (1-1147)(I712C_T1077C) LumSynth construct
MFVFLVLLPLVSSQCVNLTTRTQLPPAYTNSFTRGVYYPDKVFRSSVLHSTQDLFLPFFSNVTWFHAIHVSGTNGTKRFDNPVLPFNDGVYFASTEKSNIIRGWIFGTTLDSKTQSLLIVNNATNVVIKVCEFQFCNDPFLGVYYHKNNKSWMESEFRVYSSANNCTFEYVSQPFLMDLEGKQGNFKNLREFVFKNIDGYFKIYSKHTPINLVRDLPQGFSALEPLVDLPIGINITRFQTLLALHRSYLTPGDSSSGWTAGAAAYYVGYLQPRTFLLKYNENGTITDAVDCALDPLSETKCTLKSFTVEKGIYQTSNFRVQPTESIVRFPNITNLCPFGEVFNATRFASVYAWNRKRISNCVADYSVLYNSASFSTFKCYGVSPTKLNDLCFTNVYADSFVIRGDEVREIAPGQTGKIADYNYKLPDDFTGCVIAWNSNNLDSKVGGNYNYLYRLFRKSNLKPFERDISTEIYQAGSTPCNGVEGFNCYFPLQSYGFQPTNGVGYQPYRVVVLSFELLHAPATVCGPKKSTNLVKNKCVNFNFNGLTGTGVLTESNKKFLPFQQFGRDIADTTDAVRDPQTLEILDITPCSFGGVSVITPGTNTSNQVAVLYQDVNCTEVPVAIHADQLTPTWRVYSTGSNVFQTRAGCLIGAEHVNNSYECDIPIGAGICASYQTQTNSPRRARSVASQSIIAYTMSLGAENSVAYSNNSCAIPTNFTISVTTEILPVSMTKTSVDCTMYICGDSTECSNLLLQYGSFCTQLNRALTGIAVEQDKNTQEVFAQVKQIYKTPPIKDFGGFNFSQILPDPSKPSKRSFIEDLLFNKVTLADAGFIKQYGDCLGDIAARDLICAQKFNGLTVLPPLLTDEMIAQYTSALLAGTITSGWTFGAGAALQIPFAMQMAYRFNGIGVTQNVLYENQKLIANQFNSAIGKIQDSLSSTASALGKLQDVVNQNAQALNTLVKQLSSNFGAISSVLNDILSRLDKVEAEVQIDRLITGRLQSLQTYVTQQLIRAAEIRASANLAATKMSECVLGQSKRVDFCGKGYHLMSFPQSAPHGVVFLHVTYVPAQEKNFTCAPAICHDGKAHFPREGVFVSNGTHWFVTQRNFYEPQIITTDNTFVSGNCDVVIGIVNNTVYDPLQPELDSGGGSGGGQIYEGKLTAEGLRFGIVASRFNHALVDRLVEGAIDAIVRHGGREEDITLVRVPGSWEIPVAAGELARKEDIDAVIAIGVLIRGATPHFDYIASEVSKGLADLSLELRKPITFGVITADTLEQAIERAGTKHGNKGWEAALSAIEMANLFKSLR

SEQ ID NO: 7992 - protein, 1307 aa, Artificial Sequence
  SARS-CoV-2/Sweden/01/2020__EPI_ISL_411951 spike protein (1-1147)(I712C_T1077C) LumSynth construct
MFVFLVLLPLVSSQCVNLTTRTQLPPAYTNSFTRGVYYPDKVFRSSVLHSTQDLFLPFFSNVTWFHAIHVSGTNGTKRFDNPVLPFNDGVYFASTEKSNIIRGWIFGTTLDSKTQSLLIVNNATNVVIKVCEFQFCNDPFLGVYYHKNNKSWMESEFRVYSSANNCTFEYVSQPFLMDLEGKQGNFKNLREFVFKNIDGYFKIYSKHTPINLVRDLPQGFSALEPLVDLPIGINITRFQTLLALHRSYLTPGDSSSGWTAGAAAYYVGYLQPRTFLLKYNENGTITDAVDCALDPLSETKCTLKSFTVEKGIYQTSNFRVQPTESIVRFPNITNLCPFGEVFNATRFASVYAWNRKRISNCVADYSVLYNSASFSTFKCYGVSPTKLNDLCFTNVYADSFVIRGDEVRQIAPGQTGKIADYNYKLPDDFTGCVIAWNSNNLDSKVGGNYNYLYRLFRKSNLKPFERDISTEIYQAGSTPCNGVEGFNCYFPLQSYGFQPTNGVGYQPYRVVVLSFELLHAPATVCGPKKSTNLVKNKCVNFNFNGLTGTGVLTESNKKFLPFQQFGRDIADTTDAVRDPQTLEILDITPCSFGGVSVITPGTNTSNQVAVLYQDVNCTEVPVAIHADQLTPTWRVYSTGSNVFQTRAGCLIGAEHVNNSYECDIPIGAGICASYQTQTNSPRRARSVASQSIIAYTMSLGAENSVAYSNNSCAIPTNFTISVTTEILPVSMTKTSVDCTMYICGDSTECSNLLLQYGSFCTQLNRALTGIAVEQDKNTQEVFAQVKQIYKTPPIKDCGGFNFSQILPDPSKPSKRSFIEDLLFNKVTLADAGFIKQYGDCLGDIAARDLICAQKFNGLTVLPPLLTDEMIAQYTSALLAGTITSGWTFGAGAALQIPFAMQMAYRFNGIGVTQNVLYENQKLIANQFNSAIGKIQDSLSSTASALGKLQDVVNQNAQALNTLVKQLSSNFGAISSVLNDILSRLDKVEAEVQIDRLITGRLQSLQTYVTQQLIRAAEIRASANLAATKMSECVLGQSKRVDFCGKGYHLMSFPQSAPHGVVFLHVTYVPAQEKNFTCAPAICHDGKAHFPREGVFVSNGTHWFVTQRNFYEPQIITTDNTFVSGNCDVVIGIVNNTVYDPLQPELDSGGGSGGGQIYEGKLTAEGLRFGIVASRFNHALVDRLVEGAIDAIVRHGGREEDITLVRVPGSWEIPVAAGELARKEDIDAVIAIGVLIRGATPHFDYIASEVSKGLADLSLELRKPITFGVITADTLEQAIERAGTKHGNKGWEAALSAIEMANLFKSLR

SEQ ID NO: 7993 - protein, 1307 aa, Artificial Sequence
  SARS-CoV-2/Tianmen/HBCDC-HB-07/2020__EPI_ISL_412983 spike protein (1-1147)(I712C_T1077C) LumSynth construct
MFVFLVLLPLVSSQCVNLTTRTQLPPAYTNSFTRGVYYPDKVFRSSVLHSTQDLFLPFFSNVTWFHAIHVSGTNGTKRFDNPVLPFNDGVYFASTEKSNIIRGWIFGTTLDSKTQSLLIVNNATNVVIKVCEFQFCNDPFLGVYYHKNNKSWMESEFRVYSSANNCTFEYVSQPFLMDLEGKQGNFKNLREFVFKNIDGYFKIYSKHTPINLVRDLPQGFSALEPLVDLPIGINITRFQTLLALHRSYLTPGDSSSGWTAGAAAYYVGYLQPRTFLLKYNENGTITDAVDCALDPLSETKCTLKSFTVEKGIYQTSNFRVQPTESIVRFPNITNLCPFGEVFNATRFASVYAWNRKRISNCVADYSVLYNSASFSTFKCYGVSPTKLNDLCFTNVYADSFVIRGDEVRQIAPGQTGKIADYNYKLPDDFTGCVIAWNSNNLDSKVGGNYNYLYRLFRKSNLKPFERDISTEIYQAGSTPCNGVEGFNCYFPLQSYGFQPTNGVGYQPYRVVVLSFELLHAPATVCGPKKSTNLVKNKCVNFNFNGLTGTGVLTESNKKFLPFQQFGRDIADTTDAVRDPQTLEILDITPCSFGGVSVITPGTNTSNQVAVLYQDLNCTEVPVAIHADQLTPTWRVYSTGSNVFQTRAGCLIGAEHVNNSYECDIPIGAGICASYQTQTNSPRRARSVASQSIIAYTMSLGAENSVAYSNNSCAIPTNFTISVTTEILPVSMTKTSVDCTMYICGDSTECSNLLLQYGSFCTQLNRALTGIAVEQDKNTQEVFAQVKQIYKTPPIKDFGGFNFSQILPDPSKPSKRSFIEDLLFNKVTLADAGFIKQYGDCLGDIAARDLICAQKFNGLTVLPPLLTDEMIAQYTSALLAGTITSGWTFGAGAALQIPFAMQMAYRFNGIGVTQNVLYENQKLIANQFNSAIGKIQDSLSSTASALGKLQDVVNQNAQALNTLVKQLSSNFGAISSVLNDILSRLDKVEAEVQIDRLITGRLQSLQTYVTQQLIRAAEIRASANLAATKMSECVLGQSKRVDFCGKGYHLMSFPQSAPHGVVFLHVTYVPAQEKNFTCAPAICHDGKAHFPREGVFVSNGTHWFVTQRNFYEPQIITTDNTFVSGNCDVVIGIVNNTVYDPLQPELDSGGGSGGGQIYEGKLTAEGLRFGIVASRFNHALVDRLVEGAIDAIVRHGGREEDITLVRVPGSWEIPVAAGELARKEDIDAVIAIGVLIRGATPHFDYIASEVSKGLADLSLELRKPITFGVITADTLEQAIERAGTKHGNKGWEAALSAIEMANLFKSLR

SEQ ID NO: 7994 - protein, 1307 aa, Artificial Sequence
  SARS-CoV-2/Hong Kong/case42_VM20002493/2020__EPI_ISL_414527 spike protein (1-1147)(I712C_T1077C) LumSynth construct
MFVFLVLLPLVSSQCVNLTTRTQLPPAYTNSFTRGVYYPDKVFRSSVLHSTQDLFLPFFSNVTWFHAIHVSGTNGTKRFDNPVLPFNDGVYFASTEKSNIIRGWIFGTTLDSKTQSLLIVNNATNVVIKVCEFQFCNDPFLGVYYHKNNKSWMESEFRVYSSANNCTFEYVSQPFLMDLEGKQGNFKNLREFVFKNIDGYFKIYSKHTPINLVRDLPQGFSALEPLVDLPIGINITRFQTLLALHRSYLTPGDSSSGWTAGAAAYYVGYLQPRTFLLKYNENGTITDAVDCALDPLSETKCTLKSFTVEKGIYQTSNFRVQPTESIVRFPNITNLCPFGEVFNATRFASVYAWNRKRISNCVADYSVLYNSASFSTFKCYGVSPTKLNDLCFTNVYADSFVIRGDEVRQIAPGQTGKIADYNYKLPDDFTGCVIAWNSNNLDSKVGGNYNYLYRLFRKSNLKPFERDISTEIYQAGSTPCNGVEGFNCYFPLQSYGFQPTNGVGYQPYRVVVLSFELLHAPATVCGPKKSTNLVKNKCVNFNFNGLTGTGVLTESNKKFLPFQQFGRDIADTTDAVRDPQTLEILDITPCSFGGVSVITPGTNTSNQVAVLYQDVNCTEVPVAIHADQLTPTWRVYSTGSNVFQTRAGCLIGAEHVNNSYECDIPIGAGICASYQTQTNSPRRARSVASQSIIAYTMSLGAENSVAYSNNSCAIPTNFAISVTTEILPVSMTKTSVDCTMYICGDSTECSNLLLQYGSFCTQLNRALTGIAVEQDKNTQEVFAQVKQIYKTPPIKDFGGFNFSQILPDPSKPSKRSFIEDLLFNKVTLADAGFIKQYGDCLGDIAARDLICAQKFNGLTVLPPLLTDEMIAQYTSALLAGTITSGWTFGAGAALQIPFAMQMAYRFNGIGVTQNVLYENQKLIANQFNSAIGKIQDSLSSTASALGKLQDVVNQNAQALNTLVKQLSSNFGAISSVLNDILSRLDKVEAEVQIDRLITGRLQSLQTYVTQQLIRAAEIRASANLAATKMSECVLGQSKRVDFCGKGYHLMSFPQSAPHGVVFLHVTYVPAQEKNFTCAPAICHDGKAHFPREGVFVSNGTHWFVTQRNFYEPQIITTDNTFVSGNCDVVIGIVNNTVYDPLQPELDSGGGSGGGQIYEGKLTAEGLRFGIVASRFNHALVDRLVEGAIDAIVRHGGREEDITLVRVPGSWEIPVAAGELARKEDIDAVIAIGVLIRGATPHFDYIASEVSKGLADLSLELRKPITFGVITADTLEQAIERAGTKHGNKGWEAALSAIEMANLFKSLR

SEQ ID NO: 7995 - protein, 1307 aa, Artificial Sequence
  SARS-CoV-2/USA/CruiseA-23/2020__EPI_ISL_414482 spike protein (1-1147)(I712C_T1077C) LumSynth construct
MFVFLVLLPLVSSQCVNLTTRTQLPPAYTNSFTRGVYYPDKVFRSSVLHSTQDLFLPFFSNVTWFHAIHVSGTNGTKRFDNPVLPFNDGVYFASTEKSNIIRGWIFGTTLDSKTQSLLIVNNATNVVIKVCEFQFCNDPFLGVYYHKNNKSWMESEFRVYSSANNCTFEYVSQPFLMDLEVKQGNFKNLREFVFKNIDGYFKIYSKHTPINLVRDLPQGFSALEPLVDLPIGINITRFQTLLALHRSYLTPGDSSSGWTAGAAAYYVGYLQPRTFLLKYNENGTITDAVDCALDPLSETKCTLKSFTVEKGIYQTSNFRVQPTESIVRFPNITNLCPFGEVFNATRFASVYAWNRKRISNCVADYSVLYNSASFSTFKCYGVSPTKLNDLCFTNVYADSFVIRGDEVRQIAPGQTGKIADYNYKLPDDFTGCVIAWNSNNLDSKVGGNYNYLYRLFRKSNLKPFERDISTEIYQAGSTPCNGVEGFNCYFPLQSYGFQPTNGVGYQPYRVVVLSFELLHAPATVCGPKKSTNLVKNKCVNFNFNGLTGTGVLTESNKKFLPFQQFGRDIADTTDAVRDPQTLEILDITPCSFGGVSVITPGTNTSNQVAVLYQDVNCTEVPVAIHADQLTPTWRVYSTGSNVFQTRAGCLIGAEHVNNSYECDIPIGAGICASYQTQTNSPRRARSVASQSIIAYTMSLGAENSVAYSNNSCAIPTNFTISVTTEILPVSMTKTSVDCTMYICGDSTECSNLLLQYGSFCTQLNRALTGIAVEQDKNTQEVFAQVKQIYKTPPIKDFGGFNFSQILPDPSKPSKRSFIEDLLFNKVTLADAGFIKQYGDCLGDIAARDLICAQKFNGLTVLPPLLTDEMIAQYTSALLAGTITSGWTFGAGAALQIPFAMQMAYRFNGIGVTQNVLYENQKLIANQFNSAIGKIQDSLSSTASALGKLQDVVNQNAQALNTLVKQLSSNFGAISSVLNDILSRLDKVEAEVQIDRLITGRLQSLQTYVTQQLIRAAEIRASANLAATKMSECVLGQSKRVDFCGKGYHLMSFPQSAPHGVVFLHVTYVPAQEKNFTCAPAICHDGKAHFPREGVFVSNGTHWFVTQRNFYEPQIITTDNTFVSGNCDVVIGIVNNTVYDPLQPELDSGGGSGGGQIYEGKLTAEGLRFGIVASRFNHALVDRLVEGAIDAIVRHGGREEDITLVRVPGSWEIPVAAGELARKEDIDAVIAIGVLIRGATPHFDYIASEVSKGLADLSLELRKPITFGVITADTLEQAIERAGTKHGNKGWEAALSAIEMANLFKSLR

SEQ ID NO: 7996 - protein, 1307 aa, Artificial Sequence
  SARS-CoV-2/Hong Kong/case85_VM20002868/2020__EPI_ISL_414519 spike protein (1-1147)(I712C_T1077C) LumSynth construct
MFVFLVLVPLVSSQCVNLTTRTQLPPAYTNSFTRGVYYPDKVFRSSVLHSTQDLFLPFFSNVTWFHAIHVSGTNGTKRFDNPVLPFNDGVYFASTEKSNIIRGWIFGTTLDSKTQSLLIVNNATNVVIKVCEFQFCNDPFLGVYYHKNNKSWMESEFRVYSSANNCTFEYVSQPFLMDLEGKQGNFKNLREFVFKNIDGYFKIYSKHTPINLVRDLPQGFSALEPLVDLPIGINITRFQTLLALHRSYLTPGDSSSGWTAGAAAYYVGYLQPRTFLLKYNENGTITDAVDCALDPLSETKCTLKSFTVEKGIYQTSNFRVQPTESIVRFPNITNLCPFGEVFNATRFASVYAWNRKRISNCVADYSVLYNSASFSTFKCYGVSPTKLNDLCFTNVYADSFVIRGDEVRQIAPGQTGKIADYNYKLPDDFTGCVIAWNSNNLDSKVGGNYNYLYRLFRKSNLKPFERDISTEIYQAGSTPCNGVEGFNCYFPLQSYGFQPTNGVGYQPYRVVVLSFELLHAPATVCGPKKSTNLVKNKCVNFNFNGLTGTGVLTESNKKFLPFQQFGRDIADTTDAVRDPQTLEILDITPCSFGGVSVITPGTNTSNQVAVLYQDVNCTEVPVAIHADQLTPTWRVYSTGSNVFQTRAGCLIGAEHVNNSYECDIPIGAGICASYQTQTNSPRRARSVASQSIIAYTMSLGAENSVAYSNNSCAIPTNFTISVTTEILPVSMTKTSVDCTMYICGDSTECSNLLLQYGSFCTQLNRALTGIAVEQDKNTQEVFAQVKQIYKTPPIKDFGGFNFSQILPDPSKPSKRSFIEDLLFNKVTLADAGFIKQYGDCLGDIAARDLICAQKFNGLTVLPPLLTDEMIAQYTSALLAGTITSGWTFGAGAALQIPFAMQMAYRFNGIGVTQNVLYENQKLIANQFNSAIGKIQDSLSSTASALGKLQDVVNQNAQALNTLVKQLSSNFGAISSVLNDILSRLDKVEAEVQIDRLITGRLQSLQTYVTQQLIRAAEIRASANLAATKMSECVLGQSKRVDFCGKGYHLMSFPQSAPHGVVFLHVTYVPAQEKNFTCAPAICHDGKAHFPREGVFVSNGTHWFVTQRNFYEPQIITTDNTFVSGNCDVVIGIVNNTVYDPLQPELDSGGGSGGGQIYEGKLTAEGLRFGIVASRFNHALVDRLVEGAIDAIVRHGGREEDITLVRVPGSWEIPVAAGELARKEDIDAVIAIGVLIRGATPHFDYIASEVSKGLADLSLELRKPITFGVITADTLEQAIERAGTKHGNKGWEAALSAIEMANLFKSLR

SEQ ID NO: 7997 - protein, 1307 aa, Artificial Sequence; identical to SEQ ID NO: 7987
  SARS-CoV-2/England/200990660/2020__EPI_ISL_414523 spike protein (1-1147)(I712C_T1077C) LumSynth construct

SEQ ID NO: 7998 - protein, 1307 aa, Artificial Sequence
  SARS-CoV-2/Australia/NSW09/2020__EPI_ISL_413595 spike protein (1-1147)(I712C_T1077C) LumSynth construct
MFVFLVLLPLVSSQCVNLTTRTQLPPAYTNSFTRGVYYPDKVFRSSVLHSTQDLFLPFFSNVTWFHAIHVSGTNGTKRFDNPVLPFNDGVYFASTEKSNIIRGWIFGTTLDSKTQSLLIVNNATNVVIKVCEFQFCNDPFLGVYYHKNNKSWMESEFRVYSSANNCTFEYVSQPFLMDLEGKQGNFKNLREFVFKNIDGYFKIYSKHTPINLVRDLPQGFSALEPLVDLPIGINITRFQTLLALHRSYLTPGDSSSGWTAGAAAYYVGYLQPRTFLLKYNENGTITDAVDCALDPLSETKCTLKSFTVEKGIYQTSNFRVQPTESIVRFPNITNLCPFGEVFNATRFASVYAWNRKRISNCVADYSVLYNSASFSTFKCYGVSPTKLNDLCFTNVYADSFVIRGDEVRQIAPGQTGKIADYNYKLPDDFTGCVIAWNSNNLDSKVGGNYNYLYRLFRKSNLKPFERDISTEIYQAGSTPCNGVEGFNCYFPLQSYGFQPTNGVGYQPYRVVVLSFELLHAPATVCGPKKSTNLVKNKCVNFNFNGLTGTGVLTESNKKFLPFQQFGRDIADTTDAVRDPQTLEILDITPCSFGGVSVITPGTNTSNQVAVLYQDVNCTEVPVAIHADQLTPTWRVYSTGSNVFQTRAGCLIGAEHVNNSYECDIPIGAGICASYQTQTNSPRRARSVASQSIIAYTMSLGAENSVAYSNNSCAIPTNFTISVTTEILPVSMTKTSVDCTMYICGDSTECSNLLLQYGSFCTQLNRALTGIAVEQDKNTQEVFAQVKQIYKTPPIKDFGGFNFSQILPDPSKPSKRSFIEDLLFNKVTLADAGFIKQYGDCLGDIAARDLICAQKFNGLTVLPPLLTDEMIAQYTSALLAGTITSGWTFGAGAALQIPFAMQMAYRFNGIGVTQNVLYENQKLIANQFNSAIGKIQDSLSFTASALGKLQDVVNQNAQALNTLVKQLSSNFGAISSVLNDILSRLDKVEAEVQIDRLITGRLQSLQTYVTQQLIRAAEIRASANLAATKMSECVLGQSKRVDFCGKGYHLMSFPQSAPHGVVFLHVTYVPAQEKNFTCAPAICHDGKAHFPREGVFVSNGTHWFVTQRNFYEPQIITTDNTFVSGNCDVVIGIVNNTVYDPLQPELDSGGGSGGGQIYEGKLTAEGLRFGIVASRFNHALVDRLVEGAIDAIVRHGGREEDITLVRVPGSWEIPVAAGELARKEDIDAVIAIGVLIRGATPHFDYIASEVSKGLADLSLELRKPITFGVITADTLEQAIERAGTKHGNKGWEAALSAIEMANLFKSLR

SEQ ID NO: 7999 - protein, 1307 aa, Artificial Sequence; identical to SEQ ID NO: 7979
  SARS-CoV-2/Australia/NSW10/2020__EPI_ISL_413596 spike protein (1-1147)(I712C_T1077C) LumSynth construct

SEQ ID NO: 8000 - protein, 1307 aa, Artificial Sequence
  SARS-CoV-2/Switzerland/1000477797/2020__EPI_ISL_413023 spike protein (1-1147)(I712C_T1077C) LumSynth construct
MFVFLVLLPLVSSQCVNLTTRTQLPPAYTNSFTRGVYYPDKVFRSSVLHSTQDLFLPFFSNVTWFHAIHVSGTNGTKRFDNPVLPFNDGVYFASTEKSNIIRGWIFGTTLDSKTQSLLIVNNATNVVIKVCEFQFCNDPFLGVYYHKNNKSWMESEFRVYSSANNCTFEYVSQPFLMDLEGKQGNFKNLREFVFKNIDGYFNIYSKHTPINLVRDLPQGFSALEPLVDLPIGINITRFQTLLALHRSYLTPGDSSSGWTAGAAAYYVGYLQPRTFLLKYNENGTITDAVDCALDPLSETKCTLKSFTVEKGIYQTSNFRVQPTESIVRFPNITNLCPFGEVFNATRFASVYAWNRKRISNCVADYSVLYNSASFSTFKCYGVSPTKLNDLCFTNVYADSFVIRGDEVRQIAPGQTGKIADYNYKLPDDFTGCVIAWNSNNLDSKVGGNYNYLYRLFRKSNLKPFERDISTEIYQAGSTPCNGVEGFNCYFPLQSYGFQPTNGVGYQPYRVVVLSFELLHAPATVCGPKKSTNLVKNKCVNFNFNGLTGTGVLTESNKKFLPFQQFGRDIADTTDAVRDPQTLEILDITPCSFGGVSVITPGTNTSNQVAVLYQGVNCTEVPVAIHADQLTPTWRVYSTGSNVFQTRAGCLIGAEHVNNSYECDIPIGAGICASYQTQTNSPRRARSVASQSIIAYTMSLGAENSVAYSNNSCAIPTNFTISVTTEILPVSMTKTSVDCTMYICGDSTECSNLLLQYGSFCTQLNRALTGIAVEQDKNTQEVFAQVKQIYKTPPIKDFGGFNFSQILPDPSKPSKRSFIEDLLFNKVTLADAGFIKQYGDCLGDIAARDLICAQKFNGLTVLPPLLTDEMIAQYTSALLAGTITSGWTFGAGAALQIPFAMQMAYRFNGIGVTQNVLYENQKLIANQFNSAIGKIQDSLSSTASALGKLQDVVNQNAQALNTLVKQLSSNFGAISSVLNDILSRLDKVEAEVQIDRLITGRLQSLQTYVTQQLIRAAEIRASANLAATKMSECVLGQSKRVDFCGKGYHLMSFPQSAPHGVVFLHVTYVPAQEKNFTCAPAICHDGKAHFPREGVFVSNGTHWFVTQRNFYEPQIITTDNTFVSGNCDVVIGIVNNTVYDPLQPELDSGGGSGGGQIYEGKLTAEGLRFGIVASRFNHALVDRLVEGAIDAIVRHGGREEDITLVRVPGSWEIPVAAGELARKEDIDAVIAIGVLIRGATPHFDYIASEVSKGLADLSLELRKPITFGVITADTLEQAIERAGTKHGNKGWEAALSAIEMANLFKSLR

SEQ ID NO: 8001 - protein, 1307 aa, Artificial Sequence
  SARS-CoV-2/Belgium/BA-02291/2020__EPI_ISL_415159 spike protein (1-1147)(I712C_T1077C) LumSynth construct
MFVFLVLLPLVSSQCVNLTTRTQLPPAYTNSFTRGVYYPDKVFRSSVLHSTQDLFLPFFSNVTWFHAIHVSGTNGTKRFDNPVLPFNDGVYFASTEKSNIIRGWIFGTTLDSKTQSLLIVNNATNVVIKVCEFQFCNDPFLGVYYHKNNKSWMESEFRVYSSANNCTFEYVSQPFLMDLEGKQGNFKNLREFVFKNIDGYFKIYSKHTPINLVRDLPQGFSALEPLVDLPIGINITRFQTLLALHRSYLTPGDSSSGWTAGAAAYYVGYLQPRTFLLKYNENGTITDAVDCALDPLSETKCTLKSFTVEKGIYQTSNFRVQPTESIVRFPNITNLCPFGEVFNATRFASVYAWNRKRISNCVADYSVLYNSASFSTFKCYGVSPTKLNDLCFTNVYADSFVIRGDEVRQIAPGQTGKIADYNYKLPDDFTGCVIAWNSNNLDSKVGGNYNYLYRLFRRSNLKPFERDISTEIYQAGSTPCNGVEGFNCYFPLQSYGFQPTNGVGYQPYRVVVLSFELLPAPATVCGPKKSTNLVKNKCVNFNFNGLTGTGVLTESNKKFLPFQQFGRDIADTTDAVRDPQTLEILDITPCSFGGVSVITPGTNTSNQVAVLYQGVNCTEVPVAIHADQLTPTWRVYSTGSNVFQTRAGCLIGAEHVNNSYECDIPIGAGICASYQTQTNSPRRARSVASQSIIAYTMSLGAENSVAYSNNSCAIPTNFTISVTTEILPVSMTKTSVDCTMYICGDSTECSNLLLQYGSFCTQLNRALTGIAVEQDKNTQEVFAQVKQIYKTPPIKDFGGFNFSQILPDPSKPSKRSFIEDLLFNKVTLADAGFIKQYGDCLGDIAARDLICAQKFNGLTVLPPLLTDEMIAQYTSALLAGTITSGWTFGAGAALQIPFAMQMAYRFNGIGVTQNVLYENQKLIANQFNSAIGKIQDSLSSAAPALGKLQDVVNQNAQALNTLVKQLSSNFGAISSVLNDILSRLDKVEAEVQIDRLITGRLQSLQTYVTQQLIRAAEIRASANLAATKMSECVLGQSKRVDFCGKGYHLMSFPQSAPHGVVFLHVTYVPAQEKNFTCAPAICHDGKAHFPREGVFVSNGTHWFVTQRNFYEPQIITTDNTFVSGNCDVVIGIVNNTVYDPLQPELDSGGGSGGGQIYEGKLTAEGLRFGIVASRFNHALVDRLVEGAIDAIVRHGGREEDITLVRVPGSWEIPVAAGELARKEDIDAVIAIGVLIRGATPHFDYIASEVSKGLADLSLELRKPITFGVITADTLEQAIERAGTKHGNKGWEAALSAIEMANLFKSLR

SEQ ID NO: 8002 - protein, 1307 aa, Artificial Sequence
  SARS-CoV-2/USA/WA8-UW5/2020__EPI_ISL_413486 spike protein (1-1147)(I712C_T1077C) LumSynth construct
MFVFLVLLPLVSSQCVNLTTRTQLPPAYTNSFTRGVYYPDKVFRSSVLHSTQDLFLPFFSNVTWFHAIHVSGTNGTKRFDNPVLPFNDGVYFASTEKSNIIRGWIFGTTLDSKTQSLLIVNNATNVVIKVCEFQFCNDPFLGVYYHKNNKSWMESEFRVYSSANNCTFEYVSQPFLMDLEGKQGNFKNLREFVFKNIDGYFKIYSKHTPINLVRDLPQGFSALEPLVDLPIGINITRFQTLLALHRSYLTPGDSSSGWTAGAAAYYVGYLQPRTFLLKYNENGTITDAVDCALDPLSETKCTLKSFTVEKGIYQTSNFRVQPTESIVRFPNITNLCPFGEVFNATRFASVYAWNRKRISNCVADYSVLYNSASFSTFKCYGVSPTKLNDLCFTNVYADSFVIRGDEVRQIAPGQTGKIADYNYKLPDDFTGCVIAWNSNNLDSKVGGNYNYLYRLFRKSNLKPFERDISTEIYQAGSTPCNGVEGFNCYFPLQSYGFQPTNGVGYQPYRVVVLSFELLHAPATVCGPKKSTNLVKNKCVNFNFNGLTGTGVLTESNKKFLPFQQFGRDIADTTDAVRDPQTLEILDITPCSFGGVSVITPGTNTSNQVAVLYQDVNCTEVPVAIHADQLTPTWRVYSTGSNVFQTRAGCLIGAEYVNNSYECDIPIGAGICASYQTQTNSPRRARSVASQSIIAYTMSLGAENSVAYSNNSCAIPTNFTISVTTEILPVSMTKTSVDCTMYICGDSTECSNLLLQYGSFCTQLNRALTGIAVEQDKNTQEVFAQVKQIYKTPPIKDFGGFNFSQILPDPSKPSKRSFIEDLLFNKVTLADAGFIKQYGDCLGDIAARDLICAQKFNGLTVLPPLLTDEMIAQYTSALLAGTITSGWTFGAGAALQIPFAMQMAYRFNGIGVTQNVLYENQKLIANQFNSAIGKIQDSLSSTASALGKLQDVVNQNAQALNTLVKQLSSNFGAISSVLNDILSRLDKVEAEVQIDRLITGRLQSLQTYVTQQLIRAAEIRASANLAATKMSECVLGQSKRVDFCGKGYHLMSFPQSAPHGVVFLHVTYVPAQEKNFTCAPAICHDGKAHFPREGVFVSNGTHWFVTQRNFYEPQIITTDNTFVSGNCDVVIGIVNNTVYDPLQPELDSGGGSGGGQIYEGKLTAEGLRFGIVASRFNHALVDRLVEGAIDAIVRHGGREEDITLVRVPGSWEIPVAAGELARKEDIDAVIAIGVLIRGATPHFDYIASEVSKGLADLSLELRKPITFGVITADTLEQAIERAGTKHGNKGWEAALSAIEMANLFKSLR

SEQ ID NO: 8003 - protein, 1307 aa, Artificial Sequence
  SARS-CoV-2/England/20102000506/2020__EPI_ISL_415147 spike protein (1-1147)(I712C_T1077C) LumSynth construct
MFVFLVLLPLVSSQCVNLTTRTQLPPAYTNSFTRGVYYPDKVFRSSVLHSTQDLFLPFFSNVTWFHAIHVSGTNGTKRFDNPVLPFNDGVYFASTEKSNIIRGWIFGTTLDSKTQSLLIVNNATNVVIKVCEFQFCNDPFLGVYYHKNNKSWMESEFRVYSSANNCTFEYVSQPFLMDLEGKQGNFKNLREFVFKNIDGYFKIYSKHTPINLVRDLPQGFSALEPLVDLPIGINITRFQTLLALHRSYLTPGDSSSGWTAGAAAYYVGYLQPRTFLLKYNENGTITDAVDCALDPLSETKCTLKSFTVEKGIYQTSNFRVQPTESIVRFPNITNLCPFGEVFNATRFASVYAWNRKRISNCVADYSVLYNSASFSTFKCYGVSPTKLNDLCFTNVYADSFVIRGDEVRQIAPGQTGKIADYNYKLPDDFTGCVIAWNSNNLDSKVGGNYNYLYRLFRKSNLKPFERDISTEIYQAGSTPCNGVEGFNCYFPLQSYGFQPTNGVGYQPYRVVVLSFELLHAPATVCGPKKSTNLVKNKCVNFNFNGLTGTGVLTESNKKFLPFQQFGRDIADTTDAVRDPQTLEILDITPCSFGGVSVITPGTNTSNQVAVLYQGVNCTEVPVAIHADQLTPTWRVYSTGSNVFQTRAGCLIGAEHVNNSYECDIPIGAGICASYQTQTNSPRRARSVASQSIIAYTMSLGAENSVAYSNNSCAIPTNFTISVTTEILPVSMTKTSVDCTMYICGDSTECSNLLLQYGSFCTQLNRALTGIAVEQDKNTQEVFAQVKQIYKTPPIKDFGGFNFSQILPDPSKPSKRSFIEDLLFNKVTLADAGFIKQYGYCLGDIAARDLICAQKFNGLTVLPPLLTDEMIAQYTSALLAGTITSGWTFGAGAALQIPFAMQMAYRFNGIGVTQNVLYENQKLIANQFNSAIGKIQDSLSSTASALGKLQDVVNQNAQALNTLVKQLSSNFGAISSVLNDILSRLDKVEAEVQIDRLITGRLQSLQTYVTQQLIRAAEIRASANLAATKMSECVLGQSKRVDFCGKGYHLMSFPQSAPHGVVFLHVTYVPAQEKNFTCAPAICHDGKAHFPREGVFVSNGTHWFVTQRNFYEPQIITTDNTFVSGNCDVVIGIVNNTVYDPLQPELDSGGGSGGGQIYEGKLTAEGLRFGIVASRFNHALVDRLVEGAIDAIVRHGGREEDITLVRVPGSWEIPVAAGELARKEDIDAVIAIGVLIRGATPHFDYIASEVSKGLADLSLELRKPITFGVITADTLEQAIERAGTKHGNKGWEAALSAIEMANLFKSLR

SEQ ID NO: 8004 - protein, 1307 aa, Artificial Sequence
  SARS-CoV-2/Belgium/VAG-03013/2020__EPI_ISL_415155 spike protein (1-1147)(I712C_T1077C) LumSynth construct
MFVFLVLLPLVSSQCVNLTTRTQLPPAYTNSFTRGVYYPDKVFRSSVLHSTQDLFLPFFSNVTWFHAIHVSGTNGTKRFDNPVLPFNDGVYFASTEKSNIIRGWIFGTTLDSKTQSLLIVNNATNVVIKVCEFQFCNDPFLGVYYHKNNKSWMESEFRVYSSANNCTFEYVSQPFLMDLEGKQGNFKNLREFVFKNIDGYFKIYSKHTPINLVRDLPQGFSALEPLVDLPIGINITRFQTLLALHRSYLTPGDSSSGWTAGAAAYYVGYLQPRTFLLKYNENGTITDAVDCALDPLSETKCTLKSFTVEKGIYQTSNFRVQPTESIVRFPNITNLCPFGEVFNATRFASVYAWNRKRISNCVADYSVLYNSASFSTFKCYGVSPTKLNDLCFTNVYADSFVIRGDEVRQIAPGQTGKIADYNYKLPDDFTGCVIAWNSNNLDSKVGGNYNYLYRLFRKSNLKPFERDISTEIYQAGSTPCNGVEGFNCYFPLQSYGFQPTNGVGYQPYRVVVLSFELLHAPATVCGPKKSTNLVKNKCVNFNFNGLTGTGVLTESNKKFLPFQQFGRDIADTTDAVRDPQTLEILDITPCSFGGVSVITPGTNTSNQVAVLYQGVNCTEVPVAIHADQLTPTWRVYSTGSNVFQTRAGCLIGAEHVNNSYECDIPIGAGICASYQTQTNSPRRARSVASQSIIAYTMSLGAENSVAYSNNSCAIPTNFTISVTTEILPVSMTKTSVDCTMYICGDSTECSNLLLQYGSFCTQLNRALTGIAVEQDKNTQEVFAQVKQIYKTPPIKDFGGFNFSQILPDPSKPSKRSFIEDLLFNKVTLADAGFIKQYGDCLGDIAARDLICAQKFNGLTVLPPLLTDEMIAQYTSALLAGTITSGWTFGAGAALQIPFAMQMAYRFNGIGVTQNVLYENQKLIANQFNSAIGKIQDSLSSTATALGKLQDVVNQNAQALNTLVKQLSSNFGAISSVLNDILSRLDKVEAEVQIDRLITGRLQSLQTYVTQQLIRAAEIRASANLAATKMSECVLGQSKRVDFCGKGYHLMSFPQSAPHGVVFLHVTYVPAQEKNFTCAPAICHDGKAHFPREGVFVSNGTHWFVTQRNFYEPQIITTDNTFVSGNCDVVIGIVNNTVYDPLQPELDSGGGSGGGQIYEGKLTAEGLRFGIVASRFNHALVDRLVEGAIDAIVRHGGREEDITLVRVPGSWEIPVAAGELARKEDIDAVIAIGVLIRGATPHFDYIASEVSKGLADLSLELRKPITFGVITADTLEQAIERAGTKHGNKGWEAALSAIEMANLFKSLR

SEQ ID NO: 8005 - protein, 1307 aa, Artificial Sequence
  SARS-CoV-2/Belgium/BC-03016/2020__EPI_ISL_415157 spike protein (1-1147)(I712C_T1077C) LumSynth construct
MFVFLVLLPLVSSQCVNLTTRTQLPPAYTNSFTRGVYYPDKVFRSSVLHSTQDLFLPFFSNVTWFHAIHVSGTNGTKRFDNPVLPFNDGVYFASTEKSNIIRGWIFGTTLDSKTQSLLIVNNATNVVIKVCEFQFCNDPFLGVYYHKNNKSWMESEFRVYSSANNCTFEYVSQPFLMDLEGKQGNFKNLREFVFKNIDGYFKIYSKHTPINLVRDLPQGFSALEPLVDLPIGINITRFQTLLALHRSYLTPGDSSSGWTAGAAAYYVGYLQPRTFLLKYNENGTITDAVDCALDPLSETKCTLKSFTVEKGIYQTSNFRVQPTESIVRFPNITNLCPFGEVFNATRFASVYAWNRKRISNCVADYSVLYNSASFSTFKCYGVSPTKLNDLCFTNVYADSFVIRGDEVRQIAPGQTGKIADYNYKLPDDFTGCVIAWNSNNLDSKVGGNYNYLYRLFRKSNLKPFERDISTEIYQAGSTPCNGVEGFNCYFPLQSYGFQPTNGVGYQPYRVVVLSFELLHAPATVCGPKKSTNLVKNKCVNFNFNGLTGTGVLTESNKKFLPFQQFGRDIADTTDAVRDPQTLEILDITPCSFGGVSVITPGTNTSNQVAVLYQGVNCTEVPVAIHADQLTPTWRVYSTGSNVFQTRAGCLIGAEHVNNSYECDIPIGAGICASYQTQTNSPRRARSVASQSIIAYTMSLGAENSVAYSNNSCAIPTNFTISVTTEILPVSMTKTSVDCTMYICGDSTECSNLLLQYGSFCTQLNRALTGIAVEQDKNTQEVFAQVKQIYKTPPIKDFGGFNFSQILPDPSKPSKRSFIEDLLFNKVTLADAGFIKQYGDCLGDIAARDLICAQKFNGLTVLPPLLTDEMIAQYTSALLAGTITSGWTFGAGAALQIPFAMQMAYRFNGIGVTQNVLYENQKLIANQFNSAIGKIQDSLSSTAPALGKLQDVVNQNAQALNTLVKQLSSNFGAISSVLNDILSRLDKVEAEVQIDRLITGRLQSLQTYVTQQLIRAAEIRASANLAATKMSECVLGQSKRVDFCGKGYHLMSFPQSAPHGVVFLHVTYVPAQEKNFTCAPAICHDGKAHFPREGVFVSNGTHWFVTQRNFYEPQIITTDNTFVSGNCDVVIGIVNNTVYDPLQPELDSGGGSGGGQIYEGKLTAEGLRFGIVASRFNHALVDRLVEGAIDAIVRHGGREEDITLVRVPGSWEIPVAAGELARKEDIDAVIAIGVLIRGATPHFDYIASEVSKGLADLSLELRKPITFGVITADTLEQAIERAGTKHGNKGWEAALSAIEMANLFKSLR

SEQ ID NO: 8006 - protein, 1307 aa, Artificial Sequence
  SARS-CoV-2/Germany/BavPat3/2020__EPI_ISL_414521 spike protein (1-1147)(I712C_T1077C) LumSynth construct
MFVFLVLLPLVSSQCVNLTTRTQLPPAYTNSFTRGVYYPDKVFRSSVLHSTQDLFLPFFSNVTWFHAIHVSGTNGTKRFDNPVLPFNDGVYFASTEKSNIIRGWIFGTTLDSKTQSLLIVNNATNVVIKVCEFQFCNDPFLGVYYHKNNKSWMESEFRVYSSANNCTFEYVSQPFLMDLEGKQGNFKNLREFVFKNIDGYFKIYSKHTPINLVRDLPQGFSALEPLVDLPIGINITRFQTLLALHRSYLTPGDSSSGWTAGAAAYYVGYLQPRTFLLKYNENGTITDAVDCALDPLSETKCTLKSFTVEKGIYQTSNFRVQPTESIVRFPNITNLCPFGEVFNATRFASVYAWNRKRISNCVADYSVLYNSASFSTFKCYGVSPTKLNDLCFTNVYADSFVIRGDEVRQIAPGQTGKIADYNYKLPDDFTGCVIAWNSNNLDSKVGGNYNYLYRLFRKSNLKPFERDISTEIYQAGSTPCNGVEGFNCYFPLQSYGFQPTNGVGYQPYRVVVLSFELLHAPATVCGPKKSTNLVKNKCVNFNFNGLTGTGVLTESNKKFLPFQQFGRDIADTTDAVRDPQTLEILDITPCSFGGVSVITPGTNTSNQVAVLYQDVNCTEVPVAIHADQLTPTWRVYSTGSNVFQTRAGCLIGAEHVNNSYECDIPIGAGICASYQTQTNSPRRARSVASQSIIAYTMSLGAENSVAYSNNSCAIPTNFTISVTTEILPVSMTKTSVDCTMYICGDSTECSNLLLQYGSFCTQLNRALTGIAVEQDKNTQQVFAQVKQIYKTPPIKDFGGFNFSQILPDPSKPSKRSFIEDLLFNKVTLADAGFIKQYGDCLGDIAARDLICAQKFNGLTVLPPLLTDEMIAQYTSALLAGTITSGWTFGAGAALQIPFAMQMAYRFNGIGVTQNVLYENQKLIANQFNSAIGKIQDSLSSTASALGKLQDVVNQNAQALNTLVKQLSSNFGAISSVLNDILSRLDKVEAEVQIDRLITGRLQSLQTYVTQQLIRAAEIRASANLAATKMSECVLGQSKRVDFCGKGYHLMSFPQSAPHGVVFLHVTYVPAQEKNFTCAPAICHDGKAHFPREGVFVSNGTHWFVTQRNFYEPQIITTDNTFVSGNCDVVIGIVNNTVYDPLQPELDSGGGSGGGQIYEGKLTAEGLRFGIVASRFNHALVDRLVEGAIDAIVRHGGREEDITLVRVPGSWEIPVAAGELARKEDIDAVIAIGVLIRGATPHFDYIASEVSKGLADLSLELRKPITFGVITADTLEQAIERAGTKHGNKGWEAALSAIEMANLFKSLR

SEQ ID NO: 8007 - protein, 1307 aa, Artificial Sequence
  SARS-CoV-2/France/HF1805/2020__EPI_ISL_414628 spike protein (1-1147)(I712C_T1077C) LumSynth construct
MFVFLVLLPLVSSQCVNLTTRTQLPPAYTNSFTRGVYYPDKVFRSSVLHSTQDLFLPFFSNVTWFHAIHVSGTNGTKRFDNPVLPFNDGVYFASTEKSNIIRGWIFGTTLDSKTQSLLIVNNATNVVIKVCEFQFCNDPFLGVYYHKNNKSWMESEFRVYSSANNCTFEYVSQPFLMDLEGKQGNFKNLREFVFKNIDGYFKIYSKHTPINLVRDLPQGFSALEPLVDLPIGINITRFQTLLALHRSYLTPGDSSSGWTAGAAAYYVGYLQPRTFLLKYNENGTITDAVDCALDPLSETKCTLKSFTVEKGIYQTSNFRVQPTESIVRFPNITNLCPFGEVFNATRFASVYAWNRKRISNCVADYSVLYNSASFSTFKCYGVSPTKLNDLCFTNVYADSFVIRGDEVRQIAPGQTGKIADYNYKLPDDFTGCVIAWNSNNLDSKVGGNYNYLYRLFRKSNLKPFERDISTEIYQAGSTPCNGVEGFNCYFPLQSYGFQPTNGVGYQPYRVVVLSFELLHAPATVCGPKKSTNLVKNKCVNFNFNGLTGTGVLTESNKKFLPFQQFGRDIADTTDAVRDPQTLEILDITPCSFGGVSVITPGTNTSNQVAVLYQGVNCTEVPVAIHADQLTPTWRVYSTGSNVFQTRAGCLIGAEHVNNSYECDIPIGAGICASYQTQTNSPRRARSVASQSIIAYTMSLGAENSVAYSNNSCAIPTNFTISVTTEILPVSMTKTSVDCTMYICGDSTECSNLLLQYGSFCTQLNRALTGIAVEQDKNTQEVFAQVKQIYKTPPIKDFGGFNFSQILPDPSKPSKRSFIEDLLFNKVTLADAGFIKQYGDCLGDIAARDLICAQKFNGLTVLPPLLTDEMIAQYTSALLAGTITSGWTFGAGAALQIPFAMQMAYRFNGIGVTQNVLYENQKLIANQFNSAIGKIQDSLSSTASALGKLQDVVNQNAQALNTLVKQLSSNFGAISSVLNDILSRLDKVEAEVQIDRLITGRLQSLQTYVTQQLIRAAEIRASANLAATKMSECVLGQSKRVDFCGKGYHLMSFPQSAPHGVVFLHVTYVPAQEKNFTCAPAICHDGKAHFPREGVFVSNGTHWFVTQRNFYEPQIITTDNTFVSGNCDVVIGVVNNTVYDPLQPELDSGGGSGGGQIYEGKLTAEGLRFGIVASRFNHALVDRLVEGAIDAIVRHGGREEDITLVRVPGSWEIPVAAGELARKEDIDAVIAIGVLIRGATPHFDYIASEVSKGLADLSLELRKPITFGVITADTLEQAIERAGTKHGNKGWEAALSAIEMANLFKSLR

SEQ ID NO: 8008 - protein, 1307 aa, Artificial Sequence
  SARS-CoV-2/Netherlands/ZuidHolland_9/2020__EPI_ISL_414445 spike protein (1-1147)(I712C_T1077C) LumSynth construct
MFVFLVLLPLVSSQCVNLTTRTQLPPAYTNSFTRGVYYPDKVFRSSVLHSTQDLFLPFFSNVTWFHAIHVSGTNGTKRFDNPVLPFNDGVYFASTEKSNIIRGWIFGTTLDSKTQSLLIVNNATNVVIKVCEFQFCNDPFLGVYYHKNNKSWMESEFRVYSSANNCTFEYVSQPFLMDLEGKQGNFKNLREFVFKNIDGYFKIYSKHTPINLVRDLPQGFSALEPLVDLPIGINITRFQTLLALHRSYLTPGDSSSGWTAGAAAYYVGYLQPRTFLLKYNENGTITDAVDCALDPLSETKCTLKSFTVEKGIYQTSNFRVQPTESIVRFPNITNLCPFGEVFNATRFASVYAWNRKRISNCVADYSVLYNSASFSTFKCYGVSPTKLNDLCFTNVYADSFVIRGDEVRQIAPGQTGKIADYNYKLPDDFTGCVIAWNSNNLDSKVGGNYNYLYRLFRKSNLKPFERDISTEIYQAGSTPCNGVEGFNCYFPLQSYGFQPTNGVGYQPYRVVVLSFELLHAPATVCGPKKSTNLVKNKCVNFNFNGLTGTGVLTESNKKFLPFQQFGRDIADTTDAVRDPQTLEILDITPCSFGGVSVITPGTNTSNQVAVLYQGVNCTEVPVAIHADQLTPTWRVYSTGSNVFQTRAGCLIGAEHVNNSYECDIPIGAGICASYQTQTNSPRRARSVASQSIIAYTMSLGAENSVAYSNNSCAIPTNFTISVTTEILPVSMTKTSVDCTMYICGDSTECSNLLLQYGSFCTQLNRALTGIAVEQDKNTQEVFAQVKQIYKTPPIKDFGGFNFSQILPDPSKPSKRSFIEDLLFNKVTLADAGFIKQYGDCLGDIAARDLICVQKFNGLTVLPPLLTDEMIAQYTSALLAGTITSGWTFGAGAALQIPFAMQMAYRFNGIGVTQNVLYENQKLIANQFNSAIGKIQDSLSSTASALGKLQDVVNQNAQALNTLVKQLSSNFGAISSVLNDILSRLDKVEAEVQIDRLITGRLQSLQTYVTQQLIRAAEIRASANLAATKMSECVLGQSKRVDFCGKGYHLMSFPQSAPHGVVFLHVTYVPAQEKNFTCAPAICHDGKAHFPREGVFVSNGTHWFVTQRNFYEPQIITTDNTFVSGNCDVVIGIVNNTVYDPLQPELDSGGGSGGGQIYEGKLTAEGLRFGIVASRFNHALVDRLVEGAIDAIVRHGGREEDITLVRVPGSWEIPVAAGELARKEDIDAVIAIGVLIRGATPHFDYIASEVSKGLADLSLELRKPITFGVITADTLEQAIERAGTKHGNKGWEAALSAIEMANLFKSLR

SEQ ID NO: 8009 - protein, 1307 aa, Artificial Sequence
  SARS-CoV-2/Finland/FIN03032020A/2020__EPI_ISL_413602 spike protein (1-1147)(I712C_T1077C) LumSynth construct
MFVFLVLLPLVSSQCVNLTTRTQLPPAYTNSFTRGVYYPDKVFRSSVLHSTQDLFLPFFSNVTWFHAIHVSGTNGTKRFDNPVLPFNDGVYFASTEKSNIIRGWIFGTTLDSKTQSLLIVNNATNVVIKVCEFQFCNDPFLGVYYHKNNKSWMESEFRVYSSANNCTFEYVSQPFLMDLEGKQGNFKNLREFVFKNIDGYFKIYSKHTPINLVRDLPQGFSALEPLVDLPIGINITRFQTLLALHRSYLTPGDSSSGWTAGAAAYYVGYLQPRTFLLKYNENGTITDAVDCALDPLSETKCTLKSFTVEKGIYQTSNFRVQPTESIVRFPNITNLCPFGEVFNATRFASVYAWNRKRISNCVADYSVLYNSASFSTFKCYGVSPTKLNDLCFTNVYADSFVIRGDEVRQIAPGQTGKIADYNYKLPDDFTGCVISWNSNNLDSKVGGNYNYLYRLFRKSNLKPFERDISTEIYQAGSTPCNGVEGFNCYFPLQSYGFQPTNGVGYQPYRVVVLSFELLHAPATVCGPKKSTNLVKNKCVNFNFNGLTGTGVLTESNKKFLPFQQFGRDIADTTDAVRDPQTLEILDITPCSFGGVSVITPGTNTSNQVAVLYQGVNCTEVPVAIHADQLTPTWRVYSTGSNVFQTRAGCLIGAEHVNNSYECDIPIGAGICASYQTQTNSPRRARSVASQSIIAYTMSLGAENSVAYSNNSCAIPTNFTISVTTEILPVSMTKTSVDCTMYICGDSTECSNLLLQYGSFCTQLNRALTGIAVEQDKNTQEVFAQVKQIYKTPPIKDFGGFNFSQILPDPSKPSKRSFIEDLLFNKVTLADAGFIKQYGDCLGDIAARDLICAQKFNGLTVLPPLLTDEMIAQYTSALLAGTITSGWTFGAGAALQIPFAMQMAYRFNGIGVTQNVLYENQKLIANQFNSAIGKIQDSLSSTASALGKLQDVVNQNAQALNTLVKQLSSNFGAISSVLNDILSRLDKVEAEVQIDRLITGRLQSLQTYVTQQLIRAAEIRASANLAATKMSECVLGQSKRVDFCGKGYHLMSFPQSAPHGVVFLHVTYVPAQEKNFTCAPAICHDGKAHFPREGVFVSNGTHWFVTQRNFYEPQIITTDNTFVSGNCDVVIGIVNNTVYDPLQPELDSGGGSGGGQIYEGKLTAEGLRFGIVASRFNHALVDRLVEGAIDAIVRHGGREEDITLVRVPGSWEIPVAAGELARKEDIDAVIAIGVLIRGATPHFDYIASEVSKGLADLSLELRKPITFGVITADTLEQAIERAGTKHGNKGWEAALSAIEMANLFKSLR

SEQ ID NO: 8010 - protein, 1307 aa, Artificial Sequence
  SARS-CoV-2/France/GE1977/2020__EPI_ISL_414632 spike protein (1-1147)(I712C_T1077C) LumSynth construct
MFVFLVLLPLVSSQCVNLTTRTQLPPAYTNSFTRGVYYPDKVFRSSVLHSTQDLFLPFFSNVTWFHAIHVSGTNGTKRFDNPVLPFNDGVYFASTEKSNIIRGWIFGTTLDSKTQSLLIVNNATNVVIKVCEFQFCNDPFLGVYYHKNNKSWMESEFRVYSSANNCTFEYVSQPFLMDLEGKQGNFKNLREFVFKNIDGYFKIYSKHTPINLVRDLPQGFSALEPLVDLPIGINITRFQTLLALHRSYLTPGDSSSGWTAGAAAYYVGYLQPRTFLLKYNENGTITDAVDCALDPLSETKCTLKSFTVEKGIYQTSNFRVQPTESIVRFPNITNLCPFGEVFNATRFASVYAWNRKRISNCVADYSVLYNSASFSTFKCYGVSPTKLNDLCFTNVYADSFVIRGDEVRQIAPGQTGKIADYNYKLPDDFTGCVIAWNSNNLDSKVGGNYNYLYRLFRKSNLKPFERDISTEIYQAGSTPCNGVEGFNCYFPLQSYGFQPTNGVGYQPYRVVVLSFELLHAPATVCGPKKSTNLVKNKCVNFNFNGLTGTGVLTESNKKFLPFQQFGRDIADTTDAVRDPQTLEILDITPCSFGGVSVITPGTNTSNQVAVLYQGVNCTEVPVAIHADQLTPTWRVYSTGSNVFQTRAGCLIGAEHVNNSYECDIPIGAGICASYQTQTNSPRRARSVASQSIIAYTMSLGAENSVAYSNNSCAIPTNFTISVTTEILPVSMTKTSVDCTMYICGDSTECSNLLLQYGSFCTQLNRALTGIAVEQDKNTQEVFAQVKQIYKTPPIKDFGGFNFSQILPDPSKPSKRSFIEDLLFNKVTLADAGFIKQYGDCLGDIAARDLICAQKFNGLTVLPPLLTDEMIAQYTSALLAGTITSGWTFGAGAALQIPFAMQMAYRFNGIGVTQNVLYENQKLIANQFNSAIGKIQDSLFSTASALGKLQDVVNQNAQALNTLVKQLSSNFGAISSVLNDILSRLDKVEAEVQIDRLITGRLQSLQTYVTQQLIRAAEIRASANLAATKMSECVLGQSKRVDFCGKGYHLMSFPQSAPHGVVFLHVTYVPAQEKNFTCAPAICHDGKAHFPREGVFVSNGTHWFVTQRNFYEPQIITTDNTFVSGNCDVVIGIVNNTVYDPLQPELDSGGGSGGGQIYEGKLTAEGLRFGIVASRFNHALVDRLVEGAIDAIVRHGGREEDITLVRVPGSWEIPVAAGELARKEDIDAVIAIGVLIRGATPHFDYIASEVSKGLADLSLELRKPITFGVITADTLEQAIERAGTKHGNKGWEAALSAIEMANLFKSLR

SEQ ID NO: 8011 - protein, 1307 aa, Artificial Sequence
  SARS-CoV-2/Finland/FIN-313/2020__EPI_ISL_414641 spike protein (1-1147)(I712C_T1077C) LumSynth construct
MFVFLVLLPLVSSQCVNLTTRTQLPPAYTNSFTRGVYYPDKVFRSSVLHSTQDLFLPFFSNVTWFHAIHVSGTNGTKRFDNPVLPFNDGVYFASTEKSNIIRGWIFGTTLDSKTQSLLIVNNATNVVIKVCEFQFCNDPFLGVYYHKNNKSWMESEFRVYSSANNCTFEYVSQPFLMDLEGKQGNFKNLREFVFKNIDGYFKIYSKHTPINLVRDLPQGFSALEPLVDLPIGINITRFKTLLALHRSYLTPGDSSSGWTAGAAAYYVGYLQPRTFLLKYNENGTITDAVDCALDPLSETKCTLKSFTVEKGIYQTSNFRVQPTESIVRFPNITNLCPFGEVFNATRFASVYAWNRKRISNCVADYSVLYNSASFSTFKCYGVSPTKLNDLCFTNVYADSFVIRGDEVRQIAPGQTGKIADYNYKLPDDFTGCVIAWNSNNLDSKVGGNYNYLYRLFRKSNLKPFERDISTEIYQAGSTPCNGVEGFNCYFPLQSYGFQPTNGVGYQPYRVVVLSFELLHAPATVCGPKKSTNLVKNKCVNFNFNGLTGTGVLTESNKKFLPFQQFGRDIADTTDAVRDPQTLEILDITPCSFGGVSVITPGTNTSNQVAVLYQGVNCTEVPVAIHADQLTPTWRVYSTGSNVFQTRAGCLIGAEHVNNSYECDIPIGAGICASYQTQTNSPRRARSVASQSIIAYTMSLGAENSVAYSNNSCAIPTNFTISVTTEILPVSMTKTSVDCTMYICGDSTECSNLLLQYGSFCTQLNRALTGIAVEQDKNTQEVFAQVKQIYKTPPIKDFGGFNFSQILPDPSKPSKRSFIEDLLFNKVTLADAGFIKQYGDCLGDIAARDLICAQKFNGLTVLPPLLTDEMIAQYTSALLAGTITSGWTFGAGAALQIPFAMQMAYRFNGIGVTQNVLYENQKLIANQFNSAIGKIQDSLSSTASALGKLQDVVNQNAQALNTLVKQLSSNFGAISSVLNDILSRLDKVEAEVQIDRLITGRLQSLQTYVTQQLIRAAEIRASANLAATKMSECVLGQSKRVDFCGKGYHLMSFPQSAPHGVVFLHVTYVPAQEKNFTCAPAICHDGKAHFPREGVFVSNGTHWFVTQRNFYEPQIITTDNTFVSGNCDVVIGIVNNTVYDPLQPELDSGGGSGGGQIYEGKLTAEGLRFGIVASRFNHALVDRLVEGAIDAIVRHGGREEDITLVRVPGSWEIPVAAGELARKEDIDAVIAIGVLIRGATPHFDYIASEVSKGLADLSLELRKPITFGVITADTLEQAIERAGTKHGNKGWEAALSAIEMANLFKSLR

SEQ ID NO: 8012 - protein, 1307 aa, Artificial Sequence
  SARS-CoV-2/Netherlands/ZuidHolland_2/2020__EPI_ISL_414556 spike protein (1-1147)(I712C_T1077C) LumSynth construct
MFVFLVLLPLVSSQCVNLTTRTQLPPAYTNSFTRGVYYPDKVFRSSVLHSTQDLFLPFFSNVTWFHAIHVSGTNGTKRFDNPVLPFNDGVYFASTEKSNIIRGWIFGTTLDSKTQSLLIVNNATNVVIKVCEFQFCNDPFLGVYYHKNNKSWMESEFRVYSSANNCTFEYVSQPFLMDLEGKQGNFKNLREFVFKNIDGYFKIYSKHTPINLVRDLPQGFSALEPLVDLPIGINITRFQTLLALHRSYLTPGDSSSGWTAGAAAYYVGYLQPRTFLLKYNENGTITDAVDCALDPLSETKCTLKSFTVEKGIYQTSNFRVQPTESIVRFPNITNLCPFGEVFNATRFASVYAWNRKRISNCVADYSVLYNSASFSTFKCYGVSPTKLNDLCFTNVYADSFVIRGDEVRQIAPGQTGKIADYNYKLPDDFTGCVIAWNSNNLDSKVGGNYNYLYRLFRKSNLKPFERDISTEIYQAGSTPCNGVEGFNCYFPLQSYGFQPTNGVGYQPYRVVVLSFELLHAPATVCGPKKSTNLVKNKCVNFNFNGLTGTGVLTESNKKFLPFQQFGRDIADTTDAVRDPQTLEILDITPCSFGGVSVITPGTNTSNQVAVLYQGVNCTEVPVAIHADQLTPTWRVYSTGSNVFQTRAGCLIGAEHVNNSYECDIPIGAGICASYQTQTNSPRRARSVASQSIIAYTMSLGAENSVAYSNNSCAIPTNFTISVTTEILPVSMTKTSVDCTMYICGDSTECSNLLLQYGSFCTQLNRALTGIALEQDKNTQEVFAQVKQIYKTPPIKDFGGFNFSQILPDPSKPSKRSFIEDLLFNKVTLADAGFIKQYGDCLGDIAARDLICAQKFNGLTVLPPLLTDEMIAQYTSALLAGTITSGWTFGAGAALQIPFAMQMAYRFNGIGVTQNVLYENQKLIANQFNSAIGKIQDSLSSTASALGKLQDVVNQNAQALNTLVKQLSSNFGAISSVLNDILSRLDKVEAEVQIDRLITGRLQSLQTYVTQQLIRAAEIRASANLAATKMSECVLGQSKRVDFCGKGYHLMSFPQSAPHGVVFLHVTYVPAQEKNFTCAPAICHDGKAHFPREGVFVSNGTHWFVTQRNFYEPQIITTDNTFVSGNCDVVIGIVNNTVYDPLQPELDSGGGSGGGQIYEGKLTAEGLRFGIVASRFNHALVDRLVEGAIDAIVRHGGREEDITLVRVPGSWEIPVAAGELARKEDIDAVIAIGVLIRGATPHFDYIASEVSKGLADLSLELRKPITFGVITADTLEQAIERAGTKHGNKGWEAALSAIEMANLFKSLR

SEQ ID NO: 8013 - protein, 1307 aa, Artificial Sequence
  SARS-CoV-2/USA/WA-UW31/2020__EPI_ISL_414618 spike protein (1-1147)(I712C_T1077C) LumSynth construct
MFVFLVLLPLVSSQCVNLTTRTQLPPAYTNSFTRGVYYPDKVFRSSVLHSTQDLFLPFFSNVTWFHAIHVSGTNGTKRFDNPVLPFNDGVYFASTEKSNIIRGWIFGTTLDSKTQSLLIVNNATNVVIKVCEFQFCNDPFLGVYYHKNNKSWMESEFRVYSSANNCTFEYVSQPFLMDLEGKQGNFKNLREFVFKNIDGYFKIYSKHTPINLVRDLPQGFSALEPLVDLPIGINITRFQTLLALHRSYLTPGDSSSGWTAGAAAYYVGYLQPRTFLLKYNENGTITDAVDCALDPLSETKCTLKSFTVEKGIYQTSNFRVQPTESIVRFPNITNLCPFGEVFNATRFASVYAWNRKRISNCVADYSVLYNSASFSTFKCYGVSPTKLNDLCFTNVYADSFVIRGDEVRQIAPGQTGKIADYNYKLPDDFTGCVIAWNSNNLDSKVGGNYNYLYRLFRKSNLKPFERDISTEIYQAGSTPCNGAEGFNCYFPLQSYGFQPTNGVGYQPYRVVVLSFELLHAPATVCGPKKSTNLVKNKCVNFNFNGLTGTGVLTESNKKFLPFQQFGRDIADTTDAVRDPQTLEILDITPCSFGGVSVITPGTNTSNQVAVLYQDVNCTEVPVAIHADQLTPTWRVYSTGSNVFQTRAGCLIGAEHVNNSYECDIPIGAGICASYQTQTNSPRRARSVASQSIIAYTMSLGAENSVAYSNNSCAIPTNFTISVTTEILPVSMTKTSVDCTMYICGDSTECSNLLLQYGSFCTQLNRALTGIAVEQDKNTQEVFAQVKQIYKTPPIKDFGGFNFSQILPDPSKPSKRSFIEDLLFNKVTLADAGFIKQYGDCLGDIAARDLICAQKFNGLTVLPPLLTDEMIAQYTSALLAGTITSGWTFGAGAALQIPFAMQMAYRFNGIGVTQNVLYENQKLIANQFNSAIGKIQDSLSSTASALGKLQDVVNQNAQALNTLVKQLSSNFGAISSVLNDILSRLDKVEAEVQIDRLITGRLQSLQTYVTQQLIRAAEIRASANLAATKMSECVLGQSKRVDFCGKGYHLMSFPQSAPHGVVFLHVTYVPAQEKNFTCAPAICHDGKAHFPREGVFVSNGTHWFVTQRNFYEPQIITTDNTFVSGNCDVVIGIVNNTVYDPLQPELDSGGGSGGGQIYEGKLTAEGLRFGIVASRFNHALVDRLVEGAIDAIVRHGGREEDITLVRVPGSWEIPVAAGELARKEDIDAVIAIGVLIRGATPHFDYIASEVSKGLADLSLELRKPITFGVITADTLEQAIERAGTKHGNKGWEAALSAIEMANLFKSLR

SEQ ID NO: 8014 - protein, 1307 aa, Artificial Sequence
  SARS-CoV-2/South Korea/SNU01/2020__EPI_ISL_411929 spike protein (1-1147)(I712C_T1077C) LumSynth construct
MFVFLVLLPLVSSQCVNLTTRTQLPPAYTNSFTRGVYYPDKVFRSSVLHSTQDLFLPFFSNVTWFHAIHVSGTNGTKRFDNPVLPFNDGVYFASTEKSNIIRGWIFGTTLDSKTQSLLIVNNATNVVIKVCEFQFCNDPFLGVYYHKNNKSWMESEFRVYSSANNCTFEYVSQPFLMDLEGKQGNFKNLREFVFKNIDGYFKIYSKHTPINLVRDLPQGFWALEPLVDLPIGINITRFQTLLALHRSYLTPGDSSSGWTAGAAAYYVGYLQPRTFLLKYNENGTITDAVDCALDPLSETKCTLKSFTVEKGIYQTSNFRVQPTESIVRFPNITNLCPFGEVFNATRFASVYAWNRKRISNCVADYSVLYNSASFSTFKCYGVSPTKLNDLCFTNVYADSFVIRGDEVRQIAPGQTGKIADYNYKLPDDFTGCVIAWNSNNLDSKVGGNYNYLYRLFRKSNLKPFERDISTEIYQAGSTPCNGVEGFNCYFPLQSYGFQPTNGVGYQPYRVVVLSFELLHAPATVCGPKKSTNLVKNKCVNFNFNGLTGTGVLTESNKKFLPFQQFGRDIADTTDAVRDPQTLEILDITPCSFGGVSVITPGTNTSNQVAVLYQDVNCTEVPVAIHADQLTPTWRVYSTGSNVFQTRAGCLIGAEHVNNSYECDIPIGAGICASYQTQTNSPRRARSVASQSIIAYTMSLGAENSVAYSNNSCAIPTNFTISVTTEILPVSMTKTSVDCTMYICGDSTECSNLLLQYGSFCTQLNRALTGIAVEQDKNTQEVFAQVKQIYKTPPIKDFGGFNFSQILPDPSKPSKRSFIEDLLFNKVTLADAGFIKQYGDCLGDIAARDLICAQKFNGLTVLPPLLTDEMIAQYTSALLAGTITSGWTFGAGAALQIPFAMQMAYRFNGIGVTQNVLYENQKLIANQFNSAIGKIQDSLSSTASALGKLQDVVNQNAQALNTLVKQLSSNFGAISSVLNDILSRLDKVEAEVQIDRLITGRLQSLQTYVTQQLIRAAEIRASANLAATKMSECVLGQSKRVDFCGKGYHLMSFPQSAPHGVVFLHVTYVPAQEKNFTCAPAICHDGKAHFPREGVFVSNGTHWFVTQRNFYEPQIITTDNTFVSGNCDVVIGIVNNTVYDPLQPELDSGGGSGGGQIYEGKLTAEGLRFGIVASRFNHALVDRLVEGAIDAIVRHGGREEDITLVRVPGSWEIPVAAGELARKEDIDAVIAIGVLIRGATPHFDYIASEVSKGLADLSLELRKPITFGVITADTLEQAIERAGTKHGNKGWEAALSAIEMANLFKSLR

SEQ ID NO: 8015 - protein, 1307 aa, Artificial Sequence
  SARS-CoV-2/China/WF0004/2020__EPI_ISL_413694 spike protein (1-1147)(I712C_T1077C) LumSynth construct
MFVFLVLLPLVSSQCVNLTTRTQLPPAYTNSFTRGVYYPDKVFRSSVLHSTQDLFLPFFSNVTWFHAIHVSGTNGTKRFDNPVLPFNDGVYFASTEKSNIIRGWIFGTTLDSKTQSLLIVNNATNVVIKVCEFQFCNDPFLGVYYHKNNKSWTESEFRVYSSANNCTFEYVSQPFLMDLEGKQGNFKNLREFVFKNIDGYFKIYSKHTPINLVRDLPQGFSALEPLVDLPIGINITRFQTLLALHRSYLTPGDSSSGWTAGAAAYYVGYLQPRTFLLKYNENGTITDAVDCALDPLSETKCTLKSFTVEKGIYQTSNFRVQPTESIVRFPNITNLCPFGEVFNATRFASVYAWNRKRISNCVADYSVLYNSASFSTFKCYGVSPTKLNDLCFTNVYADSFVIRGDEVRQIAPGQTGKIADYNYKLPDDFTGCVIAWNSNNLDSKVGGNYNYLYRLFRKSNLKPFERDISTEIYQAGSTPCNGVEGFNCYFPLQSYGFQPTNGVGYQPYRVVVLSFELLHAPATVCGPKKSTNLVKNKCVNFNFNGLTGTGVLTESNKKFLPFQQFGRDIADTTDAVRDPQTLEILDITPCSFGGVSVITPGTNTSNQVAVLYQDVNCTEVPVAIHADQLTPTWRVYSTGSNVFQTRAGCLIGAEHVNNSYECDIPIGAGICASYQTQTNSPRRARSVASQSIIAYTMSLGAENSVAYSNNSCAIPTNFTISVTTEILPVSMTKTSVDCTMYICGDSTECSNLLLQYGSFCTQLNRALTGIAVEQDKNTQEVFAQVKQIYKTPPIKDFGGFNFSQILPDPSKPSKRSFIEDLLFNKVTLADAGFIKQYGDCLGDIAARDLICAQKFNGLTVLPPLLTDEMIAQYTSALLAGTITSGWTFGAGAALQIPFAMQMAYRFNGIGVTQNVLYENQKLIANQFNSAIGKIQDSLSSTASALGKLQDVVNQNAQALNTLVKQLSSNFGAISSVLNDILSRLDKVEAEVQIDRLITGRLQSLQTYVTQQLIRAAEIRASANLAATKMSECVLGQSKRFDFCGKGYHLMSFPQSAPHGVVFLHVTYVPAQEKNFTCAPAICHDGKAHFPREGVFVSNGTHWFVTQRNFYEPQIITTDNTFVSGNCDVVIGIVNNTVYDPLQPELDSGGGSGGGQIYEGKLTAEGLRFGIVASRFNHALVDRLVEGAIDAIVRHGGREEDITLVRVPGSWEIPVAAGELARKEDIDAVIAIGVLIRGATPHFDYIASEVSKGLADLSLELRKPITFGVITADTLEQAIERAGTKHGNKGWEAALSAIEMANLFKSLR

SEQ ID NO: 8016 - protein, 1307 aa, Artificial Sequence
  SARS-CoV-2/China/WF0028/2020__EPI_ISL_413791 spike protein (1-1147)(I712C_T1077C) LumSynth construct
MFVFLVLLPLVSSQCVNLTTRTQLPPAYTNSFTRGVYYPDKVFRSSVLHSTQDLFLPFFSNVTWFHAIHVSGTNGTKRFDNPVLPFNDGVYFASTEKSNIIRGWIFGTTLDSKTQSLLIVNNATNVVIKVCEFQFCNDPFLGVYYHKNNKSWMESEFRVYSSANNCTFEYVSQPFLMDLEGKQGNFKNLREFVFKNIDGYFKIYSKHTPINLVRDLPQGFSALEPLVDLPIGINITRFQTLLALHRSYLTPGDSSSGWTAGAAAYYVGYLQPRTFLLKYNENGTITDAVDCALDPLSETKCTLKSFTVEKGIYQTSNFRVQPTESIVRFPNITNLCPFGEVFNATRFASVYAWNRKRISNCVADYSVLYNSASFSTFKCYGVSPTKLNDLCFTNVYADSFVIRGDEVRQIAPGQTGKIADYNYKLPDDFTGCVIAWNSNNLDSKVGGNYNYLYRLFRKSNLKPFERDISTEIYQAGSTPCNGVEGFNCYFPLQSYGFQPTNGVGYQPYRVVVLSFELLHAPATVCGPKKSTNLVKNKCVNFNFNGLTGTGVLTESNKKFLPFQQFGRDIADTTDAVRDPQTLEILDITPCSFGGVSVITPGTNTSNQVAVLYQDVNCTEVPVAIHADQLTPTWRVYSTGSNVFQTRAGCLIGAEHVNNSYECDIPIGAGICASYQTQTNSPRRARSVASQSIIAYTMSLGAENSVAYSNNSCAIPTNFTISVTTEILPVSMTKTSVDCTMYICGDSTECSNLLLQYGSFCTQLNRALTGIAVEQDKNTQEVFAQVKQIYKTPPIKDFGGFNFSQILPDPSKPSKRSFIEDLLFNKVTLADAGFIKQYGDCLGDIAARDLICAQKFNGLTVLPPLLTDEMIAQYTSALLAGTITSGWTFGAGAALQIPFAMQMAYRFNGIGVTQNVLYENQKLIANQFNSAIGKIQDSLSSTASALGKLQDVVNQNAQALNTLVKQLSSNFGAISSVLNDILSRLDKVEAEVQIDRLITGRLQSLQTYVTQQLIRAAEIRASANLAATKMSECVLGQSKRVDFCGKGYHLMSFPQSAPHGVVFLHVTYVPAQEKNFTCAPAICHDGKAHFPREGVFVSNGTHWFVTQRNFYEPQIITTDNTFVSGNCDVVIGIVNNTVYDPLQPELESGGGSGGGQIYEGKLTAEGLRFGIVASRFNHALVDRLVEGAIDAIVRHGGREEDITLVRVPGSWEIPVAAGELARKEDIDAVIAIGVLIRGATPHFDYIASEVSKGLADLSLELRKPITFGVITADTLEQAIERAGTKHGNKGWEAALSAIEMANLFKSLR

SEQ ID NO: 8017 - protein, 1307 aa, Artificial Sequence
  SARS-CoV-2/2019-nCoV/USA-CruiseA-18/2020__MT159716.1 spike protein (1-1147)(I712C_T1077C) LumSynth construct
MFVFLVLLPLVSSQCVNLTTRTQLPPAYTNSFTRGVYYPDKVFRSSVLHSTQDLFLPFFSNVTWFHAIHVSGTNGTKRFDNPVLPFNDGVYFASTEKSNIIRGWIFGTTLDSKTQSLLIVNNATNVVIKVCEFQFCNDPFLGVYYHKNNKSWMESELRVYSSANNCTFEYVSQPFLMDLEGKQGNFKNLREFVFKNIDGYFKIYSKHTPINLVRDLPQGFSALEPLVDLPIGINITRFQTLLALHRSYLTPGDSSSGWTAGAAAYYVGYLQPRTFLLKYNENGTITDAVDCALDPLSETKCTLKSFTVEKGIYQTSNFRVQPTESIVRFPNITNLCPFGEVFNATRFASVYAWNRKRISNCVADYSVLYNSASFSTFKCYGVSPTKLNDLCFTNVYADSFVIRGDEVRQIAPGQTGKIADYNYKLPDDFTGCVIAWNSNNLDSKVGGNYNYLYRLFRKSNLKPFERDISTEIYQAGSTPCNGVEGFNCYFPLQSYGFQPTNGVGYQPYRVVVLSFELLHAPATVCGPKKSTNLVKNKCVNFNFNGLTGTGVLTESNKKFLPFQQFGRDIADTTDAVRDPQTLEILDITPCSFGGVSVITPGTNTSNQVAVLYQDVNCTEVPVAIHADQLTPTWRVYSTGSNVFQTRAGCLIGAEHVNNSYECDIPIGAGICASYQTQTNSPRRARSVASQSIIAYTMSLGAENSVAYSNNSCAIPTNFTISVTTEILPVSMTKTSVDCTMYICGDSTECSNLLLQYGSFCTQLNRALTGIAVEQDKNTQEVFAQVKQIYKTPPIKDFGGFNFSQILPDPSKPSKRSFIEDLLFNKVTLADAGFIKQYGDCLGDIAARDLICAQKFNGLTVLPPLLTDEMIAQYTSALLAGTITSGWTFGAGAALQIPFAMQMAYRFNGIGVTQNVLYENQKLIANQFNSAIGKIQDSLSSTASALGKLQDVVNQNAQALNTLVKQLSSNFGAISSVLNDILSRLDKVEAEVQIDRLITGRLQSLQTYVTQQLIRAAEIRASANLAATKMSECVLGQSKRVDFCGKGYHLMSFPQSAPHGVVFLHVTYVPAQEKNFTCAPAICHDGKAHFPREGVFVSNGTHWFVTQRNFYEPQIITTDNTFVSGNCDVVIGIVNNTVYDPLQPELDSGGGSGGGQIYEGKLTAEGLRFGIVASRFNHALVDRLVEGAIDAIVRHGGREEDITLVRVPGSWEIPVAAGELARKEDIDAVIAIGVLIRGATPHFDYIASEVSKGLADLSLELRKPITFGVITADTLEQAIERAGTKHGNKGWEAALSAIEMANLFKSLR

SEQ ID NO: 8018 - protein, 1307 aa, Artificial Sequence
  SARS-CoV-2/SARS-CoV-2/Yunnan-01/human/2020/CHN__MT049951.1 spike protein (1-1147)(I712C_T1077C) LumSynth construct
MFVFLVLLPLVSSQCVNLTTRTQLPPANTNSFTRGVYYPDKVFRSSVLHSTQDLFLPFFSNVTWFHAIHVSGTNGTKRFDNPVLPFNDGVYFASTEKSNIIRGWIFGTTLDSKTQSLLIVNNATNVVIKVCEFQFCNDPFLGVYYHKNNKSWMESEFRVYSSANNCTFEYVSQPFLMDLEGKQGNFKNLREFVFKNIDGYFKIYSKHTPINLVRDLPQGFSALEPLVDLPIGINITRFQTLLALHRSYLTPGDSSSGWTAGAAAYYVGYLQPRTFLLKYNENGTITDAVDCALDPLSETKCTLKSFTVEKGIYQTSNFRVQPTESIVRFPNITNLCPFGEVFNATRFASVYAWNRKRISNCVADYSVLYNSASFSTFKCYGVSPTKLNDLCFTNVYADSFVIRGDEVRQIAPGQTGKIADYNYKLPDDFTGCVIAWNSNNLDSKVGGNYNYLYRLFRKSNLKPFERDISTEIYQAGSTPCNGVEGFNCYFPLQSYGFQPTNGVGYQPYRVVVLSFELLHAPATVCGPKKSTNLVKNKCVNFNFNGLTGTGVLTESNKKFLPFQQFGRDIADTTDAVRDPQTLEILDITPCSFGGVSVITPGTNTSNQVAVLYQDVNCTEVPVAIHADQLTPTWRVYSTGSNVFQTRAGCLIGAEHVNNSYECDIPIGAGICASYQTQTNSPRRARSVASQSIIAYTMSLGAENSVAYSNNSCAIPTNFTISVTTEILPVSMTKTSVDCTMYICGDSTECSNLLLQYGSFCTQLNRALTGIAVEQDKNTQEVFAQVKQIYKTPPIKDFGGFNFSQILPDPSKPSKRSFIEDLLFNKVTLADAGFIKQYGDCLGDIAARDLICAQKFNGLTVLPPLLTDEMIAQYTSALLAGTITSGWTFGAGAALQIPFAMQMAYRFNGIGVTQNVLYENQKLIANQFNSAIGKIQDSLSSTASALGKLQDVVNQNAQALNTLVKQLSSNFGAISSVLNDILSRLDKVEAEVQIDRLITGRLQSLQTYVTQQLIRAAEIRASANLAATKMSECVLGQSKRVDFCGKGYHLMSFPQSAPHGVVFLHVTYVPAQEKNFTCAPAICHDGKAHFPREGVFVSNGTHWFVTQRNFYEPQIITTDNTFVSGNCDVVIGIVNNTVYDPLQPELDSGGGSGGGQIYEGKLTAEGLRFGIVASRFNHALVDRLVEGAIDAIVRHGGREEDITLVRVPGSWEIPVAAGELARKEDIDAVIAIGVLIRGATPHFDYIASEVSKGLADLSLELRKPITFGVITADTLEQAIERAGTKHGNKGWEAALSAIEMANLFKSLR

SEQ ID NO: 8019 - protein, 1307 aa, Artificial Sequence
  SARS-CoV-2/USA/WA-UW292/2020__EPI_ISL_418077 spike protein (1-1147)(I712C_T1077C) LumSynth construct
MFVFLVLLPLVSSQCVNLTTRTQLPPAYTNSFTRGVYYPDKVFRSSVLHSTQDLFLPFFSNVTWFHAIHVSGTNGTKRFDNPVLPFNDGVYFASTEKSNIIRGWIFGTTLDSKTQSLLIVNNATNVVIKVCEFQFCNDPFLGVYYHKNNKSWMESEFRVYSSANNCTFEYVSQPFLMDLEGKQGNFKNLREFVFKNIDGYFKIYSKHTPINLVRDLPQGFSALEPLVDLPIGINITRFQTLLALHRSYLTPGDSSSGWTAGAAAYYVGYLQPRTFLLKYNENGTITDAVDCALDPLSETKCTLKSFTVEKGIYQTSNFRVQPTESIVRFPNITNLCPFGEVFNATRFASVYAWNRKRISNCVADYSVLYNSASFSTFKCYGVSPTKLNDLCFTNVYADSFVIRGDEVRQIAPGQTGKIADYNYKLPDDFTGCVIAWNSNNLDSKVGGNYNYLYRLFRKSNLKPFERDISTEIYQASSTPCNGVEGFNCYFPLQSYGFQPTNGVGYQPYRVVVLSFELLHAPATVCGPKKSTNLVKNKCVNFNFNGLTGTGVLTESNKKFLPFQQFGRDIADTTDAVRDPQTLEILDITPCSFGGVSVITPGTNTSNQVAVLYQDVNCTEVPVAIHADQLTPTWRVYSTGSNVFQTRAGCLIGAEHVNNSYECDIPIGAGICASYQTQTNSPRRARSVASQSIIAYTMSLGAENSVAYSNNSCAIPTNFTISVTTEILPVSMTKTSVDCTMYICGDSTECSNLLLQYGSFCTQLNRALTGIAVEQDKNTQEVFAQVKQIYKTPPIKDFGGFNFSQILPDPSKPSKRSFIEDLLFNKVTLADAGFIKQYGDCLGDIAARDLICAQKFNGLTVLPPLLTDEMIAQYTSALLAGTITSGWTFGAGAALQIPFAMQMAYRFNGIGVTQNVLYENQKLIANQFNSAIGKIQDSLSSTASALGKLQDVVNQNAQALNTLVKQLSSNFGAISSVLNDILSRLDKVEAEVQIDRLITGRLQSLQTYVTQQLIRAAEIRASANLAATKMSECVLGQSKRVDFCGKGYHLMSFPQSAPHGVVFLHVTYVPAQEKNFTCAPAICHDGKAHFPREGVFVSNGTHWFVTQRNFYEPQIITTDNTFVSGNCDVVIGIVNNTVYDPLQPELDSGGGSGGGQIYEGKLTAEGLRFGIVASRFNHALVDRLVEGAIDAIVRHGGREEDITLVRVPGSWEIPVAAGELARKEDIDAVIAIGVLIRGATPHFDYIASEVSKGLADLSLELRKPITFGVITADTLEQAIERAGTKHGNKGWEAALSAIEMANLFKSLR

SEQ ID NO: 8020 - protein, 1307 aa, Artificial Sequence
  SARS-CoV-2/Iceland/192/2020__EPI_ISL_417819 spike protein (1-1147)(I712C_T1077C) LumSynth construct
MFVFFVLLPLVSSQCVNLTTRTQLPPAYTNSFTRGVYYPDKVFRSSVLHSTQDLFLPFFSNVTWFHAIHVSGTNGTKRFDNPVLPFNDGVYFASTEKSNIIRGWIFGTTLDSKTQSLLIVNNATNVVIKVCEFQFCNDPFLGVYYHKNNKSWMESEFRVYSSANNCTFEYVSQPFLMDLEGKQGNFKNLREFVFKNIDGYFKIYSKHTPINLVRDLPQGFSALEPLVDLPIGINITRFQTLLALHRSYLTPGDSSSGWTAGAAAYYVGYLQPRTFLLKYNENGTITDAVDCALDPLSETKCTLKSFTVEKGIYQTSNFRVQPTESIVRFPNITNLCPFGEVFNATRFASVYAWNRKRISNCVADYSVLYNSASFSTFKCYGVSPTKLNDLCFTNVYADSFVIRGDEVRQIAPGQTGKIADYNYKLPDDFTGCVIAWNSNNLDSKVGGNYNYLYRLFRKSNLKPFERDISTEIYQAGSTPCNGVEGFNCYFPLQSYGFQPTNGVGYQPYRVVVLSFELLHAPATVCGPKKSTNLVKNKCVNFNFNGLTGTGVLTESNKKFLPFQQFGRDIADTTDAVRDPQTLEILDITPCSFGGVSVITPGTNTSNQVAVLYQGVNCTEVPVAIHADQLTPTWRVYSTGSNVFQTRAGCLIGAEHVNNSYECDIPIGAGICASYQTQTNSPRRARSVASQSIIAYTMSLGAENSVAYSNNSCAIPTNFTISVTTEILPVSMTKTSVDCTMYICGDSTECSNLLLQYGSFCTQLNRALTGIAVEQDKNTQEVFAQVKQIYKTPPIKDFGGFNFSQILPDPSKPSKRSFIEDLLFNKVTLADAGFIKQYGDCLGDIAARDLICAQKFNGLTVLPPLLTDEMIAQYTSALLAGTITSGWTFGAGAALQIPFAMQMAYRFNGIGVTQNVLYENQKLIANQFNSAIGKIQDSLSSTASALGKLQDVVNQNAQALNTLVKQLSSNFGAISSVLNDILSRLDKVEAEVQIDRLITGRLQSLQTYVTQQLIRAAEIRASANLAATKMSECVLGQSKRVDFCGKGYHLMSFPQSAPHGVVFLHVTYVPAQEKNFTCAPAICHDGKAHFPREGVFVSNGTHWFVTQRNFYEPQIITTDNTFVSGNCDVVIGIVNNTVYDPLQPELDSGGGSGGGQIYEGKLTAEGLRFGIVASRFNHALVDRLVEGAIDAIVRHGGREEDITLVRVPGSWEIPVAAGELARKEDIDAVIAIGVLIRGATPHFDYIASEVSKGLADLSLELRKPITFGVITADTLEQAIERAGTKHGNKGWEAALSAIEMANLFKSLR

SEQ ID NO: 8021 - protein, 1307 aa, Artificial Sequence
  SARS-CoV-2/Belgium/ULG-6939/2020__EPI_ISL_417020 spike protein (1-1147)(I712C_T1077C) LumSynth construct
MFVFLVLLPLVSSQCVNLTTRTQLPPAYTNSFTRGVYYPDKVFRSSVLHSTQDLFLPFFSNVTWFHAIHVSGTNGTKRFDNPVLPFNDGVYFASTEKSNIIRGWIFGTTLDSKTQSLLIVNNATNVVIKVCEFQFCNDPFLGVYYHKNNKSWMESEFRVYSSANNCTFEYVSQPFLMDLEGKQGNFKNLREFVFKNIDGYFKIYSKHTPINLVRDLPQGFSALEPLVDLPIGINITRFQTLLALHRSYLTPGDSSSGWTAGAAAYYVGYLQPRTFLLKYNENGTITDAVDCALDPLSETKCTLKSFTVEKGIYQTSNFRVQPTESIVRFPNITNLCPFGEVFNATRFASVYAWNRKRISNCVADYSVLYNSASFSTFKCYGVSPTKLNDLCFTNVYADSFVIRGDEVRQIAPGQTGKIADYNYKLPDDFTGCVIAWNSNNLDSKVGGNYNYLYRLFRKSNLKPFERDISTEIYQAGSTPCNGVEGFNCYFPLQSYGFQPTNGVGYQPYRVVVLSFELLHAPATVCGPKKSTNLVKNKCVNFNFNGLTGTGVLTESNKKFLPFQQFGRDIADTTDAVRDPQTLEILDITPCSFGGVSVITPGTNTSNQVAVLYQGVNCTEVPVAIHADQLTPTWRVYSTGSNVFQTRAGCLIGAEHVNNSYECDIPIGAGICASYQTQTNSPRRARSVASQSIIAYTMSLGAENSVVYSNNSCAIPTNFTISVTTEILPVSMTKTSVDCTMYICGDSTECSNLLLQYGSFCTQLNRALTGIAVEQDKNTQEVFAQVKQIYKTPPIKDFGGFNFSQILPDPSKPSKRSFIEDLLFNKVTLADAGFIKQYGDCLGDIAARDLICAQKFNGLTVLPPLLTDEMIAQYTSALLAGTITSGWTFGAGAALQIPFAMQMAYRFNGIGVTQNVLYENQKLIANQFNSAIGKIQDSLSSTASALGKLQDVVNQNAQALNTLVKQLSSNFGAISSVLNDILSRLDKVEAEVQIDRLITGRLQSLQTYVTQQLIRAAEIRASANLAATKMSECVLGQSKRVDFCGKGYHLMSFPQSAPHGVVFLHVTYVPAQEKNFTCAPAICHDGKAHFPREGVFVSNGTHWFVTQRNFYEPQIITTDNTFVSGNCDVVIGIVNNTVYDPLQPELDSGGGSGGGQIYEGKLTAEGLRFGIVASRFNHALVDRLVEGAIDAIVRHGGREEDITLVRVPGSWEIPVAAGELARKEDIDAVIAIGVLIRGATPHFDYIASEVSKGLADLSLELRKPITFGVITADTLEQAIERAGTKHGNKGWEAALSAIEMANLFKSLR

SEQ ID NO: 8022 - protein, 1307 aa, Artificial Sequence
  SARS-CoV-2/France/HF2496/2020__EPI_ISL_418231 spike protein (1-1147)(I712C_T1077C) LumSynth construct
MFVFLVLLPLVSSQCVNLTTRTQLPPAYTNSFTRGVYYPDKVFRSSVLHSTQDLFLPFFSNVTWFHAIHVSGTNGTKRFDNPVLPFNDGVYFASTEKSNIIRGWIFGTTLDSKTQSLLIVNNATNVVIKVCEFQFCNDPFLGVYYHKNNKSWMESEFRVYSSANNCTFEYVSQPFLMDLEGKQGNFKNLREFVFKNIDGYFKIYSKHTPINLVRDLPQGFSALEPLVDLPIGINITRFQTLLALHRSYLTPGDSSSGWTAGAAAYYVGYLQPRTFLLKYNENGTITDAVDCALDPLSETKCTLKSFTVEKGIYQTSNFRVQPTESIVRFPNITNLCPFGEVFNATRFASVYAWNRKRISNCVADYSVLYNSASFSTFKCYGVSPTKLNDLCFTNVYADSFVIRGDEVRQIAPGQTGKIADYNYKLPDDFTGCVIAWNSNNLDSKVGGNYNYLYRLFRKSNLKPFERDISTEIYQAGSTPCNGVEGFNCYFPLQSYGFQPTNGVGYQPYRVVVLSFELLHAPATVCGPKKSTNLVKNKCVNFNFNGLTGTGVLTESNKKFLPFQQFGRDIADTTDAVRDPQTLEILDITPCSFGGVSVITPGTNTSNQVAVLYQGVNCTEVPVAIHADQLTPTWRVYSTGSNVFQTRAGCLIGAEHVNNSYECDIPIGAGICASYQTQTNSPRRARSVASQSIIAYTMSLGAENSVAYSNNSCAIPTNFTISVTTEILPVSMTKTSVDCTMYICGDSTECSNLLLQYGSFCTQLNRALTGIAVEQDKNTQEVFAQVKQIYKTPPIKDFGGFNFSQILPDPSKPSKRSFIEDLLFNKVTLADAGFIKQYGDCLGDIVARDLICAQKFNGLTVLPPLLTDEMIAQYTSALLAGTITSGWTFGAGAALQIPFAMQMAYRFNGIGVTQNVLYENQKLIANQFNSAIGKIQDSLSSTASALGKLQDVVNQNAQALNTLVKQLSSNFGAISSVLNDILSRLDKVEAEVQIDRLITGRLQSLQTYVTQQLIRAAEIRASANLAATKMSECVLGQSKRVDFCGKGYHLMSFPQSAPHGVVFLHVTYVPAQEKNFTCAPAICHDGKAHFPREGVFVSNGTHWFVTQRNFYEPQIITTDNTFVSGNCDVVIGIVNNTVYDPLQPELDSGGGSGGGQIYEGKLTAEGLRFGIVASRFNHALVDRLVEGAIDAIVRHGGREEDITLVRVPGSWEIPVAAGELARKEDIDAVIAIGVLIRGATPHFDYIASEVSKGLADLSLELRKPITFGVITADTLEQAIERAGTKHGNKGWEAALSAIEMANLFKSLR

SEQ ID NO: 8023 - protein, 1307 aa, Artificial Sequence
  SARS-CoV-2/USA/WA-UW291/2020__EPI_ISL_418076 spike protein (1-1147)(I712C_T1077C) LumSynth construct
MFVFLVLLPLVSSQCVNLTTRTQLPPAYTNSFTRGVYYPDKVFRSSVLHSTQDLFLPFFSNVTWFHAIHVSGTNGTKRFDNPVLPFNDGVYFASTEKSNIIRGWIFGTTLDSKTQSLLIVNNATNVVIKVCEFQFCNDPFLGVYYHKNNKSWMESEFRVYSSANNCTFEYVSQPFLMDLEGKQGNFKNLREFVFKNIDGYFKIYSKHTPINLVRDLPQGFSALEPLVDLPIGINITRFQTLLALHRSYLTPGDSSSGWTAGAAAYYVGYLQPRTFLLKYNENGTITDAVDCALDPLSETKCTLKSFTVEKGIYQTSNFRVQPTESIVRFPNITNLCPFGEVFNATRFASVYAWNRKRISNCVADYSVLYNSASFSTFKCYGVSPTKLNDLCFTNVYADSFVIRGDEVRQIAPGQTGKIADYNYKLPDDFTGCVIAWNSNNLDSKVGGNYNYLYRLFRKSNLKPFERDISTEIYQAGSTPCNGVEGFNCYFPLQSYGFQPTNGVGYQPYRVVVLSFELLHAPATVCGPKKSTNLVKNKCVNFNFNGLTGTGVLTESNKKFLPFQQFGRDIADTTDAVRDPQTLEILDITPCSFGGVSVITPGTNTSNQVAVLYQGVNCTEVPVAIHADQLTPTWRVYSTGSNVFQTRAGCLIGAEHVNNSYECDIPIGAGICASYQTQTNSPRRARSVASQSIIAYTMSLGAENSVAYSNNSCAIPTNFTISVTTEILPVSMTKTSVDCTMYICGDSTECSNLLLQYGSFCTQLNRALTGIAVEQDKNTQEVFAQVKQIYKTPPIKDFGGFNFSQILPDPSKPSKRSFIEDLLFNKVTLADAGFIKQYGDCLGDIAARDLICAQKFNGLTVLPPLLTDEMIAQYTSALLAGTITSGWTFGAGAALQIPFAMQMAYRFNGIGVTQNVLYENQKLIANQFNSAIGKIQYSLSSTASALGKLQDVVNQNAQALNTLVKQLSSNFGAISSVLNDILSRLDKVEAEVQIDRLITGRLQSLQTYVTQQLIRAAEIRASANLAATKMSECVLGQSKRVDFCGKGYHLMSFPQSAPHGVVFLHVTYVPAQEKNFTCAPAICHDGKAHFPREGVFVSNGTHWFVTQRNFYEPQIITTDNTFVSGNCDVVIGIVNNTVYDPLQPELDSGGGSGGGQIYEGKLTAEGLRFGIVASRFNHALVDRLVEGAIDAIVRHGGREEDITLVRVPGSWEIPVAAGELARKEDIDAVIAIGVLIRGATPHFDYIASEVSKGLADLSLELRKPITFGVITADTLEQAIERAGTKHGNKGWEAALSAIEMANLFKSLR

SEQ ID NO: 8024 - protein, 1307 aa, Artificial Sequence; identical to SEQ ID NO: 7987
  SARS-CoV-2/Portugal/PT0034/2020__EPI_ISL_418019 spike protein (1-1147)(I712C_T1077C) LumSynth construct

SEQ ID NO: 8025 - protein, 1307 aa, Artificial Sequence; identical to SEQ ID NO: 7979
  SARS-CoV-2/Iceland/202/2020__EPI_ISL_417750 spike protein (1-1147)(I712C_T1077C) LumSynth construct

SEQ ID NO: 8026 - protein, 1307 aa, Artificial Sequence
  SARS-CoV-2/USA/WA-UW261/2020__EPI_ISL_418046 spike protein (1-1147)(I712C_T1077C) LumSynth construct
MFVFLVLLPLVSSQCVNLTTRTQLPPAYTNSFTRGVYYPDKVFRSSVLHSTQDLFLPFFSNVTWFHAIHVSGTNGTKRFDNPVLPFNDGVYFASTEKSNIIRGWIFGTTLDSKTQSLLIVNNATNVVIKVCEFQFCNDPFLGVYYHKNNKSWMESEFRVYSSANNCTFEYVSQPFLMDLEGKQGNFKNLREFVFKNIDGYFKIYSKHTPINLVRDLPQGFSALEPLVDLPIGINITRFQTLLALHRSYLTPGDSSSGWTAGAAAYYVGYLQPRTFLLKYNENGTITDAVDCALDPLSETKCTLKSFTVEKGIYQTSNFRVQPTESIVRFPNITNLCPFGEVFNATRFTSVYAWNRKRISNCVADYSVLYNSASFSTFKCYGVSPTKLNDLCFTNVYADSFVIRGDEVRQIAPGQTGKIADYNYKLPDDFTGCVIAWNSNNLDSKVGGNYNYLYRLFRKSNLKPFERDISTEIYQAGSTPCNGVEGFNCYFPLQSYGFQPTNGVGYQPYRVVVLSFELLHAPATVCGPKKSTNLVKNKCVNFNFNGLTGTGVLTESNKKFLPFQQFGRDIADTTDAVRDPQTLEILDITPCSFGGVSVITPGTNTSNQVAVLYQDVNCTEVPVAIHADQLTPTWRVYSTGSNVFQTRAGCLIGAEHVNNSYECDIPIGAGICASYQTQTNSPRRARSVASQSIIAYTMSLGAENSVAYSNNSCAIPTNFTISVTTEILPVSMTKTSVDCTMYICGDSTECSNLLLQYGSFCTQLNRALTGIAVEQDKNTQEVFAQVKQIYKTPPIKDFGGFNFSQILPDPSKPSKRSFIEDLLFNKVTLADAGFIKQYGDCLGDIAARDLICAQKFNGLTVLPPLLTDEMIAQYTSALLAGTITSGWTFGAGAALQIPFAMQMAYRFNGIGVTQNVLYENQKLIANQFNSAIGKIQDSLSSTASALGKLQDVVNQNAQALNTLVKQLSSNFGAISSVLNDILSRLDKVEAEVQIDRLITGRLQSLQTYVTQQLIRAAEIRASANLAATKMSECVLGQSKRVDFCGKGYHLMSFPQSAPHGVVFLHVTYVPAQEKNFTCAPAICHDGKAHFPREGVFVSNGTHWFVTQRNFYEPQIITTDNTFVSGNCDVVIGIVNNTVYDPLQPELDSGGGSGGGQIYEGKLTAEGLRFGIVASRFNHALVDRLVEGAIDAIVRHGGREEDITLVRVPGSWEIPVAAGELARKEDIDAVIAIGVLIRGATPHFDYIASEVSKGLADLSLELRKPITFGVITADTLEQAIERAGTKHGNKGWEAALSAIEMANLFKSLR

SEQ ID NO: 8027 - protein, 1307 aa, Artificial Sequence
  SARS-CoV-2/Portugal/PT0035/2020__EPI_ISL_418020 spike protein (1-1147)(I712C_T1077C) LumSynth construct
MFVFLVLLPLVSSQCVNLTTRTQLPPAYTNSFTRGVYYPDKVFRSSVLHSTQDLFLPFFSNVTWFHAIHVSGTNGTKRFDNPVLPFNDGVYFASTEKSNIIRGWIFGTTLDSKTQSLLIVNNATNVVIKVCEFQFCNDPFLGVYYHKNNKSWMESEFRVYSSANNCTFEYVSQPFLMDLEGKQGNFKNLREFVFKNIDGYFKIYSKHTPINLVRDLPQGFSALEPLVDLPIGINITRFQTLLALHRSYLTPGDSSSGWTAGAAAYYVGYLQPRTFLLKYNENGTITDAVDCALDPLSETKCTLKSFTVEKGIYQTSNFRVQPTESIVRFPNITNLCPFGEVFNATRFASVYAWNRKRISNCVADYSVLYNSASFSTFKCYGVSPTKLNDLCFTNVYADSFVIRGDEVRQIAPGQTGKIADYNYKLPDDFTGCVIAWNSNNLDSKVGGNYNYLYRLFRKSNLKPFERDISTEIYQAGSTPCNGVEGFNCYFPLQSYGFQPTNGVGYQPYRVVVLSFELLHAPATVCGPKKSTNLVKNKCVNFNFNGLTGTGVLTESNKKFLPFQQFGRDIADTTDAVRDPQTLEILDITPCSFGGVSVITPGTNTSNQVAVLYQDVNCTEVPVAIHADQLTPTWRVYSTGSNVFQTRAGCLIGAEHVNNSYECDIPIGAGICASYQTQTNSPRRARSVASQSIIAYTMSLGAENSVAYSNNSCAIPTNFTISVTTEILPVSMTKTSVDCTMYICGDSTECSNLLLQYGSFCTQLNRALTGIAVEQDKNTQEVFAQVKQIYKTPPIKDFGGFNFSQILPDPSKPSKRSFIEDLLFNKVTLADAGFIKQYGDCLGDISARDLICAQKFNGLTVLPPLLTDEMIAQYTSALLAGTITSGWTFGAGAALQIPFAMQMAYRFNGIGVTQNVLYENQKLIANQFNSAIGKIQDSLSSTASALGKLQDVVNQNAQALNTLVKQLSSNFGAISSVLNDILSRLDKVEAEVQIDRLITGRLQSLQTYVTQQLIRAAEIRASANLAATKMSECVLGQSKRVDFCGKGYHLMSFPQSAPHGVVFLHVTYVPAQEKNFTCAPAICHDGKAHFPREGVFVSNGTHWFVTQRNFYEPQIITTDNTFVSGNCDVVIGIVNNTVYDPLQPELDSGGGSGGGQIYEGKLTAEGLRFGIVASRFNHALVDRLVEGAIDAIVRHGGREEDITLVRVPGSWEIPVAAGELARKEDIDAVIAIGVLIRGATPHFDYIASEVSKGLADLSLELRKPITFGVITADTLEQAIERAGTKHGNKGWEAALSAIEMANLFKSLR

SEQ ID NO: 8028 - protein, 1307 aa, Artificial Sequence
  SARS-CoV-2/USA/NY-NYUMC7/2020__EPI_ISL_418192 spike protein (1-1147)(I712C_T1077C) LumSynth construct
MFVFLVLLPLVSSQCVNLTTRTQLPPAYTNSFTRGVYYPDKVFRSSVLHSTQDLFLPFFSNVTWFHAIHVSGTNGTKRFDNPVLPFNDGVYFASTEKSNIIRGWIFGTTLDSKTQSLLIVNNATNVVIKVCEFQFCNDPFLGVYHHKNNKSWMESEFRVYSSANNCTFEYVSQPFLMDLEGKQGNFKNLREFVFKNIDGYFKIYSKHTPINLVRDLPQGFSALEPLVDLPIGINITRFQTLLALHRSYLTPGDSSSGWTAGAAAYYVGYLQPRTFLLKYNENGTITDAVDCALDPLSETKCTLKSFTVEKGIYQTSNFRVQPTESIVRFPNITNLCPFGEVFNATRFASVYAWNRKRISNCVADYSVLYNSASFSTFKCYGVSPTKLNDLCFTNVYADSFVIRGDEVRQIAPGQTGKIADYNYKLPDDFTGCVIAWNSNNLDSKVGGNYNYLYRLFRKSNLKPFERDISTEIYQAGSTPCNGVEGFNCYFPLQSYGFQPTNGVGYQPYRVVVLSFELLHAPATVCGPKKSTNLVKNKCVNFNFNGLTGTGVLTESNKKFLPFQQFGRDIADTTDAVRDPQTLEILDITPCSFGGVSVITPGTNTSNQVAVLYQGVNCTEVPVAIHADQLTPTWRVYSTGSNVFQTRAGCLIGAEHVNNSYECDIPIGAGICASYQTQTNSPRRARSVASQSIIAYTMSLGAENSVAYSNNSCAIPTNFTISVTTEILPVSMTKTSVDCTMYICGDSTECSNLLLQYGSFCTQLNRALTGIAVEQDKNTQEVFAQVKQIYKTPPIKDFGGFNFSQILPDPSKPSKRSFIEDLLFNKVTLADAGFIKQYGDCLGDIAARDLICAQKFNGLTVLPPLLTDEMIAQYTSALLAGTITSGWTFGAGAALQIPFAMQMAYRFNGIGVTQNVLYENQKLIANQFNSAIGKIQDSLSSTASALGKLQDVVNQNAQALNTLVKQLSSNFGAISSVLNDILSRLDKVEAEVQIDRLITGRLQSLQTYVTQQLIRAAEIRASANLAATKMSECVLGQSKRVDFCGKGYHLMSFPQSAPHGVVFLHVTYVPAQEKNFTCAPAICHDGKAHFPREGVFVSNGTHWFVTQRNFYEPQIITTDNTFVSGNCDVVIGIVNNTVYDPLQPELDSGGGSGGGQIYEGKLTAEGLRFGIVASRFNHALVDRLVEGAIDAIVRHGGREEDITLVRVPGSWEIPVAAGELARKEDIDAVIAIGVLIRGATPHFDYIASEVSKGLADLSLELRKPITFGVITADTLEQAIERAGTKHGNKGWEAALSAIEMANLFKSLR

SEQ ID NO: 8029 - protein, 1307 aa, Artificial Sequence
  SARS-CoV-2/Iceland/189/2020__EPI_ISL_417709 spike protein (1-1147)(I712C_T1077C) LumSynth construct
MFVFLVLLPLVSSQCVNLTTRTQLPPAYTNSFTRGVYYPDKVFRSSVLHSTQDLFLPFFSNVTWFHAIHVSGTNGTKRFDNPVLPFNDGVYFASTEKSNIIRGWIFGTTLDSKTQSLLIVNNATNVVIKVCEFQFCNDPFLGVYYHKNNKSWMESEFRVYSSANNCTFEYVSQPFLMDLEGKQGNFKNLREFVFKNIDGYFKIYSKHTPINLVRDLPQGFSALEPLVDLPIGINITRFQTLLALHRSYLTPGDSSSGWTAGAAAYYVGYLQPRTFLLKYNENGTITDAVDCALDPLSETKCTLKSFTVEKGIYQTSNFRVQPTESIVRFPNITNLCPFGEVFNATRFASVYAWNRKRISNCVADYSVLYNSASFSTFKCYGVSPTKLNDLCFTNVYADSFVIRGDEVRQIAPGQTGKIADYNYKLPDDFTGCVIAWNSNNLDSKVGGNYNYLYRLFRKSNLKPFERDISTEIYQAGSTPCNGVEGFNCYFPLQSYGFQPTNGVGYQPYRVVVLSFELLHAPATVCGPKKSTNLVKNKCVNFNFNGLTGTGVLTESNKKFLPFQQFGRDIADTTDAVRDPQTLEILDITPCSFGGVSVITPGTNTSNQVAVLYQGVNCTEVPVAIHADQLTPTWRVYSTGSNVFQTRAGCLIGAEHVNNSYECDIPIGAGICASYQTQTNSPRRARSVASQSIIAYTMSLGAENSVAYSNNSCAIPTNFTISVTTEILPVSMTKTSVDCTMYICGDSTECSNLLLQYGSFCTQLNRALTGIAVEQDKNTQEVFAQVKQIYKTPPIKDFGGFNFSQILPDPSKPSKRSFIEDLLFNKVTLADAGFTKQYGDCLGDIAARDLICAQKFNGLTVLPPLLTDEMIAQYTSALLAGTITSGWTFGAGAALQIPFAMQMAYRFNGIGVTQNVLYENQKLIANQFNSAIGKIQDSLSSTASALGKLQDVVNQNAQALNTLVKQLSSNFGAISSVLNDILSRLDKVEAEVQIDRLITGRLQSLQTYVTQQLIRAAEIRASANLAATKMSECVLGQSKRVDFCGKGYHLMSFPQSAPHGVVFLHVTYVPAQEKNFTCAPAICHDGKAHFPREGVFVSNGTHWFVTQRNFYEPQIITTDNTFVSGNCDVVIGIVNNTVYDPLQPELDSGGGSGGGQIYEGKLTAEGLRFGIVASRFNHALVDRLVEGAIDAIVRHGGREEDITLVRVPGSWEIPVAAGELARKEDIDAVIAIGVLIRGATPHFDYIASEVSKGLADLSLELRKPITFGVITADTLEQAIERAGTKHGNKGWEAALSAIEMANLFKSLR

SEQ ID NO: 8030 - protein, 1307 aa, Artificial Sequence
  SARS-CoV-2/Australia/NSW56/2020__EPI_ISL_417408 spike protein (1-1147)(I712C_T1077C) LumSynth construct
MFVFLVLLPLVSSQCVNLTTRTQLPPAYTNSFTRGVYYPDKVFRSSVLHSTQDLFLPFFSNVTWFHAIHVSGTNGTKRFDNPVLPFNDGVYFASTEKSNIIRGWIFGTTLDSKTQSLLIVNNATNVVIKVCEFQFCNDPFLGVYYHKNNKSWMESEFRVYSSANNCTFEYVSQPFLMDLEGKQGNFKNLREFVFKNIDGYFKIYSKHTPINLVRDLPQGFSALEPLVDLPIGINITRFQTLLALHRSYLTPGDSSSGWTAGAAAYYVGYLQPRTFLLKYNENGTITDAVDCALDPLSETKCTLKSFTVEKGIYQTSNFRVQPTESIVRFPNITNLCPFGEVFNATRFASVYAWNRKRISNCVADYSVLYNSASFSTFKCYGVSPTKLNDLCFTNVYADSFVIRGDEVRQIAPGQTGKIADYNYKLPDDFTGCVIAWNSNNLDSKVGGNYNYLYRLFRKSNLKPFERDISTEIYQAGSTPCNGVEGFNCYFPLQSYGFQPTNGVGYQPYRVVVLSFELLHAPATVCGPKKSTNLVKNKCVNFNFNGLTGTGVLTESNKKFLPFQQFGRDIADTTDAVRDPQTLEILDITPCSFGGVSVITPGTNTSNQVAVLYQDVNCTEVPVAIHADQLTPTWRVYSTGSNVFQTRAGCLIGAEHVNNSYECDIPIGAGICASYQTQTNSPRRARSVASQSIIAYTMSLGAENSVAYSNNSCAIPTNFTISVTTEILPVSMTKTSVDCTMYICGDSTECSNLLLQYGSFCTQLNRALTGIAVEQDKNTQEVFAQVKQIYKTPPIKDFGGFNFSQILPDSSKPSKRSFIEDLLFNKVTLADAGFIKQYGDCLGDIAARDLICAQKFNGLTVLPPLLTDEMIAQYTSALLAGTITSGWTFGAGAALQIPFAMQMAYRFNGIGVTQNVLYENQKLIANQFNSAIGKIQDSLSSTASALGKLQDVVNQNAQALNTLVKQLSSNFGAISSVLNDILSRLDKVEAEVQIDRLITGRLQSLQTYVTQQLIRAAEIRASANLAATKMSECVLGQSKRVDFCGKGYHLMSFPQSAPHGVVFLHVTYVPAQEKNFTCAPAICHDGKAHFPREGVFVSNGTHWFVTQRNFYEPQIITTDNTFVSGNCDVVIGIVNNTVYDPLQPELDSGGGSGGGQIYEGKLTAEGLRFGIVASRFNHALVDRLVEGAIDAIVRHGGREEDITLVRVPGSWEIPVAAGELARKEDIDAVIAIGVLIRGATPHFDYIASEVSKGLADLSLELRKPITFGVITADTLEQAIERAGTKHGNKGWEAALSAIEMANLFKSLR

SEQ ID NO: 8031 - protein, 1307 aa, Artificial Sequence
  SARS-CoV-2/Iceland/280/2020__EPI_ISL_417608 spike protein (1-1147)(I712C_T1077C) LumSynth construct
MFVFLVLLPLVSSQCVNLTTRTQLPPAYTNSFTRGVYYPDKVFRSSVLHSTQDLFLPFFSNVTWFHAIHVSGTNGTKRFDNPVLPFNDGVYFASTEKSNIIRGWIFGTTLDSKTQSLLIVNNATNVVIKVCEFQFCNDPFLGVYYHKNNKSWMESEFRVYSSANNCTFEYVSQPFLMDLEGKQGNFKNLREFVFKNIDGYFKIYSKHTPINLVRDLPQGFSALEPLVDLPIGINITRFQTLLALHRSYLTPGDSSSGWTAGAAAYYVGYLQPRTFLLKYNENGTITDAVDCALDPLSETKCTLKSFTVEKGIYQTSNFRVQPTESIVRFPNITNLCPFGEVFNATRFASVYAWNRKRISNCVADYSVLYNSASFSTFKCYGVSPTKLNDLCFTNVYADSFVIRGDEVRQIAPGQTGKIADYNYKLPDDFTGCVIAWNSNNLDSKVGGNYNYLYRLFRKSNLKPFERDISTEIYQAGSTPCNGVEGFNCYFPLQSYGFQPTNGVGYQPYRVVVLSFELLHAPATVCGPKKSTNLVKNKCVNFNFNGLTGTGVLTESNKKFLPFQQFGRDIADTTDAVRDPQTLEILDITPCSFGGVSVITPGTNTSNQVAVLYQGVNCTEVPVAIHADQLTPTWRVYSTGSNVFQTRAGCLIGAEHVNNSYECDIPIGAGICASYHTQTNSPRRARSVASQSIIAYTMSLGAENSVAYSNNSCAIPTNFTISVTTEILPVSMTKTSVDCTMYICGDSTECSNLLLQYGSFCTQLNRALTGIAVEQDKNTQEVFAQVKQIYKTPPIKDFGGFNFSQILPDPSKPSKRSFIEDLLFNKVTLADAGFIKQYGDCLGDIAARDLICAQKFNGLTVLPPLLTDEMIAQYTSALLAGTITSGWTFGAGAALQIPFAMQMAYRFNGIGVTQNVLYENQKLIANQFNSAIGKIQDSLSSTASALGKLQDVVNQNAQALNTLVKQLSSNFGAISSVLNDILSRLDKVEAEVQIDRLITGRLQSLQTYVTQQLIRAAEIRASANLAATKMSECVLGQSKRVDFCGKGYHLMSFPQSAPHGVVFLHVTYVPAQEKNFTCAPAICHDGKAHFPREGVFVSNGTHWFVTQRNFYEPQIITTDNTFVSGNCDVVIGIVNNTVYDPLQPELDSGGGSGGGQIYEGKLTAEGLRFGIVASRFNHALVDRLVEGAIDAIVRHGGREEDITLVRVPGSWEIPVAAGELARKEDIDAVIAIGVLIRGATPHFDYIASEVSKGLADLSLELRKPITFGVITADTLEQAIERAGTKHGNKGWEAALSAIEMANLFKSLR

SEQ ID NO: 8032 - protein, 1307 aa, Artificial Sequence; identical to SEQ ID NO: 7987
  SARS-CoV-2/Iceland/247/2020__EPI_ISL_417575 spike protein (1-1147)(I712C_T1077C) LumSynth construct

SEQ ID NO: 8033 - protein, 1307 aa, Artificial Sequence
  SARS-CoV-2/Iceland/238/2020__EPI_ISL_417566 spike protein (1-1147)(I712C_T1077C) LumSynth construct
MFVFLVLLPLVSSQCVNLTTRTQLPPAYTNSFTRGVYYPDKVFRSSVLHSTQDLFLPFFSNVTWFHAIHVSGTNGTKRFDNPVLPFNDGVYFASTEKSNIIRGWIFGTTLDSKTQSLLIVNNATNVVIKVCEFQFCNDPFLGVYYHKNNKSWMESEFRVYSSANNCTFEYVSQPFLMDLEGKQGNFKNLREFVFKNIDGYFKIYSKHTPINLVRDLPQGFSALEPLVDLPIGINITRFQTLLALHRSYLTPGDSSSGWTAGAAAYYVGYLQPRTFLLKYNENGTITDAVDCALDPLSETKCTLKSFTVEKGIYQTSNFRVQPTESIVRFPNITNLCPFGEVFNATRFASVYAWNRKRISNCVADYSVLYNSASFSTFKCYGVSPTKLNDLCFTNVYADSFVIRGDEVRQIAPGQTGKIADYNYKLPDDFTGCVIAWNSNNLDSKVGGNYNYLYRLFRKSNLKPFERDISTEIYQAGSTPCNGVEGFNCYFPLQSYGFQPTNGVGYQPYRVVVLSFELLHAPATVCGPKKSTNLVKNKCVNFNFNGLTGTGVLTESNKKFLPFQQFGRDIADTTDAVRDPQTLEILDITPCSFGGVSVITPGTNTSNQVAVLYQGVNCTEVPVAIHADQLTPTWRVYSTGSNVFQTRAGCLIGAEHVNNSYECDIPIGAGICASYQTQTNSPRRARSVASQSIIAYTMSLGAENSVAYSNNSCAIPTNFTISVTTEILPVSMTKTSVDCTMYICGDSTECSNLLLQYGSFCTQLNRALTGIAVEQDKNTQEVFAQVKQIYKTPPIKDFGGFNFSQILPDPSKPSKRSFIEDLLFNKVTLADVGFIKQYGDCLGDIAARDLICAQKFNGLTVLPPLLTDEMIAQYTSALLAGTITSGWTFGAGAALQIPFAMQMAYRFNGIGVTQNVLYENQKLIANQFNSAIGKIQDSLSSTASALGKLQDVVNQNAQALNTLVKQLSSNFGAISSVLNDILSRLDKVEAEVQIDRLITGRLQSLQTYVTQQLIRAAEIRASANLAATKMSECVLGQSKRVDFCGKGYHLMSFPQSAPHGVVFLHVTYVPAQEKNFTCAPAICHDGKAHFPREGVFVSNGTHWFVTQRNFYEPQIITTDNTFVSGNCDVVIGIVNNTVYDPLQPELDSGGGSGGGQIYEGKLTAEGLRFGIVASRFNHALVDRLVEGAIDAIVRHGGREEDITLVRVPGSWEIPVAAGELARKEDIDAVIAIGVLIRGATPHFDYIASEVSKGLADLSLELRKPITFGVITADTLEQAIERAGTKHGNKGWEAALSAIEMANLFKSLR

SEQ ID NO: 8034 - protein, 1307 aa, Artificial Sequence
  SARS-CoV-2/Greece/16/2020__EPI_ISL_418265 spike protein (1-1147)(I712C_T1077C) LumSynth construct
MFVFLVLLPLVSSQCVNLTTRTQLPPAYTNSFTRGVYYPDKVFRSSVLHSTQDLFLPFFSNVTWFHAIHVSGTNGTKRFDNPVLPFNDGVYFASTEKSNIIRGWIFGTTLDSKTQSLLIVNNATNVVIKVCEFQFCNDPFLGVYYHKNNKSWMESEFRVYSSANNCTFEYVSQPFLMDLEGKQGNFKNLREFVFKNVDGYFKIYSKHTPINLVRDLPQGFSALEPLVDLPIGINITRFQTLLALHRSYLTPGDSSSGWTAGAAAYYVGYLQPRTFLLKYNENGTITDAVDCALDPLSETKCTLKSFTVEKGIYQTSNFRVQPTESIVRFPNITNLCPFGEVFNATRFASVYAWNRKRISNCVADYSVLYNSASFSTFKCYGVSPTKLNDLCFTNVYADSFVIRGDEVRQIAPGQTGKIADYNYKLPDDFTGCVIAWNSNNLDSKVGGNYNYLYRLFRKSNLKPFERDISTEIYQAGSTPCNGVEGFNCYFPLQSYGFQPTNGVGYQPYRVVVLSFELLHAPATVCGPKKSTNLVKNKCVNFNFNGLTGTGVLTESNKKFLPFQQFGRDIADTTDAVRDPQTLEILDITPCSFGGVSVITPGTNTSNQVAVLYQDVNCTEVPVAIHADQLTPTWRVYSTGSNVFQTRAGCLIGAEHVNNSYECDIPIGAGICASYQTQTNSPRRARSVASQSIIAYTMSLGAENSVAYSNNSCAIPTNFTISVTTEILPVSMTKTSVDCTMYICGDSTECSNLLLQYGSFCTQLNRALTGIAVEQDKNTQEVFAQVKQIYKTPPIKDFGGFNFSQILPDPSKPSKRSFIEDLLFNKVTLADAGFIKQYGDCLGDIAARDLICAQKFNGLTVLPPLLTDEMIAQYTSALLAGTITSGWTFGAGAALQIPFAMQMAYRFNGIGVTQNVLYENQKLIANQFNSAIGKIQDSLSSTASALGKLQDVVNQNAQALNTLVKQLSSNFGAISSVLNDILSRLDKVEAEVQIDRLITGRLQSLQTYVTQQLIRAAEIRASANLAATKMSECVLGQSKRVDFCGKGYHLMSFPQSAPHGVVFLHVTYVPAQEKNFTCAPAICHDGKAHFPREGVFVSNGTHWFVTQRNFYEPQIITTDNTFVSGNCDVVIGIVNNTVYDPLQPELDSGGGSGGGQIYEGKLTAEGLRFGIVASRFNHALVDRLVEGAIDAIVRHGGREEDITLVRVPGSWEIPVAAGELARKEDIDAVIAIGVLIRGATPHFDYIASEVSKGLADLSLELRKPITFGVITADTLEQAIERAGTKHGNKGWEAALSAIEMANLFKSLR

SEQ ID NO: 8035 - protein, 1307 aa, Artificial Sequence
  SARS-CoV-2/Iceland/319/2020__EPI_ISL_417648 spike protein (1-1147)(I712C_T1077C) LumSynth construct
MFVFLVLLPLVSSQCVNLTTRTQLPPAYTNSFTRGVYYPDKVFRSSVLHSTQDLFLPFFSNVTWFHAIHVSGTNGTKRFDNPVLPFNDGVYFASTEKSNIIRGWIFGTTLDSKTQSLLIVNNATNVVIKVCEFQFCNDPFLGVYYHKNNKSWMESEFRVYSSANNCTFEYVSQPFLIDLEGKQGNFKNLREFVFKNIDGYFKIYSKHTPINLVRDLPQGFSALEPLVDLPIGINITRFQTLLALHRSYLTPGDSSSGWTAGAAAYYVGYLQPRTFLLKYNENGTITDAVDCALDPLSETKCTLKSFTVEKGIYQTSNFRVQPTESIVRFPNITNLCPFGEVFNATRFASVYAWNRKRISNCVADYSVLYNSASFSTFKCYGVSPTKLNDLCFTNVYADSFVIRGDEVRQIAPGQTGKIADYNYKLPDDFTGCVIAWNSNNLDSKVGGNYNYLYRLFRKSNLKPFERDISTEIYQAGSTPCNGVEGFNCYFPLQSYGFQPTNGVGYQPYRVVVLSFELLHAPATVCGPKKSTNLVKNKCVNFNFNGLTGTGVLTESNKKFLPFQQFGRDIADTTDAVRDPQTLEILDITPCSFGGVSVITPGTNTSNQVAVLYQGVNCTEVPVAIHADQLTPTWRVYSTGSNVFQTRAGCLIGAEHVNNSYECDIPIGAGICASYQTQTNSPRRARSVASQSIIAYTMSLGAENSVAYSNNSCAIPTNFTISVTTEILPVSMTKTSVDCTMYICGDSTECSNLLLQYGSFCTQLNRALTGIAVEQDKNTQEVFAQVKQIYKTPPIKDFGGFNFSQILPDPSKPSKRSFIEDLLFNKVTLADAGFIKQYGDCLGDIAARDLICAQKFNGLTVLPPLLTDEMIAQYTSALLAGTITSGWTFGAGAALQIPFAMQMAYRFNGIGVTQNVLYENQKLIANQFNSAIGKIQDSLSSTASALGKLQDVVNQNAQALNTLVKQLSSNFGAISSVLNDILSRLDKVEAEVQIDRLITGRLQSLQTYVTQQLIRAAEIRASANLAATKMSECVLGQSKRVDFCGKGYHLMSFPQSAPHGVVFLHVTYVPAQEKNFTCAPAICHDGKAHFPREGVFVSNGTHWFVTQRNFYEPQIITTDNTFVSGNCDVVIGIVNNTVYDPLQPELDSGGGSGGGQIYEGKLTAEGLRFGIVASRFNHALVDRLVEGAIDAIVRHGGREEDITLVRVPGSWEIPVAAGELARKEDIDAVIAIGVLIRGATPHFDYIASEVSKGLADLSLELRKPITFGVITADTLEQAIERAGTKHGNKGWEAALSAIEMANLFKSLR

SEQ ID NO: 8036 - protein, 1307 aa, Artificial Sequence
  SARS-CoV-2/Congo/94/2020__EPI_ISL_417947 spike protein (1-1147)(I712C_T1077C) LumSynth construct
MFVFLVLLPLVSSQCVNLTTRTQLPPAYTNSFTRGVYYPDKVFRSSVLHSTQDLFLPFFSNVTWFHAIHVSGTNGTKRFDNPVLPFNDGVYFASTEKSNIIRGWIFGTTLDSKTQSLLIVNNATNVVIKVCEFQFCNDPFLGVYYHKNNKSWMESEFRVYSSANNCTFEYVSQPFLMDLEGKQGNFKNLREFVFKNIDGYFKIYSKHTPINLVRDLPQGFSALEPLVDLPIGINITRFQTLLALHRSYLTPGDSSSGWTAGAAAYYVGYLQPRTFLLKYNENGTITDAVDCALDPLSETKCTLKSFTVEKGIYQTSNFRVQPTESIVRFPNITNLCPFGEVFNATRFASVYAWNRKRISNCVADYSVLYNSASFSTFKCYGVSPTKLNDLCFTNVYADSFVIRGDEVRQIAPGQTGKIADYNYKLPDDFTGCVIAWNSNNLDSKVGGNYNYLYRLFRKSNLKPFERDISTEIYQAGSTPCNGVEGFNCYFPLQSYGFQPTNGVGYQPYRVVVLSFELLHAPATVCGPKKSTNLVKNKCVNFNFNGLTGTGVLTESNKKFLPFQQFGRDIADTTDAVRDPQTLEILDITPCSFGGVSVITPGTNTSNQVAVLYQGVNCTEVPVAIHADQLTPTWRVYSTGSNVFQTRAGCLIGAEHVNNSYECDIPIGAGICASYQTQTNSPRRARSVASQSIIAYTMSLGAENSVAYSNNSCAIPTNFTISVTTEILPVSMTKTSVDCTMYICGDSTECSNLLLQYGSFCTQLNRALTGIAVEQDKNTQEVFAQVKQIYKTPPIKDFGGFNFSQILPDPSKPSKRSFIEDILFNKVTLADAGFIKQYGDCLGDIAARDLICAQKFNGLTVLPPLLTDEMIAQYTSALLAGTITSGWTFGAGAALQIPFAMQMAYRFNGIGVTQNVLYENQKLIANQFNSAIGKIQDSLSSTASALGKLQDVVNQNAQALNTLVKQLSSNFGAISSVLNDILSRLDKVEAEVQIDRLITGRLQSLQTYVTQQLIRAAEIRASANLAATKMSECVLGQSKRVDFCGKGYHLMSFPQSAPHGVVFLHVTYVPAQEKNFTCAPAICHDGKAHFPREGVFVSNGTHWFVTQRNFYEPQIITTDNTFVSGNCDVVIGIVNNTVYDPLQPELDSGGGSGGGQIYEGKLTAEGLRFGIVASRFNHALVDRLVEGAIDAIVRHGGREEDITLVRVPGSWEIPVAAGELARKEDIDAVIAIGVLIRGATPHFDYIASEVSKGLADLSLELRKPITFGVITADTLEQAIERAGTKHGNKGWEAALSAIEMANLFKSLR

SEQ ID NO: 8037 - protein, 1307 aa, Artificial Sequence
  SARS-CoV-2/Congo/158/2020__EPI_ISL_417950 spike protein (1-1147)(I712C_T1077C) LumSynth construct
MFVFLVLLPLVSSQCVNLTTRTQLPPAYTNSFTRGVYYPDKVFRSSVLHSTQDLFLPFFSNVTWFHAIHVSGTNGTKRFDNPVLPFNDGVYFASTEKSNIIRGWIFGTTLDSKTQSLLIVNNATNVVIKVCEFQFCNDPFLGVYYHKNNKSWMESEFRVYSSANNCTFEYVSQPFLMDLEGKQGNFKNLREFVFKNIDGYFKIYSKHTPINLVRDLPQGFSALEPLVDLPIGINITRFQTLLALHRSYLTPGDSSSGWTAGAAAYYVGYLQPRTFLLKYNENGTITDAVDCALDPLSETKCTLKSFTVEKGIYQTSNFRVQPTESIVRFPNITNLCPFGEVFNATRFASVYAWNRKRISNCVADYSVLYNSASFSTFKCYGVSPTKLNDLCFTNVYADSFVIRGDEVRQIAPGQTGKIADYNYKLPDDFTGCVIAWNSNNLDSKVGGNYNYLYRLFRKSNLKPFERDISTEIYQAGSTPCNGVEGFNCYFPLQSYGFQPTNGVGYQPYRVVVLSFELLHAPATVCGPKKSTNLVKNKCVNFNFNGLTGTGVLTESNKKFLPFQQFGRDIADTTDAVRDPQTLEILDITPCSFGGVSVITPGTNTSNQVAVLYQDVNCTEVPVAIHADQLTPTWRVYSTGSNVFQTRAGCLIGAEHVNNSYECDIPIGAGICASYQTQTNSPRRARSVASQSIIAYTMSLGAENSVAYSNNSCAIPTNFTISVTTEILPVSMTKTSVDCTMYICGDSTECSNLLLQYGSFCTQLNRALTGIAVEQDKNTQEVFAQVKQIYKTPPIKDFGGFNFSQILPDPSKPSKRSFIEDLLFNKVTLADAGFIKQYGDCLGDIAARDLICAQKFNGLTVLPPLLTDEMIAQYTSALLAGTITSGWTFGAGAALQIPFAMQMAYRFNGIGVTQNVLYENQKLIANQFNSAIGKIQDSLSSTASALGKLQDVVNQNAQALNTLVKQLSSNFGAISSVLNDILSRLDKVEAEVQIDRLITGRLQSLQTYVTQQLIRAAEIRASANLAATKMSECVLGQSKRVDFCGKGYHLMSFPQSAPHGVVFLHVTYVPAQEKNFTCAPAICHDGKAHFPREGVFVSNGTHWFVTQRNFYEPQIITTDNTFLSGNCDVVIGIVNNTVYDPLQPELDSGGGSGGGQIYEGKLTAEGLRFGIVASRFNHALVDRLVEGAIDAIVRHGGREEDITLVRVPGSWEIPVAAGELARKEDIDAVIAIGVLIRGATPHFDYIASEVSKGLADLSLELRKPITFGVITADTLEQAIERAGTKHGNKGWEAALSAIEMANLFKSLR

SEQ ID NO: 8038 - protein, 1307 aa, Artificial Sequence
  SARS-CoV-2/USA/UT-00034/2020__EPI_ISL_417977 spike protein (1-1147)(I712C_T1077C) LumSynth construct
MFVFLVLLPLVSSQCVNLTTRTQLPPAYTNSFTRGVYYPDKVFRSSVLHSTQDLFLPFFSNVTWFHAIHVSGTNGTKRFDNPVLPFNDGVYFASTEKSNIIRGWIFGTTLDSKTQSLLIVNNATNVVIKVCEFQFCNDPFLGVYYYKNNKSWMESEFRVYSSANNCTFEYVSQPFLMDLEGKQGNFKNLREFVFKNIDGYFKIYSKHTPINLVRDLPQGFSALEPLVDLPIGINITRFQTLLALHRSYLTPGDSSSGWTAGAAAYYVGYLQPRTFLLKYNENGTITDAVDCALDPLSETKCTLKSFTVEKGIYQTSNFRVQPTESIVRFPNITNLCPFGEVFNATRFASVYAWNRKRISNCVADYSVLYNSASFSTFKCYGVSPTKLNDLCFTNVYADSFVIRGDEVRQIAPGQTGKIADYNYKLPDDFTGCVIAWNSNNLDSKVGGNYNYLYRLFRKSNLKPFERDISTEIYQAGSTPCNGVEGFNCYFPLQSYGFQPTNGVGYQPYRVVVLSFELLHAPATVCGPKKSTNLVKNKCVNFNFNGLTGTGVLTESNKKFLPFQQFGRDIADTTDAVRDPQTLEILDITPCSFGGVSVITPGTNTSNQVAVLYQGVNCTEVPVAIHADQLTPTWRVYSTGSNVFQTRAGCLIGAEHVNNSYECDIPIGAGICASYQTQTNSPRRARSVASQSIIAYTMSLGAENSVAYSNNSCAIPTNFTISVTTEILPVSMTKTSVDCTMYICGDSTECSNLLLQYGSFCTQLNRALTGIAVEQDKNTQEVFAQVKQIYKTPPIKDFGGFNFSQILPDPSKPSKRSFIEDLLFNKVTLADAGFIKQYGDCLGDIAARDLICAQKFNGLTVLPPLLTDEMIAQYTSALLAGTITSGWTFGAGAALQIPFAMQMAYRFNGIGVTQNVLYENQKLIANQFNSAIGKIQDSLSSTASALGKLQDVVNQNAQALNTLVKQLSSNFGAISSVLNDILSRLDKVEAEVQIDRLITGRLQSLQTYVTQQLIRAAEIRASANLAATKMSECVLGQSKRVDFCGKGYHLMSFPQSAPHGVVFLHVTYVPAQEKNFTCAPAICHDGKAHFPREGVFVSNGTHWFVTQRNFYEPQIITTDNTFVSGNCDVVIGIVNNTVYDPLQPELDSGGGSGGGQIYEGKLTAEGLRFGIVASRFNHALVDRLVEGAIDAIVRHGGREEDITLVRVPGSWEIPVAAGELARKEDIDAVIAIGVLIRGATPHFDYIASEVSKGLADLSLELRKPITFGVITADTLEQAIERAGTKHGNKGWEAALSAIEMANLFKSLR

SEQ ID NO: 8039 - protein, 1307 aa, Artificial Sequence
  SARS-CoV-2/USA/UT-00033/2020__EPI_ISL_417976 spike protein (1-1147)(I712C_T1077C) LumSynth construct
MFVFLVLLPLVSSQCVNLTTRTQLPPAYTNSFTRGVYYPDKVFRSSVLHSTQDLFLPFFSNVTWFHAIHVSGTNGTKRFDNPVLPFNDGVYFASTEKSNIIRGWIFGTTLDSKTQSLLIVNNATNVVIKVCEFQFCNDPFLGVYYHKNNKSWMESEFRVYSSANNCTFEYVSQPFLMDLEGKQGNFKNLREFVFKNIDGYFKIYSKHTPINLVRDLPQGFSALEPLVDLPIGINITRFQTLLALHRSYLTPGDSSSGLTAGAAAYYVGYLQPRTFLLKYNENGTITDAVDCALDPLSETKCTLKSFTVEKGIYQTSNFRVQPTESIVRFPNITNLCPFGEVFNATRFASVYAWNRKRISNCVADYSVLYNSASFSTFKCYGVSPTKLNDLCFTNVYADSFVIRGDEVRQIAPGQTGKIADYNYKLPDDFTGCVIAWNSNNLDSKVGGNYNYLYRLFRKSNLKPFERDISTEIYQAGSTPCNGVEGFNCYFPLQSYGFQPTNGVGYQPYRVVVLSFELLHAPATVCGPKKSTNLVKNKCVNFNFNGLTGTGVLTESNKKFLPFQQFGRDIADTTDAVRDPQTLEILDITPCSFGGVSVITPGTNTSNQVAVLYQGVNCTEVPVAIHADQLTPTWRVYSTGSNVFQTRAGCLIGAEHVNNSYECDIPIGAGICASYQTQTNSPRRARSVASQSIIAYTMSLGAENSVAYSNNSCAIPTNFTISVTTEILPVSMTKTSVDCTMYICGDSTECSNLLLQYGSFCTQLNRALTGIAVEQDKNTQEVFAQVKQIYKTPPIKDFGGFNFSQILPDPSKPSKRSFIEDLLFNKVTLADAGFIKQYGDCLGDIAARDLICAQKFNGLTVLPPLLTDEMIAQYTSALLAGTITSGWTFGAGAALQIPFAMQMAYRFNGIGVTQNVLYENQKLIANQFNSAIGKIQDSLSSTASALGKLQDVVNQNAQALNTLVKQLSSNFGAISSVLNDILSRLDKVEAEVQIDRLITGRLQSLQTYVTQQLIRAAEIRASANLAATKMSECVLGQSKRVDFCGKGYHLMSFPQSAPHGVVFLHVTYVPAQEKNFTCAPAICHDGKAHFPREGVFVSNGTHWFVTQRNFYEPQIITTDNTFVSGNCDVVIGIVNNTVYDPLQPELDSGGGSGGGQIYEGKLTAEGLRFGIVASRFNHALVDRLVEGAIDAIVRHGGREEDITLVRVPGSWEIPVAAGELARKEDIDAVIAIGVLIRGATPHFDYIASEVSKGLADLSLELRKPITFGVITADTLEQAIERAGTKHGNKGWEAALSAIEMANLFKSLR

SEQ ID NO: 8040 - protein, 1307 aa, Artificial Sequence
  SARS-CoV-2/USA/WI-13/2020__EPI_ISL_417516 spike protein (1-1147)(I712C_T1077C) LumSynth construct
MFVFLVLLPLVSSQCVNLTTRTQLPPAYTNSFTRGVYYPDKVFRSSVLHSTQDLFLPFFSNVTWFHAIHVSGTNGTKRFDNPVLPFNDGVYFASTEKSNIIRGWIFGTTLDSKTQSLLIVNNATNVVIKVCEFQFCNDPFLGVYYHKNNKSWMESEFRVYSSANNCTFEYVSQPFLMDLEGKQGNFKNLREFVFKNIDGYFKIYSKHTPINLVRDLPQGFSALEPLVDLPIGINITRFQTLLALHRSYLTPGDSSSGWTAGAAAYYVGYLQPRTFLLKYNENGTITDAVDCALDPLSETKCTLKSFTVEKGIYQTSNFRVLPTESIVRFPNITNLCPFGEVFNATRFASVYAWNRKRISNCVADYSVLYNSASFSTFKCYGVSPTKLNDLCFTNVYADSFVIRGDEVRQIAPGQTGKIADYNYKLPDDFTGCVIAWNSNNLDSKVGGNYNYLYRLFRKSNLKPFERDISTEIYQAGSTPCNGVEGFNCYFPLQSYGFQPTNGVGYQPYRVVVLSFELLHAPATVCGPKKSTNLVKNKCVNFNFNGLTGTGVLTESNKKFLPFQQFGRDIADTTDAVRDPQTLEILDITPCSFGGVSVITPGTNTSNQVAVLYQGVNCTEVPVAIHADQLTPTWRVYSTGSNVFQTRAGCLIGAEHVNNSYECDIPIGAGICASYQTQTNSPRRARSVASQSIIAYTMSLGAENSVAYSNNSCAIPTNFTISVTTEILPVSMTKTSVDCTMYICGDSTECSNLLLQYGSFCTQLNRALTGIAVEQDKNTQEVFAQVKQIYKTPPIKDFGGFNFSQILPDPSKPSKRSFIEDLLFNKVTLADAGFIKQYGDCLGDIAARDLICAQKFNGLTVLPPLLTDEMIAQYTSALLAGTITSGWTFGAGAALQIPFAMQMAYRFNGIGVTQNVLYENQKLIANQFNSAIGKIQDSLSSTASALGKLQDVVNQNAQALNTLVKQLSSNFGAISSVLNDILSRLDKVEAEVQIDRLITGRLQSLQTYVTQQLIRAAEIRASANLAATKMSECVLGQSKRVDFCGKGYHLMSFPQSAPHGVVFLHVTYVPAQEKNFTCAPAICHDGKAHFPREGVFVSNGTHWFVTQRNFYEPQIITTDNTFVSGNCDVVIGIVNNTVYDPLQPELDSGGGSGGGQIYEGKLTAEGLRFGIVASRFNHALVDRLVEGAIDAIVRHGGREEDITLVRVPGSWEIPVAAGELARKEDIDAVIAIGVLIRGATPHFDYIASEVSKGLADLSLELRKPITFGVITADTLEQAIERAGTKHGNKGWEAALSAIEMANLFKSLR

SEQ ID NO: 8041 - protein, 1306 aa, Artificial Sequence
  SARS-CoV-2/India/1-27/2020__EPI_ISL_413522 spike protein (1-1146)(I711C_T1076C) LumSynth construct
MFVFLVLLPLVSSQCVNLTTRTQLPPAYTNSFTRGVYYPDKVFRSSVLHSTQDLFLPFFSNVTWFHAIHVSGTNGTKRFDNPVLPFNDGVYFASTEKSNIIRGWIFGTTLDSKTQSLLIVNNATNVVIKVCEFQFCNDPFLGVYHKNNKSWMESEFRVYSSANNCTFEYVSQPFLMDLEGKQGNFKNLREFVFKNIDGYFKIYSKHTPINLVRDLPQGFSALEPLVDLPIGINITRFQTLLALHRSYLTPGDSSSGWTAGAAAYYVGYLQPRTFLLKYNENGTITDAVDCALDPLSETKCTLKSFTVEKGIYQTSNFRVQPTESIVRFPNITNLCPFGEVFNATRFASVYAWNRKRISNCVADYSVLYNSASFSTFKCYGVSPTKLNDLCFTNVYADSFVIRGDEVIQIAPGQTGKIADYNYKLPDDFTGCVIAWNSNNLDSKVGGNYNYLYRLFRKSNLKPFERDISTEIYQAGSTPCNGVEGFNCYFPLQSYGFQPTNGVGYQPYRVVVLSFELLHAPATVCGPKKSTNLVKNKCVNFNFNGLTGTGVLTESNKKFLPFQQFGRDIADTTDAVRDPQTLEILDITPCSFGGVSVITPGTNTSNQVAVLYQDVNCTEVPVAIHADQLTPTWRVYSTGSNVFQTRAGCLIGAEHVNNSYECDIPIGAGICASYQTQTNSPRRARSVASQSIIAYTMSLGAENSVAYSNNSCAIPTNFTISVTTEILPVSMTKTSVDCTMYICGDSTECSNLLLQYGSFCTQLNRALTGIAVEQDKNTQEVFAQVKQIYKTPPIKDFGGFNFSQILPDPSKPSKRSFIEDLLFNKVTLADAGFIKQYGDCLGDIAARDLICAQKFNGLTVLPPLLTDEMIAQYTSALLAGTITSGWTFGAGAALQIPFAMQMAYRFNGIGVTQNVLYENQKLIANQFNSAIGKIQDSLSSTASALGKLQDVVNQNAQALNTLVKQLSSNFGAISSVLNDILSRLDKVEAEVQIDRLITGRLQSLQTYVTQQLIRAAEIRASANLAATKMSECVLGQSKRVDFCGKGYHLMSFPQSAPHGVVFLHVTYVPAQEKNFTCAPAICHDGKAHFPREGVFVSNGTHWFVTQRNFYEPQIITTDNTFVSGNCDVVIGIVNNTVYDPLQPELDSGGGSGGGQIYEGKLTAEGLRFGIVASRFNHALVDRLVEGAIDAIVRHGGREEDITLVRVPGSWEIPVAAGELARKEDIDAVIAIGVLIRGATPHFDYIASEVSKGLADLSLELRKPITFGVITADTLEQAIERAGTKHGNKGWEAALSAIEMANLFKSLR

SEQ ID NO: 8042 - protein, 1301 aa, Artificial Sequence
  SARS-CoV-2/pangolin/Guangxi/P4L/2017__EPI_ISL_410538 spike protein (1-1141)(I706C_T1071C) LumSynth construct
MFVFLFVLPLVSSQCVNLTTRTGIPPGYTNSSTRGVYYPDKVFRSSILHLTQDLFLPFFSNVTWFNTINYQGGFKKFDNPVLPFNDGVYFASTEKSNIIRGWIFGTTLDARTQSLLIVNNATNVVIKVCEFQFCTDPFLGVYYHNNNKTWVENEFRVYSSANNCTFEYISQPFLMDLEGKQGNFKNLREFVFKNVDGYFKIYSKHTPIDLVRDLPRGFAALEPLVDLPIGINITRFQTLLALHRSYLTPGNLESGWTTGAAAYYVGYLQQRTFLLSYNQNGTITDAVDCSLDPLSETKCTLKSLTVEKGIYQTSNFRVQPTISIVRFPNITNLCPFGEVFNASKFASVYAWNRKRISNCVADYSVLYNSTSFSTFKCYGVSPTKLNDLCFTNVYADSFVVKGDEVRQIAPGQTGVIADYNYKLPDDFTGCVIAWNSVKQDALTGGNYGYLYRLFRKSKLKPFERDISTEIYQAGSTPCNGQVGLNCYYPLERYGFHPTTGVNYQPFRVVVLSFELLNGPATVCGPKLSTTLVKDKCVNFNFNGLTGTGVLTTSKKQFLPFQQFGRDISDTTDAVRDPQTLEILDITPCSFGGVSVITPGTNTSNQVAVLYQDVNCTEVPMAIHAEQLTPAWRVYSAGANVFQTRAGCLVGAEHVNNSYECDIPVGAGICASYHSMSSLRSVNQRSIIAYTMSLGAENSVAYSNNSCAIPTNFTISVTTEILPVSMTKTSVDCTMYICGDSIECSNLLLQYGSFCTQLNRALTGIAVEQDKNTQEVFAQVKQIYKTPPIKDFGGFNFSQILPDPSKPSKRSFIEDLLFNKVTLADAGFIKQYGDCLGDIAARDLICAQKFNGLTVLPPLLTDEMIAQYTSALLAGTITSGWTFGAGAALQIPFAMQMAYRFNGIGVTQNVLYENQKLIANQFNSAIGKIQDSLSSTASALGKLQDVVNQNAQALNTLVKQLSSNFGAISSVLNDILSRLDKVEAEVQIDRLITGRLQSLQTYVTQQLIRAAEIRASANLAATKMSECVLGQSKRVDFCGKGYHLMSFPQSAPHGVVFLHVTYVPAQEKNFTCAPAICHEGKAHFPREGVFVSNGTHWFITQRNFYEPQIITTDNTFVSGSCDVVIGIVNNTVYDPLQPELDSGGGSGGGQIYEGKLTAEGLRFGIVASRFNHALVDRLVEGAIDAIVRHGGREEDITLVRVPGSWEIPVAAGELARKEDIDAVIAIGVLIRGATPHFDYIASEVSKGLADLSLELRKPITFGVITADTLEQAIERAGTKHGNKGWEAALSAIEMANLFKSLR

SEQ ID NO: 8043 - protein, 1301 aa, Artificial Sequence
  SARS-CoV-2/pangolin/Guangxi/P5L/2017__EPI_ISL_410540 spike protein (1-1141)(I706C_T1071C) LumSynth construct
MFVFLFVLPLVSSQCVNLTTRTGIPPGYTNSSTRGVYYPDKVFRSSILHLTQDLFLPFFSNVTWFNTINYQGGFKKFDNPVLPFNDGVYFASTEKSNIIRGWIFGTTLDARTQSLLIVNNATNVVIKVCEFQFCTDPFLGVYYHNNNKTWVENEFRVYSSANNCTFEYISQPFLMDLEGKQGNFKNLREFVFKNVDGYFKIYSKHTPIDLVRDLPRGFAALEPLVDLPIGINITRFQTLLALHRSYLTPGKLESGWTTGAAAYYVGYLQQRTFLLSYNQNGTITDAVDCSLDPLSETKCTLKSLTVEKGIYQTSNFRVQPTISIVRFPNITNLCPFGEVFNASKFASVYAWNRKRISNCVADYSVLYNSTSFSTFKCYGVSPTKLNDLCFTNVYADSFVVKGDEVRQIAPGQTGVIADYNYKLPDDFTGCVIAWNSVKQDALTGGNYGYLYRLFRKSKLKPFERDISTEIYQAGSTPCNGQVGLNCYYPLERYGFHPTTGVNYQPFRVVVLSFELLNGPATVCGPKLSTTLVKDKCVNFNFNGLTGTGVLTTSKKQFLPFQQFGRDISDTTDAVRDPQTLEILDITPCSFGGVSVITPGTNTSNQVAVLYQDVNCTEVPMAIHAEQLTPAWRVYSAGANVFQTRAGCLVGAEHVNNSYECDIPVGAGICASYHSMSSFRSVNQRSIIAYTMSLGAENSVAYSNNSCAIPTNFTISVTTEILPVSMTKTSVDCTMYICGDSIECSNLLLQYGSFCTQLNRALTGIAVEQDKNTQEVFAQVKQIYKTPPIKDFGGFNFSQILPDPSKPSKRSFIEDLLFNKVTLADAGFIKQYGDCLGDIAARDLICAQKFNGLTVLPPLLTDEMIAQYTSALLAGTITSGWTFGAGAALQIPFAMQMAYRFNGIGVTQNVLYENQKLIANQFNSAIGKIQDSLSSTASALGKLQDVVNQNAQALNTLVKQLSSNFGAISSVLNDILSRLDKVEAEVQIDRLITGRLQSLQTYVTQQLIRAAEIRASANLAATKMSECVLGQSKRVDFCGKGYHLMSFPQSAPHGVVFLHVTYVPAQEKNFTCAPAICHEGKAHFPREGVFVSNGTHWFITQRNFYEPQIITTDNTFVSGSCDVVIGIVNNTVYDPLQPELDSGGGSGGGQIYEGKLTAEGLRFGIVASRFNHALVDRLVEGAIDAIVRHGGREEDITLVRVPGSWEIPVAAGELARKEDIDAVIAIGVLIRGATPHFDYIASEVSKGLADLSLELRKPITFGVITADTLEQAIERAGTKHGNKGWEAALSAIEMANLFKSLR

SEQ ID NO: 8044 - protein, 1301 aa, Artificial Sequence
  SARS-CoV-2/pangolin/Guangxi/P5E/2017__EPI_ISL_410541 spike protein (1-1141)(I706C_T1071C) LumSynth construct
MFVFLFVLPLVSSQCVNLTTRTGIPPGYTNSSTRGVYYPDKVFRSSILHLTQDLFLPFFSNVTWFNTITYQGGSKKFDNPVLPFNDGVYFASTEKSNIIRGWIFGTTLDARTQSLLIVNNATNVVIKVCEFQFCTDPFLGVYYHNNNKTWVENEFRVYSSANNCTFEYISQPFLMDLEGKQGNFKNLREFVFKNVDGYFKIYSKHTPIDLVRDLPRGFAALEPLVDLPIGINITRFQTLLALHRSYLTPGKLESGWTTGAAAYYVGYLQQRTFLLSYNQNGTITDAVDCSLDPLSETKCTLKSLTVEKGIYQTSNFRVQPTISIVRFPNITNLCPFGEVFNASKFASVYAWNRKRISNCVADYSVLYNSTSFSTFKCYGVSPTKLNDLCFTNVYADSFVVKGDEVRQIAPGQTGVIADYNYKLPDDFTGCVIAWNSVKQDALTGDNYGYLYRLFRKSKLKPFERDISTEIYQAGSTPCNGQVGLNCYYPLERYGFHPTTGVNYQPFRVVVLSFELLNGPATVCGPKLSTTLVKDKCVNFNFNGLTGTGVLTTSKKQFLPFQQFGRDISDTTDAVRDPQTLEILDITPCSFGGVSVITPGTNTSNQVAVLYQDVNCTEVPMAIHAEQLTPAWRVYSAGANVFQTRAGCLVGAEHVNNSYECDIPVGAGICASYHSMSSFRSVNQRSIIAYTMSLGAENSVAYSNNSCAIPTNFTISVTTEILPVSMTKTSVDCTMYICGDSIECSNLLLQYGSFCTQLNRALTGIAVEQDKNTQEVFAQVKQIYKTPPIKDFGGFNFSQILPDPSKPSKRSFIEDLLFNKVTLADAGFIKQYGDCLGDIAARDLICAQKFNGLTVLPPLLTDEMIAQYTSALLAGTITSGWTFGAGAALQIPFAMQMAYRFNGIGVTQNVLYENQKLIANQFNSAIGKIQDSLSSTASALGKLQDVVNQNAQALNTLVKQLSSNFGAISSVLNDILSRLDKVEAEVQIDRLITGRLQSLQTYVTQQLIRAAEIRASANLAATKMSECVLGQSKRVDFCGKGYHLMSFPQSAPHGVVFLHVTYVPAQEKNFTCAPAICHEGKAHFPREGVFVSNGTHWFITQRNFYEPQIITTDNTFVSGSCDVVIGIVNNTVYDPLQPELDSGGGSGGGQIYEGKLTAEGLRFGIVASRFNHALVDRLVEGAIDAIVRHGGREEDITLVRVPGSWEIPVAAGELARKEDIDAVIAIGVLIRGATPHFDYIASEVSKGLADLSLELRKPITFGVITADTLEQAIERAGTKHGNKGWEAALSAIEMANLFKSLR

SEQ ID NO: 8045 - protein, 1299 aa, Artificial Sequence
  SARS-CoV-2/pangolin/Guangxi/P1E/2017__EPI_ISL_410539 spike protein (1-1139)(I704C_T1069C) LumSynth construct
MFVFLFVLPLVSSQCVNLTTRTGIQPGYTNSSTRGVYYPDKVFRSSILHLTQDLFLPFFSNVTWFNTINYQGGFKKFDNPVLPFNDGVYFASTEKSNIIRGWIFGTTLDARTQSLLIVNNATNVVIKVCEFQFCTDPFLGVYYHNNNKTWVENEFRVYSSANNCTFEYISQPFLMDLEGKQGNFKNLREFVFKNVDGYFKIYSKHTPIDLVRDLPRGFAALEPLVDLPIGINITRFQTLLALHRSYLTPGKLESGWTTGAAAYYVGYLQQRTFLLSYNQNGTITDAVDCSLDPLSETKCTLKSLTVEKGIYQTSNFRVQPTISIVRFPNITNLCPFGEVFNASKFASVYAWNRKRISNCVADYSVLYNSTSFSTFKCYGVSPTKLNDLCFTNVYADSFVVKGDEVRQIAPGQTGVIADYNYKLPDDFTGCVIAWNSVKQDALTGGNYLYRLFRKSKLKPFERDISTEIYQAGSTPCNGQVGLNCYYPLERYGFHPTTGVNYQPFRVVVLSFELLNGPATVCGPKLSTTLVKDKCVNFNFNGLTGTGVLTTSKKQFLPFQQFGRDISDTTDAVRDPQTLEILDITPCSFGGVSVITPGTNTSNQVAVLYQDVNCTEVPMAIHAEQLTPAWRVYSAGANVFQTRAGCLVGAEHVNNSYECDIPVGAGICASYHSMSSLRSVNQRSIIAYTMSLGAENSVAYSNNSCAIPTNFTISVTTEILPVSMTKTSVDCTMYICGDSIECSNLLLQYGSFCTQLNRALTGIAVEQDKNTQEVFAQVKQIYKTPPIKDFGGFNFSQILPDPSKPSKRSFIEDLLFNKVTLADAGFIKQYGDCLGDIAARDLICAQKFNGLTVLPPLLTDEMIAQYTSALLAGTITSGWTFGAGAALQIPFAMQMAYRFNGIGVTQNVLYENQKLIANQFNSAIGKIQDSLSSTASALGKLQDVVNQNAQALNTLVKQLSSNFGAISSVLNDILSRLDKVEAEVQIDRLITGRLQSLQTYVTQQLIRAAEIRASANLAATKMSECVLGQSKRVDFCGKGYHLMSFPQSAPHGVVFLHVTYVPAQEKNFTCAPAICHEGKAHFPREGVFVSNGTHWFITQRNFYEPQIITTDNTFVSGSCDVVIGIVNNTVYDPLQPELDSGGGSGGGQIYEGKLTAEGLRFGIVASRFNHALVDRLVEGAIDAIVRHGGREEDITLVRVPGSWEIPVAAGELARKEDIDAVIAIGVLIRGATPHFDYIASEVSKGLADLSLELRKPITFGVITADTLEQAIERAGTKHGNKGWEAALSAIEMANLFKSLR

SEQ ID NO: 8046 - protein, 1307 aa, Artificial Sequence
  SARS-CoV-2/Wuhan/WIV05/2019__EPI_ISL_402128 spike protein (1-1147)(I714C_Y1110C) LumSynth construct
MFVFLVLLPLVSSQCVNLTTRTQLPPAYTNSFTRGVYYPDKVFRSSVLHSTQDLFLPFFSNVTWFHAIHVSGTNGTKRFDNPVLPFNDGVYFASTEKSNIIRGWIFGTTLDSKTQSLLIVNNATNVVIKVCEFQFCNDPFLGVYYHKNNKSWMESEFRVYSSANNCTFEYVSQPFLMDLEGKQGNFKNLREFVFKNIDGYFKIYSKHTPINLVRDLPQGFSALEPLVDLPIGINITRFQTLLALHRSYLTPGDSSSGWTAGAAAYYVGYLQPRTFLLKYNENGTITDAVDCALDPLSETKCTLKSFTVEKGIYQTSNFRVQPTESIVRFPNITNLCPFGEVFNATRFASVYAWNRKRISNCVADYSVLYNSASFSTFKCYGVSPTKLNDLCFTNVYADSFVIRGDEVRQIAPGQTGKIADYNYKLPDDFTGCVIAWNSNNLDSKVGGNYNYLYRLFRKSNLKPFERDISTEIYQAGSTPCNGVEGFNCYFPLQSYGFQPTNGVGYQPYRVVVLSFELLHAPATVCGPKKSTNLVKNKCVNFNFNGLTGTGVLTESNKKFLPFQQFGRDIADTTDAVRDPQTLEILDITPCSFGGVSVITPGTNTSNQVAVLYQDVNCTEVPVAIHADQLTPTWRVYSTGSNVFQTRAGCLIGAEHVNNSYECDIPIGAGICASYQTQTNSPRRARSVASQSIIAYTMSLGAENSVAYSNNSIACPTNFTISVTTEILPVSMTKTSVDCTMYICGDSTECSNLLLQYGSFCTQLNRALTGIAVEQDKNTQEVFAQVKQIYKTPPIKDFGGFNFSQILPDPSKPSKRSFIEDLLFNKVTLADAGFIKQYGDCLGDIAARDLICAQKFNGLTVLPPLLTDEMIAQYTSALLAGTITSGWTFGAGAALQIPFAMQMAYRFNGIGVTQNVLYENQKLIANQFNSAIGKIQDSLSSTASALGKLQDVVNQNAQALNTLVKQLSSNFGAISSVLNDILSRLDKVEAEVQIDRLITGRLQSLQTYVTQQLIRAAEIRASANLAATKMSECVLGQSKRVDFCGKGYHLMSFPQSAPHGVVFLHVTYVPAQEKNFTTAPAICHDGKAHFPREGVFVSNGTHWFVTQRNFCEPQIITTDNTFVSGNCDVVIGIVNNTVYDPLQPELDSGGGSGGGQIYEGKLTAEGLRFGIVASRFNHALVDRLVEGAIDAIVRHGGREEDITLVRVPGSWEIPVAAGELARKEDIDAVIAIGVLIRGATPHFDYIASEVSKGLADLSLELRKPITFGVITADTLEQAIERAGTKHGNKGWEAALSAIEMANLFKSLR

SEQ ID NO: 8047 - protein, 1303 aa, Artificial Sequence
  SARS-CoV-2/bat/Yunnan/RaTG13/2013__EPI_ISL_402131 spike protein (1-1143)(I710C_Y1106C) LumSynth construct
MFVFLVLLPLVSSQCVNLTTRTQLPPAYTNSSTRGVYYPDKVFRSSVLHLTQDLFLPFFSNVTWFHAIHVSGTNGIKRFDNPVLPFNDGVYFASTEKSNIIRGWIFGTTLDSKTQSLLIVNNATNVVIKVCEFQFCNDPFLGVYYHKNNKSWMESEFRVYSSANNCTFEYVSQPFLMDLEGKQGNFKNLREFVFKNIDGYFKIYSKHTPINLVRDLPPGFSALEPLVDLPIGINITRFQTLLALHRSYLTPGDSSSGWTAGAAAYYVGYLQPRTFLLKYNENGTITDAVDCALDPLSETKCTLKSFTVEKGIYQTSNFRVQPTDSIVRFPNITNLCPFGEVFNATTFASVYAWNRKRISNCVADYSVLYNSTSFSTFKCYGVSPTKLNDLCFTNVYADSFVITGDEVRQIAPGQTGKIADYNYKLPDDFTGCVIAWNSKHIDAKEGGNFNYLYRLFRKANLKPFERDISTEIYQAGSKPCNGQTGLNCYYPLYRYGFYPTDGVGHQPYRVVVLSFELLNAPATVCGPKKSTNLVKNKCVNFNFNGLTGTGVLTESNKKFLPFQQFGRDIADTTDAVRDPQTLEILDITPCSFGGVSVITPGTNASNQVAVLYQDVNCTEVPVAIHADQLTPTWRVYSTGSNVFQTRAGCLIGAEHVNNSYECDIPIGAGICASYQTQTNSRSVASQSIIAYTMSLGAENSVAYSNNSIACPTNFTISVTTEILPVSMTKTSVDCTMYICGDSTECSNLLLQYGSFCTQLNRALTGIAVEQDKNTQEVFAQVKQIYKTPPIKDFGGFNFSQILPDPSKPSKRSFIEDLLFNKVTLADAGFIKQYGDCLGDIAARDLICAQKFNGLTVLPPLLTDEMIAQYTSALLAGTITSGWTFGAGAALQIPFAMQMAYRFNGIGVTQNVLYENQKLIANQFNSAIGKIQDSLSSTASALGKLQDVVNQNAQALNTLVKQLSSNFGAISSVLNDILSRLDKVEAEVQIDRLITGRLQSLQTYVTQQLIRAAEIRASANLAATKMSECVLGQSKRVDFCGKGYHLMSFPQSAPHGVVFLHVTYVPAQEKNFTTAPAICHDGKAHFPREGVFVSNGTHWFVTQRNFCEPQIITTDNTFVSGSCDVVIGIVNNTVYDPLQPELDSGGGSGGGQIYEGKLTAEGLRFGIVASRFNHALVDRLVEGAIDAIVRHGGREEDITLVRVPGSWEIPVAAGELARKEDIDAVIAIGVLIRGATPHFDYIASEVSKGLADLSLELRKPITFGVITADTLEQAIERAGTKHGNKGWEAALSAIEMANLFKSLR

SEQ ID NO: 8048 - protein, 1307 aa, Artificial Sequence
  SARS-CoV-2/Wuhan/HBCDC-HB-01/2019__EPI_ISL_402132 spike protein (1-1147)(I714C_Y1110C) LumSynth construct
MFVFLVLLPLVSSQCVNLTTRTQLPPAYTNSITRGVYYPDKVFRSSVLHSTQDLFLPFFSNVTWFHAIHVSGTNGTKRFDNPVLPFNDGVYFASTEKSNIIRGWIFGTTLDSKTQSLLIVNNATNVVIKVCEFQFCNDPFLGVYYHKNNKSWMESEFRVYSSANNCTFEYVSQPFLMDLEGKQGNFKNLREFVFKNIDGYFKIYSKHTPINLVRDLPQGFSALEPLVDLPIGINITRFQTLLALHRSYLTPGDSSSGWTAGAAAYYVGYLQPRTFLLKYNENGTITDAVDCALDPLSETKCTLKSFTVEKGIYQTSNFRVQPTESIVRFPNITNLCPFGEVFNATRFASVYAWNRKRISNCVADYSVLYNSASFSTFKCYGVSPTKLNDLCFTNVYADSFVIRGDEVRQIAPGQTGKIADYNYKLPDDFTGCVIAWNSNNLDSKVGGNYNYLYRLFRKSNLKPFERDISTEIYQAGSTPCNGVEGFNCYFPLQSYGFQPTNGVGYQPYRVVVLSFELLHAPATVCGPKKSTNLVKNKCVNFNFNGLTGTGVLTESNKKFLPFQQFGRDIADTTDAVRDPQTLEILDITPCSFGGVSVITPGTNTSNQVAVLYQDVNCTEVPVAIHADQLTPTWRVYSTGSNVFQTRAGCLIGAEHVNNSYECDIPIGAGICASYQTQTNSPRRARSVASQSIIAYTMSLGAENSVAYSNNSIACPTNFTISVTTEILPVSMTKTSVDCTMYICGDSTECSNLLLQYGSFCTQLNRALTGIAVEQDKNTQEVFAQVKQIYKTPPIKDFGGFNFSQILPDPSKPSKRSFIEDLLFNKVTLADAGFIKQYGDCLGDIAARDLICAQKFNGLTVLPPLLTDEMIAQYTSALLAGTITSGWTFGAGAALQIPFAMQMAYRFNGIGVTQNVLYENQKLIANQFNSAIGKIQDSLSSTASALGKLQDVVNQNAQALNTLVKQLSSNFGAISSVLNDILSRLDKVEAEVQIDRLITGRLQSLQTYVTQQLIRAAEIRASANLAATKMSECVLGQSKRVDFCGKGYHLMSFPQSAPHGVVFLHVTYVPAQEKNFTTAPAICHDGKAHFPREGVFVSNGTHWFVTQRNFCEPQIITTDNTFVSGNCDVVIGIVNNTVYDPLQPELDSGGGSGGGQIYEGKLTAEGLRFGIVASRFNHALVDRLVEGAIDAIVRHGGREEDITLVRVPGSWEIPVAAGELARKEDIDAVIAIGVLIRGATPHFDYIASEVSKGLADLSLELRKPITFGVITADTLEQAIERAGTKHGNKGWEAALSAIEMANLFKSLR

SEQ ID NO: 8049 - protein, 1307 aa, Artificial Sequence
  SARS-CoV-2/Guangdong/20SF028/2020__EPI_ISL_403936 spike protein (1-1147)(I714C_Y1110C) LumSynth construct
MFVFLVLLPLVSSQCVNLTTRTQLPPAYTNSFTRGVYYPDKVFRSSVLYSTQDLFLPFFSNVTWFHAIHVSGTNGTKRFDNPVLPFNDGVYFASTEKSNIIRGWIFGTTLDSKTQSLLIVNNATNVVIKVCEFQFCNDPFLGVYYHKNNKSWMESEFRVYSSANNCTFEYVSQPFLMDLEGKQGNFKNLREFVFKNIDGYFKIYSKHTPINLVRDLPQGFSALEPLVDLPIGINITRFQTLLALHRSYLTPGDSSSGWTAGAAAYYVGYLQPRTFLLKYNENGTITDAVDCALDPLSETKCTLKSFTVEKGIYQTSNFRVQPTESIVRFPNITNLCPFGEVFNATRFASVYAWNRKRISNCVADYSVLYNSASFSTFKCYGVSPTKLNDLCFTNVYADSFVIRGDEVRQIAPGQTGKIADYNYKLPDDFTGCVIAWNSNNLDSKVGGNYNYLYRLFRKSNLKPFERDISTEIYQAGSTPCNGVEGFNCYFPLQSYGFQPTNGVGYQPYRVVVLSFELLHAPATVCGPKKSTNLVKNKCVNFNFNGLTGTGVLTESNKKFLPFQQFGRDIADTTDAVRDPQTLEILDITPCSFGGVSVITPGTNTSNQVAVLYQDVNCTEVPVAIHADQLTPTWRVYSTGSNVFQTRAGCLIGAEHVNNSYECDIPIGAGICASYQTQTNSPRRARSVASQSIIAYTMSLGAENSVAYSNNSIACPTNFTISVTTEILPVSMTKTSVDCTMYICGDSTECSNLLLQYGSFCTQLNRALTGIAVEQDKNTQEVFAQVKQIYKTPPIKDFGGFNFSQILPDPSKPSKRSFIEDLLFNKVTLADAGFIKQYGDCLGDIAARDLICAQKFNGLTVLPPLLTDEMIAQYTSALLAGTITSGWTFGAGAALQIPFAMQMAYRFNGIGVTQNVLYENQKLIANQFNSAIGKIQDSLSSTASALGKLQDVVNQNAQALNTLVKQLSSNFGAISSVLNDILSRLDKVEAEVQIDRLITGRLQSLQTYVTQQLIRAAEIRASANLAATKMSECVLGQSKRVDFCGKGYHLMSFPQSAPHGVVFLHVTYVPAQEKNFTTAPAICHDGKAHFPREGVFVSNGTHWFVTQRNFCEPQIITTDNTFVSGNCDVVIGIVNNTVYDPLQPELDSGGGSGGGQIYEGKLTAEGLRFGIVASRFNHALVDRLVEGAIDAIVRHGGREEDITLVRVPGSWEIPVAAGELARKEDIDAVIAIGVLIRGATPHFDYIASEVSKGLADLSLELRKPITFGVITADTLEQAIERAGTKHGNKGWEAALSAIEMANLFKSLR

SEQ ID NO: 8050 - protein, 1307 aa, Artificial Sequence
  SARS-CoV-2/Shenzhen/SZTH-001/2020__EPI_ISL_406592 spike protein (1-1147)(I714C_Y1110C) LumSynth construct
MFVFLVLLPLVSSQCVNLTTRTQLPPAYTNSFTRGVYYPDKVFRSSVLHSTQDLFLPFFSNVTWFHAIHVSGTNGTKRFDNPVLPFNDGVYFASTEKSNIIRGWIFGTTLDSKTQSLLIVNNATNVVIKVCEFQFCNDPFLGVYYHKNNKSWMESEFRVYSSANNCTFEYVSQPFLMDLEGKQGNFKNLREFVFKNIDGYFKIYSKHTPINLVRDLPQGFSALEPLVDLPIGINITRFQTLLALHRSYLTPGDSSSGWTAGAAAYYVGYLQPRTFLLKYNENGTITDAVDCALDPLSETKCTLKSFTVEKGIYQTSNFRVQPTESIVRFPNITNLCPFGEVFNATRFASVYAWNRKRISNCVADYSVLYNSASFSTFKCYGVSPTKLNDLCFTNVYADSFVIRGDEVRQIAPGQTGKIADYNYKLPDDFTGCVIAWNSNNLDSKVGGNYNYLYRLFRKSNLKPFERDISTEIYQAGSTPCNGVEGFNCYFPLQSYGFQPTNGVGYQPYRVVVLSFELLHAPATVCGPKKSTNLVKNKCVNFNFNGLTGTGVLTESNKKFLPFQQFGRDIADTTDAVRDPQTLEILDITPCSFGGVSVITPGTNTSNQVAVLYQDVNCTEVPVAIHADQLTPTWRVYSTGSNVFQTRAGCLIGAEHVNNSYECDIPIGAGICASYQTQTNSPRRARSVASQSIIAYTMSLGAENSVAYSNNSIACPTNFTISVTTEILPVSMTKTSVDCTMYICGDSTECSNLLLQYGSFCTQLNRALTGIAVEQDKNTQEVFAQVKQIYKTPPIKDFGGFNFSQILPDPSKPSKRSFIEDLLFNKVTLADAGFIKQYGDCLGDIAARDLICAQKFNGLTVLPPLLTDEMIAQYTSALLAGTITSGWTFGAGAALQIPFAMQMAYRFNGIGVTQNVLYENQKLIANQFNSAIGKIQDSLSSTASALGKLQDVVNQNAQALNTLVKQLSSNFGAISSVLNDILSRLDKVEAEVQIDRLITGRLQSLQTYVTQQLIRAAEIRASANLAATKMSECVLGQSKRVDFCGKGYHLMSFPQSAPHGVVFLHVTYVPAQEKNFTTAPAICHDGKAHFPREGVFVSNGTHWFVTQRNFCEPQIITTDNTFVSGNCDVLIGIVNNTVYDPLQPELDSGGGSGGGQIYEGKLTAEGLRFGIVASRFNHALVDRLVEGAIDAIVRHGGREEDITLVRVPGSWEIPVAAGELARKEDIDAVIAIGVLIRGATPHFDYIASEVSKGLADLSLELRKPITFGVITADTLEQAIERAGTKHGNKGWEAALSAIEMANLFKSLR

SEQ ID NO: 8051 - protein, 1307 aa, Artificial Sequence
  SARS-CoV-2/Shenzhen/SZTH-004/2020__EPI_ISL_406595 spike protein (1-1147)(I714C_Y1110C) LumSynth construct
MFVFLVLLPLVSSQCVNLTTRTQLPPAYTNSFTRGVYYPDKVFRSSVLHSTQDLFLPFFSNVTWFHAIHVSGTNGTKRFDNPVLPFNDGVYFASTEKSNIIRGWIFGTTLDSKTQSLLIVNNATNVVIKVCEFQFCNDPFLGVYYHKNNKSWMESEFRVYSSANNCTFEYVSQPFLMDLEGKQGNFKNLREFVFKNIDGYFKIYSKHTPINLVRDLPQGFSALEPLVDLPIGINITRFQTLLALHRSYLTPGDSSSGWTAGAAAYYVGYLQPRTFLLKYNENGTITDAVDCALDPLSETKCTLKSFTVEKGIYQTSNFRVQPTESIVRFPNITNLCPFGEVFNATRFASVYAWDRKRISNCVAYYSVLYNSASFSTFKCYGVSPTKLNDLCFTNVYADSFVIRGDEVRQIAPGQTGKIADYNYKLPDDFTGCVIAWNSNNLDSKVGGNYNYLYRLFRKSNLKPFERDISTEIYQAGSTPCNGVEGFNCYFPLQSYGFQPTNGVGYQPYRVVVLSFELLHAPATVCGPKKSTNLVKNKCVNFNFNGLTGTGVLTESNKKFLPFQQFGRDIADTTDAVRDPQTLEILDITPCSFGGVSVITPGTNTSNQVAVLYQDVNCTEVPVAIHADQLTPTWRVYSTGSNVFQTRAGCLIGAEHVNNSYECDIPIGAGICASYQTQTNSPRRARSVASQSIIAYTMSLGAENSVAYSNNSIACPTNFTISVTTEILPVSMTKTSVDCTMYICGDSTECSNLLLQYGSFCTQLNRALTGIAVEQDKNTQEVFAQVKQIYKTPPIKDFGGFNFSQILPDPSKPSKRSFIEDLLFNKVTLADAGFIKQYGDCLGDIAARDLICAQKFNGLTVLPPLLTDEMIAQYTSALLAGTITSGWTFGAGAALQIPFAMQMAYRFNGIGVTQNVLYENQKLIANQFNSAIGKIQDSLSSTASALGKLQDVVNQNAQALNTLVKQLSSNFGAISSVLNDILSRLDKVEAEVQIDRLITGRLQSLQTYVTQQLIRAAEIRASANLAATKMSECVLGQSKRVDFCGKGYHLMSFPQSAPHGVVFLHVTYVPAQEKNFTTAPAICHDGKAHFPREGVFVSNGTHWFVTQRNFCEPQIITTDNTFVSGNCDVVIGIVNNTVYDPLQPELDSGGGSGGGQIYEGKLTAEGLRFGIVASRFNHALVDRLVEGAIDAIVRHGGREEDITLVRVPGSWEIPVAAGELARKEDIDAVIAIGVLIRGATPHFDYIASEVSKGLADLSLELRKPITFGVITADTLEQAIERAGTKHGNKGWEAALSAIEMANLFKSLR

SEQ ID NO: 8052 - protein, 1307 aa, Artificial Sequence
  SARS-CoV-2/France/IDF0372/2020__EPI_ISL_406596 spike protein (1-1147)(I714C_Y1110C) LumSynth construct
MFVFLVLLPLVSSQCVNLTTRTQLPPAYTNSFTRGVYYPDKVFRSSVLHSTQDLFLPFFSNVTWFHAIHVSGTNGTKRFDNPVLPFNDGVYFASTEKSNIIRGWIFGTTLDSKTQSLLIVNNATNVVIKVCEFQFCNDPFLGVYYHKNNKSWMESEFRVYSSANNCTFEYVSQPFLMDLEGKQGNFKNLREFVFKNIDGYFKIYSKHTPINLVRDLPQGFSALEPLVDLPIGINITRFQTLLALHRSYLTPGDSSSGWTAGAAAYYVGYLQPRTFLLKYNENGTITDAVDCALDPLSETKCTLKSFTVEKGIYQTSNFRVQPTESIVRFPNITNLCPFGEVFNATRFASVYAWNRKRISNCVADYSFLYNSASFSTFKCYGVSPTKLNDLCFTNVYADSFVIRGDEVRQIAPGQTGKIADYNYKLPDDFTGCVIAWNSNNLDSKVGGNYNYLYRLFRKSNLKPFERDISTEIYQAGSTPCNGVEGFNCYFPLQSYGFQPTNGVGYQPYRVVVLSFELLHAPATVCGPKKSTNLVKNKCVNFNFNGLTGTGVLTESNKKFLPFQQFGRDIADTTDAVRDPQTLEILDITPCSFGGVSVITPGTNTSNQVAVLYQDVNCTEVPVAIHADQLTPTWRVYSTGSNVFQTRAGCLIGAEHVNNSYECDIPIGAGICASYQTQTNSPRRARSVASQSIIAYTMSLGAENSVAYSNNSIACPTNFTISVTTEILPVSMTKTSVDCTMYICGDSTECSNLLLQYGSFCTQLNRALTGIAVEQDKNTQEVFAQVKQIYKTPPIKDFGGFNFSQILPDPSKPSKRSFIEDLLFNKVTLADAGFIKQYGDCLGDIAARDLICAQKFNGLTVLPPLLTDEMIAQYTSALLAGTITSGWTFGAGAALQIPFAMQMAYRFNGIGVTQNVLYENQKLIANQFNSAIGKIQDSLSSTASALGKLQDVVNQNAQALNTLVKQLSSNFGAISSVLNDILSRLDKVEAEVQIDRLITGRLQSLQTYVTQQLIRAAEIRASANLAATKMSECVLGQSKRVDFCGKGYHLMSFPQSAPHGVVFLHVTYVPAQEKNFTTAPAICHDGKAHFPREGVFVSNGTHWFVTQRNFCEPQIITTDNTFVSGNCDVVIGIVNNTVYDPLQPELDSGGGSGGGQIYEGKLTAEGLRFGIVASRFNHALVDRLVEGAIDAIVRHGGREEDITLVRVPGSWEIPVAAGELARKEDIDAVIAIGVLIRGATPHFDYIASEVSKGLADLSLELRKPITFGVITADTLEQAIERAGTKHGNKGWEAALSAIEMANLFKSLR

SEQ ID NO: 8053 - protein, 1307 aa, Artificial Sequence
  SARS-CoV-2/Australia/VIC01/2020__EPI_ISL_406844 spike protein (1-1147)(I714C_Y1110C) LumSynth construct
MFVFLVLLPLVSSQCVNLTTRTQLPPAYTNSFTRGVYYPDKVFRSSVLHSTQDLFLPFFSNVTWFHAIHVSGTNGTKRFDNPVLPFNDGVYFASTEKSNIIRGWIFGTTLDSKTQSLLIVNNATNVVIKVCEFQFCNDPFLGVYYHKNNKSWMESEFRVYSSANNCTFEYVSQPFLMDLEGKQGNFKNLREFVFKNIDGYFKIYSKHTPINLVRDLPQGFSALEPLVDLPIGINITRFQTLLALHRRYLTPGDSSSGWTAGAAAYYVGYLQPRTFLLKYNENGTITDAVDCALDPLSETKCTLKSFTVEKGIYQTSNFRVQPTESIVRFPNITNLCPFGEVFNATRFASVYAWNRKRISNCVADYSVLYNSASFSTFKCYGVSPTKLNDLCFTNVYADSFVIRGDEVRQIAPGQTGKIADYNYKLPDDFTGCVIAWNSNNLDSKVGGNYNYLYRLFRKSNLKPFERDISTEIYQAGSTPCNGVEGFNCYFPLQSYGFQPTNGVGYQPYRVVVLSFELLHAPATVCGPKKSTNLVKNKCVNFNFNGLTGTGVLTESNKKFLPFQQFGRDIADTTDAVRDPQTLEILDITPCSFGGVSVITPGTNTSNQVAVLYQDVNCTEVPVAIHADQLTPTWRVYSTGSNVFQTRAGCLIGAEHVNNSYECDIPIGAGICASYQTQTNSPRRARSVASQSIIAYTMSLGAENSVAYSNNSIACPTNFTISVTTEILPVSMTKTSVDCTMYICGDSTECSNLLLQYGSFCTQLNRALTGIAVEQDKNTQEVFAQVKQIYKTPPIKDFGGFNFSQILPDPSKPSKRSFIEDLLFNKVTLADAGFIKQYGDCLGDIAARDLICAQKFNGLTVLPPLLTDEMIAQYTSALLAGTITSGWTFGAGAALQIPFAMQMAYRFNGIGVTQNVLYENQKLIANQFNSAIGKIQDSLSSTASALGKLQDVVNQNAQALNTLVKQLSSNFGAISSVLNDILSRLDKVEAEVQIDRLITGRLQSLQTYVTQQLIRAAEIRASANLAATKMSECVLGQSKRVDFCGKGYHLMSFPQSAPHGVVFLHVTYVPAQEKNFTTAPAICHDGKAHFPREGVFVSNGTHWFVTQRNFCEPQIITTDNTFVSGNCDVVIGIVNNTVYDPLQPELDSGGGSGGGQIYEGKLTAEGLRFGIVASRFNHALVDRLVEGAIDAIVRHGGREEDITLVRVPGSWEIPVAAGELARKEDIDAVIAIGVLIRGATPHFDYIASEVSKGLADLSLELRKPITFGVITADTLEQAIERAGTKHGNKGWEAALSAIEMANLFKSLR

SEQ ID NO: 8054 - protein, 1307 aa, Artificial Sequence
  SARS-CoV-2/Germany/BavPat1/2020__EPI_ISL_406862 spike protein (1-1147)(I714C_Y1110C) LumSynth construct
MFVFLVLLPLVSSQCVNLTTRTQLPPAYTNSFTRGVYYPDKVFRSSVLHSTQDLFLPFFSNVTWFHAIHVSGTNGTKRFDNPVLPFNDGVYFASTEKSNIIRGWIFGTTLDSKTQSLLIVNNATNVVIKVCEFQFCNDPFLGVYYHKNNKSWMESEFRVYSSANNCTFEYVSQPFLMDLEGKQGNFKNLREFVFKNIDGYFKIYSKHTPINLVRDLPQGFSALEPLVDLPIGINITRFQTLLALHRSYLTPGDSSSGWTAGAAAYYVGYLQPRTFLLKYNENGTITDAVDCALDPLSETKCTLKSFTVEKGIYQTSNFRVQPTESIVRFPNITNLCPFGEVFNATRFASVYAWNRKRISNCVADYSVLYNSASFSTFKCYGVSPTKLNDLCFTNVYADSFVIRGDEVRQIAPGQTGKIADYNYKLPDDFTGCVIAWNSNNLDSKVGGNYNYLYRLFRKSNLKPFERDISTEIYQAGSTPCNGVEGFNCYFPLQSYGFQPTNGVGYQPYRVVVLSFELLHAPATVCGPKKSTNLVKNKCVNFNFNGLTGTGVLTESNKKFLPFQQFGRDIADTTDAVRDPQTLEILDITPCSFGGVSVITPGTNTSNQVAVLYQGVNCTEVPVAIHADQLTPTWRVYSTGSNVFQTRAGCLIGAEHVNNSYECDIPIGAGICASYQTQTNSPRRARSVASQSIIAYTMSLGAENSVAYSNNSIACPTNFTISVTTEILPVSMTKTSVDCTMYICGDSTECSNLLLQYGSFCTQLNRALTGIAVEQDKNTQEVFAQVKQIYKTPPIKDFGGFNFSQILPDPSKPSKRSFIEDLLFNKVTLADAGFIKQYGDCLGDIAARDLICAQKFNGLTVLPPLLTDEMIAQYTSALLAGTITSGWTFGAGAALQIPFAMQMAYRFNGIGVTQNVLYENQKLIANQFNSAIGKIQDSLSSTASALGKLQDVVNQNAQALNTLVKQLSSNFGAISSVLNDILSRLDKVEAEVQIDRLITGRLQSLQTYVTQQLIRAAEIRASANLAATKMSECVLGQSKRVDFCGKGYHLMSFPQSAPHGVVFLHVTYVPAQEKNFTTAPAICHDGKAHFPREGVFVSNGTHWFVTQRNFCEPQIITTDNTFVSGNCDVVIGIVNNTVYDPLQPELDSGGGSGGGQIYEGKLTAEGLRFGIVASRFNHALVDRLVEGAIDAIVRHGGREEDITLVRVPGSWEIPVAAGELARKEDIDAVIAIGVLIRGATPHFDYIASEVSKGLADLSLELRKPITFGVITADTLEQAIERAGTKHGNKGWEAALSAIEMANLFKSLR

SEQ ID NO: 8055 - protein, 1307 aa, Artificial Sequence
  SARS-CoV-2/Wuhan/HBCDC-HB-02/2020__EPI_ISL_412978 spike protein (1-1147)(I714C_Y1110C) LumSynth construct
MFVFLVLLPLVSSQCVNLTTRTQLPPAYTNSFTRGVYYPDKVFRSSVLHSTQDLFLPFFSNVTWFHAIHVSGTNGTKRFDNPVLPFNDGVYFASTEKSNIIRGWIFGTTLDSKTQSLLIVNNATNVVIKVCEFQFCNDPFLGVYYHKNNKSWMESEFRVYSSANNCTFEYVSQPFLMDLEGKQGNFKNLREFVFKNIDGYFKIYSKHTPINLVRDLPQGFSALEPLVDLPIGINITRFQTLLALHRSYLTPGDSSSGWTAGAAAYYVGYLQPRTFLLKYNENGTITDAVDCALDPLSETKCTLKSFTVEKGIYQTSNFRVQPTESIVRFPNITNLCPFGEVFNATRFASVYAWNRKRISNCVADYSVLYNSASFSTFKCYGVSPTKLNDLCFTNVYADSFVIRGDEVRQIAPGQTGKIADYNYKLPDDFTGCVIAWNSNNLDSKVGGNYNYLYRLFRKSNLKPFERDISTEIYQAGSTPCNGVEGFNCYFPLQSYGFQPTNGVGYQPYRVVVLSFELLHAPATVCGPKKSTNLVKNKCVNFNFNGLTGTGVLTESNKKFLPFQQFGRDIADTTDAVRDPQTLEILDITPCSFGGVSVITPGTNTSNQVAVLYQDVNCTEVPVAIHADQLTPTWRVYSTGSNVFQTRAGCLIGAEHVNNSYECDIPIGAGICASYQTQTNSPRRARSVASQSIIAYTMSLGAENSVAYSNNSIACPTNFTISVTTEILPVSMTKTSVDCTMYICGDSTECSNFLLQYGSFCTQLNRALTGIAVEQDKNTQEVFAQVKQIYKTPPIKDFGGFNFSQILPDPSKPSKRSFIEDLLFNKVTLADAGFIKQYGDCLGDIAARDLICAQKFNGLTVLPPLLTDEMIAQYTSALLAGTITSGWTFGAGAALQIPFAMQMAYRFNGIGVTQNVLYENQKLIANQFNSAIGKIQDSLSSTASALGKLQDVVNQNAQALNTLVKQLSSNFGAISSVLNDILSRLDKVEAEVQIDRLITGRLQSLQTYVTQQLIRAAEIRASANLAATKMSECVLGQSKRVDFCGKGYHLMSFPQSAPHGVVFLHVTYVPAQEKNFTTAPAICHDGKAHFPREGVFVSNGTHWFVTQRNFCEPQIITTDNTFVSGNCDVVIGIVNNTVYDPLQPELDSGGGSGGGQIYEGKLTAEGLRFGIVASRFNHALVDRLVEGAIDAIVRHGGREEDITLVRVPGSWEIPVAAGELARKEDIDAVIAIGVLIRGATPHFDYIASEVSKGLADLSLELRKPITFGVITADTLEQAIERAGTKHGNKGWEAALSAIEMANLFKSLR

SEQ ID NO: 8056 - protein, 1307 aa, Artificial Sequence
  SARS-CoV-2/Australia/QLD02/2020__EPI_ISL_407896 spike protein (1-1147)(I714C_Y1110C) LumSynth construct
MFVFLVLLPLVSSQCVNLTTRTQLPPAYTNSFTRGVYYPDKVFRSSVLHSTQDLFLPFFSNVTWFHAIHVSGTNGTKRFDNPVLPFNDGVYFASTEKSNIIRGWIFGTTLDSKTQSLLIVNNATNVVIKVCEFQFCNDPFLGVYYHKNNKSWMESEFRVYSSANNCTFEYVSQPFLMDLEGKQGNFKNLREFVFKNIDGYFKIYSKHTPINLVRDLPQGFSALEPLVDLPIGINITRFQTLLALHRSYLTPGDSSSGWTAGAAAYYVGYLQPRTFLLKYNENGTITDAVDCALDPLSETKCTLKSFTVEKGIYQTSNFRVQPTESIVRFPNITNLCPFGEVFNATRFASVYAWNRKRISNCVADYSVLYNSASFSTFKCYGVSPTKLNDLCFTNVYADSFVIRGDEVRQIAPGQTGKIADYNYKLPDDFTGCVIAWNSNNLDSKVGGNYNYLYRLFRKSNLKPFERDISTEIYQAGSTPCNGVEGFNCYFPLQSYGFQPTNGVGYQPYRVVVLSFELLHAPATVCGPKKSTNLVKNKCVNFNFNGLTGTGVLTESNKKFLPFQQFGRDIADTTDAVRDPQTLEILDITPCSFGGVSVITPGTNTSNQVAVLYQDVNCTEVPVAIHADQLTPTWRVYSTGSNVFQTRAGCLIGAEHVNNSYECDIPIGAGICASYQTQTNSPRRARSVASQSIIAYTMSLGAENSVAYSNNSIACPTNFTISVTTEILPVSMTKTSVDCTMYICGDSTECSNLLLQYGSFCTQLNRALTGIAVEQDKNTQEVFAQVKQIYKTPPIKDFGGFNFSQILPDPSKPSKRSFIEDLLFNKVTLADAGFIKQYGDCLGDIAARDLICAQKFNGLTVLPPLLTDEMIAQYTSALLAGTITSGWTFGAGAALQIPFAMQMAYRFNGIGVTQNVLYENQKLIANQFNSAIGKIQDSLSSTASALGKLQDVVNQNAQALNTLVKQLSSNFGAISSVLNDILSRLDKVEAEVQIDRLITGRLQSLQTYVTQQLIRAAEIRASANLAATKMSECVLGQSKRVDFCGKGYHLMSFPQSAPHGVVFLHVTYVPAQEKNFTTAPAICHDGKAHFPREGVFVSNGTHWFVTQRNFCEPQIITTDNTFVSGNCDVVIGIVNNTVYDPLQLELDSGGGSGGGQIYEGKLTAEGLRFGIVASRFNHALVDRLVEGAIDAIVRHGGREEDITLVRVPGSWEIPVAAGELARKEDIDAVIAIGVLIRGATPHFDYIASEVSKGLADLSLELRKPITFGVITADTLEQAIERAGTKHGNKGWEAALSAIEMANLFKSLR

SEQ ID NO: 8057 - protein, 1307 aa, Artificial Sequence
  SARS-CoV-2/India/1-31/2020__EPI_ISL_413523 spike protein (1-1147)(I714C_Y1110C) LumSynth construct
MFVFLVLLPLVSSQCVNLTTRTQLPPAYTNSFTRGVYYPDKVFRSSVLHSTQDLFLPFFSNVTWFHAIHVSGTNGTKRFDNPVLPFNDGVYFASTEKSNIIRGWIFGTTLDSKTQSLLIVNNATNVVIKVCEFQFCNDPFLGVYYHKNNKSWMESEFRVYSSANNCTFEYVSQPFLMDLEGKQGNFKNLREFVFKNIDGYFKIYSKHTPINLVRDLPQGFSALEPLVDLPIGINITRFQTLLALHRSYLTPGDSSSGWTAGAAAYYVGYLQPRTFLLKYNENGTITDAVDCALDPLSETKCTLKSFTVEKGIYQTSNFRVQPTESIVRFPNITNLCPFGEVFNATRFASVYAWNRKRISNCVADYSVLYNSASFSTFKCYGVSPTKLNDLCFTNVYADSFVIRGDEVRQIAPGQTGKIADYNYKLPDDFTGCVIAWNSNNLDSKVGGNYNYLYRLFRKSNLKPFERDISTEIYQAGSTPCNGVEGFNCYFPLQSYGFQPTNGVGYQPYRVVVLSFELLHAPATVCGPKKSTNLVKNKCVNFNFNGLTGTGVLTESNKKFLPFQQFGRDIADTTDAVRDPQTLEILDITPCSFGGVSVITPGTNTSNQVAVLYQDVNCTEVPVAIHADQLTPTWRVYSTGSNVFQTRAGCLIGAEHVNNSYECDIPIGAGICASYQTQTNSPRRARSVASQSIIAYTMSLGAENSVAYSNNSIACPTNFTISVTTEILPVSMTKTSVDCTMYICGDSTECSNLLLQYGSFCTQLNRALTGIAVEQDKNTQEVFAQVKQIYKTPPIKDFGGFNFSQILPDPSKPSKRSFIEDLLFNKVTLADAGFIKQYGDCLGDIAARDLICAQKFNGLTVLPPLLTDEMIAQYTSALLAGTITSGWTFGAGAALQIPFAMQMAYRFNGIGVTQNVLYENQKLIANQFNSVIGKIQDSLSSTASALGKLQDVVNQNAQALNTLVKQLSSNFGAISSVLNDILSRLDKVEAEVQIDRLITGRLQSLQTYVTQQLIRAAEIRASANLAATKMSECVLGQSKRVDFCGKGYHLMSFPQSAPHGVVFLHVTYVPAQEKNFTTAPAICHDGKAHFPREGVFVSNGTHWFVTQRNFCEPQIITTDNTFVSGNCDVVIGIVNNTVYDPLQPELDSGGGSGGGQIYEGKLTAEGLRFGIVASRFNHALVDRLVEGAIDAIVRHGGREEDITLVRVPGSWEIPVAAGELARKEDIDAVIAIGVLIRGATPHFDYIASEVSKGLADLSLELRKPITFGVITADTLEQAIERAGTKHGNKGWEAALSAIEMANLFKSLR

SEQ ID NO: 8058 - protein, 1307 aa, Artificial Sequence
  SARS-CoV-2/Guangdong/GD2020087-P0008/2020__EPI_ISL_413863 spike protein (1-1147)(I714C_Y1110C) LumSynth construct
MFVFLVLLPLVSSQCVNLTTRTQLPPAYTNSFTRGVYYPDKVFRSSVLHSTQDLFLPFFSNVTWFHAIHVSGTNGTKRFDNPVLPFNDGVYFASTEKSNIIRGWIFGTTLDSKTQSLLIVNNATNVVIKVCEFQFCNDPFLGVYYHKNNKSWMESEFRVYSSANNCTFEYVSQPFLMDLEGKQGNFKNLREFVFKNIDGYFKIYSKHTPINLVRDLPQGFSALEPLVDLPIGINITRFQTLLALHRSYLTPGDSSSGWTAGAAAYYVGYLQPRTFLLKYNENGTITDAVDCALDPLSETKCTLKSFTVEKGIYQTSNFRVQPTESIVRFPNITNLCPFGEVFNATRFASVYAWNRKRISNCVADYSVLYNSASFSTFKCYGVSPTKLNDLCFTNVYADSFVIRGDEVREIAPGQTGKIADYNYKLPDDFTGCVIAWNSNNLDSKVGGNYNYLYRLFRKSNLKPFERDISTEIYQAGSTPCNGVEGFNCYFPLQSYGFQPTNGVGYQPYRVVVLSFELLHAPATVCGPKKSTNLVKNKCVNFNFNGLTGTGVLTESNKKFLPFQQFGRDIADTTDAVRDPQTLEILDITPCSFGGVSVITPGTNTSNQVAVLYQDVNCTEVPVAIHADQLTPTWRVYSTGSNVFQTRAGCLIGAEHVNNSYECDIPIGAGICASYQTQTNSPRRARSVASQSIIAYTMSLGAENSVAYSNNSIACPTNFTISVTTEILPVSMTKTSVDCTMYICGDSTECSNLLLQYGSFCTQLNRALTGIAVEQDKNTQEVFAQVKQIYKTPPIKDFGGFNFSQILPDPSKPSKRSFIEDLLFNKVTLADAGFIKQYGDCLGDIAARDLICAQKFNGLTVLPPLLTDEMIAQYTSALLAGTITSGWTFGAGAALQIPFAMQMAYRFNGIGVTQNVLYENQKLIANQFNSAIGKIQDSLSSTASALGKLQDVVNQNAQALNTLVKQLSSNFGAISSVLNDILSRLDKVEAEVQIDRLITGRLQSLQTYVTQQLIRAAEIRASANLAATKMSECVLGQSKRVDFCGKGYHLMSFPQSAPHGVVFLHVTYVPAQEKNFTTAPAICHDGKAHFPREGVFVSNGTHWFVTQRNFCEPQIITTDNTFVSGNCDVVIGIVNNTVYDPLQPELDSGGGSGGGQIYEGKLTAEGLRFGIVASRFNHALVDRLVEGAIDAIVRHGGREEDITLVRVPGSWEIPVAAGELARKEDIDAVIAIGVLIRGATPHFDYIASEVSKGLADLSLELRKPITFGVITADTLEQAIERAGTKHGNKGWEAALSAIEMANLFKSLR

SEQ ID NO: 8059 - protein, 1307 aa, Artificial Sequence
  SARS-CoV-2/Sweden/01/2020__EPI_ISL_411951 spike protein (1-1147)(I714C_Y1110C) LumSynth construct
MFVFLVLLPLVSSQCVNLTTRTQLPPAYTNSFTRGVYYPDKVFRSSVLHSTQDLFLPFFSNVTWFHAIHVSGTNGTKRFDNPVLPFNDGVYFASTEKSNIIRGWIFGTTLDSKTQSLLIVNNATNVVIKVCEFQFCNDPFLGVYYHKNNKSWMESEFRVYSSANNCTFEYVSQPFLMDLEGKQGNFKNLREFVFKNIDGYFKIYSKHTPINLVRDLPQGFSALEPLVDLPIGINITRFQTLLALHRSYLTPGDSSSGWTAGAAAYYVGYLQPRTFLLKYNENGTITDAVDCALDPLSETKCTLKSFTVEKGIYQTSNFRVQPTESIVRFPNITNLCPFGEVFNATRFASVYAWNRKRISNCVADYSVLYNSASFSTFKCYGVSPTKLNDLCFTNVYADSFVIRGDEVRQIAPGQTGKIADYNYKLPDDFTGCVIAWNSNNLDSKVGGNYNYLYRLFRKSNLKPFERDISTEIYQAGSTPCNGVEGFNCYFPLQSYGFQPTNGVGYQPYRVVVLSFELLHAPATVCGPKKSTNLVKNKCVNFNFNGLTGTGVLTESNKKFLPFQQFGRDIADTTDAVRDPQTLEILDITPCSFGGVSVITPGTNTSNQVAVLYQDVNCTEVPVAIHADQLTPTWRVYSTGSNVFQTRAGCLIGAEHVNNSYECDIPIGAGICASYQTQTNSPRRARSVASQSIIAYTMSLGAENSVAYSNNSIACPTNFTISVTTEILPVSMTKTSVDCTMYICGDSTECSNLLLQYGSFCTQLNRALTGIAVEQDKNTQEVFAQVKQIYKTPPIKDCGGFNFSQILPDPSKPSKRSFIEDLLFNKVTLADAGFIKQYGDCLGDIAARDLICAQKFNGLTVLPPLLTDEMIAQYTSALLAGTITSGWTFGAGAALQIPFAMQMAYRFNGIGVTQNVLYENQKLIANQFNSAIGKIQDSLSSTASALGKLQDVVNQNAQALNTLVKQLSSNFGAISSVLNDILSRLDKVEAEVQIDRLITGRLQSLQTYVTQQLIRAAEIRASANLAATKMSECVLGQSKRVDFCGKGYHLMSFPQSAPHGVVFLHVTYVPAQEKNFTTAPAICHDGKAHFPREGVFVSNGTHWFVTQRNFCEPQIITTDNTFVSGNCDVVIGIVNNTVYDPLQPELDSGGGSGGGQIYEGKLTAEGLRFGIVASRFNHALVDRLVEGAIDAIVRHGGREEDITLVRVPGSWEIPVAAGELARKEDIDAVIAIGVLIRGATPHFDYIASEVSKGLADLSLELRKPITFGVITADTLEQAIERAGTKHGNKGWEAALSAIEMANLFKSLR

SEQ ID NO: 8060 - protein, 1307 aa, Artificial Sequence
  SARS-CoV-2/Tianmen/HBCDC-HB-07/2020__EPI_ISL_412983 spike protein (1-1147)(I714C_Y1110C) LumSynth construct
MFVFLVLLPLVSSQCVNLTTRTQLPPAYTNSFTRGVYYPDKVFRSSVLHSTQDLFLPFFSNVTWFHAIHVSGTNGTKRFDNPVLPFNDGVYFASTEKSNIIRGWIFGTTLDSKTQSLLIVNNATNVVIKVCEFQFCNDPFLGVYYHKNNKSWMESEFRVYSSANNCTFEYVSQPFLMDLEGKQGNFKNLREFVFKNIDGYFKIYSKHTPINLVRDLPQGFSALEPLVDLPIGINITRFQTLLALHRSYLTPGDSSSGWTAGAAAYYVGYLQPRTFLLKYNENGTITDAVDCALDPLSETKCTLKSFTVEKGIYQTSNFRVQPTESIVRFPNITNLCPFGEVFNATRFASVYAWNRKRISNCVADYSVLYNSASFSTFKCYGVSPTKLNDLCFTNVYADSFVIRGDEVRQIAPGQTGKIADYNYKLPDDFTGCVIAWNSNNLDSKVGGNYNYLYRLFRKSNLKPFERDISTEIYQAGSTPCNGVEGFNCYFPLQSYGFQPTNGVGYQPYRVVVLSFELLHAPATVCGPKKSTNLVKNKCVNFNFNGLTGTGVLTESNKKFLPFQQFGRDIADTTDAVRDPQTLEILDITPCSFGGVSVITPGTNTSNQVAVLYQDLNCTEVPVAIHADQLTPTWRVYSTGSNVFQTRAGCLIGAEHVNNSYECDIPIGAGICASYQTQTNSPRRARSVASQSIIAYTMSLGAENSVAYSNNSIACPTNFTISVTTEILPVSMTKTSVDCTMYICGDSTECSNLLLQYGSFCTQLNRALTGIAVEQDKNTQEVFAQVKQIYKTPPIKDFGGFNFSQILPDPSKPSKRSFIEDLLFNKVTLADAGFIKQYGDCLGDIAARDLICAQKFNGLTVLPPLLTDEMIAQYTSALLAGTITSGWTFGAGAALQIPFAMQMAYRFNGIGVTQNVLYENQKLIANQFNSAIGKIQDSLSSTASALGKLQDVVNQNAQALNTLVKQLSSNFGAISSVLNDILSRLDKVEAEVQIDRLITGRLQSLQTYVTQQLIRAAEIRASANLAATKMSECVLGQSKRVDFCGKGYHLMSFPQSAPHGVVFLHVTYVPAQEKNFTTAPAICHDGKAHFPREGVFVSNGTHWFVTQRNFCEPQIITTDNTFVSGNCDVVIGIVNNTVYDPLQPELDSGGGSGGGQIYEGKLTAEGLRFGIVASRFNHALVDRLVEGAIDAIVRHGGREEDITLVRVPGSWEIPVAAGELARKEDIDAVIAIGVLIRGATPHFDYIASEVSKGLADLSLELRKPITFGVITADTLEQAIERAGTKHGNKGWEAALSAIEMANLFKSLR

SEQ ID NO: 8061 - protein, 1307 aa, Artificial Sequence
  SARS-CoV-2/Hong Kong/case42_VM20002493/2020__EPI_ISL_414527 spike protein (1-1147)(I714C_Y1110C) LumSynth construct
MFVFLVLLPLVSSQCVNLTTRTQLPPAYTNSFTRGVYYPDKVFRSSVLHSTQDLFLPFFSNVTWFHAIHVSGTNGTKRFDNPVLPFNDGVYFASTEKSNIIRGWIFGTTLDSKTQSLLIVNNATNVVIKVCEFQFCNDPFLGVYYHKNNKSWMESEFRVYSSANNCTFEYVSQPFLMDLEGKQGNFKNLREFVFKNIDGYFKIYSKHTPINLVRDLPQGFSALEPLVDLPIGINITRFQTLLALHRSYLTPGDSSSGWTAGAAAYYVGYLQPRTFLLKYNENGTITDAVDCALDPLSETKCTLKSFTVEKGIYQTSNFRVQPTESIVRFPNITNLCPFGEVFNATRFASVYAWNRKRISNCVADYSVLYNSASFSTFKCYGVSPTKLNDLCFTNVYADSFVIRGDEVRQIAPGQTGKIADYNYKLPDDFTGCVIAWNSNNLDSKVGGNYNYLYRLFRKSNLKPFERDISTEIYQAGSTPCNGVEGFNCYFPLQSYGFQPTNGVGYQPYRVVVLSFELLHAPATVCGPKKSTNLVKNKCVNFNFNGLTGTGVLTESNKKFLPFQQFGRDIADTTDAVRDPQTLEILDITPCSFGGVSVITPGTNTSNQVAVLYQDVNCTEVPVAIHADQLTPTWRVYSTGSNVFQTRAGCLIGAEHVNNSYECDIPIGAGICASYQTQTNSPRRARSVASQSIIAYTMSLGAENSVAYSNNSIACPTNFAISVTTEILPVSMTKTSVDCTMYICGDSTECSNLLLQYGSFCTQLNRALTGIAVEQDKNTQEVFAQVKQIYKTPPIKDFGGFNFSQILPDPSKPSKRSFIEDLLFNKVTLADAGFIKQYGDCLGDIAARDLICAQKFNGLTVLPPLLTDEMIAQYTSALLAGTITSGWTFGAGAALQIPFAMQMAYRFNGIGVTQNVLYENQKLIANQFNSAIGKIQDSLSSTASALGKLQDVVNQNAQALNTLVKQLSSNFGAISSVLNDILSRLDKVEAEVQIDRLITGRLQSLQTYVTQQLIRAAEIRASANLAATKMSECVLGQSKRVDFCGKGYHLMSFPQSAPHGVVFLHVTYVPAQEKNFTTAPAICHDGKAHFPREGVFVSNGTHWFVTQRNFCEPQIITTDNTFVSGNCDVVIGIVNNTVYDPLQPELDSGGGSGGGQIYEGKLTAEGLRFGIVASRFNHALVDRLVEGAIDAIVRHGGREEDITLVRVPGSWEIPVAAGELARKEDIDAVIAIGVLIRGATPHFDYIASEVSKGLADLSLELRKPITFGVITADTLEQAIERAGTKHGNKGWEAALSAIEMANLFKSLR

SEQ ID NO: 8062 - protein, 1307 aa, Artificial Sequence
  SARS-CoV-2/USA/CruiseA-23/2020__EPI_ISL_414482 spike protein (1-1147)(I714C_Y1110C) LumSynth construct
MFVFLVLLPLVSSQCVNLTTRTQLPPAYTNSFTRGVYYPDKVFRSSVLHSTQDLFLPFFSNVTWFHAIHVSGTNGTKRFDNPVLPFNDGVYFASTEKSNIIRGWIFGTTLDSKTQSLLIVNNATNVVIKVCEFQFCNDPFLGVYYHKNNKSWMESEFRVYSSANNCTFEYVSQPFLMDLEVKQGNFKNLREFVFKNIDGYFKIYSKHTPINLVRDLPQGFSALEPLVDLPIGINITRFQTLLALHRSYLTPGDSSSGWTAGAAAYYVGYLQPRTFLLKYNENGTITDAVDCALDPLSETKCTLKSFTVEKGIYQTSNFRVQPTESIVRFPNITNLCPFGEVFNATRFASVYAWNRKRISNCVADYSVLYNSASFSTFKCYGVSPTKLNDLCFTNVYADSFVIRGDEVRQIAPGQTGKIADYNYKLPDDFTGCVIAWNSNNLDSKVGGNYNYLYRLFRKSNLKPFERDISTEIYQAGSTPCNGVEGFNCYFPLQSYGFQPTNGVGYQPYRVVVLSFELLHAPATVCGPKKSTNLVKNKCVNFNFNGLTGTGVLTESNKKFLPFQQFGRDIADTTDAVRDPQTLEILDITPCSFGGVSVITPGTNTSNQVAVLYQDVNCTEVPVAIHADQLTPTWRVYSTGSNVFQTRAGCLIGAEHVNNSYECDIPIGAGICASYQTQTNSPRRARSVASQSIIAYTMSLGAENSVAYSNNSIACPTNFTISVTTEILPVSMTKTSVDCTMYICGDSTECSNLLLQYGSFCTQLNRALTGIAVEQDKNTQEVFAQVKQIYKTPPIKDFGGFNFSQILPDPSKPSKRSFIEDLLFNKVTLADAGFIKQYGDCLGDIAARDLICAQKFNGLTVLPPLLTDEMIAQYTSALLAGTITSGWTFGAGAALQIPFAMQMAYRFNGIGVTQNVLYENQKLIANQFNSAIGKIQDSLSSTASALGKLQDVVNQNAQALNTLVKQLSSNFGAISSVLNDILSRLDKVEAEVQIDRLITGRLQSLQTYVTQQLIRAAEIRASANLAATKMSECVLGQSKRVDFCGKGYHLMSFPQSAPHGVVFLHVTYVPAQEKNFTTAPAICHDGKAHFPREGVFVSNGTHWFVTQRNFCEPQIITTDNTFVSGNCDVVIGIVNNTVYDPLQPELDSGGGSGGGQIYEGKLTAEGLRFGIVASRFNHALVDRLVEGAIDAIVRHGGREEDITLVRVPGSWEIPVAAGELARKEDIDAVIAIGVLIRGATPHFDYIASEVSKGLADLSLELRKPITFGVITADTLEQAIERAGTKHGNKGWEAALSAIEMANLFKSLR

SEQ ID NO: 8063 - protein, 1307 aa, Artificial Sequence
  SARS-CoV-2/Hong Kong/case85_VM20002868/2020__EPI_ISL_414519 spike protein (1-1147)(I714C_Y1110C) LumSynth construct
MFVFLVLVPLVSSQCVNLTTRTQLPPAYTNSFTRGVYYPDKVFRSSVLHSTQDLFLPFFSNVTWFHAIHVSGTNGTKRFDNPVLPFNDGVYFASTEKSNIIRGWIFGTTLDSKTQSLLIVNNATNVVIKVCEFQFCNDPFLGVYYHKNNKSWMESEFRVYSSANNCTFEYVSQPFLMDLEGKQGNFKNLREFVFKNIDGYFKIYSKHTPINLVRDLPQGFSALEPLVDLPIGINITRFQTLLALHRSYLTPGDSSSGWTAGAAAYYVGYLQPRTFLLKYNENGTITDAVDCALDPLSETKCTLKSFTVEKGIYQTSNFRVQPTESIVRFPNITNLCPFGEVFNATRFASVYAWNRKRISNCVADYSVLYNSASFSTFKCYGVSPTKLNDLCFTNVYADSFVIRGDEVRQIAPGQTGKIADYNYKLPDDFTGCVIAWNSNNLDSKVGGNYNYLYRLFRKSNLKPFERDISTEIYQAGSTPCNGVEGFNCYFPLQSYGFQPTNGVGYQPYRVVVLSFELLHAPATVCGPKKSTNLVKNKCVNFNFNGLTGTGVLTESNKKFLPFQQFGRDIADTTDAVRDPQTLEILDITPCSFGGVSVITPGTNTSNQVAVLYQDVNCTEVPVAIHADQLTPTWRVYSTGSNVFQTRAGCLIGAEHVNNSYECDIPIGAGICASYQTQTNSPRRARSVASQSIIAYTMSLGAENSVAYSNNSIACPTNFTISVTTEILPVSMTKTSVDCTMYICGDSTECSNLLLQYGSFCTQLNRALTGIAVEQDKNTQEVFAQVKQIYKTPPIKDFGGFNFSQILPDPSKPSKRSFIEDLLFNKVTLADAGFIKQYGDCLGDIAARDLICAQKFNGLTVLPPLLTDEMIAQYTSALLAGTITSGWTFGAGAALQIPFAMQMAYRFNGIGVTQNVLYENQKLIANQFNSAIGKIQDSLSSTASALGKLQDVVNQNAQALNTLVKQLSSNFGAISSVLNDILSRLDKVEAEVQIDRLITGRLQSLQTYVTQQLIRAAEIRASANLAATKMSECVLGQSKRVDFCGKGYHLMSFPQSAPHGVVFLHVTYVPAQEKNFTTAPAICHDGKAHFPREGVFVSNGTHWFVTQRNFCEPQIITTDNTFVSGNCDVVIGIVNNTVYDPLQPELDSGGGSGGGQIYEGKLTAEGLRFGIVASRFNHALVDRLVEGAIDAIVRHGGREEDITLVRVPGSWEIPVAAGELARKEDIDAVIAIGVLIRGATPHFDYIASEVSKGLADLSLELRKPITFGVITADTLEQAIERAGTKHGNKGWEAALSAIEMANLFKSLR

SEQ ID NO: 8064 - protein, 1307 aa, Artificial Sequence; identical to SEQ ID NO: 8054
  SARS-CoV-2/England/200990660/2020__EPI_ISL_414523 spike protein (1-1147)(I714C_Y1110C) LumSynth construct

SEQ ID NO: 8065 - protein, 1307 aa, Artificial Sequence
  SARS-CoV-2/Australia/NSW09/2020__EPI_ISL_413595 spike protein (1-1147)(I714C_Y1110C) LumSynth construct
MFVFLVLLPLVSSQCVNLTTRTQLPPAYTNSFTRGVYYPDKVFRSSVLHSTQDLFLPFFSNVTWFHAIHVSGTNGTKRFDNPVLPFNDGVYFASTEKSNIIRGWIFGTTLDSKTQSLLIVNNATNVVIKVCEFQFCNDPFLGVYYHKNNKSWMESEFRVYSSANNCTFEYVSQPFLMDLEGKQGNFKNLREFVFKNIDGYFKIYSKHTPINLVRDLPQGFSALEPLVDLPIGINITRFQTLLALHRSYLTPGDSSSGWTAGAAAYYVGYLQPRTFLLKYNENGTITDAVDCALDPLSETKCTLKSFTVEKGIYQTSNFRVQPTESIVRFPNITNLCPFGEVFNATRFASVYAWNRKRISNCVADYSVLYNSASFSTFKCYGVSPTKLNDLCFTNVYADSFVIRGDEVRQIAPGQTGKIADYNYKLPDDFTGCVIAWNSNNLDSKVGGNYNYLYRLFRKSNLKPFERDISTEIYQAGSTPCNGVEGFNCYFPLQSYGFQPTNGVGYQPYRVVVLSFELLHAPATVCGPKKSTNLVKNKCVNFNFNGLTGTGVLTESNKKFLPFQQFGRDIADTTDAVRDPQTLEILDITPCSFGGVSVITPGTNTSNQVAVLYQDVNCTEVPVAIHADQLTPTWRVYSTGSNVFQTRAGCLIGAEHVNNSYECDIPIGAGICASYQTQTNSPRRARSVASQSIIAYTMSLGAENSVAYSNNSIACPTNFTISVTTEILPVSMTKTSVDCTMYICGDSTECSNLLLQYGSFCTQLNRALTGIAVEQDKNTQEVFAQVKQIYKTPPIKDFGGFNFSQILPDPSKPSKRSFIEDLLFNKVTLADAGFIKQYGDCLGDIAARDLICAQKFNGLTVLPPLLTDEMIAQYTSALLAGTITSGWTFGAGAALQIPFAMQMAYRFNGIGVTQNVLYENQKLIANQFNSAIGKIQDSLSFTASALGKLQDVVNQNAQALNTLVKQLSSNFGAISSVLNDILSRLDKVEAEVQIDRLITGRLQSLQTYVTQQLIRAAEIRASANLAATKMSECVLGQSKRVDFCGKGYHLMSFPQSAPHGVVFLHVTYVPAQEKNFTTAPAICHDGKAHFPREGVFVSNGTHWFVTQRNFCEPQIITTDNTFVSGNCDVVIGIVNNTVYDPLQPELDSGGGSGGGQIYEGKLTAEGLRFGIVASRFNHALVDRLVEGAIDAIVRHGGREEDITLVRVPGSWEIPVAAGELARKEDIDAVIAIGVLIRGATPHFDYIASEVSKGLADLSLELRKPITFGVITADTLEQAIERAGTKHGNKGWEAALSAIEMANLFKSLR

SEQ ID NO: 8066 - protein, 1307 aa, Artificial Sequence; identical to SEQ ID NO: 8046
  SARS-CoV-2/Australia/NSW10/2020__EPI_ISL_413596 spike protein (1-1147)(I714C_Y1110C) LumSynth construct

SEQ ID NO: 8067 - protein, 1307 aa, Artificial Sequence
  SARS-CoV-2/Switzerland/1000477797/2020__EPI_ISL_413023 spike protein (1-1147)(I714C_Y1110C) LumSynth construct
MFVFLVLLPLVSSQCVNLTTRTQLPPAYTNSFTRGVYYPDKVFRSSVLHSTQDLFLPFFSNVTWFHAIHVSGTNGTKRFDNPVLPFNDGVYFASTEKSNIIRGWIFGTTLDSKTQSLLIVNNATNVVIKVCEFQFCNDPFLGVYYHKNNKSWMESEFRVYSSANNCTFEYVSQPFLMDLEGKQGNFKNLREFVFKNIDGYFNIYSKHTPINLVRDLPQGFSALEPLVDLPIGINITRFQTLLALHRSYLTPGDSSSGWTAGAAAYYVGYLQPRTFLLKYNENGTITDAVDCALDPLSETKCTLKSFTVEKGIYQTSNFRVQPTESIVRFPNITNLCPFGEVFNATRFASVYAWNRKRISNCVADYSVLYNSASFSTFKCYGVSPTKLNDLCFTNVYADSFVIRGDEVRQIAPGQTGKIADYNYKLPDDFTGCVIAWNSNNLDSKVGGNYNYLYRLFRKSNLKPFERDISTEIYQAGSTPCNGVEGFNCYFPLQSYGFQPTNGVGYQPYRVVVLSFELLHAPATVCGPKKSTNLVKNKCVNFNFNGLTGTGVLTESNKKFLPFQQFGRDIADTTDAVRDPQTLEILDITPCSFGGVSVITPGTNTSNQVAVLYQGVNCTEVPVAIHADQLTPTWRVYSTGSNVFQTRAGCLIGAEHVNNSYECDIPIGAGICASYQTQTNSPRRARSVASQSIIAYTMSLGAENSVAYSNNSIACPTNFTISVTTEILPVSMTKTSVDCTMYICGDSTECSNLLLQYGSFCTQLNRALTGIAVEQDKNTQEVFAQVKQIYKTPPIKDFGGFNFSQILPDPSKPSKRSFIEDLLFNKVTLADAGFIKQYGDCLGDIAARDLICAQKFNGLTVLPPLLTDEMIAQYTSALLAGTITSGWTFGAGAALQIPFAMQMAYRFNGIGVTQNVLYENQKLIANQFNSAIGKIQDSLSSTASALGKLQDVVNQNAQALNTLVKQLSSNFGAISSVLNDILSRLDKVEAEVQIDRLITGRLQSLQTYVTQQLIRAAEIRASANLAATKMSECVLGQSKRVDFCGKGYHLMSFPQSAPHGVVFLHVTYVPAQEKNFTTAPAICHDGKAHFPREGVFVSNGTHWFVTQRNFCEPQIITTDNTFVSGNCDVVIGIVNNTVYDPLQPELDSGGGSGGGQIYEGKLTAEGLRFGIVASRFNHALVDRLVEGAIDAIVRHGGREEDITLVRVPGSWEIPVAAGELARKEDIDAVIAIGVLIRGATPHFDYIASEVSKGLADLSLELRKPITFGVITADTLEQAIERAGTKHGNKGWEAALSAIEMANLFKSLR

SEQ ID NO: 8068 - protein, 1307 aa, Artificial Sequence
  SARS-CoV-2/Belgium/BA-02291/2020__EPI_ISL_415159 spike protein (1-1147)(I714C_Y1110C) LumSynth construct
MFVFLVLLPLVSSQCVNLTTRTQLPPAYTNSFTRGVYYPDKVFRSSVLHSTQDLFLPFFSNVTWFHAIHVSGTNGTKRFDNPVLPFNDGVYFASTEKSNIIRGWIFGTTLDSKTQSLLIVNNATNVVIKVCEFQFCNDPFLGVYYHKNNKSWMESEFRVYSSANNCTFEYVSQPFLMDLEGKQGNFKNLREFVFKNIDGYFKIYSKHTPINLVRDLPQGFSALEPLVDLPIGINITRFQTLLALHRSYLTPGDSSSGWTAGAAAYYVGYLQPRTFLLKYNENGTITDAVDCALDPLSETKCTLKSFTVEKGIYQTSNFRVQPTESIVRFPNITNLCPFGEVFNATRFASVYAWNRKRISNCVADYSVLYNSASFSTFKCYGVSPTKLNDLCFTNVYADSFVIRGDEVRQIAPGQTGKIADYNYKLPDDFTGCVIAWNSNNLDSKVGGNYNYLYRLFRRSNLKPFERDISTEIYQAGSTPCNGVEGFNCYFPLQSYGFQPTNGVGYQPYRVVVLSFELLPAPATVCGPKKSTNLVKNKCVNFNFNGLTGTGVLTESNKKFLPFQQFGRDIADTTDAVRDPQTLEILDITPCSFGGVSVITPGTNTSNQVAVLYQGVNCTEVPVAIHADQLTPTWRVYSTGSNVFQTRAGCLIGAEHVNNSYECDIPIGAGICASYQTQTNSPRRARSVASQSIIAYTMSLGAENSVAYSNNSIACPTNFTISVTTEILPVSMTKTSVDCTMYICGDSTECSNLLLQYGSFCTQLNRALTGIAVEQDKNTQEVFAQVKQIYKTPPIKDFGGFNFSQILPDPSKPSKRSFIEDLLFNKVTLADAGFIKQYGDCLGDIAARDLICAQKFNGLTVLPPLLTDEMIAQYTSALLAGTITSGWTFGAGAALQIPFAMQMAYRFNGIGVTQNVLYENQKLIANQFNSAIGKIQDSLSSAAPALGKLQDVVNQNAQALNTLVKQLSSNFGAISSVLNDILSRLDKVEAEVQIDRLITGRLQSLQTYVTQQLIRAAEIRASANLAATKMSECVLGQSKRVDFCGKGYHLMSFPQSAPHGVVFLHVTYVPAQEKNFTTAPAICHDGKAHFPREGVFVSNGTHWFVTQRNFCEPQIITTDNTFVSGNCDVVIGIVNNTVYDPLQPELDSGGGSGGGQIYEGKLTAEGLRFGIVASRFNHALVDRLVEGAIDAIVRHGGREEDITLVRVPGSWEIPVAAGELARKEDIDAVIAIGVLIRGATPHFDYIASEVSKGLADLSLELRKPITFGVITADTLEQAIERAGTKHGNKGWEAALSAIEMANLFKSLR

SEQ ID NO: 8069 - protein, 1307 aa, Artificial Sequence
  SARS-CoV-2/USA/WA8-UW5/2020__EPI_ISL_413486 spike protein (1-1147)(I714C_Y1110C) LumSynth construct
MFVFLVLLPLVSSQCVNLTTRTQLPPAYTNSFTRGVYYPDKVFRSSVLHSTQDLFLPFFSNVTWFHAIHVSGTNGTKRFDNPVLPFNDGVYFASTEKSNIIRGWIFGTTLDSKTQSLLIVNNATNVVIKVCEFQFCNDPFLGVYYHKNNKSWMESEFRVYSSANNCTFEYVSQPFLMDLEGKQGNFKNLREFVFKNIDGYFKIYSKHTPINLVRDLPQGFSALEPLVDLPIGINITRFQTLLALHRSYLTPGDSSSGWTAGAAAYYVGYLQPRTFLLKYNENGTITDAVDCALDPLSETKCTLKSFTVEKGIYQTSNFRVQPTESIVRFPNITNLCPFGEVFNATRFASVYAWNRKRISNCVADYSVLYNSASFSTFKCYGVSPTKLNDLCFTNVYADSFVIRGDEVRQIAPGQTGKIADYNYKLPDDFTGCVIAWNSNNLDSKVGGNYNYLYRLFRKSNLKPFERDISTEIYQAGSTPCNGVEGFNCYFPLQSYGFQPTNGVGYQPYRVVVLSFELLHAPATVCGPKKSTNLVKNKCVNFNFNGLTGTGVLTESNKKFLPFQQFGRDIADTTDAVRDPQTLEILDITPCSFGGVSVITPGTNTSNQVAVLYQDVNCTEVPVAIHADQLTPTWRVYSTGSNVFQTRAGCLIGAEYVNNSYECDIPIGAGICASYQTQTNSPRRARSVASQSIIAYTMSLGAENSVAYSNNSIACPTNFTISVTTEILPVSMTKTSVDCTMYICGDSTECSNLLLQYGSFCTQLNRALTGIAVEQDKNTQEVFAQVKQIYKTPPIKDFGGFNFSQILPDPSKPSKRSFIEDLLFNKVTLADAGFIKQYGDCLGDIAARDLICAQKFNGLTVLPPLLTDEMIAQYTSALLAGTITSGWTFGAGAALQIPFAMQMAYRFNGIGVTQNVLYENQKLIANQFNSAIGKIQDSLSSTASALGKLQDVVNQNAQALNTLVKQLSSNFGAISSVLNDILSRLDKVEAEVQIDRLITGRLQSLQTYVTQQLIRAAEIRASANLAATKMSECVLGQSKRVDFCGKGYHLMSFPQSAPHGVVFLHVTYVPAQEKNFTTAPAICHDGKAHFPREGVFVSNGTHWFVTQRNFCEPQIITTDNTFVSGNCDVVIGIVNNTVYDPLQPELDSGGGSGGGQIYEGKLTAEGLRFGIVASRFNHALVDRLVEGAIDAIVRHGGREEDITLVRVPGSWEIPVAAGELARKEDIDAVIAIGVLIRGATPHFDYIASEVSKGLADLSLELRKPITFGVITADTLEQAIERAGTKHGNKGWEAALSAIEMANLFKSLR

SEQ ID NO: 8070 - protein, 1307 aa, Artificial Sequence
  SARS-CoV-2/England/20102000506/2020__EPI_ISL_415147 spike protein (1-1147)(I714C_Y1110C) LumSynth construct
MFVFLVLLPLVSSQCVNLTTRTQLPPAYTNSFTRGVYYPDKVFRSSVLHSTQDLFLPFFSNVTWFHAIHVSGTNGTKRFDNPVLPFNDGVYFASTEKSNIIRGWIFGTTLDSKTQSLLIVNNATNVVIKVCEFQFCNDPFLGVYYHKNNKSWMESEFRVYSSANNCTFEYVSQPFLMDLEGKQGNFKNLREFVFKNIDGYFKIYSKHTPINLVRDLPQGFSALEPLVDLPIGINITRFQTLLALHRSYLTPGDSSSGWTAGAAAYYVGYLQPRTFLLKYNENGTITDAVDCALDPLSETKCTLKSFTVEKGIYQTSNFRVQPTESIVRFPNITNLCPFGEVFNATRFASVYAWNRKRISNCVADYSVLYNSASFSTFKCYGVSPTKLNDLCFTNVYADSFVIRGDEVRQIAPGQTGKIADYNYKLPDDFTGCVIAWNSNNLDSKVGGNYNYLYRLFRKSNLKPFERDISTEIYQAGSTPCNGVEGFNCYFPLQSYGFQPTNGVGYQPYRVVVLSFELLHAPATVCGPKKSTNLVKNKCVNFNFNGLTGTGVLTESNKKFLPFQQFGRDIADTTDAVRDPQTLEILDITPCSFGGVSVITPGTNTSNQVAVLYQGVNCTEVPVAIHADQLTPTWRVYSTGSNVFQTRAGCLIGAEHVNNSYECDIPIGAGICASYQTQTNSPRRARSVASQSIIAYTMSLGAENSVAYSNNSIACPTNFTISVTTEILPVSMTKTSVDCTMYICGDSTECSNLLLQYGSFCTQLNRALTGIAVEQDKNTQEVFAQVKQIYKTPPIKDFGGFNFSQILPDPSKPSKRSFIEDLLFNKVTLADAGFIKQYGYCLGDIAARDLICAQKFNGLTVLPPLLTDEMIAQYTSALLAGTITSGWTFGAGAALQIPFAMQMAYRFNGIGVTQNVLYENQKLIANQFNSAIGKIQDSLSSTASALGKLQDVVNQNAQALNTLVKQLSSNFGAISSVLNDILSRLDKVEAEVQIDRLITGRLQSLQTYVTQQLIRAAEIRASANLAATKMSECVLGQSKRVDFCGKGYHLMSFPQSAPHGVVFLHVTYVPAQEKNFTTAPAICHDGKAHFPREGVFVSNGTHWFVTQRNFCEPQIITTDNTFVSGNCDVVIGIVNNTVYDPLQPELDSGGGSGGGQIYEGKLTAEGLRFGIVASRFNHALVDRLVEGAIDAIVRHGGREEDITLVRVPGSWEIPVAAGELARKEDIDAVIAIGVLIRGATPHFDYIASEVSKGLADLSLELRKPITFGVITADTLEQAIERAGTKHGNKGWEAALSAIEMANLFKSLR

SEQ ID NO: 8071 - protein, 1307 aa, Artificial Sequence
  SARS-CoV-2/Belgium/VAG-03013/2020__EPI_ISL_415155 spike protein (1-1147)(I714C_Y1110C) LumSynth construct
MFVFLVLLPLVSSQCVNLTTRTQLPPAYTNSFTRGVYYPDKVFRSSVLHSTQDLFLPFFSNVTWFHAIHVSGTNGTKRFDNPVLPFNDGVYFASTEKSNIIRGWIFGTTLDSKTQSLLIVNNATNVVIKVCEFQFCNDPFLGVYYHKNNKSWMESEFRVYSSANNCTFEYVSQPFLMDLEGKQGNFKNLREFVFKNIDGYFKIYSKHTPINLVRDLPQGFSALEPLVDLPIGINITRFQTLLALHRSYLTPGDSSSGWTAGAAAYYVGYLQPRTFLLKYNENGTITDAVDCALDPLSETKCTLKSFTVEKGIYQTSNFRVQPTESIVRFPNITNLCPFGEVFNATRFASVYAWNRKRISNCVADYSVLYNSASFSTFKCYGVSPTKLNDLCFTNVYADSFVIRGDEVRQIAPGQTGKIADYNYKLPDDFTGCVIAWNSNNLDSKVGGNYNYLYRLFRKSNLKPFERDISTEIYQAGSTPCNGVEGFNCYFPLQSYGFQPTNGVGYQPYRVVVLSFELLHAPATVCGPKKSTNLVKNKCVNFNFNGLTGTGVLTESNKKFLPFQQFGRDIADTTDAVRDPQTLEILDITPCSFGGVSVITPGTNTSNQVAVLYQGVNCTEVPVAIHADQLTPTWRVYSTGSNVFQTRAGCLIGAEHVNNSYECDIPIGAGICASYQTQTNSPRRARSVASQSIIAYTMSLGAENSVAYSNNSIACPTNFTISVTTEILPVSMTKTSVDCTMYICGDSTECSNLLLQYGSFCTQLNRALTGIAVEQDKNTQEVFAQVKQIYKTPPIKDFGGFNFSQILPDPSKPSKRSFIEDLLFNKVTLADAGFIKQYGDCLGDIAARDLICAQKFNGLTVLPPLLTDEMIAQYTSALLAGTITSGWTFGAGAALQIPFAMQMAYRFNGIGVTQNVLYENQKLIANQFNSAIGKIQDSLSSTATALGKLQDVVNQNAQALNTLVKQLSSNFGAISSVLNDILSRLDKVEAEVQIDRLITGRLQSLQTYVTQQLIRAAEIRASANLAATKMSECVLGQSKRVDFCGKGYHLMSFPQSAPHGVVFLHVTYVPAQEKNFTTAPAICHDGKAHFPREGVFVSNGTHWFVTQRNFCEPQIITTDNTFVSGNCDVVIGIVNNTVYDPLQPELDSGGGSGGGQIYEGKLTAEGLRFGIVASRFNHALVDRLVEGAIDAIVRHGGREEDITLVRVPGSWEIPVAAGELARKEDIDAVIAIGVLIRGATPHFDYIASEVSKGLADLSLELRKPITFGVITADTLEQAIERAGTKHGNKGWEAALSAIEMANLFKSLR

SEQ ID NO: 8072 - protein, 1307 aa, Artificial Sequence
  SARS-CoV-2/Belgium/BC-03016/2020__EPI_ISL_415157 spike protein (1-1147)(I714C_Y1110C) LumSynth construct
MFVFLVLLPLVSSQCVNLTTRTQLPPAYTNSFTRGVYYPDKVFRSSVLHSTQDLFLPFFSNVTWFHAIHVSGTNGTKRFDNPVLPFNDGVYFASTEKSNIIRGWIFGTTLDSKTQSLLIVNNATNVVIKVCEFQFCNDPFLGVYYHKNNKSWMESEFRVYSSANNCTFEYVSQPFLMDLEGKQGNFKNLREFVFKNIDGYFKIYSKHTPINLVRDLPQGFSALEPLVDLPIGINITRFQTLLALHRSYLTPGDSSSGWTAGAAAYYVGYLQPRTFLLKYNENGTITDAVDCALDPLSETKCTLKSFTVEKGIYQTSNFRVQPTESIVRFPNITNLCPFGEVFNATRFASVYAWNRKRISNCVADYSVLYNSASFSTFKCYGVSPTKLNDLCFTNVYADSFVIRGDEVRQIAPGQTGKIADYNYKLPDDFTGCVIAWNSNNLDSKVGGNYNYLYRLFRKSNLKPFERDISTEIYQAGSTPCNGVEGFNCYFPLQSYGFQPTNGVGYQPYRVVVLSFELLHAPATVCGPKKSTNLVKNKCVNFNFNGLTGTGVLTESNKKFLPFQQFGRDIADTTDAVRDPQTLEILDITPCSFGGVSVITPGTNTSNQVAVLYQGVNCTEVPVAIHADQLTPTWRVYSTGSNVFQTRAGCLIGAEHVNNSYECDIPIGAGICASYQTQTNSPRRARSVASQSIIAYTMSLGAENSVAYSNNSIACPTNFTISVTTEILPVSMTKTSVDCTMYICGDSTECSNLLLQYGSFCTQLNRALTGIAVEQDKNTQEVFAQVKQIYKTPPIKDFGGFNFSQILPDPSKPSKRSFIEDLLFNKVTLADAGFIKQYGDCLGDIAARDLICAQKFNGLTVLPPLLTDEMIAQYTSALLAGTITSGWTFGAGAALQIPFAMQMAYRFNGIGVTQNVLYENQKLIANQFNSAIGKIQDSLSSTAPALGKLQDVVNQNAQALNTLVKQLSSNFGAISSVLNDILSRLDKVEAEVQIDRLITGRLQSLQTYVTQQLIRAAEIRASANLAATKMSECVLGQSKRVDFCGKGYHLMSFPQSAPHGVVFLHVTYVPAQEKNFTTAPAICHDGKAHFPREGVFVSNGTHWFVTQRNFCEPQIITTDNTFVSGNCDVVIGIVNNTVYDPLQPELDSGGGSGGGQIYEGKLTAEGLRFGIVASRFNHALVDRLVEGAIDAIVRHGGREEDITLVRVPGSWEIPVAAGELARKEDIDAVIAIGVLIRGATPHFDYIASEVSKGLADLSLELRKPITFGVITADTLEQAIERAGTKHGNKGWEAALSAIEMANLFKSLR

SEQ ID NO: 8073 - protein, 1307 aa, Artificial Sequence
  SARS-CoV-2/Germany/BavPat3/2020__EPI_ISL_414521 spike protein (1-1147)(I714C_Y1110C) LumSynth construct
MFVFLVLLPLVSSQCVNLTTRTQLPPAYTNSFTRGVYYPDKVFRSSVLHSTQDLFLPFFSNVTWFHAIHVSGTNGTKRFDNPVLPFNDGVYFASTEKSNIIRGWIFGTTLDSKTQSLLIVNNATNVVIKVCEFQFCNDPFLGVYYHKNNKSWMESEFRVYSSANNCTFEYVSQPFLMDLEGKQGNFKNLREFVFKNIDGYFKIYSKHTPINLVRDLPQGFSALEPLVDLPIGINITRFQTLLALHRSYLTPGDSSSGWTAGAAAYYVGYLQPRTFLLKYNENGTITDAVDCALDPLSETKCTLKSFTVEKGIYQTSNFRVQPTESIVRFPNITNLCPFGEVFNATRFASVYAWNRKRISNCVADYSVLYNSASFSTFKCYGVSPTKLNDLCFTNVYADSFVIRGDEVRQIAPGQTGKIADYNYKLPDDFTGCVIAWNSNNLDSKVGGNYNYLYRLFRKSNLKPFERDISTEIYQAGSTPCNGVEGFNCYFPLQSYGFQPTNGVGYQPYRVVVLSFELLHAPATVCGPKKSTNLVKNKCVNFNFNGLTGTGVLTESNKKFLPFQQFGRDIADTTDAVRDPQTLEILDITPCSFGGVSVITPGTNTSNQVAVLYQDVNCTEVPVAIHADQLTPTWRVYSTGSNVFQTRAGCLIGAEHVNNSYECDIPIGAGICASYQTQTNSPRRARSVASQSIIAYTMSLGAENSVAYSNNSIACPTNFTISVTTEILPVSMTKTSVDCTMYICGDSTECSNLLLQYGSFCTQLNRALTGIAVEQDKNTQQVFAQVKQIYKTPPIKDFGGFNFSQILPDPSKPSKRSFIEDLLFNKVTLADAGFIKQYGDCLGDIAARDLICAQKFNGLTVLPPLLTDEMIAQYTSALLAGTITSGWTFGAGAALQIPFAMQMAYRFNGIGVTQNVLYENQKLIANQFNSAIGKIQDSLSSTASALGKLQDVVNQNAQALNTLVKQLSSNFGAISSVLNDILSRLDKVEAEVQIDRLITGRLQSLQTYVTQQLIRAAEIRASANLAATKMSECVLGQSKRVDFCGKGYHLMSFPQSAPHGVVFLHVTYVPAQEKNFTTAPAICHDGKAHFPREGVFVSNGTHWFVTQRNFCEPQIITTDNTFVSGNCDVVIGIVNNTVYDPLQPELDSGGGSGGGQIYEGKLTAEGLRFGIVASRFNHALVDRLVEGAIDAIVRHGGREEDITLVRVPGSWEIPVAAGELARKEDIDAVIAIGVLIRGATPHFDYIASEVSKGLADLSLELRKPITFGVITADTLEQAIERAGTKHGNKGWEAALSAIEMANLFKSLR

SEQ ID NO: 8074 - protein, 1307 aa, Artificial Sequence
  SARS-CoV-2/France/HF1805/2020__EPI_ISL_414628 spike protein (1-1147)(I714C_Y1110C) LumSynth construct
MFVFLVLLPLVSSQCVNLTTRTQLPPAYTNSFTRGVYYPDKVFRSSVLHSTQDLFLPFFSNVTWFHAIHVSGTNGTKRFDNPVLPFNDGVYFASTEKSNIIRGWIFGTTLDSKTQSLLIVNNATNVVIKVCEFQFCNDPFLGVYYHKNNKSWMESEFRVYSSANNCTFEYVSQPFLMDLEGKQGNFKNLREFVFKNIDGYFKIYSKHTPINLVRDLPQGFSALEPLVDLPIGINITRFQTLLALHRSYLTPGDSSSGWTAGAAAYYVGYLQPRTFLLKYNENGTITDAVDCALDPLSETKCTLKSFTVEKGIYQTSNFRVQPTESIVRFPNITNLCPFGEVFNATRFASVYAWNRKRISNCVADYSVLYNSASFSTFKCYGVSPTKLNDLCFTNVYADSFVIRGDEVRQIAPGQTGKIADYNYKLPDDFTGCVIAWNSNNLDSKVGGNYNYLYRLFRKSNLKPFERDISTEIYQAGSTPCNGVEGFNCYFPLQSYGFQPTNGVGYQPYRVVVLSFELLHAPATVCGPKKSTNLVKNKCVNFNFNGLTGTGVLTESNKKFLPFQQFGRDIADTTDAVRDPQTLEILDITPCSFGGVSVITPGTNTSNQVAVLYQGVNCTEVPVAIHADQLTPTWRVYSTGSNVFQTRAGCLIGAEHVNNSYECDIPIGAGICASYQTQTNSPRRARSVASQSIIAYTMSLGAENSVAYSNNSIACPTNFTISVTTEILPVSMTKTSVDCTMYICGDSTECSNLLLQYGSFCTQLNRALTGIAVEQDKNTQEVFAQVKQIYKTPPIKDFGGFNFSQILPDPSKPSKRSFIEDLLFNKVTLADAGFIKQYGDCLGDIAARDLICAQKFNGLTVLPPLLTDEMIAQYTSALLAGTITSGWTFGAGAALQIPFAMQMAYRFNGIGVTQNVLYENQKLIANQFNSAIGKIQDSLSSTASALGKLQDVVNQNAQALNTLVKQLSSNFGAISSVLNDILSRLDKVEAEVQIDRLITGRLQSLQTYVTQQLIRAAEIRASANLAATKMSECVLGQSKRVDFCGKGYHLMSFPQSAPHGVVFLHVTYVPAQEKNFTTAPAICHDGKAHFPREGVFVSNGTHWFVTQRNFCEPQIITTDNTFVSGNCDVVIGVVNNTVYDPLQPELDSGGGSGGGQIYEGKLTAEGLRFGIVASRFNHALVDRLVEGAIDAIVRHGGREEDITLVRVPGSWEIPVAAGELARKEDIDAVIAIGVLIRGATPHFDYIASEVSKGLADLSLELRKPITFGVITADTLEQAIERAGTKHGNKGWEAALSAIEMANLFKSLR

SEQ ID NO: 8075 - protein, 1307 aa, Artificial Sequence
  SARS-CoV-2/Netherlands/ZuidHolland_9/2020__EPI_ISL_414445 spike protein (1-1147)(I714C_Y1110C) LumSynth construct
MFVFLVLLPLVSSQCVNLTTRTQLPPAYTNSFTRGVYYPDKVFRSSVLHSTQDLFLPFFSNVTWFHAIHVSGTNGTKRFDNPVLPFNDGVYFASTEKSNIIRGWIFGTTLDSKTQSLLIVNNATNVVIKVCEFQFCNDPFLGVYYHKNNKSWMESEFRVYSSANNCTFEYVSQPFLMDLEGKQGNFKNLREFVFKNIDGYFKIYSKHTPINLVRDLPQGFSALEPLVDLPIGINITRFQTLLALHRSYLTPGDSSSGWTAGAAAYYVGYLQPRTFLLKYNENGTITDAVDCALDPLSETKCTLKSFTVEKGIYQTSNFRVQPTESIVRFPNITNLCPFGEVFNATRFASVYAWNRKRISNCVADYSVLYNSASFSTFKCYGVSPTKLNDLCFTNVYADSFVIRGDEVRQIAPGQTGKIADYNYKLPDDFTGCVIAWNSNNLDSKVGGNYNYLYRLFRKSNLKPFERDISTEIYQAGSTPCNGVEGFNCYFPLQSYGFQPTNGVGYQPYRVVVLSFELLHAPATVCGPKKSTNLVKNKCVNFNFNGLTGTGVLTESNKKFLPFQQFGRDIADTTDAVRDPQTLEILDITPCSFGGVSVITPGTNTSNQVAVLYQGVNCTEVPVAIHADQLTPTWRVYSTGSNVFQTRAGCLIGAEHVNNSYECDIPIGAGICASYQTQTNSPRRARSVASQSIIAYTMSLGAENSVAYSNNSIACPTNFTISVTTEILPVSMTKTSVDCTMYICGDSTECSNLLLQYGSFCTQLNRALTGIAVEQDKNTQEVFAQVKQIYKTPPIKDFGGFNFSQILPDPSKPSKRSFIEDLLFNKVTLADAGFIKQYGDCLGDIAARDLICVQKFNGLTVLPPLLTDEMIAQYTSALLAGTITSGWTFGAGAALQIPFAMQMAYRFNGIGVTQNVLYENQKLIANQFNSAIGKIQDSLSSTASALGKLQDVVNQNAQALNTLVKQLSSNFGAISSVLNDILSRLDKVEAEVQIDRLITGRLQSLQTYVTQQLIRAAEIRASANLAATKMSECVLGQSKRVDFCGKGYHLMSFPQSAPHGVVFLHVTYVPAQEKNFTTAPAICHDGKAHFPREGVFVSNGTHWFVTQRNFCEPQIITTDNTFVSGNCDVVIGIVNNTVYDPLQPELDSGGGSGGGQIYEGKLTAEGLRFGIVASRFNHALVDRLVEGAIDAIVRHGGREEDITLVRVPGSWEIPVAAGELARKEDIDAVIAIGVLIRGATPHFDYIASEVSKGLADLSLELRKPITFGVITADTLEQAIERAGTKHGNKGWEAALSAIEMANLFKSLR

SEQ ID NO: 8076 - protein, 1307 aa, Artificial Sequence
  SARS-CoV-2/Finland/FIN03032020A/2020__EPI_ISL_413602 spike protein (1-1147)(I714C_Y1110C) LumSynth construct
MFVFLVLLPLVSSQCVNLTTRTQLPPAYTNSFTRGVYYPDKVFRSSVLHSTQDLFLPFFSNVTWFHAIHVSGTNGTKRFDNPVLPFNDGVYFASTEKSNIIRGWIFGTTLDSKTQSLLIVNNATNVVIKVCEFQFCNDPFLGVYYHKNNKSWMESEFRVYSSANNCTFEYVSQPFLMDLEGKQGNFKNLREFVFKNIDGYFKIYSKHTPINLVRDLPQGFSALEPLVDLPIGINITRFQTLLALHRSYLTPGDSSSGWTAGAAAYYVGYLQPRTFLLKYNENGTITDAVDCALDPLSETKCTLKSFTVEKGIYQTSNFRVQPTESIVRFPNITNLCPFGEVFNATRFASVYAWNRKRISNCVADYSVLYNSASFSTFKCYGVSPTKLNDLCFTNVYADSFVIRGDEVRQIAPGQTGKIADYNYKLPDDFTGCVISWNSNNLDSKVGGNYNYLYRLFRKSNLKPFERDISTEIYQAGSTPCNGVEGFNCYFPLQSYGFQPTNGVGYQPYRVVVLSFELLHAPATVCGPKKSTNLVKNKCVNFNFNGLTGTGVLTESNKKFLPFQQFGRDIADTTDAVRDPQTLEILDITPCSFGGVSVITPGTNTSNQVAVLYQGVNCTEVPVAIHADQLTPTWRVYSTGSNVFQTRAGCLIGAEHVNNSYECDIPIGAGICASYQTQTNSPRRARSVASQSIIAYTMSLGAENSVAYSNNSIACPTNFTISVTTEILPVSMTKTSVDCTMYICGDSTECSNLLLQYGSFCTQLNRALTGIAVEQDKNTQEVFAQVKQIYKTPPIKDFGGFNFSQILPDPSKPSKRSFIEDLLFNKVTLADAGFIKQYGDCLGDIAARDLICAQKFNGLTVLPPLLTDEMIAQYTSALLAGTITSGWTFGAGAALQIPFAMQMAYRFNGIGVTQNVLYENQKLIANQFNSAIGKIQDSLSSTASALGKLQDVVNQNAQALNTLVKQLSSNFGAISSVLNDILSRLDKVEAEVQIDRLITGRLQSLQTYVTQQLIRAAEIRASANLAATKMSECVLGQSKRVDFCGKGYHLMSFPQSAPHGVVFLHVTYVPAQEKNFTTAPAICHDGKAHFPREGVFVSNGTHWFVTQRNFCEPQIITTDNTFVSGNCDVVIGIVNNTVYDPLQPELDSGGGSGGGQIYEGKLTAEGLRFGIVASRFNHALVDRLVEGAIDAIVRHGGREEDITLVRVPGSWEIPVAAGELARKEDIDAVIAIGVLIRGATPHFDYIASEVSKGLADLSLELRKPITFGVITADTLEQAIERAGTKHGNKGWEAALSAIEMANLFKSLR

SEQ ID NO: 8077 - protein, 1307 aa, Artificial Sequence
  SARS-CoV-2/France/GE1977/2020__EPI_ISL_414632 spike protein (1-1147)(I714C_Y1110C) LumSynth construct
MFVFLVLLPLVSSQCVNLTTRTQLPPAYTNSFTRGVYYPDKVFRSSVLHSTQDLFLPFFSNVTWFHAIHVSGTNGTKRFDNPVLPFNDGVYFASTEKSNIIRGWIFGTTLDSKTQSLLIVNNATNVVIKVCEFQFCNDPFLGVYYHKNNKSWMESEFRVYSSANNCTFEYVSQPFLMDLEGKQGNFKNLREFVFKNIDGYFKIYSKHTPINLVRDLPQGFSALEPLVDLPIGINITRFQTLLALHRSYLTPGDSSSGWTAGAAAYYVGYLQPRTFLLKYNENGTITDAVDCALDPLSETKCTLKSFTVEKGIYQTSNFRVQPTESIVRFPNITNLCPFGEVFNATRFASVYAWNRKRISNCVADYSVLYNSASFSTFKCYGVSPTKLNDLCFTNVYADSFVIRGDEVRQIAPGQTGKIADYNYKLPDDFTGCVIAWNSNNLDSKVGGNYNYLYRLFRKSNLKPFERDISTEIYQAGSTPCNGVEGFNCYFPLQSYGFQPTNGVGYQPYRVVVLSFELLHAPATVCGPKKSTNLVKNKCVNFNFNGLTGTGVLTESNKKFLPFQQFGRDIADTTDAVRDPQTLEILDITPCSFGGVSVITPGTNTSNQVAVLYQGVNCTEVPVAIHADQLTPTWRVYSTGSNVFQTRAGCLIGAEHVNNSYECDIPIGAGICASYQTQTNSPRRARSVASQSIIAYTMSLGAENSVAYSNNSIACPTNFTISVTTEILPVSMTKTSVDCTMYICGDSTECSNLLLQYGSFCTQLNRALTGIAVEQDKNTQEVFAQVKQIYKTPPIKDFGGFNFSQILPDPSKPSKRSFIEDLLFNKVTLADAGFIKQYGDCLGDIAARDLICAQKFNGLTVLPPLLTDEMIAQYTSALLAGTITSGWTFGAGAALQIPFAMQMAYRFNGIGVTQNVLYENQKLIANQFNSAIGKIQDSLFSTASALGKLQDVVNQNAQALNTLVKQLSSNFGAISSVLNDILSRLDKVEAEVQIDRLITGRLQSLQTYVTQQLIRAAEIRASANLAATKMSECVLGQSKRVDFCGKGYHLMSFPQSAPHGVVFLHVTYVPAQEKNFTTAPAICHDGKAHFPREGVFVSNGTHWFVTQRNFCEPQIITTDNTFVSGNCDVVIGIVNNTVYDPLQPELDSGGGSGGGQIYEGKLTAEGLRFGIVASRFNHALVDRLVEGAIDAIVRHGGREEDITLVRVPGSWEIPVAAGELARKEDIDAVIAIGVLIRGATPHFDYIASEVSKGLADLSLELRKPITFGVITADTLEQAIERAGTKHGNKGWEAALSAIEMANLFKSLR

SEQ ID NO: 8078 - protein, 1307 aa, Artificial Sequence
  SARS-CoV-2/Finland/FIN-313/2020__EPI_ISL_414641 spike protein (1-1147)(I714C_Y1110C) LumSynth construct
MFVFLVLLPLVSSQCVNLTTRTQLPPAYTNSFTRGVYYPDKVFRSSVLHSTQDLFLPFFSNVTWFHAIHVSGTNGTKRFDNPVLPFNDGVYFASTEKSNIIRGWIFGTTLDSKTQSLLIVNNATNVVIKVCEFQFCNDPFLGVYYHKNNKSWMESEFRVYSSANNCTFEYVSQPFLMDLEGKQGNFKNLREFVFKNIDGYFKIYSKHTPINLVRDLPQGFSALEPLVDLPIGINITRFKTLLALHRSYLTPGDSSSGWTAGAAAYYVGYLQPRTFLLKYNENGTITDAVDCALDPLSETKCTLKSFTVEKGIYQTSNFRVQPTESIVRFPNITNLCPFGEVFNATRFASVYAWNRKRISNCVADYSVLYNSASFSTFKCYGVSPTKLNDLCFTNVYADSFVIRGDEVRQIAPGQTGKIADYNYKLPDDFTGCVIAWNSNNLDSKVGGNYNYLYRLFRKSNLKPFERDISTEIYQAGSTPCNGVEGFNCYFPLQSYGFQPTNGVGYQPYRVVVLSFELLHAPATVCGPKKSTNLVKNKCVNFNFNGLTGTGVLTESNKKFLPFQQFGRDIADTTDAVRDPQTLEILDITPCSFGGVSVITPGTNTSNQVAVLYQGVNCTEVPVAIHADQLTPTWRVYSTGSNVFQTRAGCLIGAEHVNNSYECDIPIGAGICASYQTQTNSPRRARSVASQSIIAYTMSLGAENSVAYSNNSIACPTNFTISVTTEILPVSMTKTSVDCTMYICGDSTECSNLLLQYGSFCTQLNRALTGIAVEQDKNTQEVFAQVKQIYKTPPIKDFGGFNFSQILPDPSKPSKRSFIEDLLFNKVTLADAGFIKQYGDCLGDIAARDLICAQKFNGLTVLPPLLTDEMIAQYTSALLAGTITSGWTFGAGAALQIPFAMQMAYRFNGIGVTQNVLYENQKLIANQFNSAIGKIQDSLSSTASALGKLQDVVNQNAQALNTLVKQLSSNFGAISSVLNDILSRLDKVEAEVQIDRLITGRLQSLQTYVTQQLIRAAEIRASANLAATKMSECVLGQSKRVDFCGKGYHLMSFPQSAPHGVVFLHVTYVPAQEKNFTTAPAICHDGKAHFPREGVFVSNGTHWFVTQRNFCEPQIITTDNTFVSGNCDVVIGIVNNTVYDPLQPELDSGGGSGGGQIYEGKLTAEGLRFGIVASRFNHALVDRLVEGAIDAIVRHGGREEDITLVRVPGSWEIPVAAGELARKEDIDAVIAIGVLIRGATPHFDYIASEVSKGLADLSLELRKPITFGVITADTLEQAIERAGTKHGNKGWEAALSAIEMANLFKSLR

SEQ ID NO: 8079 - protein, 1307 aa, Artificial Sequence
  SARS-CoV-2/Netherlands/ZuidHolland_2/2020__EPI_ISL_414556 spike protein (1-1147)(I714C_Y1110C) LumSynth construct
MFVFLVLLPLVSSQCVNLTTRTQLPPAYTNSFTRGVYYPDKVFRSSVLHSTQDLFLPFFSNVTWFHAIHVSGTNGTKRFDNPVLPFNDGVYFASTEKSNIIRGWIFGTTLDSKTQSLLIVNNATNVVIKVCEFQFCNDPFLGVYYHKNNKSWMESEFRVYSSANNCTFEYVSQPFLMDLEGKQGNFKNLREFVFKNIDGYFKIYSKHTPINLVRDLPQGFSALEPLVDLPIGINITRFQTLLALHRSYLTPGDSSSGWTAGAAAYYVGYLQPRTFLLKYNENGTITDAVDCALDPLSETKCTLKSFTVEKGIYQTSNFRVQPTESIVRFPNITNLCPFGEVFNATRFASVYAWNRKRISNCVADYSVLYNSASFSTFKCYGVSPTKLNDLCFTNVYADSFVIRGDEVRQIAPGQTGKIADYNYKLPDDFTGCVIAWNSNNLDSKVGGNYNYLYRLFRKSNLKPFERDISTEIYQAGSTPCNGVEGFNCYFPLQSYGFQPTNGVGYQPYRVVVLSFELLHAPATVCGPKKSTNLVKNKCVNFNFNGLTGTGVLTESNKKFLPFQQFGRDIADTTDAVRDPQTLEILDITPCSFGGVSVITPGTNTSNQVAVLYQGVNCTEVPVAIHADQLTPTWRVYSTGSNVFQTRAGCLIGAEHVNNSYECDIPIGAGICASYQTQTNSPRRARSVASQSIIAYTMSLGAENSVAYSNNSIACPTNFTISVTTEILPVSMTKTSVDCTMYICGDSTECSNLLLQYGSFCTQLNRALTGIALEQDKNTQEVFAQVKQIYKTPPIKDFGGFNFSQILPDPSKPSKRSFIEDLLFNKVTLADAGFIKQYGDCLGDIAARDLICAQKFNGLTVLPPLLTDEMIAQYTSALLAGTITSGWTFGAGAALQIPFAMQMAYRFNGIGVTQNVLYENQKLIANQFNSAIGKIQDSLSSTASALGKLQDVVNQNAQALNTLVKQLSSNFGAISSVLNDILSRLDKVEAEVQIDRLITGRLQSLQTYVTQQLIRAAEIRASANLAATKMSECVLGQSKRVDFCGKGYHLMSFPQSAPHGVVFLHVTYVPAQEKNFTTAPAICHDGKAHFPREGVFVSNGTHWFVTQRNFCEPQIITTDNTFVSGNCDVVIGIVNNTVYDPLQPELDSGGGSGGGQIYEGKLTAEGLRFGIVASRFNHALVDRLVEGAIDAIVRHGGREEDITLVRVPGSWEIPVAAGELARKEDIDAVIAIGVLIRGATPHFDYIASEVSKGLADLSLELRKPITFGVITADTLEQAIERAGTKHGNKGWEAALSAIEMANLFKSLR

SEQ ID NO: 8080 - protein, 1307 aa, Artificial Sequence
  SARS-CoV-2/USA/WA-UW31/2020__EPI_ISL_414618 spike protein (1-1147)(I714C_Y1110C) LumSynth construct
MFVFLVLLPLVSSQCVNLTTRTQLPPAYTNSFTRGVYYPDKVFRSSVLHSTQDLFLPFFSNVTWFHAIHVSGTNGTKRFDNPVLPFNDGVYFASTEKSNIIRGWIFGTTLDSKTQSLLIVNNATNVVIKVCEFQFCNDPFLGVYYHKNNKSWMESEFRVYSSANNCTFEYVSQPFLMDLEGKQGNFKNLREFVFKNIDGYFKIYSKHTPINLVRDLPQGFSALEPLVDLPIGINITRFQTLLALHRSYLTPGDSSSGWTAGAAAYYVGYLQPRTFLLKYNENGTITDAVDCALDPLSETKCTLKSFTVEKGIYQTSNFRVQPTESIVRFPNITNLCPFGEVFNATRFASVYAWNRKRISNCVADYSVLYNSASFSTFKCYGVSPTKLNDLCFTNVYADSFVIRGDEVRQIAPGQTGKIADYNYKLPDDFTGCVIAWNSNNLDSKVGGNYNYLYRLFRKSNLKPFERDISTEIYQAGSTPCNGAEGFNCYFPLQSYGFQPTNGVGYQPYRVVVLSFELLHAPATVCGPKKSTNLVKNKCVNFNFNGLTGTGVLTESNKKFLPFQQFGRDIADTTDAVRDPQTLEILDITPCSFGGVSVITPGTNTSNQVAVLYQDVNCTEVPVAIHADQLTPTWRVYSTGSNVFQTRAGCLIGAEHVNNSYECDIPIGAGICASYQTQTNSPRRARSVASQSIIAYTMSLGAENSVAYSNNSIACPTNFTISVTTEILPVSMTKTSVDCTMYICGDSTECSNLLLQYGSFCTQLNRALTGIAVEQDKNTQEVFAQVKQIYKTPPIKDFGGFNFSQILPDPSKPSKRSFIEDLLFNKVTLADAGFIKQYGDCLGDIAARDLICAQKFNGLTVLPPLLTDEMIAQYTSALLAGTITSGWTFGAGAALQIPFAMQMAYRFNGIGVTQNVLYENQKLIANQFNSAIGKIQDSLSSTASALGKLQDVVNQNAQALNTLVKQLSSNFGAISSVLNDILSRLDKVEAEVQIDRLITGRLQSLQTYVTQQLIRAAEIRASANLAATKMSECVLGQSKRVDFCGKGYHLMSFPQSAPHGVVFLHVTYVPAQEKNFTTAPAICHDGKAHFPREGVFVSNGTHWFVTQRNFCEPQIITTDNTFVSGNCDVVIGIVNNTVYDPLQPELDSGGGSGGGQIYEGKLTAEGLRFGIVASRFNHALVDRLVEGAIDAIVRHGGREEDITLVRVPGSWEIPVAAGELARKEDIDAVIAIGVLIRGATPHFDYIASEVSKGLADLSLELRKPITFGVITADTLEQAIERAGTKHGNKGWEAALSAIEMANLFKSLR

SEQ ID NO: 8081 - protein, 1307 aa, Artificial Sequence
  SARS-CoV-2/South Korea/SNU01/2020__EPI_ISL_411929 spike protein (1-1147)(I714C_Y1110C) LumSynth construct
MFVFLVLLPLVSSQCVNLTTRTQLPPAYTNSFTRGVYYPDKVFRSSVLHSTQDLFLPFFSNVTWFHAIHVSGTNGTKRFDNPVLPFNDGVYFASTEKSNIIRGWIFGTTLDSKTQSLLIVNNATNVVIKVCEFQFCNDPFLGVYYHKNNKSWMESEFRVYSSANNCTFEYVSQPFLMDLEGKQGNFKNLREFVFKNIDGYFKIYSKHTPINLVRDLPQGFWALEPLVDLPIGINITRFQTLLALHRSYLTPGDSSSGWTAGAAAYYVGYLQPRTFLLKYNENGTITDAVDCALDPLSETKCTLKSFTVEKGIYQTSNFRVQPTESIVRFPNITNLCPFGEVFNATRFASVYAWNRKRISNCVADYSVLYNSASFSTFKCYGVSPTKLNDLCFTNVYADSFVIRGDEVRQIAPGQTGKIADYNYKLPDDFTGCVIAWNSNNLDSKVGGNYNYLYRLFRKSNLKPFERDISTEIYQAGSTPCNGVEGFNCYFPLQSYGFQPTNGVGYQPYRVVVLSFELLHAPATVCGPKKSTNLVKNKCVNFNFNGLTGTGVLTESNKKFLPFQQFGRDIADTTDAVRDPQTLEILDITPCSFGGVSVITPGTNTSNQVAVLYQDVNCTEVPVAIHADQLTPTWRVYSTGSNVFQTRAGCLIGAEHVNNSYECDIPIGAGICASYQTQTNSPRRARSVASQSIIAYTMSLGAENSVAYSNNSIACPTNFTISVTTEILPVSMTKTSVDCTMYICGDSTECSNLLLQYGSFCTQLNRALTGIAVEQDKNTQEVFAQVKQIYKTPPIKDFGGFNFSQILPDPSKPSKRSFIEDLLFNKVTLADAGFIKQYGDCLGDIAARDLICAQKFNGLTVLPPLLTDEMIAQYTSALLAGTITSGWTFGAGAALQIPFAMQMAYRFNGIGVTQNVLYENQKLIANQFNSAIGKIQDSLSSTASALGKLQDVVNQNAQALNTLVKQLSSNFGAISSVLNDILSRLDKVEAEVQIDRLITGRLQSLQTYVTQQLIRAAEIRASANLAATKMSECVLGQSKRVDFCGKGYHLMSFPQSAPHGVVFLHVTYVPAQEKNFTTAPAICHDGKAHFPREGVFVSNGTHWFVTQRNFCEPQIITTDNTFVSGNCDVVIGIVNNTVYDPLQPELDSGGGSGGGQIYEGKLTAEGLRFGIVASRFNHALVDRLVEGAIDAIVRHGGREEDITLVRVPGSWEIPVAAGELARKEDIDAVIAIGVLIRGATPHFDYIASEVSKGLADLSLELRKPITFGVITADTLEQAIERAGTKHGNKGWEAALSAIEMANLFKSLR

SEQ ID NO: 8082 - protein, 1307 aa, Artificial Sequence
  SARS-CoV-2/China/WF0004/2020__EPI_ISL_413694 spike protein (1-1147)(I714C_Y1110C) LumSynth construct
MFVFLVLLPLVSSQCVNLTTRTQLPPAYTNSFTRGVYYPDKVFRSSVLHSTQDLFLPFFSNVTWFHAIHVSGTNGTKRFDNPVLPFNDGVYFASTEKSNIIRGWIFGTTLDSKTQSLLIVNNATNVVIKVCEFQFCNDPFLGVYYHKNNKSWTESEFRVYSSANNCTFEYVSQPFLMDLEGKQGNFKNLREFVFKNIDGYFKIYSKHTPINLVRDLPQGFSALEPLVDLPIGINITRFQTLLALHRSYLTPGDSSSGWTAGAAAYYVGYLQPRTFLLKYNENGTITDAVDCALDPLSETKCTLKSFTVEKGIYQTSNFRVQPTESIVRFPNITNLCPFGEVFNATRFASVYAWNRKRISNCVADYSVLYNSASFSTFKCYGVSPTKLNDLCFTNVYADSFVIRGDEVRQIAPGQTGKIADYNYKLPDDFTGCVIAWNSNNLDSKVGGNYNYLYRLFRKSNLKPFERDISTEIYQAGSTPCNGVEGFNCYFPLQSYGFQPTNGVGYQPYRVVVLSFELLHAPATVCGPKKSTNLVKNKCVNFNFNGLTGTGVLTESNKKFLPFQQFGRDIADTTDAVRDPQTLEILDITPCSFGGVSVITPGTNTSNQVAVLYQDVNCTEVPVAIHADQLTPTWRVYSTGSNVFQTRAGCLIGAEHVNNSYECDIPIGAGICASYQTQTNSPRRARSVASQSIIAYTMSLGAENSVAYSNNSIACPTNFTISVTTEILPVSMTKTSVDCTMYICGDSTECSNLLLQYGSFCTQLNRALTGIAVEQDKNTQEVFAQVKQIYKTPPIKDFGGFNFSQILPDPSKPSKRSFIEDLLFNKVTLADAGFIKQYGDCLGDIAARDLICAQKFNGLTVLPPLLTDEMIAQYTSALLAGTITSGWTFGAGAALQIPFAMQMAYRFNGIGVTQNVLYENQKLIANQFNSAIGKIQDSLSSTASALGKLQDVVNQNAQALNTLVKQLSSNFGAISSVLNDILSRLDKVEAEVQIDRLITGRLQSLQTYVTQQLIRAAEIRASANLAATKMSECVLGQSKRFDFCGKGYHLMSFPQSAPHGVVFLHVTYVPAQEKNFTTAPAICHDGKAHFPREGVFVSNGTHWFVTQRNFCEPQIITTDNTFVSGNCDVVIGIVNNTVYDPLQPELDSGGGSGGGQIYEGKLTAEGLRFGIVASRFNHALVDRLVEGAIDAIVRHGGREEDITLVRVPGSWEIPVAAGELARKEDIDAVIAIGVLIRGATPHFDYIASEVSKGLADLSLELRKPITFGVITADTLEQAIERAGTKHGNKGWEAALSAIEMANLFKSLR

SEQ ID NO: 8083 - protein, 1307 aa, Artificial Sequence
  SARS-CoV-2/China/WF0028/2020__EPI_ISL_413791 spike protein (1-1147)(I714C_Y1110C) LumSynth construct
MFVFLVLLPLVSSQCVNLTTRTQLPPAYTNSFTRGVYYPDKVFRSSVLHSTQDLFLPFFSNVTWFHAIHVSGTNGTKRFDNPVLPFNDGVYFASTEKSNIIRGWIFGTTLDSKTQSLLIVNNATNVVIKVCEFQFCNDPFLGVYYHKNNKSWMESEFRVYSSANNCTFEYVSQPFLMDLEGKQGNFKNLREFVFKNIDGYFKIYSKHTPINLVRDLPQGFSALEPLVDLPIGINITRFQTLLALHRSYLTPGDSSSGWTAGAAAYYVGYLQPRTFLLKYNENGTITDAVDCALDPLSETKCTLKSFTVEKGIYQTSNFRVQPTESIVRFPNITNLCPFGEVFNATRFASVYAWNRKRISNCVADYSVLYNSASFSTFKCYGVSPTKLNDLCFTNVYADSFVIRGDEVRQIAPGQTGKIADYNYKLPDDFTGCVIAWNSNNLDSKVGGNYNYLYRLFRKSNLKPFERDISTEIYQAGSTPCNGVEGFNCYFPLQSYGFQPTNGVGYQPYRVVVLSFELLHAPATVCGPKKSTNLVKNKCVNFNFNGLTGTGVLTESNKKFLPFQQFGRDIADTTDAVRDPQTLEILDITPCSFGGVSVITPGTNTSNQVAVLYQDVNCTEVPVAIHADQLTPTWRVYSTGSNVFQTRAGCLIGAEHVNNSYECDIPIGAGICASYQTQTNSPRRARSVASQSIIAYTMSLGAENSVAYSNNSIACPTNFTISVTTEILPVSMTKTSVDCTMYICGDSTECSNLLLQYGSFCTQLNRALTGIAVEQDKNTQEVFAQVKQIYKTPPIKDFGGFNFSQILPDPSKPSKRSFIEDLLFNKVTLADAGFIKQYGDCLGDIAARDLICAQKFNGLTVLPPLLTDEMIAQYTSALLAGTITSGWTFGAGAALQIPFAMQMAYRFNGIGVTQNVLYENQKLIANQFNSAIGKIQDSLSSTASALGKLQDVVNQNAQALNTLVKQLSSNFGAISSVLNDILSRLDKVEAEVQIDRLITGRLQSLQTYVTQQLIRAAEIRASANLAATKMSECVLGQSKRVDFCGKGYHLMSFPQSAPHGVVFLHVTYVPAQEKNFTTAPAICHDGKAHFPREGVFVSNGTHWFVTQRNFCEPQIITTDNTFVSGNCDVVIGIVNNTVYDPLQPELESGGGSGGGQIYEGKLTAEGLRFGIVASRFNHALVDRLVEGAIDAIVRHGGREEDITLVRVPGSWEIPVAAGELARKEDIDAVIAIGVLIRGATPHFDYIASEVSKGLADLSLELRKPITFGVITADTLEQAIERAGTKHGNKGWEAALSAIEMANLFKSLR

SEQ ID NO: 8084 - protein, 1307 aa, Artificial Sequence
  SARS-CoV-2/2019-nCoV/USA-CruiseA-18/2020__MT159716.1 spike protein (1-1147)(I714C_Y1110C) LumSynth construct
MFVFLVLLPLVSSQCVNLTTRTQLPPAYTNSFTRGVYYPDKVFRSSVLHSTQDLFLPFFSNVTWFHAIHVSGTNGTKRFDNPVLPFNDGVYFASTEKSNIIRGWIFGTTLDSKTQSLLIVNNATNVVIKVCEFQFCNDPFLGVYYHKNNKSWMESELRVYSSANNCTFEYVSQPFLMDLEGKQGNFKNLREFVFKNIDGYFKIYSKHTPINLVRDLPQGFSALEPLVDLPIGINITRFQTLLALHRSYLTPGDSSSGWTAGAAAYYVGYLQPRTFLLKYNENGTITDAVDCALDPLSETKCTLKSFTVEKGIYQTSNFRVQPTESIVRFPNITNLCPFGEVFNATRFASVYAWNRKRISNCVADYSVLYNSASFSTFKCYGVSPTKLNDLCFTNVYADSFVIRGDEVRQIAPGQTGKIADYNYKLPDDFTGCVIAWNSNNLDSKVGGNYNYLYRLFRKSNLKPFERDISTEIYQAGSTPCNGVEGFNCYFPLQSYGFQPTNGVGYQPYRVVVLSFELLHAPATVCGPKKSTNLVKNKCVNFNFNGLTGTGVLTESNKKFLPFQQFGRDIADTTDAVRDPQTLEILDITPCSFGGVSVITPGTNTSNQVAVLYQDVNCTEVPVAIHADQLTPTWRVYSTGSNVFQTRAGCLIGAEHVNNSYECDIPIGAGICASYQTQTNSPRRARSVASQSIIAYTMSLGAENSVAYSNNSIACPTNFTISVTTEILPVSMTKTSVDCTMYICGDSTECSNLLLQYGSFCTQLNRALTGIAVEQDKNTQEVFAQVKQIYKTPPIKDFGGFNFSQILPDPSKPSKRSFIEDLLFNKVTLADAGFIKQYGDCLGDIAARDLICAQKFNGLTVLPPLLTDEMIAQYTSALLAGTITSGWTFGAGAALQIPFAMQMAYRFNGIGVTQNVLYENQKLIANQFNSAIGKIQDSLSSTASALGKLQDVVNQNAQALNTLVKQLSSNFGAISSVLNDILSRLDKVEAEVQIDRLITGRLQSLQTYVTQQLIRAAEIRASANLAATKMSECVLGQSKRVDFCGKGYHLMSFPQSAPHGVVFLHVTYVPAQEKNFTTAPAICHDGKAHFPREGVFVSNGTHWFVTQRNFCEPQIITTDNTFVSGNCDVVIGIVNNTVYDPLQPELDSGGGSGGGQIYEGKLTAEGLRFGIVASRFNHALVDRLVEGAIDAIVRHGGREEDITLVRVPGSWEIPVAAGELARKEDIDAVIAIGVLIRGATPHFDYIASEVSKGLADLSLELRKPITFGVITADTLEQAIERAGTKHGNKGWEAALSAIEMANLFKSLR

SEQ ID NO: 8085 - protein, 1307 aa, Artificial Sequence
  SARS-CoV-2/SARS-CoV-2/Yunnan-01/human/2020/CHN__MT049951.1 spike protein (1-1147)(I714C_Y1110C) LumSynth construct
MFVFLVLLPLVSSQCVNLTTRTQLPPANTNSFTRGVYYPDKVFRSSVLHSTQDLFLPFFSNVTWFHAIHVSGTNGTKRFDNPVLPFNDGVYFASTEKSNIIRGWIFGTTLDSKTQSLLIVNNATNVVIKVCEFQFCNDPFLGVYYHKNNKSWMESEFRVYSSANNCTFEYVSQPFLMDLEGKQGNFKNLREFVFKNIDGYFKIYSKHTPINLVRDLPQGFSALEPLVDLPIGINITRFQTLLALHRSYLTPGDSSSGWTAGAAAYYVGYLQPRTFLLKYNENGTITDAVDCALDPLSETKCTLKSFTVEKGIYQTSNFRVQPTESIVRFPNITNLCPFGEVFNATRFASVYAWNRKRISNCVADYSVLYNSASFSTFKCYGVSPTKLNDLCFTNVYADSFVIRGDEVRQIAPGQTGKIADYNYKLPDDFTGCVIAWNSNNLDSKVGGNYNYLYRLFRKSNLKPFERDISTEIYQAGSTPCNGVEGFNCYFPLQSYGFQPTNGVGYQPYRVVVLSFELLHAPATVCGPKKSTNLVKNKCVNFNFNGLTGTGVLTESNKKFLPFQQFGRDIADTTDAVRDPQTLEILDITPCSFGGVSVITPGTNTSNQVAVLYQDVNCTEVPVAIHADQLTPTWRVYSTGSNVFQTRAGCLIGAEHVNNSYECDIPIGAGICASYQTQTNSPRRARSVASQSIIAYTMSLGAENSVAYSNNSIACPTNFTISVTTEILPVSMTKTSVDCTMYICGDSTECSNLLLQYGSFCTQLNRALTGIAVEQDKNTQEVFAQVKQIYKTPPIKDFGGFNFSQILPDPSKPSKRSFIEDLLFNKVTLADAGFIKQYGDCLGDIAARDLICAQKFNGLTVLPPLLTDEMIAQYTSALLAGTITSGWTFGAGAALQIPFAMQMAYRFNGIGVTQNVLYENQKLIANQFNSAIGKIQDSLSSTASALGKLQDVVNQNAQALNTLVKQLSSNFGAISSVLNDILSRLDKVEAEVQIDRLITGRLQSLQTYVTQQLIRAAEIRASANLAATKMSECVLGQSKRVDFCGKGYHLMSFPQSAPHGVVFLHVTYVPAQEKNFTTAPAICHDGKAHFPREGVFVSNGTHWFVTQRNFCEPQIITTDNTFVSGNCDVVIGIVNNTVYDPLQPELDSGGGSGGGQIYEGKLTAEGLRFGIVASRFNHALVDRLVEGAIDAIVRHGGREEDITLVRVPGSWEIPVAAGELARKEDIDAVIAIGVLIRGATPHFDYIASEVSKGLADLSLELRKPITFGVITADTLEQAIERAGTKHGNKGWEAALSAIEMANLFKSLR

SEQ ID NO: 8086 - protein, 1307 aa, Artificial Sequence
  SARS-CoV-2/USA/WA-UW292/2020__EPI_ISL_418077 spike protein (1-1147)(I714C_Y1110C) LumSynth construct
MFVFLVLLPLVSSQCVNLTTRTQLPPAYTNSFTRGVYYPDKVFRSSVLHSTQDLFLPFFSNVTWFHAIHVSGTNGTKRFDNPVLPFNDGVYFASTEKSNIIRGWIFGTTLDSKTQSLLIVNNATNVVIKVCEFQFCNDPFLGVYYHKNNKSWMESEFRVYSSANNCTFEYVSQPFLMDLEGKQGNFKNLREFVFKNIDGYFKIYSKHTPINLVRDLPQGFSALEPLVDLPIGINITRFQTLLALHRSYLTPGDSSSGWTAGAAAYYVGYLQPRTFLLKYNENGTITDAVDCALDPLSETKCTLKSFTVEKGIYQTSNFRVQPTESIVRFPNITNLCPFGEVFNATRFASVYAWNRKRISNCVADYSVLYNSASFSTFKCYGVSPTKLNDLCFTNVYADSFVIRGDEVRQIAPGQTGKIADYNYKLPDDFTGCVIAWNSNNLDSKVGGNYNYLYRLFRKSNLKPFERDISTEIYQASSTPCNGVEGFNCYFPLQSYGFQPTNGVGYQPYRVVVLSFELLHAPATVCGPKKSTNLVKNKCVNFNFNGLTGTGVLTESNKKFLPFQQFGRDIADTTDAVRDPQTLEILDITPCSFGGVSVITPGTNTSNQVAVLYQDVNCTEVPVAIHADQLTPTWRVYSTGSNVFQTRAGCLIGAEHVNNSYECDIPIGAGICASYQTQTNSPRRARSVASQSIIAYTMSLGAENSVAYSNNSIACPTNFTISVTTEILPVSMTKTSVDCTMYICGDSTECSNLLLQYGSFCTQLNRALTGIAVEQDKNTQEVFAQVKQIYKTPPIKDFGGFNFSQILPDPSKPSKRSFIEDLLFNKVTLADAGFIKQYGDCLGDIAARDLICAQKFNGLTVLPPLLTDEMIAQYTSALLAGTITSGWTFGAGAALQIPFAMQMAYRFNGIGVTQNVLYENQKLIANQFNSAIGKIQDSLSSTASALGKLQDVVNQNAQALNTLVKQLSSNFGAISSVLNDILSRLDKVEAEVQIDRLITGRLQSLQTYVTQQLIRAAEIRASANLAATKMSECVLGQSKRVDFCGKGYHLMSFPQSAPHGVVFLHVTYVPAQEKNFTTAPAICHDGKAHFPREGVFVSNGTHWFVTQRNFCEPQIITTDNTFVSGNCDVVIGIVNNTVYDPLQPELDSGGGSGGGQIYEGKLTAEGLRFGIVASRFNHALVDRLVEGAIDAIVRHGGREEDITLVRVPGSWEIPVAAGELARKEDIDAVIAIGVLIRGATPHFDYIASEVSKGLADLSLELRKPITFGVITADTLEQAIERAGTKHGNKGWEAALSAIEMANLFKSLR

SEQ ID NO: 8087 - protein, 1307 aa, Artificial Sequence
  SARS-CoV-2/Iceland/192/2020__EPI_ISL_417819 spike protein (1-1147)(I714C_Y1110C) LumSynth construct
MFVFFVLLPLVSSQCVNLTTRTQLPPAYTNSFTRGVYYPDKVFRSSVLHSTQDLFLPFFSNVTWFHAIHVSGTNGTKRFDNPVLPFNDGVYFASTEKSNIIRGWIFGTTLDSKTQSLLIVNNATNVVIKVCEFQFCNDPFLGVYYHKNNKSWMESEFRVYSSANNCTFEYVSQPFLMDLEGKQGNFKNLREFVFKNIDGYFKIYSKHTPINLVRDLPQGFSALEPLVDLPIGINITRFQTLLALHRSYLTPGDSSSGWTAGAAAYYVGYLQPRTFLLKYNENGTITDAVDCALDPLSETKCTLKSFTVEKGIYQTSNFRVQPTESIVRFPNITNLCPFGEVFNATRFASVYAWNRKRISNCVADYSVLYNSASFSTFKCYGVSPTKLNDLCFTNVYADSFVIRGDEVRQIAPGQTGKIADYNYKLPDDFTGCVIAWNSNNLDSKVGGNYNYLYRLFRKSNLKPFERDISTEIYQAGSTPCNGVEGFNCYFPLQSYGFQPTNGVGYQPYRVVVLSFELLHAPATVCGPKKSTNLVKNKCVNFNFNGLTGTGVLTESNKKFLPFQQFGRDIADTTDAVRDPQTLEILDITPCSFGGVSVITPGTNTSNQVAVLYQGVNCTEVPVAIHADQLTPTWRVYSTGSNVFQTRAGCLIGAEHVNNSYECDIPIGAGICASYQTQTNSPRRARSVASQSIIAYTMSLGAENSVAYSNNSIACPTNFTISVTTEILPVSMTKTSVDCTMYICGDSTECSNLLLQYGSFCTQLNRALTGIAVEQDKNTQEVFAQVKQIYKTPPIKDFGGFNFSQILPDPSKPSKRSFIEDLLFNKVTLADAGFIKQYGDCLGDIAARDLICAQKFNGLTVLPPLLTDEMIAQYTSALLAGTITSGWTFGAGAALQIPFAMQMAYRFNGIGVTQNVLYENQKLIANQFNSAIGKIQDSLSSTASALGKLQDVVNQNAQALNTLVKQLSSNFGAISSVLNDILSRLDKVEAEVQIDRLITGRLQSLQTYVTQQLIRAAEIRASANLAATKMSECVLGQSKRVDFCGKGYHLMSFPQSAPHGVVFLHVTYVPAQEKNFTTAPAICHDGKAHFPREGVFVSNGTHWFVTQRNFCEPQIITTDNTFVSGNCDVVIGIVNNTVYDPLQPELDSGGGSGGGQIYEGKLTAEGLRFGIVASRFNHALVDRLVEGAIDAIVRHGGREEDITLVRVPGSWEIPVAAGELARKEDIDAVIAIGVLIRGATPHFDYIASEVSKGLADLSLELRKPITFGVITADTLEQAIERAGTKHGNKGWEAALSAIEMANLFKSLR

SEQ ID NO: 8088 - protein, 1307 aa, Artificial Sequence
  SARS-CoV-2/Belgium/ULG-6939/2020__EPI_ISL_417020 spike protein (1-1147)(I714C_Y1110C) LumSynth construct
MFVFLVLLPLVSSQCVNLTTRTQLPPAYTNSFTRGVYYPDKVFRSSVLHSTQDLFLPFFSNVTWFHAIHVSGTNGTKRFDNPVLPFNDGVYFASTEKSNIIRGWIFGTTLDSKTQSLLIVNNATNVVIKVCEFQFCNDPFLGVYYHKNNKSWMESEFRVYSSANNCTFEYVSQPFLMDLEGKQGNFKNLREFVFKNIDGYFKIYSKHTPINLVRDLPQGFSALEPLVDLPIGINITRFQTLLALHRSYLTPGDSSSGWTAGAAAYYVGYLQPRTFLLKYNENGTITDAVDCALDPLSETKCTLKSFTVEKGIYQTSNFRVQPTESIVRFPNITNLCPFGEVFNATRFASVYAWNRKRISNCVADYSVLYNSASFSTFKCYGVSPTKLNDLCFTNVYADSFVIRGDEVRQIAPGQTGKIADYNYKLPDDFTGCVIAWNSNNLDSKVGGNYNYLYRLFRKSNLKPFERDISTEIYQAGSTPCNGVEGFNCYFPLQSYGFQPTNGVGYQPYRVVVLSFELLHAPATVCGPKKSTNLVKNKCVNFNFNGLTGTGVLTESNKKFLPFQQFGRDIADTTDAVRDPQTLEILDITPCSFGGVSVITPGTNTSNQVAVLYQGVNCTEVPVAIHADQLTPTWRVYSTGSNVFQTRAGCLIGAEHVNNSYECDIPIGAGICASYQTQTNSPRRARSVASQSIIAYTMSLGAENSVVYSNNSIACPTNFTISVTTEILPVSMTKTSVDCTMYICGDSTECSNLLLQYGSFCTQLNRALTGIAVEQDKNTQEVFAQVKQIYKTPPIKDFGGFNFSQILPDPSKPSKRSFIEDLLFNKVTLADAGFIKQYGDCLGDIAARDLICAQKFNGLTVLPPLLTDEMIAQYTSALLAGTITSGWTFGAGAALQIPFAMQMAYRFNGIGVTQNVLYENQKLIANQFNSAIGKIQDSLSSTASALGKLQDVVNQNAQALNTLVKQLSSNFGAISSVLNDILSRLDKVEAEVQIDRLITGRLQSLQTYVTQQLIRAAEIRASANLAATKMSECVLGQSKRVDFCGKGYHLMSFPQSAPHGVVFLHVTYVPAQEKNFTTAPAICHDGKAHFPREGVFVSNGTHWFVTQRNFCEPQIITTDNTFVSGNCDVVIGIVNNTVYDPLQPELDSGGGSGGGQIYEGKLTAEGLRFGIVASRFNHALVDRLVEGAIDAIVRHGGREEDITLVRVPGSWEIPVAAGELARKEDIDAVIAIGVLIRGATPHFDYIASEVSKGLADLSLELRKPITFGVITADTLEQAIERAGTKHGNKGWEAALSAIEMANLFKSLR

SEQ ID NO: 8089 - protein, 1307 aa, Artificial Sequence
  SARS-CoV-2/France/HF2496/2020__EPI_ISL_418231 spike protein (1-1147)(I714C_Y1110C) LumSynth construct
MFVFLVLLPLVSSQCVNLTTRTQLPPAYTNSFTRGVYYPDKVFRSSVLHSTQDLFLPFFSNVTWFHAIHVSGTNGTKRFDNPVLPFNDGVYFASTEKSNIIRGWIFGTTLDSKTQSLLIVNNATNVVIKVCEFQFCNDPFLGVYYHKNNKSWMESEFRVYSSANNCTFEYVSQPFLMDLEGKQGNFKNLREFVFKNIDGYFKIYSKHTPINLVRDLPQGFSALEPLVDLPIGINITRFQTLLALHRSYLTPGDSSSGWTAGAAAYYVGYLQPRTFLLKYNENGTITDAVDCALDPLSETKCTLKSFTVEKGIYQTSNFRVQPTESIVRFPNITNLCPFGEVFNATRFASVYAWNRKRISNCVADYSVLYNSASFSTFKCYGVSPTKLNDLCFTNVYADSFVIRGDEVRQIAPGQTGKIADYNYKLPDDFTGCVIAWNSNNLDSKVGGNYNYLYRLFRKSNLKPFERDISTEIYQAGSTPCNGVEGFNCYFPLQSYGFQPTNGVGYQPYRVVVLSFELLHAPATVCGPKKSTNLVKNKCVNFNFNGLTGTGVLTESNKKFLPFQQFGRDIADTTDAVRDPQTLEILDITPCSFGGVSVITPGTNTSNQVAVLYQGVNCTEVPVAIHADQLTPTWRVYSTGSNVFQTRAGCLIGAEHVNNSYECDIPIGAGICASYQTQTNSPRRARSVASQSIIAYTMSLGAENSVAYSNNSIACPTNFTISVTTEILPVSMTKTSVDCTMYICGDSTECSNLLLQYGSFCTQLNRALTGIAVEQDKNTQEVFAQVKQIYKTPPIKDFGGFNFSQILPDPSKPSKRSFIEDLLFNKVTLADAGFIKQYGDCLGDIVARDLICAQKFNGLTVLPPLLTDEMIAQYTSALLAGTITSGWTFGAGAALQIPFAMQMAYRFNGIGVTQNVLYENQKLIANQFNSAIGKIQDSLSSTASALGKLQDVVNQNAQALNTLVKQLSSNFGAISSVLNDILSRLDKVEAEVQIDRLITGRLQSLQTYVTQQLIRAAEIRASANLAATKMSECVLGQSKRVDFCGKGYHLMSFPQSAPHGVVFLHVTYVPAQEKNFTTAPAICHDGKAHFPREGVFVSNGTHWFVTQRNFCEPQIITTDNTFVSGNCDVVIGIVNNTVYDPLQPELDSGGGSGGGQIYEGKLTAEGLRFGIVASRFNHALVDRLVEGAIDAIVRHGGREEDITLVRVPGSWEIPVAAGELARKEDIDAVIAIGVLIRGATPHFDYIASEVSKGLADLSLELRKPITFGVITADTLEQAIERAGTKHGNKGWEAALSAIEMANLFKSLR

SEQ ID NO: 8090 - protein, 1307 aa, Artificial Sequence
  SARS-CoV-2/USA/WA-UW291/2020__EPI_ISL_418076 spike protein (1-1147)(I714C_Y1110C) LumSynth construct
MFVFLVLLPLVSSQCVNLTTRTQLPPAYTNSFTRGVYYPDKVFRSSVLHSTQDLFLPFFSNVTWFHAIHVSGTNGTKRFDNPVLPFNDGVYFASTEKSNIIRGWIFGTTLDSKTQSLLIVNNATNVVIKVCEFQFCNDPFLGVYYHKNNKSWMESEFRVYSSANNCTFEYVSQPFLMDLEGKQGNFKNLREFVFKNIDGYFKIYSKHTPINLVRDLPQGFSALEPLVDLPIGINITRFQTLLALHRSYLTPGDSSSGWTAGAAAYYVGYLQPRTFLLKYNENGTITDAVDCALDPLSETKCTLKSFTVEKGIYQTSNFRVQPTESIVRFPNITNLCPFGEVFNATRFASVYAWNRKRISNCVADYSVLYNSASFSTFKCYGVSPTKLNDLCFTNVYADSFVIRGDEVRQIAPGQTGKIADYNYKLPDDFTGCVIAWNSNNLDSKVGGNYNYLYRLFRKSNLKPFERDISTEIYQAGSTPCNGVEGFNCYFPLQSYGFQPTNGVGYQPYRVVVLSFELLHAPATVCGPKKSTNLVKNKCVNFNFNGLTGTGVLTESNKKFLPFQQFGRDIADTTDAVRDPQTLEILDITPCSFGGVSVITPGTNTSNQVAVLYQGVNCTEVPVAIHADQLTPTWRVYSTGSNVFQTRAGCLIGAEHVNNSYECDIPIGAGICASYQTQTNSPRRARSVASQSIIAYTMSLGAENSVAYSNNSIACPTNFTISVTTEILPVSMTKTSVDCTMYICGDSTECSNLLLQYGSFCTQLNRALTGIAVEQDKNTQEVFAQVKQIYKTPPIKDFGGFNFSQILPDPSKPSKRSFIEDLLFNKVTLADAGFIKQYGDCLGDIAARDLICAQKFNGLTVLPPLLTDEMIAQYTSALLAGTITSGWTFGAGAALQIPFAMQMAYRFNGIGVTQNVLYENQKLIANQFNSAIGKIQYSLSSTASALGKLQDVVNQNAQALNTLVKQLSSNFGAISSVLNDILSRLDKVEAEVQIDRLITGRLQSLQTYVTQQLIRAAEIRASANLAATKMSECVLGQSKRVDFCGKGYHLMSFPQSAPHGVVFLHVTYVPAQEKNFTTAPAICHDGKAHFPREGVFVSNGTHWFVTQRNFCEPQIITTDNTFVSGNCDVVIGIVNNTVYDPLQPELDSGGGSGGGQIYEGKLTAEGLRFGIVASRFNHALVDRLVEGAIDAIVRHGGREEDITLVRVPGSWEIPVAAGELARKEDIDAVIAIGVLIRGATPHFDYIASEVSKGLADLSLELRKPITFGVITADTLEQAIERAGTKHGNKGWEAALSAIEMANLFKSLR

SEQ ID NO: 8091 - protein, 1307 aa, Artificial Sequence; identical to SEQ ID NO: 8054
  SARS-CoV-2/Portugal/PT0034/2020__EPI_ISL_418019 spike protein (1-1147)(I714C_Y1110C) LumSynth construct

SEQ ID NO: 8092 - protein, 1307 aa, Artificial Sequence; identical to SEQ ID NO: 8046
  SARS-CoV-2/Iceland/202/2020__EPI_ISL_417750 spike protein (1-1147)(I714C_Y1110C) LumSynth construct

SEQ ID NO: 8093 - protein, 1307 aa, Artificial Sequence
  SARS-CoV-2/USA/WA-UW261/2020__EPI_ISL_418046 spike protein (1-1147)(I714C_Y1110C) LumSynth construct
MFVFLVLLPLVSSQCVNLTTRTQLPPAYTNSFTRGVYYPDKVFRSSVLHSTQDLFLPFFSNVTWFHAIHVSGTNGTKRFDNPVLPFNDGVYFASTEKSNIIRGWIFGTTLDSKTQSLLIVNNATNVVIKVCEFQFCNDPFLGVYYHKNNKSWMESEFRVYSSANNCTFEYVSQPFLMDLEGKQGNFKNLREFVFKNIDGYFKIYSKHTPINLVRDLPQGFSALEPLVDLPIGINITRFQTLLALHRSYLTPGDSSSGWTAGAAAYYVGYLQPRTFLLKYNENGTITDAVDCALDPLSETKCTLKSFTVEKGIYQTSNFRVQPTESIVRFPNITNLCPFGEVFNATRFTSVYAWNRKRISNCVADYSVLYNSASFSTFKCYGVSPTKLNDLCFTNVYADSFVIRGDEVRQIAPGQTGKIADYNYKLPDDFTGCVIAWNSNNLDSKVGGNYNYLYRLFRKSNLKPFERDISTEIYQAGSTPCNGVEGFNCYFPLQSYGFQPTNGVGYQPYRVVVLSFELLHAPATVCGPKKSTNLVKNKCVNFNFNGLTGTGVLTESNKKFLPFQQFGRDIADTTDAVRDPQTLEILDITPCSFGGVSVITPGTNTSNQVAVLYQDVNCTEVPVAIHADQLTPTWRVYSTGSNVFQTRAGCLIGAEHVNNSYECDIPIGAGICASYQTQTNSPRRARSVASQSIIAYTMSLGAENSVAYSNNSIACPTNFTISVTTEILPVSMTKTSVDCTMYICGDSTECSNLLLQYGSFCTQLNRALTGIAVEQDKNTQEVFAQVKQIYKTPPIKDFGGFNFSQILPDPSKPSKRSFIEDLLFNKVTLADAGFIKQYGDCLGDIAARDLICAQKFNGLTVLPPLLTDEMIAQYTSALLAGTITSGWTFGAGAALQIPFAMQMAYRFNGIGVTQNVLYENQKLIANQFNSAIGKIQDSLSSTASALGKLQDVVNQNAQALNTLVKQLSSNFGAISSVLNDILSRLDKVEAEVQIDRLITGRLQSLQTYVTQQLIRAAEIRASANLAATKMSECVLGQSKRVDFCGKGYHLMSFPQSAPHGVVFLHVTYVPAQEKNFTTAPAICHDGKAHFPREGVFVSNGTHWFVTQRNFCEPQIITTDNTFVSGNCDVVIGIVNNTVYDPLQPELDSGGGSGGGQIYEGKLTAEGLRFGIVASRFNHALVDRLVEGAIDAIVRHGGREEDITLVRVPGSWEIPVAAGELARKEDIDAVIAIGVLIRGATPHFDYIASEVSKGLADLSLELRKPITFGVITADTLEQAIERAGTKHGNKGWEAALSAIEMANLFKSLR

SEQ ID NO: 8094 - protein, 1307 aa, Artificial Sequence
  SARS-CoV-2/Portugal/PT0035/2020__EPI_ISL_418020 spike protein (1-1147)(I714C_Y1110C) LumSynth construct
MFVFLVLLPLVSSQCVNLTTRTQLPPAYTNSFTRGVYYPDKVFRSSVLHSTQDLFLPFFSNVTWFHAIHVSGTNGTKRFDNPVLPFNDGVYFASTEKSNIIRGWIFGTTLDSKTQSLLIVNNATNVVIKVCEFQFCNDPFLGVYYHKNNKSWMESEFRVYSSANNCTFEYVSQPFLMDLEGKQGNFKNLREFVFKNIDGYFKIYSKHTPINLVRDLPQGFSALEPLVDLPIGINITRFQTLLALHRSYLTPGDSSSGWTAGAAAYYVGYLQPRTFLLKYNENGTITDAVDCALDPLSETKCTLKSFTVEKGIYQTSNFRVQPTESIVRFPNITNLCPFGEVFNATRFASVYAWNRKRISNCVADYSVLYNSASFSTFKCYGVSPTKLNDLCFTNVYADSFVIRGDEVRQIAPGQTGKIADYNYKLPDDFTGCVIAWNSNNLDSKVGGNYNYLYRLFRKSNLKPFERDISTEIYQAGSTPCNGVEGFNCYFPLQSYGFQPTNGVGYQPYRVVVLSFELLHAPATVCGPKKSTNLVKNKCVNFNFNGLTGTGVLTESNKKFLPFQQFGRDIADTTDAVRDPQTLEILDITPCSFGGVSVITPGTNTSNQVAVLYQDVNCTEVPVAIHADQLTPTWRVYSTGSNVFQTRAGCLIGAEHVNNSYECDIPIGAGICASYQTQTNSPRRARSVASQSIIAYTMSLGAENSVAYSNNSIACPTNFTISVTTEILPVSMTKTSVDCTMYICGDSTECSNLLLQYGSFCTQLNRALTGIAVEQDKNTQEVFAQVKQIYKTPPIKDFGGFNFSQILPDPSKPSKRSFIEDLLFNKVTLADAGFIKQYGDCLGDISARDLICAQKFNGLTVLPPLLTDEMIAQYTSALLAGTITSGWTFGAGAALQIPFAMQMAYRFNGIGVTQNVLYENQKLIANQFNSAIGKIQDSLSSTASALGKLQDVVNQNAQALNTLVKQLSSNFGAISSVLNDILSRLDKVEAEVQIDRLITGRLQSLQTYVTQQLIRAAEIRASANLAATKMSECVLGQSKRVDFCGKGYHLMSFPQSAPHGVVFLHVTYVPAQEKNFTTAPAICHDGKAHFPREGVFVSNGTHWFVTQRNFCEPQIITTDNTFVSGNCDVVIGIVNNTVYDPLQPELDSGGGSGGGQIYEGKLTAEGLRFGIVASRFNHALVDRLVEGAIDAIVRHGGREEDITLVRVPGSWEIPVAAGELARKEDIDAVIAIGVLIRGATPHFDYIASEVSKGLADLSLELRKPITFGVITADTLEQAIERAGTKHGNKGWEAALSAIEMANLFKSLR

SEQ ID NO: 8095 - protein, 1307 aa, Artificial Sequence
  SARS-CoV-2/USA/NY-NYUMC7/2020__EPI_ISL_418192 spike protein (1-1147)(I714C_Y1110C) LumSynth construct
MFVFLVLLPLVSSQCVNLTTRTQLPPAYTNSFTRGVYYPDKVFRSSVLHSTQDLFLPFFSNVTWFHAIHVSGTNGTKRFDNPVLPFNDGVYFASTEKSNIIRGWIFGTTLDSKTQSLLIVNNATNVVIKVCEFQFCNDPFLGVYHHKNNKSWMESEFRVYSSANNCTFEYVSQPFLMDLEGKQGNFKNLREFVFKNIDGYFKIYSKHTPINLVRDLPQGFSALEPLVDLPIGINITRFQTLLALHRSYLTPGDSSSGWTAGAAAYYVGYLQPRTFLLKYNENGTITDAVDCALDPLSETKCTLKSFTVEKGIYQTSNFRVQPTESIVRFPNITNLCPFGEVFNATRFASVYAWNRKRISNCVADYSVLYNSASFSTFKCYGVSPTKLNDLCFTNVYADSFVIRGDEVRQIAPGQTGKIADYNYKLPDDFTGCVIAWNSNNLDSKVGGNYNYLYRLFRKSNLKPFERDISTEIYQAGSTPCNGVEGFNCYFPLQSYGFQPTNGVGYQPYRVVVLSFELLHAPATVCGPKKSTNLVKNKCVNFNFNGLTGTGVLTESNKKFLPFQQFGRDIADTTDAVRDPQTLEILDITPCSFGGVSVITPGTNTSNQVAVLYQGVNCTEVPVAIHADQLTPTWRVYSTGSNVFQTRAGCLIGAEHVNNSYECDIPIGAGICASYQTQTNSPRRARSVASQSIIAYTMSLGAENSVAYSNNSIACPTNFTISVTTEILPVSMTKTSVDCTMYICGDSTECSNLLLQYGSFCTQLNRALTGIAVEQDKNTQEVFAQVKQIYKTPPIKDFGGFNFSQILPDPSKPSKRSFIEDLLFNKVTLADAGFIKQYGDCLGDIAARDLICAQKFNGLTVLPPLLTDEMIAQYTSALLAGTITSGWTFGAGAALQIPFAMQMAYRFNGIGVTQNVLYENQKLIANQFNSAIGKIQDSLSSTASALGKLQDVVNQNAQALNTLVKQLSSNFGAISSVLNDILSRLDKVEAEVQIDRLITGRLQSLQTYVTQQLIRAAEIRASANLAATKMSECVLGQSKRVDFCGKGYHLMSFPQSAPHGVVFLHVTYVPAQEKNFTTAPAICHDGKAHFPREGVFVSNGTHWFVTQRNFCEPQIITTDNTFVSGNCDVVIGIVNNTVYDPLQPELDSGGGSGGGQIYEGKLTAEGLRFGIVASRFNHALVDRLVEGAIDAIVRHGGREEDITLVRVPGSWEIPVAAGELARKEDIDAVIAIGVLIRGATPHFDYIASEVSKGLADLSLELRKPITFGVITADTLEQAIERAGTKHGNKGWEAALSAIEMANLFKSLR

SEQ ID NO: 8096 - protein, 1307 aa, Artificial Sequence
  SARS-CoV-2/Iceland/189/2020__EPI_ISL_417709 spike protein (1-1147)(I714C_Y1110C) LumSynth construct
MFVFLVLLPLVSSQCVNLTTRTQLPPAYTNSFTRGVYYPDKVFRSSVLHSTQDLFLPFFSNVTWFHAIHVSGTNGTKRFDNPVLPFNDGVYFASTEKSNIIRGWIFGTTLDSKTQSLLIVNNATNVVIKVCEFQFCNDPFLGVYYHKNNKSWMESEFRVYSSANNCTFEYVSQPFLMDLEGKQGNFKNLREFVFKNIDGYFKIYSKHTPINLVRDLPQGFSALEPLVDLPIGINITRFQTLLALHRSYLTPGDSSSGWTAGAAAYYVGYLQPRTFLLKYNENGTITDAVDCALDPLSETKCTLKSFTVEKGIYQTSNFRVQPTESIVRFPNITNLCPFGEVFNATRFASVYAWNRKRISNCVADYSVLYNSASFSTFKCYGVSPTKLNDLCFTNVYADSFVIRGDEVRQIAPGQTGKIADYNYKLPDDFTGCVIAWNSNNLDSKVGGNYNYLYRLFRKSNLKPFERDISTEIYQAGSTPCNGVEGFNCYFPLQSYGFQPTNGVGYQPYRVVVLSFELLHAPATVCGPKKSTNLVKNKCVNFNFNGLTGTGVLTESNKKFLPFQQFGRDIADTTDAVRDPQTLEILDITPCSFGGVSVITPGTNTSNQVAVLYQGVNCTEVPVAIHADQLTPTWRVYSTGSNVFQTRAGCLIGAEHVNNSYECDIPIGAGICASYQTQTNSPRRARSVASQSIIAYTMSLGAENSVAYSNNSIACPTNFTISVTTEILPVSMTKTSVDCTMYICGDSTECSNLLLQYGSFCTQLNRALTGIAVEQDKNTQEVFAQVKQIYKTPPIKDFGGFNFSQILPDPSKPSKRSFIEDLLFNKVTLADAGFTKQYGDCLGDIAARDLICAQKFNGLTVLPPLLTDEMIAQYTSALLAGTITSGWTFGAGAALQIPFAMQMAYRFNGIGVTQNVLYENQKLIANQFNSAIGKIQDSLSSTASALGKLQDVVNQNAQALNTLVKQLSSNFGAISSVLNDILSRLDKVEAEVQIDRLITGRLQSLQTYVTQQLIRAAEIRASANLAATKMSECVLGQSKRVDFCGKGYHLMSFPQSAPHGVVFLHVTYVPAQEKNFTTAPAICHDGKAHFPREGVFVSNGTHWFVTQRNFCEPQIITTDNTFVSGNCDVVIGIVNNTVYDPLQPELDSGGGSGGGQIYEGKLTAEGLRFGIVASRFNHALVDRLVEGAIDAIVRHGGREEDITLVRVPGSWEIPVAAGELARKEDIDAVIAIGVLIRGATPHFDYIASEVSKGLADLSLELRKPITFGVITADTLEQAIERAGTKHGNKGWEAALSAIEMANLFKSLR

SEQ ID NO: 8097 - protein, 1307 aa, Artificial Sequence
  SARS-CoV-2/Australia/NSW56/2020__EPI_ISL_417408 spike protein (1-1147)(I714C_Y1110C) LumSynth construct
MFVFLVLLPLVSSQCVNLTTRTQLPPAYTNSFTRGVYYPDKVFRSSVLHSTQDLFLPFFSNVTWFHAIHVSGTNGTKRFDNPVLPFNDGVYFASTEKSNIIRGWIFGTTLDSKTQSLLIVNNATNVVIKVCEFQFCNDPFLGVYYHKNNKSWMESEFRVYSSANNCTFEYVSQPFLMDLEGKQGNFKNLREFVFKNIDGYFKIYSKHTPINLVRDLPQGFSALEPLVDLPIGINITRFQTLLALHRSYLTPGDSSSGWTAGAAAYYVGYLQPRTFLLKYNENGTITDAVDCALDPLSETKCTLKSFTVEKGIYQTSNFRVQPTESIVRFPNITNLCPFGEVFNATRFASVYAWNRKRISNCVADYSVLYNSASFSTFKCYGVSPTKLNDLCFTNVYADSFVIRGDEVRQIAPGQTGKIADYNYKLPDDFTGCVIAWNSNNLDSKVGGNYNYLYRLFRKSNLKPFERDISTEIYQAGSTPCNGVEGFNCYFPLQSYGFQPTNGVGYQPYRVVVLSFELLHAPATVCGPKKSTNLVKNKCVNFNFNGLTGTGVLTESNKKFLPFQQFGRDIADTTDAVRDPQTLEILDITPCSFGGVSVITPGTNTSNQVAVLYQDVNCTEVPVAIHADQLTPTWRVYSTGSNVFQTRAGCLIGAEHVNNSYECDIPIGAGICASYQTQTNSPRRARSVASQSIIAYTMSLGAENSVAYSNNSIACPTNFTISVTTEILPVSMTKTSVDCTMYICGDSTECSNLLLQYGSFCTQLNRALTGIAVEQDKNTQEVFAQVKQIYKTPPIKDFGGFNFSQILPDSSKPSKRSFIEDLLFNKVTLADAGFIKQYGDCLGDIAARDLICAQKFNGLTVLPPLLTDEMIAQYTSALLAGTITSGWTFGAGAALQIPFAMQMAYRFNGIGVTQNVLYENQKLIANQFNSAIGKIQDSLSSTASALGKLQDVVNQNAQALNTLVKQLSSNFGAISSVLNDILSRLDKVEAEVQIDRLITGRLQSLQTYVTQQLIRAAEIRASANLAATKMSECVLGQSKRVDFCGKGYHLMSFPQSAPHGVVFLHVTYVPAQEKNFTTAPAICHDGKAHFPREGVFVSNGTHWFVTQRNFCEPQIITTDNTFVSGNCDVVIGIVNNTVYDPLQPELDSGGGSGGGQIYEGKLTAEGLRFGIVASRFNHALVDRLVEGAIDAIVRHGGREEDITLVRVPGSWEIPVAAGELARKEDIDAVIAIGVLIRGATPHFDYIASEVSKGLADLSLELRKPITFGVITADTLEQAIERAGTKHGNKGWEAALSAIEMANLFKSLR

SEQ ID NO: 8098 - protein, 1307 aa, Artificial Sequence
  SARS-CoV-2/Iceland/280/2020__EPI_ISL_417608 spike protein (1-1147)(I714C_Y1110C) LumSynth construct
MFVFLVLLPLVSSQCVNLTTRTQLPPAYTNSFTRGVYYPDKVFRSSVLHSTQDLFLPFFSNVTWFHAIHVSGTNGTKRFDNPVLPFNDGVYFASTEKSNIIRGWIFGTTLDSKTQSLLIVNNATNVVIKVCEFQFCNDPFLGVYYHKNNKSWMESEFRVYSSANNCTFEYVSQPFLMDLEGKQGNFKNLREFVFKNIDGYFKIYSKHTPINLVRDLPQGFSALEPLVDLPIGINITRFQTLLALHRSYLTPGDSSSGWTAGAAAYYVGYLQPRTFLLKYNENGTITDAVDCALDPLSETKCTLKSFTVEKGIYQTSNFRVQPTESIVRFPNITNLCPFGEVFNATRFASVYAWNRKRISNCVADYSVLYNSASFSTFKCYGVSPTKLNDLCFTNVYADSFVIRGDEVRQIAPGQTGKIADYNYKLPDDFTGCVIAWNSNNLDSKVGGNYNYLYRLFRKSNLKPFERDISTEIYQAGSTPCNGVEGFNCYFPLQSYGFQPTNGVGYQPYRVVVLSFELLHAPATVCGPKKSTNLVKNKCVNFNFNGLTGTGVLTESNKKFLPFQQFGRDIADTTDAVRDPQTLEILDITPCSFGGVSVITPGTNTSNQVAVLYQGVNCTEVPVAIHADQLTPTWRVYSTGSNVFQTRAGCLIGAEHVNNSYECDIPIGAGICASYHTQTNSPRRARSVASQSIIAYTMSLGAENSVAYSNNSIACPTNFTISVTTEILPVSMTKTSVDCTMYICGDSTECSNLLLQYGSFCTQLNRALTGIAVEQDKNTQEVFAQVKQIYKTPPIKDFGGFNFSQILPDPSKPSKRSFIEDLLFNKVTLADAGFIKQYGDCLGDIAARDLICAQKFNGLTVLPPLLTDEMIAQYTSALLAGTITSGWTFGAGAALQIPFAMQMAYRFNGIGVTQNVLYENQKLIANQFNSAIGKIQDSLSSTASALGKLQDVVNQNAQALNTLVKQLSSNFGAISSVLNDILSRLDKVEAEVQIDRLITGRLQSLQTYVTQQLIRAAEIRASANLAATKMSECVLGQSKRVDFCGKGYHLMSFPQSAPHGVVFLHVTYVPAQEKNFTTAPAICHDGKAHFPREGVFVSNGTHWFVTQRNFCEPQIITTDNTFVSGNCDVVIGIVNNTVYDPLQPELDSGGGSGGGQIYEGKLTAEGLRFGIVASRFNHALVDRLVEGAIDAIVRHGGREEDITLVRVPGSWEIPVAAGELARKEDIDAVIAIGVLIRGATPHFDYIASEVSKGLADLSLELRKPITFGVITADTLEQAIERAGTKHGNKGWEAALSAIEMANLFKSLR

SEQ ID NO: 8099 - protein, 1307 aa, Artificial Sequence; identical to SEQ ID NO: 8054
  SARS-CoV-2/Iceland/247/2020__EPI_ISL_417575 spike protein (1-1147)(I714C_Y1110C) LumSynth construct

SEQ ID NO: 8100 - protein, 1307 aa, Artificial Sequence
  SARS-CoV-2/Iceland/238/2020__EPI_ISL_417566 spike protein (1-1147)(I714C_Y1110C) LumSynth construct
MFVFLVLLPLVSSQCVNLTTRTQLPPAYTNSFTRGVYYPDKVFRSSVLHSTQDLFLPFFSNVTWFHAIHVSGTNGTKRFDNPVLPFNDGVYFASTEKSNIIRGWIFGTTLDSKTQSLLIVNNATNVVIKVCEFQFCNDPFLGVYYHKNNKSWMESEFRVYSSANNCTFEYVSQPFLMDLEGKQGNFKNLREFVFKNIDGYFKIYSKHTPINLVRDLPQGFSALEPLVDLPIGINITRFQTLLALHRSYLTPGDSSSGWTAGAAAYYVGYLQPRTFLLKYNENGTITDAVDCALDPLSETKCTLKSFTVEKGIYQTSNFRVQPTESIVRFPNITNLCPFGEVFNATRFASVYAWNRKRISNCVADYSVLYNSASFSTFKCYGVSPTKLNDLCFTNVYADSFVIRGDEVRQIAPGQTGKIADYNYKLPDDFTGCVIAWNSNNLDSKVGGNYNYLYRLFRKSNLKPFERDISTEIYQAGSTPCNGVEGFNCYFPLQSYGFQPTNGVGYQPYRVVVLSFELLHAPATVCGPKKSTNLVKNKCVNFNFNGLTGTGVLTESNKKFLPFQQFGRDIADTTDAVRDPQTLEILDITPCSFGGVSVITPGTNTSNQVAVLYQGVNCTEVPVAIHADQLTPTWRVYSTGSNVFQTRAGCLIGAEHVNNSYECDIPIGAGICASYQTQTNSPRRARSVASQSIIAYTMSLGAENSVAYSNNSIACPTNFTISVTTEILPVSMTKTSVDCTMYICGDSTECSNLLLQYGSFCTQLNRALTGIAVEQDKNTQEVFAQVKQIYKTPPIKDFGGFNFSQILPDPSKPSKRSFIEDLLFNKVTLADVGFIKQYGDCLGDIAARDLICAQKFNGLTVLPPLLTDEMIAQYTSALLAGTITSGWTFGAGAALQIPFAMQMAYRFNGIGVTQNVLYENQKLIANQFNSAIGKIQDSLSSTASALGKLQDVVNQNAQALNTLVKQLSSNFGAISSVLNDILSRLDKVEAEVQIDRLITGRLQSLQTYVTQQLIRAAEIRASANLAATKMSECVLGQSKRVDFCGKGYHLMSFPQSAPHGVVFLHVTYVPAQEKNFTTAPAICHDGKAHFPREGVFVSNGTHWFVTQRNFCEPQIITTDNTFVSGNCDVVIGIVNNTVYDPLQPELDSGGGSGGGQIYEGKLTAEGLRFGIVASRFNHALVDRLVEGAIDAIVRHGGREEDITLVRVPGSWEIPVAAGELARKEDIDAVIAIGVLIRGATPHFDYIASEVSKGLADLSLELRKPITFGVITADTLEQAIERAGTKHGNKGWEAALSAIEMANLFKSLR

SEQ ID NO: 8101 - protein, 1307 aa, Artificial Sequence
  SARS-CoV-2/Greece/16/2020__EPI_ISL_418265 spike protein (1-1147)(I714C_Y1110C) LumSynth construct
MFVFLVLLPLVSSQCVNLTTRTQLPPAYTNSFTRGVYYPDKVFRSSVLHSTQDLFLPFFSNVTWFHAIHVSGTNGTKRFDNPVLPFNDGVYFASTEKSNIIRGWIFGTTLDSKTQSLLIVNNATNVVIKVCEFQFCNDPFLGVYYHKNNKSWMESEFRVYSSANNCTFEYVSQPFLMDLEGKQGNFKNLREFVFKNVDGYFKIYSKHTPINLVRDLPQGFSALEPLVDLPIGINITRFQTLLALHRSYLTPGDSSSGWTAGAAAYYVGYLQPRTFLLKYNENGTITDAVDCALDPLSETKCTLKSFTVEKGIYQTSNFRVQPTESIVRFPNITNLCPFGEVFNATRFASVYAWNRKRISNCVADYSVLYNSASFSTFKCYGVSPTKLNDLCFTNVYADSFVIRGDEVRQIAPGQTGKIADYNYKLPDDFTGCVIAWNSNNLDSKVGGNYNYLYRLFRKSNLKPFERDISTEIYQAGSTPCNGVEGFNCYFPLQSYGFQPTNGVGYQPYRVVVLSFELLHAPATVCGPKKSTNLVKNKCVNFNFNGLTGTGVLTESNKKFLPFQQFGRDIADTTDAVRDPQTLEILDITPCSFGGVSVITPGTNTSNQVAVLYQDVNCTEVPVAIHADQLTPTWRVYSTGSNVFQTRAGCLIGAEHVNNSYECDIPIGAGICASYQTQTNSPRRARSVASQSIIAYTMSLGAENSVAYSNNSIACPTNFTISVTTEILPVSMTKTSVDCTMYICGDSTECSNLLLQYGSFCTQLNRALTGIAVEQDKNTQEVFAQVKQIYKTPPIKDFGGFNFSQILPDPSKPSKRSFIEDLLFNKVTLADAGFIKQYGDCLGDIAARDLICAQKFNGLTVLPPLLTDEMIAQYTSALLAGTITSGWTFGAGAALQIPFAMQMAYRFNGIGVTQNVLYENQKLIANQFNSAIGKIQDSLSSTASALGKLQDVVNQNAQALNTLVKQLSSNFGAISSVLNDILSRLDKVEAEVQIDRLITGRLQSLQTYVTQQLIRAAEIRASANLAATKMSECVLGQSKRVDFCGKGYHLMSFPQSAPHGVVFLHVTYVPAQEKNFTTAPAICHDGKAHFPREGVFVSNGTHWFVTQRNFCEPQIITTDNTFVSGNCDVVIGIVNNTVYDPLQPELDSGGGSGGGQIYEGKLTAEGLRFGIVASRFNHALVDRLVEGAIDAIVRHGGREEDITLVRVPGSWEIPVAAGELARKEDIDAVIAIGVLIRGATPHFDYIASEVSKGLADLSLELRKPITFGVITADTLEQAIERAGTKHGNKGWEAALSAIEMANLFKSLR

SEQ ID NO: 8102 - protein, 1307 aa, Artificial Sequence
  SARS-CoV-2/Iceland/319/2020__EPI_ISL_417648 spike protein (1-1147)(I714C_Y1110C) LumSynth construct
MFVFLVLLPLVSSQCVNLTTRTQLPPAYTNSFTRGVYYPDKVFRSSVLHSTQDLFLPFFSNVTWFHAIHVSGTNGTKRFDNPVLPFNDGVYFASTEKSNIIRGWIFGTTLDSKTQSLLIVNNATNVVIKVCEFQFCNDPFLGVYYHKNNKSWMESEFRVYSSANNCTFEYVSQPFLIDLEGKQGNFKNLREFVFKNIDGYFKIYSKHTPINLVRDLPQGFSALEPLVDLPIGINITRFQTLLALHRSYLTPGDSSSGWTAGAAAYYVGYLQPRTFLLKYNENGTITDAVDCALDPLSETKCTLKSFTVEKGIYQTSNFRVQPTESIVRFPNITNLCPFGEVFNATRFASVYAWNRKRISNCVADYSVLYNSASFSTFKCYGVSPTKLNDLCFTNVYADSFVIRGDEVRQIAPGQTGKIADYNYKLPDDFTGCVIAWNSNNLDSKVGGNYNYLYRLFRKSNLKPFERDISTEIYQAGSTPCNGVEGFNCYFPLQSYGFQPTNGVGYQPYRVVVLSFELLHAPATVCGPKKSTNLVKNKCVNFNFNGLTGTGVLTESNKKFLPFQQFGRDIADTTDAVRDPQTLEILDITPCSFGGVSVITPGTNTSNQVAVLYQGVNCTEVPVAIHADQLTPTWRVYSTGSNVFQTRAGCLIGAEHVNNSYECDIPIGAGICASYQTQTNSPRRARSVASQSIIAYTMSLGAENSVAYSNNSIACPTNFTISVTTEILPVSMTKTSVDCTMYICGDSTECSNLLLQYGSFCTQLNRALTGIAVEQDKNTQEVFAQVKQIYKTPPIKDFGGFNFSQILPDPSKPSKRSFIEDLLFNKVTLADAGFIKQYGDCLGDIAARDLICAQKFNGLTVLPPLLTDEMIAQYTSALLAGTITSGWTFGAGAALQIPFAMQMAYRFNGIGVTQNVLYENQKLIANQFNSAIGKIQDSLSSTASALGKLQDVVNQNAQALNTLVKQLSSNFGAISSVLNDILSRLDKVEAEVQIDRLITGRLQSLQTYVTQQLIRAAEIRASANLAATKMSECVLGQSKRVDFCGKGYHLMSFPQSAPHGVVFLHVTYVPAQEKNFTTAPAICHDGKAHFPREGVFVSNGTHWFVTQRNFCEPQIITTDNTFVSGNCDVVIGIVNNTVYDPLQPELDSGGGSGGGQIYEGKLTAEGLRFGIVASRFNHALVDRLVEGAIDAIVRHGGREEDITLVRVPGSWEIPVAAGELARKEDIDAVIAIGVLIRGATPHFDYIASEVSKGLADLSLELRKPITFGVITADTLEQAIERAGTKHGNKGWEAALSAIEMANLFKSLR

SEQ ID NO: 8103 - protein, 1307 aa, Artificial Sequence
  SARS-CoV-2/Congo/94/2020__EPI_ISL_417947 spike protein (1-1147)(I714C_Y1110C) LumSynth construct
MFVFLVLLPLVSSQCVNLTTRTQLPPAYTNSFTRGVYYPDKVFRSSVLHSTQDLFLPFFSNVTWFHAIHVSGTNGTKRFDNPVLPFNDGVYFASTEKSNIIRGWIFGTTLDSKTQSLLIVNNATNVVIKVCEFQFCNDPFLGVYYHKNNKSWMESEFRVYSSANNCTFEYVSQPFLMDLEGKQGNFKNLREFVFKNIDGYFKIYSKHTPINLVRDLPQGFSALEPLVDLPIGINITRFQTLLALHRSYLTPGDSSSGWTAGAAAYYVGYLQPRTFLLKYNENGTITDAVDCALDPLSETKCTLKSFTVEKGIYQTSNFRVQPTESIVRFPNITNLCPFGEVFNATRFASVYAWNRKRISNCVADYSVLYNSASFSTFKCYGVSPTKLNDLCFTNVYADSFVIRGDEVRQIAPGQTGKIADYNYKLPDDFTGCVIAWNSNNLDSKVGGNYNYLYRLFRKSNLKPFERDISTEIYQAGSTPCNGVEGFNCYFPLQSYGFQPTNGVGYQPYRVVVLSFELLHAPATVCGPKKSTNLVKNKCVNFNFNGLTGTGVLTESNKKFLPFQQFGRDIADTTDAVRDPQTLEILDITPCSFGGVSVITPGTNTSNQVAVLYQGVNCTEVPVAIHADQLTPTWRVYSTGSNVFQTRAGCLIGAEHVNNSYECDIPIGAGICASYQTQTNSPRRARSVASQSIIAYTMSLGAENSVAYSNNSIACPTNFTISVTTEILPVSMTKTSVDCTMYICGDSTECSNLLLQYGSFCTQLNRALTGIAVEQDKNTQEVFAQVKQIYKTPPIKDFGGFNFSQILPDPSKPSKRSFIEDILFNKVTLADAGFIKQYGDCLGDIAARDLICAQKFNGLTVLPPLLTDEMIAQYTSALLAGTITSGWTFGAGAALQIPFAMQMAYRFNGIGVTQNVLYENQKLIANQFNSAIGKIQDSLSSTASALGKLQDVVNQNAQALNTLVKQLSSNFGAISSVLNDILSRLDKVEAEVQIDRLITGRLQSLQTYVTQQLIRAAEIRASANLAATKMSECVLGQSKRVDFCGKGYHLMSFPQSAPHGVVFLHVTYVPAQEKNFTTAPAICHDGKAHFPREGVFVSNGTHWFVTQRNFCEPQIITTDNTFVSGNCDVVIGIVNNTVYDPLQPELDSGGGSGGGQIYEGKLTAEGLRFGIVASRFNHALVDRLVEGAIDAIVRHGGREEDITLVRVPGSWEIPVAAGELARKEDIDAVIAIGVLIRGATPHFDYIASEVSKGLADLSLELRKPITFGVITADTLEQAIERAGTKHGNKGWEAALSAIEMANLFKSLR

SEQ ID NO: 8104 - protein, 1307 aa, Artificial Sequence
  SARS-CoV-2/Congo/158/2020__EPI_ISL_417950 spike protein (1-1147)(I714C_Y1110C) LumSynth construct
MFVFLVLLPLVSSQCVNLTTRTQLPPAYTNSFTRGVYYPDKVFRSSVLHSTQDLFLPFFSNVTWFHAIHVSGTNGTKRFDNPVLPFNDGVYFASTEKSNIIRGWIFGTTLDSKTQSLLIVNNATNVVIKVCEFQFCNDPFLGVYYHKNNKSWMESEFRVYSSANNCTFEYVSQPFLMDLEGKQGNFKNLREFVFKNIDGYFKIYSKHTPINLVRDLPQGFSALEPLVDLPIGINITRFQTLLALHRSYLTPGDSSSGWTAGAAAYYVGYLQPRTFLLKYNENGTITDAVDCALDPLSETKCTLKSFTVEKGIYQTSNFRVQPTESIVRFPNITNLCPFGEVFNATRFASVYAWNRKRISNCVADYSVLYNSASFSTFKCYGVSPTKLNDLCFTNVYADSFVIRGDEVRQIAPGQTGKIADYNYKLPDDFTGCVIAWNSNNLDSKVGGNYNYLYRLFRKSNLKPFERDISTEIYQAGSTPCNGVEGFNCYFPLQSYGFQPTNGVGYQPYRVVVLSFELLHAPATVCGPKKSTNLVKNKCVNFNFNGLTGTGVLTESNKKFLPFQQFGRDIADTTDAVRDPQTLEILDITPCSFGGVSVITPGTNTSNQVAVLYQDVNCTEVPVAIHADQLTPTWRVYSTGSNVFQTRAGCLIGAEHVNNSYECDIPIGAGICASYQTQTNSPRRARSVASQSIIAYTMSLGAENSVAYSNNSIACPTNFTISVTTEILPVSMTKTSVDCTMYICGDSTECSNLLLQYGSFCTQLNRALTGIAVEQDKNTQEVFAQVKQIYKTPPIKDFGGFNFSQILPDPSKPSKRSFIEDLLFNKVTLADAGFIKQYGDCLGDIAARDLICAQKFNGLTVLPPLLTDEMIAQYTSALLAGTITSGWTFGAGAALQIPFAMQMAYRFNGIGVTQNVLYENQKLIANQFNSAIGKIQDSLSSTASALGKLQDVVNQNAQALNTLVKQLSSNFGAISSVLNDILSRLDKVEAEVQIDRLITGRLQSLQTYVTQQLIRAAEIRASANLAATKMSECVLGQSKRVDFCGKGYHLMSFPQSAPHGVVFLHVTYVPAQEKNFTTAPAICHDGKAHFPREGVFVSNGTHWFVTQRNFCEPQIITTDNTFLSGNCDVVIGIVNNTVYDPLQPELDSGGGSGGGQIYEGKLTAEGLRFGIVASRFNHALVDRLVEGAIDAIVRHGGREEDITLVRVPGSWEIPVAAGELARKEDIDAVIAIGVLIRGATPHFDYIASEVSKGLADLSLELRKPITFGVITADTLEQAIERAGTKHGNKGWEAALSAIEMANLFKSLR

SEQ ID NO: 8105 - protein, 1307 aa, Artificial Sequence
  SARS-CoV-2/USA/UT-00034/2020__EPI_ISL_417977 spike protein (1-1147)(I714C_Y1110C) LumSynth construct
MFVFLVLLPLVSSQCVNLTTRTQLPPAYTNSFTRGVYYPDKVFRSSVLHSTQDLFLPFFSNVTWFHAIHVSGTNGTKRFDNPVLPFNDGVYFASTEKSNIIRGWIFGTTLDSKTQSLLIVNNATNVVIKVCEFQFCNDPFLGVYYYKNNKSWMESEFRVYSSANNCTFEYVSQPFLMDLEGKQGNFKNLREFVFKNIDGYFKIYSKHTPINLVRDLPQGFSALEPLVDLPIGINITRFQTLLALHRSYLTPGDSSSGWTAGAAAYYVGYLQPRTFLLKYNENGTITDAVDCALDPLSETKCTLKSFTVEKGIYQTSNFRVQPTESIVRFPNITNLCPFGEVFNATRFASVYAWNRKRISNCVADYSVLYNSASFSTFKCYGVSPTKLNDLCFTNVYADSFVIRGDEVRQIAPGQTGKIADYNYKLPDDFTGCVIAWNSNNLDSKVGGNYNYLYRLFRKSNLKPFERDISTEIYQAGSTPCNGVEGFNCYFPLQSYGFQPTNGVGYQPYRVVVLSFELLHAPATVCGPKKSTNLVKNKCVNFNFNGLTGTGVLTESNKKFLPFQQFGRDIADTTDAVRDPQTLEILDITPCSFGGVSVITPGTNTSNQVAVLYQGVNCTEVPVAIHADQLTPTWRVYSTGSNVFQTRAGCLIGAEHVNNSYECDIPIGAGICASYQTQTNSPRRARSVASQSIIAYTMSLGAENSVAYSNNSIACPTNFTISVTTEILPVSMTKTSVDCTMYICGDSTECSNLLLQYGSFCTQLNRALTGIAVEQDKNTQEVFAQVKQIYKTPPIKDFGGFNFSQILPDPSKPSKRSFIEDLLFNKVTLADAGFIKQYGDCLGDIAARDLICAQKFNGLTVLPPLLTDEMIAQYTSALLAGTITSGWTFGAGAALQIPFAMQMAYRFNGIGVTQNVLYENQKLIANQFNSAIGKIQDSLSSTASALGKLQDVVNQNAQALNTLVKQLSSNFGAISSVLNDILSRLDKVEAEVQIDRLITGRLQSLQTYVTQQLIRAAEIRASANLAATKMSECVLGQSKRVDFCGKGYHLMSFPQSAPHGVVFLHVTYVPAQEKNFTTAPAICHDGKAHFPREGVFVSNGTHWFVTQRNFCEPQIITTDNTFVSGNCDVVIGIVNNTVYDPLQPELDSGGGSGGGQIYEGKLTAEGLRFGIVASRFNHALVDRLVEGAIDAIVRHGGREEDITLVRVPGSWEIPVAAGELARKEDIDAVIAIGVLIRGATPHFDYIASEVSKGLADLSLELRKPITFGVITADTLEQAIERAGTKHGNKGWEAALSAIEMANLFKSLR

SEQ ID NO: 8106 - protein, 1307 aa, Artificial Sequence
  SARS-CoV-2/USA/UT-00033/2020__EPI_ISL_417976 spike protein (1-1147)(I714C_Y1110C) LumSynth construct
MFVFLVLLPLVSSQCVNLTTRTQLPPAYTNSFTRGVYYPDKVFRSSVLHSTQDLFLPFFSNVTWFHAIHVSGTNGTKRFDNPVLPFNDGVYFASTEKSNIIRGWIFGTTLDSKTQSLLIVNNATNVVIKVCEFQFCNDPFLGVYYHKNNKSWMESEFRVYSSANNCTFEYVSQPFLMDLEGKQGNFKNLREFVFKNIDGYFKIYSKHTPINLVRDLPQGFSALEPLVDLPIGINITRFQTLLALHRSYLTPGDSSSGLTAGAAAYYVGYLQPRTFLLKYNENGTITDAVDCALDPLSETKCTLKSFTVEKGIYQTSNFRVQPTESIVRFPNITNLCPFGEVFNATRFASVYAWNRKRISNCVADYSVLYNSASFSTFKCYGVSPTKLNDLCFTNVYADSFVIRGDEVRQIAPGQTGKIADYNYKLPDDFTGCVIAWNSNNLDSKVGGNYNYLYRLFRKSNLKPFERDISTEIYQAGSTPCNGVEGFNCYFPLQSYGFQPTNGVGYQPYRVVVLSFELLHAPATVCGPKKSTNLVKNKCVNFNFNGLTGTGVLTESNKKFLPFQQFGRDIADTTDAVRDPQTLEILDITPCSFGGVSVITPGTNTSNQVAVLYQGVNCTEVPVAIHADQLTPTWRVYSTGSNVFQTRAGCLIGAEHVNNSYECDIPIGAGICASYQTQTNSPRRARSVASQSIIAYTMSLGAENSVAYSNNSIACPTNFTISVTTEILPVSMTKTSVDCTMYICGDSTECSNLLLQYGSFCTQLNRALTGIAVEQDKNTQEVFAQVKQIYKTPPIKDFGGFNFSQILPDPSKPSKRSFIEDLLFNKVTLADAGFIKQYGDCLGDIAARDLICAQKFNGLTVLPPLLTDEMIAQYTSALLAGTITSGWTFGAGAALQIPFAMQMAYRFNGIGVTQNVLYENQKLIANQFNSAIGKIQDSLSSTASALGKLQDVVNQNAQALNTLVKQLSSNFGAISSVLNDILSRLDKVEAEVQIDRLITGRLQSLQTYVTQQLIRAAEIRASANLAATKMSECVLGQSKRVDFCGKGYHLMSFPQSAPHGVVFLHVTYVPAQEKNFTTAPAICHDGKAHFPREGVFVSNGTHWFVTQRNFCEPQIITTDNTFVSGNCDVVIGIVNNTVYDPLQPELDSGGGSGGGQIYEGKLTAEGLRFGIVASRFNHALVDRLVEGAIDAIVRHGGREEDITLVRVPGSWEIPVAAGELARKEDIDAVIAIGVLIRGATPHFDYIASEVSKGLADLSLELRKPITFGVITADTLEQAIERAGTKHGNKGWEAALSAIEMANLFKSLR

SEQ ID NO: 8107 - protein, 1307 aa, Artificial Sequence
  SARS-CoV-2/USA/WI-13/2020__EPI_ISL_417516 spike protein (1-1147)(I714C_Y1110C) LumSynth construct
MFVFLVLLPLVSSQCVNLTTRTQLPPAYTNSFTRGVYYPDKVFRSSVLHSTQDLFLPFFSNVTWFHAIHVSGTNGTKRFDNPVLPFNDGVYFASTEKSNIIRGWIFGTTLDSKTQSLLIVNNATNVVIKVCEFQFCNDPFLGVYYHKNNKSWMESEFRVYSSANNCTFEYVSQPFLMDLEGKQGNFKNLREFVFKNIDGYFKIYSKHTPINLVRDLPQGFSALEPLVDLPIGINITRFQTLLALHRSYLTPGDSSSGWTAGAAAYYVGYLQPRTFLLKYNENGTITDAVDCALDPLSETKCTLKSFTVEKGIYQTSNFRVLPTESIVRFPNITNLCPFGEVFNATRFASVYAWNRKRISNCVADYSVLYNSASFSTFKCYGVSPTKLNDLCFTNVYADSFVIRGDEVRQIAPGQTGKIADYNYKLPDDFTGCVIAWNSNNLDSKVGGNYNYLYRLFRKSNLKPFERDISTEIYQAGSTPCNGVEGFNCYFPLQSYGFQPTNGVGYQPYRVVVLSFELLHAPATVCGPKKSTNLVKNKCVNFNFNGLTGTGVLTESNKKFLPFQQFGRDIADTTDAVRDPQTLEILDITPCSFGGVSVITPGTNTSNQVAVLYQGVNCTEVPVAIHADQLTPTWRVYSTGSNVFQTRAGCLIGAEHVNNSYECDIPIGAGICASYQTQTNSPRRARSVASQSIIAYTMSLGAENSVAYSNNSIACPTNFTISVTTEILPVSMTKTSVDCTMYICGDSTECSNLLLQYGSFCTQLNRALTGIAVEQDKNTQEVFAQVKQIYKTPPIKDFGGFNFSQILPDPSKPSKRSFIEDLLFNKVTLADAGFIKQYGDCLGDIAARDLICAQKFNGLTVLPPLLTDEMIAQYTSALLAGTITSGWTFGAGAALQIPFAMQMAYRFNGIGVTQNVLYENQKLIANQFNSAIGKIQDSLSSTASALGKLQDVVNQNAQALNTLVKQLSSNFGAISSVLNDILSRLDKVEAEVQIDRLITGRLQSLQTYVTQQLIRAAEIRASANLAATKMSECVLGQSKRVDFCGKGYHLMSFPQSAPHGVVFLHVTYVPAQEKNFTTAPAICHDGKAHFPREGVFVSNGTHWFVTQRNFCEPQIITTDNTFVSGNCDVVIGIVNNTVYDPLQPELDSGGGSGGGQIYEGKLTAEGLRFGIVASRFNHALVDRLVEGAIDAIVRHGGREEDITLVRVPGSWEIPVAAGELARKEDIDAVIAIGVLIRGATPHFDYIASEVSKGLADLSLELRKPITFGVITADTLEQAIERAGTKHGNKGWEAALSAIEMANLFKSLR

SEQ ID NO: 8108 - protein, 1306 aa, Artificial Sequence
  SARS-CoV-2/India/1-27/2020__EPI_ISL_413522 spike protein (1-1146)(I713C_Y1109C) LumSynth construct
MFVFLVLLPLVSSQCVNLTTRTQLPPAYTNSFTRGVYYPDKVFRSSVLHSTQDLFLPFFSNVTWFHAIHVSGTNGTKRFDNPVLPFNDGVYFASTEKSNIIRGWIFGTTLDSKTQSLLIVNNATNVVIKVCEFQFCNDPFLGVYHKNNKSWMESEFRVYSSANNCTFEYVSQPFLMDLEGKQGNFKNLREFVFKNIDGYFKIYSKHTPINLVRDLPQGFSALEPLVDLPIGINITRFQTLLALHRSYLTPGDSSSGWTAGAAAYYVGYLQPRTFLLKYNENGTITDAVDCALDPLSETKCTLKSFTVEKGIYQTSNFRVQPTESIVRFPNITNLCPFGEVFNATRFASVYAWNRKRISNCVADYSVLYNSASFSTFKCYGVSPTKLNDLCFTNVYADSFVIRGDEVIQIAPGQTGKIADYNYKLPDDFTGCVIAWNSNNLDSKVGGNYNYLYRLFRKSNLKPFERDISTEIYQAGSTPCNGVEGFNCYFPLQSYGFQPTNGVGYQPYRVVVLSFELLHAPATVCGPKKSTNLVKNKCVNFNFNGLTGTGVLTESNKKFLPFQQFGRDIADTTDAVRDPQTLEILDITPCSFGGVSVITPGTNTSNQVAVLYQDVNCTEVPVAIHADQLTPTWRVYSTGSNVFQTRAGCLIGAEHVNNSYECDIPIGAGICASYQTQTNSPRRARSVASQSIIAYTMSLGAENSVAYSNNSIACPTNFTISVTTEILPVSMTKTSVDCTMYICGDSTECSNLLLQYGSFCTQLNRALTGIAVEQDKNTQEVFAQVKQIYKTPPIKDFGGFNFSQILPDPSKPSKRSFIEDLLFNKVTLADAGFIKQYGDCLGDIAARDLICAQKFNGLTVLPPLLTDEMIAQYTSALLAGTITSGWTFGAGAALQIPFAMQMAYRFNGIGVTQNVLYENQKLIANQFNSAIGKIQDSLSSTASALGKLQDVVNQNAQALNTLVKQLSSNFGAISSVLNDILSRLDKVEAEVQIDRLITGRLQSLQTYVTQQLIRAAEIRASANLAATKMSECVLGQSKRVDFCGKGYHLMSFPQSAPHGVVFLHVTYVPAQEKNFTTAPAICHDGKAHFPREGVFVSNGTHWFVTQRNFCEPQIITTDNTFVSGNCDVVIGIVNNTVYDPLQPELDSGGGSGGGQIYEGKLTAEGLRFGIVASRFNHALVDRLVEGAIDAIVRHGGREEDITLVRVPGSWEIPVAAGELARKEDIDAVIAIGVLIRGATPHFDYIASEVSKGLADLSLELRKPITFGVITADTLEQAIERAGTKHGNKGWEAALSAIEMANLFKSLR

SEQ ID NO: 8109 - protein, 1301 aa, Artificial Sequence
  SARS-CoV-2/pangolin/Guangxi/P4L/2017__EPI_ISL_410538 spike protein (1-1141)(I708C_Y1104C) LumSynth construct
MFVFLFVLPLVSSQCVNLTTRTGIPPGYTNSSTRGVYYPDKVFRSSILHLTQDLFLPFFSNVTWFNTINYQGGFKKFDNPVLPFNDGVYFASTEKSNIIRGWIFGTTLDARTQSLLIVNNATNVVIKVCEFQFCTDPFLGVYYHNNNKTWVENEFRVYSSANNCTFEYISQPFLMDLEGKQGNFKNLREFVFKNVDGYFKIYSKHTPIDLVRDLPRGFAALEPLVDLPIGINITRFQTLLALHRSYLTPGNLESGWTTGAAAYYVGYLQQRTFLLSYNQNGTITDAVDCSLDPLSETKCTLKSLTVEKGIYQTSNFRVQPTISIVRFPNITNLCPFGEVFNASKFASVYAWNRKRISNCVADYSVLYNSTSFSTFKCYGVSPTKLNDLCFTNVYADSFVVKGDEVRQIAPGQTGVIADYNYKLPDDFTGCVIAWNSVKQDALTGGNYGYLYRLFRKSKLKPFERDISTEIYQAGSTPCNGQVGLNCYYPLERYGFHPTTGVNYQPFRVVVLSFELLNGPATVCGPKLSTTLVKDKCVNFNFNGLTGTGVLTTSKKQFLPFQQFGRDISDTTDAVRDPQTLEILDITPCSFGGVSVITPGTNTSNQVAVLYQDVNCTEVPMAIHAEQLTPAWRVYSAGANVFQTRAGCLVGAEHVNNSYECDIPVGAGICASYHSMSSLRSVNQRSIIAYTMSLGAENSVAYSNNSIACPTNFTISVTTEILPVSMTKTSVDCTMYICGDSIECSNLLLQYGSFCTQLNRALTGIAVEQDKNTQEVFAQVKQIYKTPPIKDFGGFNFSQILPDPSKPSKRSFIEDLLFNKVTLADAGFIKQYGDCLGDIAARDLICAQKFNGLTVLPPLLTDEMIAQYTSALLAGTITSGWTFGAGAALQIPFAMQMAYRFNGIGVTQNVLYENQKLIANQFNSAIGKIQDSLSSTASALGKLQDVVNQNAQALNTLVKQLSSNFGAISSVLNDILSRLDKVEAEVQIDRLITGRLQSLQTYVTQQLIRAAEIRASANLAATKMSECVLGQSKRVDFCGKGYHLMSFPQSAPHGVVFLHVTYVPAQEKNFTTAPAICHEGKAHFPREGVFVSNGTHWFITQRNFCEPQIITTDNTFVSGSCDVVIGIVNNTVYDPLQPELDSGGGSGGGQIYEGKLTAEGLRFGIVASRFNHALVDRLVEGAIDAIVRHGGREEDITLVRVPGSWEIPVAAGELARKEDIDAVIAIGVLIRGATPHFDYIASEVSKGLADLSLELRKPITFGVITADTLEQAIERAGTKHGNKGWEAALSAIEMANLFKSLR

SEQ ID NO: 8110 - protein, 1301 aa, Artificial Sequence
  SARS-CoV-2/pangolin/Guangxi/P5L/2017__EPI_ISL_410540 spike protein (1-1141)(I708C_Y1104C) LumSynth construct
MFVFLFVLPLVSSQCVNLTTRTGIPPGYTNSSTRGVYYPDKVFRSSILHLTQDLFLPFFSNVTWFNTINYQGGFKKFDNPVLPFNDGVYFASTEKSNIIRGWIFGTTLDARTQSLLIVNNATNVVIKVCEFQFCTDPFLGVYYHNNNKTWVENEFRVYSSANNCTFEYISQPFLMDLEGKQGNFKNLREFVFKNVDGYFKIYSKHTPIDLVRDLPRGFAALEPLVDLPIGINITRFQTLLALHRSYLTPGKLESGWTTGAAAYYVGYLQQRTFLLSYNQNGTITDAVDCSLDPLSETKCTLKSLTVEKGIYQTSNFRVQPTISIVRFPNITNLCPFGEVFNASKFASVYAWNRKRISNCVADYSVLYNSTSFSTFKCYGVSPTKLNDLCFTNVYADSFVVKGDEVRQIAPGQTGVIADYNYKLPDDFTGCVIAWNSVKQDALTGGNYGYLYRLFRKSKLKPFERDISTEIYQAGSTPCNGQVGLNCYYPLERYGFHPTTGVNYQPFRVVVLSFELLNGPATVCGPKLSTTLVKDKCVNFNFNGLTGTGVLTTSKKQFLPFQQFGRDISDTTDAVRDPQTLEILDITPCSFGGVSVITPGTNTSNQVAVLYQDVNCTEVPMAIHAEQLTPAWRVYSAGANVFQTRAGCLVGAEHVNNSYECDIPVGAGICASYHSMSSFRSVNQRSIIAYTMSLGAENSVAYSNNSIACPTNFTISVTTEILPVSMTKTSVDCTMYICGDSIECSNLLLQYGSFCTQLNRALTGIAVEQDKNTQEVFAQVKQIYKTPPIKDFGGFNFSQILPDPSKPSKRSFIEDLLFNKVTLADAGFIKQYGDCLGDIAARDLICAQKFNGLTVLPPLLTDEMIAQYTSALLAGTITSGWTFGAGAALQIPFAMQMAYRFNGIGVTQNVLYENQKLIANQFNSAIGKIQDSLSSTASALGKLQDVVNQNAQALNTLVKQLSSNFGAISSVLNDILSRLDKVEAEVQIDRLITGRLQSLQTYVTQQLIRAAEIRASANLAATKMSECVLGQSKRVDFCGKGYHLMSFPQSAPHGVVFLHVTYVPAQEKNFTTAPAICHEGKAHFPREGVFVSNGTHWFITQRNFCEPQIITTDNTFVSGSCDVVIGIVNNTVYDPLQPELDSGGGSGGGQIYEGKLTAEGLRFGIVASRFNHALVDRLVEGAIDAIVRHGGREEDITLVRVPGSWEIPVAAGELARKEDIDAVIAIGVLIRGATPHFDYIASEVSKGLADLSLELRKPITFGVITADTLEQAIERAGTKHGNKGWEAALSAIEMANLFKSLR

SEQ ID NO: 8111 - protein, 1301 aa, Artificial Sequence
  SARS-CoV-2/pangolin/Guangxi/P5E/2017__EPI_ISL_410541 spike protein (1-1141)(I708C_Y1104C) LumSynth construct
MFVFLFVLPLVSSQCVNLTTRTGIPPGYTNSSTRGVYYPDKVFRSSILHLTQDLFLPFFSNVTWFNTITYQGGSKKFDNPVLPFNDGVYFASTEKSNIIRGWIFGTTLDARTQSLLIVNNATNVVIKVCEFQFCTDPFLGVYYHNNNKTWVENEFRVYSSANNCTFEYISQPFLMDLEGKQGNFKNLREFVFKNVDGYFKIYSKHTPIDLVRDLPRGFAALEPLVDLPIGINITRFQTLLALHRSYLTPGKLESGWTTGAAAYYVGYLQQRTFLLSYNQNGTITDAVDCSLDPLSETKCTLKSLTVEKGIYQTSNFRVQPTISIVRFPNITNLCPFGEVFNASKFASVYAWNRKRISNCVADYSVLYNSTSFSTFKCYGVSPTKLNDLCFTNVYADSFVVKGDEVRQIAPGQTGVIADYNYKLPDDFTGCVIAWNSVKQDALTGDNYGYLYRLFRKSKLKPFERDISTEIYQAGSTPCNGQVGLNCYYPLERYGFHPTTGVNYQPFRVVVLSFELLNGPATVCGPKLSTTLVKDKCVNFNFNGLTGTGVLTTSKKQFLPFQQFGRDISDTTDAVRDPQTLEILDITPCSFGGVSVITPGTNTSNQVAVLYQDVNCTEVPMAIHAEQLTPAWRVYSAGANVFQTRAGCLVGAEHVNNSYECDIPVGAGICASYHSMSSFRSVNQRSIIAYTMSLGAENSVAYSNNSIACPTNFTISVTTEILPVSMTKTSVDCTMYICGDSIECSNLLLQYGSFCTQLNRALTGIAVEQDKNTQEVFAQVKQIYKTPPIKDFGGFNFSQILPDPSKPSKRSFIEDLLFNKVTLADAGFIKQYGDCLGDIAARDLICAQKFNGLTVLPPLLTDEMIAQYTSALLAGTITSGWTFGAGAALQIPFAMQMAYRFNGIGVTQNVLYENQKLIANQFNSAIGKIQDSLSSTASALGKLQDVVNQNAQALNTLVKQLSSNFGAISSVLNDILSRLDKVEAEVQIDRLITGRLQSLQTYVTQQLIRAAEIRASANLAATKMSECVLGQSKRVDFCGKGYHLMSFPQSAPHGVVFLHVTYVPAQEKNFTTAPAICHEGKAHFPREGVFVSNGTHWFITQRNFCEPQIITTDNTFVSGSCDVVIGIVNNTVYDPLQPELDSGGGSGGGQIYEGKLTAEGLRFGIVASRFNHALVDRLVEGAIDAIVRHGGREEDITLVRVPGSWEIPVAAGELARKEDIDAVIAIGVLIRGATPHFDYIASEVSKGLADLSLELRKPITFGVITADTLEQAIERAGTKHGNKGWEAALSAIEMANLFKSLR

SEQ ID NO: 8112 - protein, 1299 aa, Artificial Sequence
  SARS-CoV-2/pangolin/Guangxi/P1E/2017__EPI_ISL_410539 spike protein (1-1139)(I706C_Y1102C) LumSynth construct
MFVFLFVLPLVSSQCVNLTTRTGIQPGYTNSSTRGVYYPDKVFRSSILHLTQDLFLPFFSNVTWFNTINYQGGFKKFDNPVLPFNDGVYFASTEKSNIIRGWIFGTTLDARTQSLLIVNNATNVVIKVCEFQFCTDPFLGVYYHNNNKTWVENEFRVYSSANNCTFEYISQPFLMDLEGKQGNFKNLREFVFKNVDGYFKIYSKHTPIDLVRDLPRGFAALEPLVDLPIGINITRFQTLLALHRSYLTPGKLESGWTTGAAAYYVGYLQQRTFLLSYNQNGTITDAVDCSLDPLSETKCTLKSLTVEKGIYQTSNFRVQPTISIVRFPNITNLCPFGEVFNASKFASVYAWNRKRISNCVADYSVLYNSTSFSTFKCYGVSPTKLNDLCFTNVYADSFVVKGDEVRQIAPGQTGVIADYNYKLPDDFTGCVIAWNSVKQDALTGGNYLYRLFRKSKLKPFERDISTEIYQAGSTPCNGQVGLNCYYPLERYGFHPTTGVNYQPFRVVVLSFELLNGPATVCGPKLSTTLVKDKCVNFNFNGLTGTGVLTTSKKQFLPFQQFGRDISDTTDAVRDPQTLEILDITPCSFGGVSVITPGTNTSNQVAVLYQDVNCTEVPMAIHAEQLTPAWRVYSAGANVFQTRAGCLVGAEHVNNSYECDIPVGAGICASYHSMSSLRSVNQRSIIAYTMSLGAENSVAYSNNSIACPTNFTISVTTEILPVSMTKTSVDCTMYICGDSIECSNLLLQYGSFCTQLNRALTGIAVEQDKNTQEVFAQVKQIYKTPPIKDFGGFNFSQILPDPSKPSKRSFIEDLLFNKVTLADAGFIKQYGDCLGDIAARDLICAQKFNGLTVLPPLLTDEMIAQYTSALLAGTITSGWTFGAGAALQIPFAMQMAYRFNGIGVTQNVLYENQKLIANQFNSAIGKIQDSLSSTASALGKLQDVVNQNAQALNTLVKQLSSNFGAISSVLNDILSRLDKVEAEVQIDRLITGRLQSLQTYVTQQLIRAAEIRASANLAATKMSECVLGQSKRVDFCGKGYHLMSFPQSAPHGVVFLHVTYVPAQEKNFTTAPAICHEGKAHFPREGVFVSNGTHWFITQRNFCEPQIITTDNTFVSGSCDVVIGIVNNTVYDPLQPELDSGGGSGGGQIYEGKLTAEGLRFGIVASRFNHALVDRLVEGAIDAIVRHGGREEDITLVRVPGSWEIPVAAGELARKEDIDAVIAIGVLIRGATPHFDYIASEVSKGLADLSLELRKPITFGVITADTLEQAIERAGTKHGNKGWEAALSAIEMANLFKSLR

SEQ ID NO: 8113 - protein, 1307 aa, Artificial Sequence
  SARS-CoV-2/Wuhan/WIV05/2019__EPI_ISL_402128 spike protein (1-1147)(P715C_P1069C) LumSynth construct
MFVFLVLLPLVSSQCVNLTTRTQLPPAYTNSFTRGVYYPDKVFRSSVLHSTQDLFLPFFSNVTWFHAIHVSGTNGTKRFDNPVLPFNDGVYFASTEKSNIIRGWIFGTTLDSKTQSLLIVNNATNVVIKVCEFQFCNDPFLGVYYHKNNKSWMESEFRVYSSANNCTFEYVSQPFLMDLEGKQGNFKNLREFVFKNIDGYFKIYSKHTPINLVRDLPQGFSALEPLVDLPIGINITRFQTLLALHRSYLTPGDSSSGWTAGAAAYYVGYLQPRTFLLKYNENGTITDAVDCALDPLSETKCTLKSFTVEKGIYQTSNFRVQPTESIVRFPNITNLCPFGEVFNATRFASVYAWNRKRISNCVADYSVLYNSASFSTFKCYGVSPTKLNDLCFTNVYADSFVIRGDEVRQIAPGQTGKIADYNYKLPDDFTGCVIAWNSNNLDSKVGGNYNYLYRLFRKSNLKPFERDISTEIYQAGSTPCNGVEGFNCYFPLQSYGFQPTNGVGYQPYRVVVLSFELLHAPATVCGPKKSTNLVKNKCVNFNFNGLTGTGVLTESNKKFLPFQQFGRDIADTTDAVRDPQTLEILDITPCSFGGVSVITPGTNTSNQVAVLYQDVNCTEVPVAIHADQLTPTWRVYSTGSNVFQTRAGCLIGAEHVNNSYECDIPIGAGICASYQTQTNSPRRARSVASQSIIAYTMSLGAENSVAYSNNSIAICTNFTISVTTEILPVSMTKTSVDCTMYICGDSTECSNLLLQYGSFCTQLNRALTGIAVEQDKNTQEVFAQVKQIYKTPPIKDFGGFNFSQILPDPSKPSKRSFIEDLLFNKVTLADAGFIKQYGDCLGDIAARDLICAQKFNGLTVLPPLLTDEMIAQYTSALLAGTITSGWTFGAGAALQIPFAMQMAYRFNGIGVTQNVLYENQKLIANQFNSAIGKIQDSLSSTASALGKLQDVVNQNAQALNTLVKQLSSNFGAISSVLNDILSRLDKVEAEVQIDRLITGRLQSLQTYVTQQLIRAAEIRASANLAATKMSECVLGQSKRVDFCGKGYHLMSFPQSAPHGVVFLHVTYVCAQEKNFTTAPAICHDGKAHFPREGVFVSNGTHWFVTQRNFYEPQIITTDNTFVSGNCDVVIGIVNNTVYDPLQPELDSGGGSGGGQIYEGKLTAEGLRFGIVASRFNHALVDRLVEGAIDAIVRHGGREEDITLVRVPGSWEIPVAAGELARKEDIDAVIAIGVLIRGATPHFDYIASEVSKGLADLSLELRKPITFGVITADTLEQAIERAGTKHGNKGWEAALSAIEMANLFKSLR

SEQ ID NO: 8114 - protein, 1303 aa, Artificial Sequence
  SARS-CoV-2/bat/Yunnan/RaTG13/2013__EPI_ISL_402131 spike protein (1-1143)(P711C_P1065C) LumSynth construct
MFVFLVLLPLVSSQCVNLTTRTQLPPAYTNSSTRGVYYPDKVFRSSVLHLTQDLFLPFFSNVTWFHAIHVSGTNGIKRFDNPVLPFNDGVYFASTEKSNIIRGWIFGTTLDSKTQSLLIVNNATNVVIKVCEFQFCNDPFLGVYYHKNNKSWMESEFRVYSSANNCTFEYVSQPFLMDLEGKQGNFKNLREFVFKNIDGYFKIYSKHTPINLVRDLPPGFSALEPLVDLPIGINITRFQTLLALHRSYLTPGDSSSGWTAGAAAYYVGYLQPRTFLLKYNENGTITDAVDCALDPLSETKCTLKSFTVEKGIYQTSNFRVQPTDSIVRFPNITNLCPFGEVFNATTFASVYAWNRKRISNCVADYSVLYNSTSFSTFKCYGVSPTKLNDLCFTNVYADSFVITGDEVRQIAPGQTGKIADYNYKLPDDFTGCVIAWNSKHIDAKEGGNFNYLYRLFRKANLKPFERDISTEIYQAGSKPCNGQTGLNCYYPLYRYGFYPTDGVGHQPYRVVVLSFELLNAPATVCGPKKSTNLVKNKCVNFNFNGLTGTGVLTESNKKFLPFQQFGRDIADTTDAVRDPQTLEILDITPCSFGGVSVITPGTNASNQVAVLYQDVNCTEVPVAIHADQLTPTWRVYSTGSNVFQTRAGCLIGAEHVNNSYECDIPIGAGICASYQTQTNSRSVASQSIIAYTMSLGAENSVAYSNNSIAICTNFTISVTTEILPVSMTKTSVDCTMYICGDSTECSNLLLQYGSFCTQLNRALTGIAVEQDKNTQEVFAQVKQIYKTPPIKDFGGFNFSQILPDPSKPSKRSFIEDLLFNKVTLADAGFIKQYGDCLGDIAARDLICAQKFNGLTVLPPLLTDEMIAQYTSALLAGTITSGWTFGAGAALQIPFAMQMAYRFNGIGVTQNVLYENQKLIANQFNSAIGKIQDSLSSTASALGKLQDVVNQNAQALNTLVKQLSSNFGAISSVLNDILSRLDKVEAEVQIDRLITGRLQSLQTYVTQQLIRAAEIRASANLAATKMSECVLGQSKRVDFCGKGYHLMSFPQSAPHGVVFLHVTYVCAQEKNFTTAPAICHDGKAHFPREGVFVSNGTHWFVTQRNFYEPQIITTDNTFVSGSCDVVIGIVNNTVYDPLQPELDSGGGSGGGQIYEGKLTAEGLRFGIVASRFNHALVDRLVEGAIDAIVRHGGREEDITLVRVPGSWEIPVAAGELARKEDIDAVIAIGVLIRGATPHFDYIASEVSKGLADLSLELRKPITFGVITADTLEQAIERAGTKHGNKGWEAALSAIEMANLFKSLR

SEQ ID NO: 8115 - protein, 1307 aa, Artificial Sequence
  SARS-CoV-2/Wuhan/HBCDC-HB-01/2019__EPI_ISL_402132 spike protein (1-1147)(P715C_P1069C) LumSynth construct
MFVFLVLLPLVSSQCVNLTTRTQLPPAYTNSITRGVYYPDKVFRSSVLHSTQDLFLPFFSNVTWFHAIHVSGTNGTKRFDNPVLPFNDGVYFASTEKSNIIRGWIFGTTLDSKTQSLLIVNNATNVVIKVCEFQFCNDPFLGVYYHKNNKSWMESEFRVYSSANNCTFEYVSQPFLMDLEGKQGNFKNLREFVFKNIDGYFKIYSKHTPINLVRDLPQGFSALEPLVDLPIGINITRFQTLLALHRSYLTPGDSSSGWTAGAAAYYVGYLQPRTFLLKYNENGTITDAVDCALDPLSETKCTLKSFTVEKGIYQTSNFRVQPTESIVRFPNITNLCPFGEVFNATRFASVYAWNRKRISNCVADYSVLYNSASFSTFKCYGVSPTKLNDLCFTNVYADSFVIRGDEVRQIAPGQTGKIADYNYKLPDDFTGCVIAWNSNNLDSKVGGNYNYLYRLFRKSNLKPFERDISTEIYQAGSTPCNGVEGFNCYFPLQSYGFQPTNGVGYQPYRVVVLSFELLHAPATVCGPKKSTNLVKNKCVNFNFNGLTGTGVLTESNKKFLPFQQFGRDIADTTDAVRDPQTLEILDITPCSFGGVSVITPGTNTSNQVAVLYQDVNCTEVPVAIHADQLTPTWRVYSTGSNVFQTRAGCLIGAEHVNNSYECDIPIGAGICASYQTQTNSPRRARSVASQSIIAYTMSLGAENSVAYSNNSIAICTNFTISVTTEILPVSMTKTSVDCTMYICGDSTECSNLLLQYGSFCTQLNRALTGIAVEQDKNTQEVFAQVKQIYKTPPIKDFGGFNFSQILPDPSKPSKRSFIEDLLFNKVTLADAGFIKQYGDCLGDIAARDLICAQKFNGLTVLPPLLTDEMIAQYTSALLAGTITSGWTFGAGAALQIPFAMQMAYRFNGIGVTQNVLYENQKLIANQFNSAIGKIQDSLSSTASALGKLQDVVNQNAQALNTLVKQLSSNFGAISSVLNDILSRLDKVEAEVQIDRLITGRLQSLQTYVTQQLIRAAEIRASANLAATKMSECVLGQSKRVDFCGKGYHLMSFPQSAPHGVVFLHVTYVCAQEKNFTTAPAICHDGKAHFPREGVFVSNGTHWFVTQRNFYEPQIITTDNTFVSGNCDVVIGIVNNTVYDPLQPELDSGGGSGGGQIYEGKLTAEGLRFGIVASRFNHALVDRLVEGAIDAIVRHGGREEDITLVRVPGSWEIPVAAGELARKEDIDAVIAIGVLIRGATPHFDYIASEVSKGLADLSLELRKPITFGVITADTLEQAIERAGTKHGNKGWEAALSAIEMANLFKSLR

SEQ ID NO: 8116 - protein, 1307 aa, Artificial Sequence
  SARS-CoV-2/Guangdong/20SF028/2020__EPI_ISL_403936 spike protein (1-1147)(P715C_P1069C) LumSynth construct
MFVFLVLLPLVSSQCVNLTTRTQLPPAYTNSFTRGVYYPDKVFRSSVLYSTQDLFLPFFSNVTWFHAIHVSGTNGTKRFDNPVLPFNDGVYFASTEKSNIIRGWIFGTTLDSKTQSLLIVNNATNVVIKVCEFQFCNDPFLGVYYHKNNKSWMESEFRVYSSANNCTFEYVSQPFLMDLEGKQGNFKNLREFVFKNIDGYFKIYSKHTPINLVRDLPQGFSALEPLVDLPIGINITRFQTLLALHRSYLTPGDSSSGWTAGAAAYYVGYLQPRTFLLKYNENGTITDAVDCALDPLSETKCTLKSFTVEKGIYQTSNFRVQPTESIVRFPNITNLCPFGEVFNATRFASVYAWNRKRISNCVADYSVLYNSASFSTFKCYGVSPTKLNDLCFTNVYADSFVIRGDEVRQIAPGQTGKIADYNYKLPDDFTGCVIAWNSNNLDSKVGGNYNYLYRLFRKSNLKPFERDISTEIYQAGSTPCNGVEGFNCYFPLQSYGFQPTNGVGYQPYRVVVLSFELLHAPATVCGPKKSTNLVKNKCVNFNFNGLTGTGVLTESNKKFLPFQQFGRDIADTTDAVRDPQTLEILDITPCSFGGVSVITPGTNTSNQVAVLYQDVNCTEVPVAIHADQLTPTWRVYSTGSNVFQTRAGCLIGAEHVNNSYECDIPIGAGICASYQTQTNSPRRARSVASQSIIAYTMSLGAENSVAYSNNSIAICTNFTISVTTEILPVSMTKTSVDCTMYICGDSTECSNLLLQYGSFCTQLNRALTGIAVEQDKNTQEVFAQVKQIYKTPPIKDFGGFNFSQILPDPSKPSKRSFIEDLLFNKVTLADAGFIKQYGDCLGDIAARDLICAQKFNGLTVLPPLLTDEMIAQYTSALLAGTITSGWTFGAGAALQIPFAMQMAYRFNGIGVTQNVLYENQKLIANQFNSAIGKIQDSLSSTASALGKLQDVVNQNAQALNTLVKQLSSNFGAISSVLNDILSRLDKVEAEVQIDRLITGRLQSLQTYVTQQLIRAAEIRASANLAATKMSECVLGQSKRVDFCGKGYHLMSFPQSAPHGVVFLHVTYVCAQEKNFTTAPAICHDGKAHFPREGVFVSNGTHWFVTQRNFYEPQIITTDNTFVSGNCDVVIGIVNNTVYDPLQPELDSGGGSGGGQIYEGKLTAEGLRFGIVASRFNHALVDRLVEGAIDAIVRHGGREEDITLVRVPGSWEIPVAAGELARKEDIDAVIAIGVLIRGATPHFDYIASEVSKGLADLSLELRKPITFGVITADTLEQAIERAGTKHGNKGWEAALSAIEMANLFKSLR

SEQ ID NO: 8117 - protein, 1307 aa, Artificial Sequence
  SARS-CoV-2/Shenzhen/SZTH-001/2020__EPI_ISL_406592 spike protein (1-1147)(P715C_P1069C) LumSynth construct
MFVFLVLLPLVSSQCVNLTTRTQLPPAYTNSFTRGVYYPDKVFRSSVLHSTQDLFLPFFSNVTWFHAIHVSGTNGTKRFDNPVLPFNDGVYFASTEKSNIIRGWIFGTTLDSKTQSLLIVNNATNVVIKVCEFQFCNDPFLGVYYHKNNKSWMESEFRVYSSANNCTFEYVSQPFLMDLEGKQGNFKNLREFVFKNIDGYFKIYSKHTPINLVRDLPQGFSALEPLVDLPIGINITRFQTLLALHRSYLTPGDSSSGWTAGAAAYYVGYLQPRTFLLKYNENGTITDAVDCALDPLSETKCTLKSFTVEKGIYQTSNFRVQPTESIVRFPNITNLCPFGEVFNATRFASVYAWNRKRISNCVADYSVLYNSASFSTFKCYGVSPTKLNDLCFTNVYADSFVIRGDEVRQIAPGQTGKIADYNYKLPDDFTGCVIAWNSNNLDSKVGGNYNYLYRLFRKSNLKPFERDISTEIYQAGSTPCNGVEGFNCYFPLQSYGFQPTNGVGYQPYRVVVLSFELLHAPATVCGPKKSTNLVKNKCVNFNFNGLTGTGVLTESNKKFLPFQQFGRDIADTTDAVRDPQTLEILDITPCSFGGVSVITPGTNTSNQVAVLYQDVNCTEVPVAIHADQLTPTWRVYSTGSNVFQTRAGCLIGAEHVNNSYECDIPIGAGICASYQTQTNSPRRARSVASQSIIAYTMSLGAENSVAYSNNSIAICTNFTISVTTEILPVSMTKTSVDCTMYICGDSTECSNLLLQYGSFCTQLNRALTGIAVEQDKNTQEVFAQVKQIYKTPPIKDFGGFNFSQILPDPSKPSKRSFIEDLLFNKVTLADAGFIKQYGDCLGDIAARDLICAQKFNGLTVLPPLLTDEMIAQYTSALLAGTITSGWTFGAGAALQIPFAMQMAYRFNGIGVTQNVLYENQKLIANQFNSAIGKIQDSLSSTASALGKLQDVVNQNAQALNTLVKQLSSNFGAISSVLNDILSRLDKVEAEVQIDRLITGRLQSLQTYVTQQLIRAAEIRASANLAATKMSECVLGQSKRVDFCGKGYHLMSFPQSAPHGVVFLHVTYVCAQEKNFTTAPAICHDGKAHFPREGVFVSNGTHWFVTQRNFYEPQIITTDNTFVSGNCDVLIGIVNNTVYDPLQPELDSGGGSGGGQIYEGKLTAEGLRFGIVASRFNHALVDRLVEGAIDAIVRHGGREEDITLVRVPGSWEIPVAAGELARKEDIDAVIAIGVLIRGATPHFDYIASEVSKGLADLSLELRKPITFGVITADTLEQAIERAGTKHGNKGWEAALSAIEMANLFKSLR

SEQ ID NO: 8118 - protein, 1307 aa, Artificial Sequence
  SARS-CoV-2/Shenzhen/SZTH-004/2020__EPI_ISL_406595 spike protein (1-1147)(P715C_P1069C) LumSynth construct
MFVFLVLLPLVSSQCVNLTTRTQLPPAYTNSFTRGVYYPDKVFRSSVLHSTQDLFLPFFSNVTWFHAIHVSGTNGTKRFDNPVLPFNDGVYFASTEKSNIIRGWIFGTTLDSKTQSLLIVNNATNVVIKVCEFQFCNDPFLGVYYHKNNKSWMESEFRVYSSANNCTFEYVSQPFLMDLEGKQGNFKNLREFVFKNIDGYFKIYSKHTPINLVRDLPQGFSALEPLVDLPIGINITRFQTLLALHRSYLTPGDSSSGWTAGAAAYYVGYLQPRTFLLKYNENGTITDAVDCALDPLSETKCTLKSFTVEKGIYQTSNFRVQPTESIVRFPNITNLCPFGEVFNATRFASVYAWDRKRISNCVAYYSVLYNSASFSTFKCYGVSPTKLNDLCFTNVYADSFVIRGDEVRQIAPGQTGKIADYNYKLPDDFTGCVIAWNSNNLDSKVGGNYNYLYRLFRKSNLKPFERDISTEIYQAGSTPCNGVEGFNCYFPLQSYGFQPTNGVGYQPYRVVVLSFELLHAPATVCGPKKSTNLVKNKCVNFNFNGLTGTGVLTESNKKFLPFQQFGRDIADTTDAVRDPQTLEILDITPCSFGGVSVITPGTNTSNQVAVLYQDVNCTEVPVAIHADQLTPTWRVYSTGSNVFQTRAGCLIGAEHVNNSYECDIPIGAGICASYQTQTNSPRRARSVASQSIIAYTMSLGAENSVAYSNNSIAICTNFTISVTTEILPVSMTKTSVDCTMYICGDSTECSNLLLQYGSFCTQLNRALTGIAVEQDKNTQEVFAQVKQIYKTPPIKDFGGFNFSQILPDPSKPSKRSFIEDLLFNKVTLADAGFIKQYGDCLGDIAARDLICAQKFNGLTVLPPLLTDEMIAQYTSALLAGTITSGWTFGAGAALQIPFAMQMAYRFNGIGVTQNVLYENQKLIANQFNSAIGKIQDSLSSTASALGKLQDVVNQNAQALNTLVKQLSSNFGAISSVLNDILSRLDKVEAEVQIDRLITGRLQSLQTYVTQQLIRAAEIRASANLAATKMSECVLGQSKRVDFCGKGYHLMSFPQSAPHGVVFLHVTYVCAQEKNFTTAPAICHDGKAHFPREGVFVSNGTHWFVTQRNFYEPQIITTDNTFVSGNCDVVIGIVNNTVYDPLQPELDSGGGSGGGQIYEGKLTAEGLRFGIVASRFNHALVDRLVEGAIDAIVRHGGREEDITLVRVPGSWEIPVAAGELARKEDIDAVIAIGVLIRGATPHFDYIASEVSKGLADLSLELRKPITFGVITADTLEQAIERAGTKHGNKGWEAALSAIEMANLFKSLR

SEQ ID NO: 8119 - protein, 1307 aa, Artificial Sequence
  SARS-CoV-2/France/IDF0372/2020__EPI_ISL_406596 spike protein (1-1147)(P715C_P1069C) LumSynth construct
MFVFLVLLPLVSSQCVNLTTRTQLPPAYTNSFTRGVYYPDKVFRSSVLHSTQDLFLPFFSNVTWFHAIHVSGTNGTKRFDNPVLPFNDGVYFASTEKSNIIRGWIFGTTLDSKTQSLLIVNNATNVVIKVCEFQFCNDPFLGVYYHKNNKSWMESEFRVYSSANNCTFEYVSQPFLMDLEGKQGNFKNLREFVFKNIDGYFKIYSKHTPINLVRDLPQGFSALEPLVDLPIGINITRFQTLLALHRSYLTPGDSSSGWTAGAAAYYVGYLQPRTFLLKYNENGTITDAVDCALDPLSETKCTLKSFTVEKGIYQTSNFRVQPTESIVRFPNITNLCPFGEVFNATRFASVYAWNRKRISNCVADYSFLYNSASFSTFKCYGVSPTKLNDLCFTNVYADSFVIRGDEVRQIAPGQTGKIADYNYKLPDDFTGCVIAWNSNNLDSKVGGNYNYLYRLFRKSNLKPFERDISTEIYQAGSTPCNGVEGFNCYFPLQSYGFQPTNGVGYQPYRVVVLSFELLHAPATVCGPKKSTNLVKNKCVNFNFNGLTGTGVLTESNKKFLPFQQFGRDIADTTDAVRDPQTLEILDITPCSFGGVSVITPGTNTSNQVAVLYQDVNCTEVPVAIHADQLTPTWRVYSTGSNVFQTRAGCLIGAEHVNNSYECDIPIGAGICASYQTQTNSPRRARSVASQSIIAYTMSLGAENSVAYSNNSIAICTNFTISVTTEILPVSMTKTSVDCTMYICGDSTECSNLLLQYGSFCTQLNRALTGIAVEQDKNTQEVFAQVKQIYKTPPIKDFGGFNFSQILPDPSKPSKRSFIEDLLFNKVTLADAGFIKQYGDCLGDIAARDLICAQKFNGLTVLPPLLTDEMIAQYTSALLAGTITSGWTFGAGAALQIPFAMQMAYRFNGIGVTQNVLYENQKLIANQFNSAIGKIQDSLSSTASALGKLQDVVNQNAQALNTLVKQLSSNFGAISSVLNDILSRLDKVEAEVQIDRLITGRLQSLQTYVTQQLIRAAEIRASANLAATKMSECVLGQSKRVDFCGKGYHLMSFPQSAPHGVVFLHVTYVCAQEKNFTTAPAICHDGKAHFPREGVFVSNGTHWFVTQRNFYEPQIITTDNTFVSGNCDVVIGIVNNTVYDPLQPELDSGGGSGGGQIYEGKLTAEGLRFGIVASRFNHALVDRLVEGAIDAIVRHGGREEDITLVRVPGSWEIPVAAGELARKEDIDAVIAIGVLIRGATPHFDYIASEVSKGLADLSLELRKPITFGVITADTLEQAIERAGTKHGNKGWEAALSAIEMANLFKSLR

SEQ ID NO: 8120 - protein, 1307 aa, Artificial Sequence
  SARS-CoV-2/Australia/VIC01/2020__EPI_ISL_406844 spike protein (1-1147)(P715C_P1069C) LumSynth construct
MFVFLVLLPLVSSQCVNLTTRTQLPPAYTNSFTRGVYYPDKVFRSSVLHSTQDLFLPFFSNVTWFHAIHVSGTNGTKRFDNPVLPFNDGVYFASTEKSNIIRGWIFGTTLDSKTQSLLIVNNATNVVIKVCEFQFCNDPFLGVYYHKNNKSWMESEFRVYSSANNCTFEYVSQPFLMDLEGKQGNFKNLREFVFKNIDGYFKIYSKHTPINLVRDLPQGFSALEPLVDLPIGINITRFQTLLALHRRYLTPGDSSSGWTAGAAAYYVGYLQPRTFLLKYNENGTITDAVDCALDPLSETKCTLKSFTVEKGIYQTSNFRVQPTESIVRFPNITNLCPFGEVFNATRFASVYAWNRKRISNCVADYSVLYNSASFSTFKCYGVSPTKLNDLCFTNVYADSFVIRGDEVRQIAPGQTGKIADYNYKLPDDFTGCVIAWNSNNLDSKVGGNYNYLYRLFRKSNLKPFERDISTEIYQAGSTPCNGVEGFNCYFPLQSYGFQPTNGVGYQPYRVVVLSFELLHAPATVCGPKKSTNLVKNKCVNFNFNGLTGTGVLTESNKKFLPFQQFGRDIADTTDAVRDPQTLEILDITPCSFGGVSVITPGTNTSNQVAVLYQDVNCTEVPVAIHADQLTPTWRVYSTGSNVFQTRAGCLIGAEHVNNSYECDIPIGAGICASYQTQTNSPRRARSVASQSIIAYTMSLGAENSVAYSNNSIAICTNFTISVTTEILPVSMTKTSVDCTMYICGDSTECSNLLLQYGSFCTQLNRALTGIAVEQDKNTQEVFAQVKQIYKTPPIKDFGGFNFSQILPDPSKPSKRSFIEDLLFNKVTLADAGFIKQYGDCLGDIAARDLICAQKFNGLTVLPPLLTDEMIAQYTSALLAGTITSGWTFGAGAALQIPFAMQMAYRFNGIGVTQNVLYENQKLIANQFNSAIGKIQDSLSSTASALGKLQDVVNQNAQALNTLVKQLSSNFGAISSVLNDILSRLDKVEAEVQIDRLITGRLQSLQTYVTQQLIRAAEIRASANLAATKMSECVLGQSKRVDFCGKGYHLMSFPQSAPHGVVFLHVTYVCAQEKNFTTAPAICHDGKAHFPREGVFVSNGTHWFVTQRNFYEPQIITTDNTFVSGNCDVVIGIVNNTVYDPLQPELDSGGGSGGGQIYEGKLTAEGLRFGIVASRFNHALVDRLVEGAIDAIVRHGGREEDITLVRVPGSWEIPVAAGELARKEDIDAVIAIGVLIRGATPHFDYIASEVSKGLADLSLELRKPITFGVITADTLEQAIERAGTKHGNKGWEAALSAIEMANLFKSLR

SEQ ID NO: 8121 - protein, 1307 aa, Artificial Sequence
  SARS-CoV-2/Germany/BavPat1/2020__EPI_ISL_406862 spike protein (1-1147)(P715C_P1069C) LumSynth construct
MFVFLVLLPLVSSQCVNLTTRTQLPPAYTNSFTRGVYYPDKVFRSSVLHSTQDLFLPFFSNVTWFHAIHVSGTNGTKRFDNPVLPFNDGVYFASTEKSNIIRGWIFGTTLDSKTQSLLIVNNATNVVIKVCEFQFCNDPFLGVYYHKNNKSWMESEFRVYSSANNCTFEYVSQPFLMDLEGKQGNFKNLREFVFKNIDGYFKIYSKHTPINLVRDLPQGFSALEPLVDLPIGINITRFQTLLALHRSYLTPGDSSSGWTAGAAAYYVGYLQPRTFLLKYNENGTITDAVDCALDPLSETKCTLKSFTVEKGIYQTSNFRVQPTESIVRFPNITNLCPFGEVFNATRFASVYAWNRKRISNCVADYSVLYNSASFSTFKCYGVSPTKLNDLCFTNVYADSFVIRGDEVRQIAPGQTGKIADYNYKLPDDFTGCVIAWNSNNLDSKVGGNYNYLYRLFRKSNLKPFERDISTEIYQAGSTPCNGVEGFNCYFPLQSYGFQPTNGVGYQPYRVVVLSFELLHAPATVCGPKKSTNLVKNKCVNFNFNGLTGTGVLTESNKKFLPFQQFGRDIADTTDAVRDPQTLEILDITPCSFGGVSVITPGTNTSNQVAVLYQGVNCTEVPVAIHADQLTPTWRVYSTGSNVFQTRAGCLIGAEHVNNSYECDIPIGAGICASYQTQTNSPRRARSVASQSIIAYTMSLGAENSVAYSNNSIAICTNFTISVTTEILPVSMTKTSVDCTMYICGDSTECSNLLLQYGSFCTQLNRALTGIAVEQDKNTQEVFAQVKQIYKTPPIKDFGGFNFSQILPDPSKPSKRSFIEDLLFNKVTLADAGFIKQYGDCLGDIAARDLICAQKFNGLTVLPPLLTDEMIAQYTSALLAGTITSGWTFGAGAALQIPFAMQMAYRFNGIGVTQNVLYENQKLIANQFNSAIGKIQDSLSSTASALGKLQDVVNQNAQALNTLVKQLSSNFGAISSVLNDILSRLDKVEAEVQIDRLITGRLQSLQTYVTQQLIRAAEIRASANLAATKMSECVLGQSKRVDFCGKGYHLMSFPQSAPHGVVFLHVTYVCAQEKNFTTAPAICHDGKAHFPREGVFVSNGTHWFVTQRNFYEPQIITTDNTFVSGNCDVVIGIVNNTVYDPLQPELDSGGGSGGGQIYEGKLTAEGLRFGIVASRFNHALVDRLVEGAIDAIVRHGGREEDITLVRVPGSWEIPVAAGELARKEDIDAVIAIGVLIRGATPHFDYIASEVSKGLADLSLELRKPITFGVITADTLEQAIERAGTKHGNKGWEAALSAIEMANLFKSLR

SEQ ID NO: 8122 - protein, 1307 aa, Artificial Sequence
  SARS-CoV-2/Wuhan/HBCDC-HB-02/2020__EPI_ISL_412978 spike protein (1-1147)(P715C_P1069C) LumSynth construct
MFVFLVLLPLVSSQCVNLTTRTQLPPAYTNSFTRGVYYPDKVFRSSVLHSTQDLFLPFFSNVTWFHAIHVSGTNGTKRFDNPVLPFNDGVYFASTEKSNIIRGWIFGTTLDSKTQSLLIVNNATNVVIKVCEFQFCNDPFLGVYYHKNNKSWMESEFRVYSSANNCTFEYVSQPFLMDLEGKQGNFKNLREFVFKNIDGYFKIYSKHTPINLVRDLPQGFSALEPLVDLPIGINITRFQTLLALHRSYLTPGDSSSGWTAGAAAYYVGYLQPRTFLLKYNENGTITDAVDCALDPLSETKCTLKSFTVEKGIYQTSNFRVQPTESIVRFPNITNLCPFGEVFNATRFASVYAWNRKRISNCVADYSVLYNSASFSTFKCYGVSPTKLNDLCFTNVYADSFVIRGDEVRQIAPGQTGKIADYNYKLPDDFTGCVIAWNSNNLDSKVGGNYNYLYRLFRKSNLKPFERDISTEIYQAGSTPCNGVEGFNCYFPLQSYGFQPTNGVGYQPYRVVVLSFELLHAPATVCGPKKSTNLVKNKCVNFNFNGLTGTGVLTESNKKFLPFQQFGRDIADTTDAVRDPQTLEILDITPCSFGGVSVITPGTNTSNQVAVLYQDVNCTEVPVAIHADQLTPTWRVYSTGSNVFQTRAGCLIGAEHVNNSYECDIPIGAGICASYQTQTNSPRRARSVASQSIIAYTMSLGAENSVAYSNNSIAICTNFTISVTTEILPVSMTKTSVDCTMYICGDSTECSNFLLQYGSFCTQLNRALTGIAVEQDKNTQEVFAQVKQIYKTPPIKDFGGFNFSQILPDPSKPSKRSFIEDLLFNKVTLADAGFIKQYGDCLGDIAARDLICAQKFNGLTVLPPLLTDEMIAQYTSALLAGTITSGWTFGAGAALQIPFAMQMAYRFNGIGVTQNVLYENQKLIANQFNSAIGKIQDSLSSTASALGKLQDVVNQNAQALNTLVKQLSSNFGAISSVLNDILSRLDKVEAEVQIDRLITGRLQSLQTYVTQQLIRAAEIRASANLAATKMSECVLGQSKRVDFCGKGYHLMSFPQSAPHGVVFLHVTYVCAQEKNFTTAPAICHDGKAHFPREGVFVSNGTHWFVTQRNFYEPQIITTDNTFVSGNCDVVIGIVNNTVYDPLQPELDSGGGSGGGQIYEGKLTAEGLRFGIVASRFNHALVDRLVEGAIDAIVRHGGREEDITLVRVPGSWEIPVAAGELARKEDIDAVIAIGVLIRGATPHFDYIASEVSKGLADLSLELRKPITFGVITADTLEQAIERAGTKHGNKGWEAALSAIEMANLFKSLR

SEQ ID NO: 8123 - protein, 1307 aa, Artificial Sequence
  SARS-CoV-2/Australia/QLD02/2020__EPI_ISL_407896 spike protein (1-1147)(P715C_P1069C) LumSynth construct
MFVFLVLLPLVSSQCVNLTTRTQLPPAYTNSFTRGVYYPDKVFRSSVLHSTQDLFLPFFSNVTWFHAIHVSGTNGTKRFDNPVLPFNDGVYFASTEKSNIIRGWIFGTTLDSKTQSLLIVNNATNVVIKVCEFQFCNDPFLGVYYHKNNKSWMESEFRVYSSANNCTFEYVSQPFLMDLEGKQGNFKNLREFVFKNIDGYFKIYSKHTPINLVRDLPQGFSALEPLVDLPIGINITRFQTLLALHRSYLTPGDSSSGWTAGAAAYYVGYLQPRTFLLKYNENGTITDAVDCALDPLSETKCTLKSFTVEKGIYQTSNFRVQPTESIVRFPNITNLCPFGEVFNATRFASVYAWNRKRISNCVADYSVLYNSASFSTFKCYGVSPTKLNDLCFTNVYADSFVIRGDEVRQIAPGQTGKIADYNYKLPDDFTGCVIAWNSNNLDSKVGGNYNYLYRLFRKSNLKPFERDISTEIYQAGSTPCNGVEGFNCYFPLQSYGFQPTNGVGYQPYRVVVLSFELLHAPATVCGPKKSTNLVKNKCVNFNFNGLTGTGVLTESNKKFLPFQQFGRDIADTTDAVRDPQTLEILDITPCSFGGVSVITPGTNTSNQVAVLYQDVNCTEVPVAIHADQLTPTWRVYSTGSNVFQTRAGCLIGAEHVNNSYECDIPIGAGICASYQTQTNSPRRARSVASQSIIAYTMSLGAENSVAYSNNSIAICTNFTISVTTEILPVSMTKTSVDCTMYICGDSTECSNLLLQYGSFCTQLNRALTGIAVEQDKNTQEVFAQVKQIYKTPPIKDFGGFNFSQILPDPSKPSKRSFIEDLLFNKVTLADAGFIKQYGDCLGDIAARDLICAQKFNGLTVLPPLLTDEMIAQYTSALLAGTITSGWTFGAGAALQIPFAMQMAYRFNGIGVTQNVLYENQKLIANQFNSAIGKIQDSLSSTASALGKLQDVVNQNAQALNTLVKQLSSNFGAISSVLNDILSRLDKVEAEVQIDRLITGRLQSLQTYVTQQLIRAAEIRASANLAATKMSECVLGQSKRVDFCGKGYHLMSFPQSAPHGVVFLHVTYVCAQEKNFTTAPAICHDGKAHFPREGVFVSNGTHWFVTQRNFYEPQIITTDNTFVSGNCDVVIGIVNNTVYDPLQLELDSGGGSGGGQIYEGKLTAEGLRFGIVASRFNHALVDRLVEGAIDAIVRHGGREEDITLVRVPGSWEIPVAAGELARKEDIDAVIAIGVLIRGATPHFDYIASEVSKGLADLSLELRKPITFGVITADTLEQAIERAGTKHGNKGWEAALSAIEMANLFKSLR

SEQ ID NO: 8124 - protein, 1307 aa, Artificial Sequence
  SARS-CoV-2/India/1-31/2020__EPI_ISL_413523 spike protein (1-1147)(P715C_P1069C) LumSynth construct
MFVFLVLLPLVSSQCVNLTTRTQLPPAYTNSFTRGVYYPDKVFRSSVLHSTQDLFLPFFSNVTWFHAIHVSGTNGTKRFDNPVLPFNDGVYFASTEKSNIIRGWIFGTTLDSKTQSLLIVNNATNVVIKVCEFQFCNDPFLGVYYHKNNKSWMESEFRVYSSANNCTFEYVSQPFLMDLEGKQGNFKNLREFVFKNIDGYFKIYSKHTPINLVRDLPQGFSALEPLVDLPIGINITRFQTLLALHRSYLTPGDSSSGWTAGAAAYYVGYLQPRTFLLKYNENGTITDAVDCALDPLSETKCTLKSFTVEKGIYQTSNFRVQPTESIVRFPNITNLCPFGEVFNATRFASVYAWNRKRISNCVADYSVLYNSASFSTFKCYGVSPTKLNDLCFTNVYADSFVIRGDEVRQIAPGQTGKIADYNYKLPDDFTGCVIAWNSNNLDSKVGGNYNYLYRLFRKSNLKPFERDISTEIYQAGSTPCNGVEGFNCYFPLQSYGFQPTNGVGYQPYRVVVLSFELLHAPATVCGPKKSTNLVKNKCVNFNFNGLTGTGVLTESNKKFLPFQQFGRDIADTTDAVRDPQTLEILDITPCSFGGVSVITPGTNTSNQVAVLYQDVNCTEVPVAIHADQLTPTWRVYSTGSNVFQTRAGCLIGAEHVNNSYECDIPIGAGICASYQTQTNSPRRARSVASQSIIAYTMSLGAENSVAYSNNSIAICTNFTISVTTEILPVSMTKTSVDCTMYICGDSTECSNLLLQYGSFCTQLNRALTGIAVEQDKNTQEVFAQVKQIYKTPPIKDFGGFNFSQILPDPSKPSKRSFIEDLLFNKVTLADAGFIKQYGDCLGDIAARDLICAQKFNGLTVLPPLLTDEMIAQYTSALLAGTITSGWTFGAGAALQIPFAMQMAYRFNGIGVTQNVLYENQKLIANQFNSVIGKIQDSLSSTASALGKLQDVVNQNAQALNTLVKQLSSNFGAISSVLNDILSRLDKVEAEVQIDRLITGRLQSLQTYVTQQLIRAAEIRASANLAATKMSECVLGQSKRVDFCGKGYHLMSFPQSAPHGVVFLHVTYVCAQEKNFTTAPAICHDGKAHFPREGVFVSNGTHWFVTQRNFYEPQIITTDNTFVSGNCDVVIGIVNNTVYDPLQPELDSGGGSGGGQIYEGKLTAEGLRFGIVASRFNHALVDRLVEGAIDAIVRHGGREEDITLVRVPGSWEIPVAAGELARKEDIDAVIAIGVLIRGATPHFDYIASEVSKGLADLSLELRKPITFGVITADTLEQAIERAGTKHGNKGWEAALSAIEMANLFKSLR

SEQ ID NO: 8125 - protein, 1307 aa, Artificial Sequence
  SARS-CoV-2/Guangdong/GD2020087-P0008/2020__EPI_ISL_413863 spike protein (1-1147)(P715C_P1069C) LumSynth construct
MFVFLVLLPLVSSQCVNLTTRTQLPPAYTNSFTRGVYYPDKVFRSSVLHSTQDLFLPFFSNVTWFHAIHVSGTNGTKRFDNPVLPFNDGVYFASTEKSNIIRGWIFGTTLDSKTQSLLIVNNATNVVIKVCEFQFCNDPFLGVYYHKNNKSWMESEFRVYSSANNCTFEYVSQPFLMDLEGKQGNFKNLREFVFKNIDGYFKIYSKHTPINLVRDLPQGFSALEPLVDLPIGINITRFQTLLALHRSYLTPGDSSSGWTAGAAAYYVGYLQPRTFLLKYNENGTITDAVDCALDPLSETKCTLKSFTVEKGIYQTSNFRVQPTESIVRFPNITNLCPFGEVFNATRFASVYAWNRKRISNCVADYSVLYNSASFSTFKCYGVSPTKLNDLCFTNVYADSFVIRGDEVREIAPGQTGKIADYNYKLPDDFTGCVIAWNSNNLDSKVGGNYNYLYRLFRKSNLKPFERDISTEIYQAGSTPCNGVEGFNCYFPLQSYGFQPTNGVGYQPYRVVVLSFELLHAPATVCGPKKSTNLVKNKCVNFNFNGLTGTGVLTESNKKFLPFQQFGRDIADTTDAVRDPQTLEILDITPCSFGGVSVITPGTNTSNQVAVLYQDVNCTEVPVAIHADQLTPTWRVYSTGSNVFQTRAGCLIGAEHVNNSYECDIPIGAGICASYQTQTNSPRRARSVASQSIIAYTMSLGAENSVAYSNNSIAICTNFTISVTTEILPVSMTKTSVDCTMYICGDSTECSNLLLQYGSFCTQLNRALTGIAVEQDKNTQEVFAQVKQIYKTPPIKDFGGFNFSQILPDPSKPSKRSFIEDLLFNKVTLADAGFIKQYGDCLGDIAARDLICAQKFNGLTVLPPLLTDEMIAQYTSALLAGTITSGWTFGAGAALQIPFAMQMAYRFNGIGVTQNVLYENQKLIANQFNSAIGKIQDSLSSTASALGKLQDVVNQNAQALNTLVKQLSSNFGAISSVLNDILSRLDKVEAEVQIDRLITGRLQSLQTYVTQQLIRAAEIRASANLAATKMSECVLGQSKRVDFCGKGYHLMSFPQSAPHGVVFLHVTYVCAQEKNFTTAPAICHDGKAHFPREGVFVSNGTHWFVTQRNFYEPQIITTDNTFVSGNCDVVIGIVNNTVYDPLQPELDSGGGSGGGQIYEGKLTAEGLRFGIVASRFNHALVDRLVEGAIDAIVRHGGREEDITLVRVPGSWEIPVAAGELARKEDIDAVIAIGVLIRGATPHFDYIASEVSKGLADLSLELRKPITFGVITADTLEQAIERAGTKHGNKGWEAALSAIEMANLFKSLR

SEQ ID NO: 8126 - protein, 1307 aa, Artificial Sequence
  SARS-CoV-2/Sweden/01/2020__EPI_ISL_411951 spike protein (1-1147)(P715C_P1069C) LumSynth construct
MFVFLVLLPLVSSQCVNLTTRTQLPPAYTNSFTRGVYYPDKVFRSSVLHSTQDLFLPFFSNVTWFHAIHVSGTNGTKRFDNPVLPFNDGVYFASTEKSNIIRGWIFGTTLDSKTQSLLIVNNATNVVIKVCEFQFCNDPFLGVYYHKNNKSWMESEFRVYSSANNCTFEYVSQPFLMDLEGKQGNFKNLREFVFKNIDGYFKIYSKHTPINLVRDLPQGFSALEPLVDLPIGINITRFQTLLALHRSYLTPGDSSSGWTAGAAAYYVGYLQPRTFLLKYNENGTITDAVDCALDPLSETKCTLKSFTVEKGIYQTSNFRVQPTESIVRFPNITNLCPFGEVFNATRFASVYAWNRKRISNCVADYSVLYNSASFSTFKCYGVSPTKLNDLCFTNVYADSFVIRGDEVRQIAPGQTGKIADYNYKLPDDFTGCVIAWNSNNLDSKVGGNYNYLYRLFRKSNLKPFERDISTEIYQAGSTPCNGVEGFNCYFPLQSYGFQPTNGVGYQPYRVVVLSFELLHAPATVCGPKKSTNLVKNKCVNFNFNGLTGTGVLTESNKKFLPFQQFGRDIADTTDAVRDPQTLEILDITPCSFGGVSVITPGTNTSNQVAVLYQDVNCTEVPVAIHADQLTPTWRVYSTGSNVFQTRAGCLIGAEHVNNSYECDIPIGAGICASYQTQTNSPRRARSVASQSIIAYTMSLGAENSVAYSNNSIAICTNFTISVTTEILPVSMTKTSVDCTMYICGDSTECSNLLLQYGSFCTQLNRALTGIAVEQDKNTQEVFAQVKQIYKTPPIKDCGGFNFSQILPDPSKPSKRSFIEDLLFNKVTLADAGFIKQYGDCLGDIAARDLICAQKFNGLTVLPPLLTDEMIAQYTSALLAGTITSGWTFGAGAALQIPFAMQMAYRFNGIGVTQNVLYENQKLIANQFNSAIGKIQDSLSSTASALGKLQDVVNQNAQALNTLVKQLSSNFGAISSVLNDILSRLDKVEAEVQIDRLITGRLQSLQTYVTQQLIRAAEIRASANLAATKMSECVLGQSKRVDFCGKGYHLMSFPQSAPHGVVFLHVTYVCAQEKNFTTAPAICHDGKAHFPREGVFVSNGTHWFVTQRNFYEPQIITTDNTFVSGNCDVVIGIVNNTVYDPLQPELDSGGGSGGGQIYEGKLTAEGLRFGIVASRFNHALVDRLVEGAIDAIVRHGGREEDITLVRVPGSWEIPVAAGELARKEDIDAVIAIGVLIRGATPHFDYIASEVSKGLADLSLELRKPITFGVITADTLEQAIERAGTKHGNKGWEAALSAIEMANLFKSLR

SEQ ID NO: 8127 - protein, 1307 aa, Artificial Sequence
  SARS-CoV-2/Tianmen/HBCDC-HB-07/2020__EPI_ISL_412983 spike protein (1-1147)(P715C_P1069C) LumSynth construct
MFVFLVLLPLVSSQCVNLTTRTQLPPAYTNSFTRGVYYPDKVFRSSVLHSTQDLFLPFFSNVTWFHAIHVSGTNGTKRFDNPVLPFNDGVYFASTEKSNIIRGWIFGTTLDSKTQSLLIVNNATNVVIKVCEFQFCNDPFLGVYYHKNNKSWMESEFRVYSSANNCTFEYVSQPFLMDLEGKQGNFKNLREFVFKNIDGYFKIYSKHTPINLVRDLPQGFSALEPLVDLPIGINITRFQTLLALHRSYLTPGDSSSGWTAGAAAYYVGYLQPRTFLLKYNENGTITDAVDCALDPLSETKCTLKSFTVEKGIYQTSNFRVQPTESIVRFPNITNLCPFGEVFNATRFASVYAWNRKRISNCVADYSVLYNSASFSTFKCYGVSPTKLNDLCFTNVYADSFVIRGDEVRQIAPGQTGKIADYNYKLPDDFTGCVIAWNSNNLDSKVGGNYNYLYRLFRKSNLKPFERDISTEIYQAGSTPCNGVEGFNCYFPLQSYGFQPTNGVGYQPYRVVVLSFELLHAPATVCGPKKSTNLVKNKCVNFNFNGLTGTGVLTESNKKFLPFQQFGRDIADTTDAVRDPQTLEILDITPCSFGGVSVITPGTNTSNQVAVLYQDLNCTEVPVAIHADQLTPTWRVYSTGSNVFQTRAGCLIGAEHVNNSYECDIPIGAGICASYQTQTNSPRRARSVASQSIIAYTMSLGAENSVAYSNNSIAICTNFTISVTTEILPVSMTKTSVDCTMYICGDSTECSNLLLQYGSFCTQLNRALTGIAVEQDKNTQEVFAQVKQIYKTPPIKDFGGFNFSQILPDPSKPSKRSFIEDLLFNKVTLADAGFIKQYGDCLGDIAARDLICAQKFNGLTVLPPLLTDEMIAQYTSALLAGTITSGWTFGAGAALQIPFAMQMAYRFNGIGVTQNVLYENQKLIANQFNSAIGKIQDSLSSTASALGKLQDVVNQNAQALNTLVKQLSSNFGAISSVLNDILSRLDKVEAEVQIDRLITGRLQSLQTYVTQQLIRAAEIRASANLAATKMSECVLGQSKRVDFCGKGYHLMSFPQSAPHGVVFLHVTYVCAQEKNFTTAPAICHDGKAHFPREGVFVSNGTHWFVTQRNFYEPQIITTDNTFVSGNCDVVIGIVNNTVYDPLQPELDSGGGSGGGQIYEGKLTAEGLRFGIVASRFNHALVDRLVEGAIDAIVRHGGREEDITLVRVPGSWEIPVAAGELARKEDIDAVIAIGVLIRGATPHFDYIASEVSKGLADLSLELRKPITFGVITADTLEQAIERAGTKHGNKGWEAALSAIEMANLFKSLR

SEQ ID NO: 8128 - protein, 1307 aa, Artificial Sequence
  SARS-CoV-2/Hong Kong/case42_VM20002493/2020__EPI_ISL_414527 spike protein (1-1147)(P715C_P1069C) LumSynth construct
MFVFLVLLPLVSSQCVNLTTRTQLPPAYTNSFTRGVYYPDKVFRSSVLHSTQDLFLPFFSNVTWFHAIHVSGTNGTKRFDNPVLPFNDGVYFASTEKSNIIRGWIFGTTLDSKTQSLLIVNNATNVVIKVCEFQFCNDPFLGVYYHKNNKSWMESEFRVYSSANNCTFEYVSQPFLMDLEGKQGNFKNLREFVFKNIDGYFKIYSKHTPINLVRDLPQGFSALEPLVDLPIGINITRFQTLLALHRSYLTPGDSSSGWTAGAAAYYVGYLQPRTFLLKYNENGTITDAVDCALDPLSETKCTLKSFTVEKGIYQTSNFRVQPTESIVRFPNITNLCPFGEVFNATRFASVYAWNRKRISNCVADYSVLYNSASFSTFKCYGVSPTKLNDLCFTNVYADSFVIRGDEVRQIAPGQTGKIADYNYKLPDDFTGCVIAWNSNNLDSKVGGNYNYLYRLFRKSNLKPFERDISTEIYQAGSTPCNGVEGFNCYFPLQSYGFQPTNGVGYQPYRVVVLSFELLHAPATVCGPKKSTNLVKNKCVNFNFNGLTGTGVLTESNKKFLPFQQFGRDIADTTDAVRDPQTLEILDITPCSFGGVSVITPGTNTSNQVAVLYQDVNCTEVPVAIHADQLTPTWRVYSTGSNVFQTRAGCLIGAEHVNNSYECDIPIGAGICASYQTQTNSPRRARSVASQSIIAYTMSLGAENSVAYSNNSIAICTNFAISVTTEILPVSMTKTSVDCTMYICGDSTECSNLLLQYGSFCTQLNRALTGIAVEQDKNTQEVFAQVKQIYKTPPIKDFGGFNFSQILPDPSKPSKRSFIEDLLFNKVTLADAGFIKQYGDCLGDIAARDLICAQKFNGLTVLPPLLTDEMIAQYTSALLAGTITSGWTFGAGAALQIPFAMQMAYRFNGIGVTQNVLYENQKLIANQFNSAIGKIQDSLSSTASALGKLQDVVNQNAQALNTLVKQLSSNFGAISSVLNDILSRLDKVEAEVQIDRLITGRLQSLQTYVTQQLIRAAEIRASANLAATKMSECVLGQSKRVDFCGKGYHLMSFPQSAPHGVVFLHVTYVCAQEKNFTTAPAICHDGKAHFPREGVFVSNGTHWFVTQRNFYEPQIITTDNTFVSGNCDVVIGIVNNTVYDPLQPELDSGGGSGGGQIYEGKLTAEGLRFGIVASRFNHALVDRLVEGAIDAIVRHGGREEDITLVRVPGSWEIPVAAGELARKEDIDAVIAIGVLIRGATPHFDYIASEVSKGLADLSLELRKPITFGVITADTLEQAIERAGTKHGNKGWEAALSAIEMANLFKSLR

SEQ ID NO: 8129 - protein, 1307 aa, Artificial Sequence
  SARS-CoV-2/USA/CruiseA-23/2020__EPI_ISL_414482 spike protein (1-1147)(P715C_P1069C) LumSynth construct
MFVFLVLLPLVSSQCVNLTTRTQLPPAYTNSFTRGVYYPDKVFRSSVLHSTQDLFLPFFSNVTWFHAIHVSGTNGTKRFDNPVLPFNDGVYFASTEKSNIIRGWIFGTTLDSKTQSLLIVNNATNVVIKVCEFQFCNDPFLGVYYHKNNKSWMESEFRVYSSANNCTFEYVSQPFLMDLEVKQGNFKNLREFVFKNIDGYFKIYSKHTPINLVRDLPQGFSALEPLVDLPIGINITRFQTLLALHRSYLTPGDSSSGWTAGAAAYYVGYLQPRTFLLKYNENGTITDAVDCALDPLSETKCTLKSFTVEKGIYQTSNFRVQPTESIVRFPNITNLCPFGEVFNATRFASVYAWNRKRISNCVADYSVLYNSASFSTFKCYGVSPTKLNDLCFTNVYADSFVIRGDEVRQIAPGQTGKIADYNYKLPDDFTGCVIAWNSNNLDSKVGGNYNYLYRLFRKSNLKPFERDISTEIYQAGSTPCNGVEGFNCYFPLQSYGFQPTNGVGYQPYRVVVLSFELLHAPATVCGPKKSTNLVKNKCVNFNFNGLTGTGVLTESNKKFLPFQQFGRDIADTTDAVRDPQTLEILDITPCSFGGVSVITPGTNTSNQVAVLYQDVNCTEVPVAIHADQLTPTWRVYSTGSNVFQTRAGCLIGAEHVNNSYECDIPIGAGICASYQTQTNSPRRARSVASQSIIAYTMSLGAENSVAYSNNSIAICTNFTISVTTEILPVSMTKTSVDCTMYICGDSTECSNLLLQYGSFCTQLNRALTGIAVEQDKNTQEVFAQVKQIYKTPPIKDFGGFNFSQILPDPSKPSKRSFIEDLLFNKVTLADAGFIKQYGDCLGDIAARDLICAQKFNGLTVLPPLLTDEMIAQYTSALLAGTITSGWTFGAGAALQIPFAMQMAYRFNGIGVTQNVLYENQKLIANQFNSAIGKIQDSLSSTASALGKLQDVVNQNAQALNTLVKQLSSNFGAISSVLNDILSRLDKVEAEVQIDRLITGRLQSLQTYVTQQLIRAAEIRASANLAATKMSECVLGQSKRVDFCGKGYHLMSFPQSAPHGVVFLHVTYVCAQEKNFTTAPAICHDGKAHFPREGVFVSNGTHWFVTQRNFYEPQIITTDNTFVSGNCDVVIGIVNNTVYDPLQPELDSGGGSGGGQIYEGKLTAEGLRFGIVASRFNHALVDRLVEGAIDAIVRHGGREEDITLVRVPGSWEIPVAAGELARKEDIDAVIAIGVLIRGATPHFDYIASEVSKGLADLSLELRKPITFGVITADTLEQAIERAGTKHGNKGWEAALSAIEMANLFKSLR

SEQ ID NO: 8130 - protein, 1307 aa, Artificial Sequence
  SARS-CoV-2/Hong Kong/case85_VM20002868/2020__EPI_ISL_414519 spike protein (1-1147)(P715C_P1069C) LumSynth construct
MFVFLVLVPLVSSQCVNLTTRTQLPPAYTNSFTRGVYYPDKVFRSSVLHSTQDLFLPFFSNVTWFHAIHVSGTNGTKRFDNPVLPFNDGVYFASTEKSNIIRGWIFGTTLDSKTQSLLIVNNATNVVIKVCEFQFCNDPFLGVYYHKNNKSWMESEFRVYSSANNCTFEYVSQPFLMDLEGKQGNFKNLREFVFKNIDGYFKIYSKHTPINLVRDLPQGFSALEPLVDLPIGINITRFQTLLALHRSYLTPGDSSSGWTAGAAAYYVGYLQPRTFLLKYNENGTITDAVDCALDPLSETKCTLKSFTVEKGIYQTSNFRVQPTESIVRFPNITNLCPFGEVFNATRFASVYAWNRKRISNCVADYSVLYNSASFSTFKCYGVSPTKLNDLCFTNVYADSFVIRGDEVRQIAPGQTGKIADYNYKLPDDFTGCVIAWNSNNLDSKVGGNYNYLYRLFRKSNLKPFERDISTEIYQAGSTPCNGVEGFNCYFPLQSYGFQPTNGVGYQPYRVVVLSFELLHAPATVCGPKKSTNLVKNKCVNFNFNGLTGTGVLTESNKKFLPFQQFGRDIADTTDAVRDPQTLEILDITPCSFGGVSVITPGTNTSNQVAVLYQDVNCTEVPVAIHADQLTPTWRVYSTGSNVFQTRAGCLIGAEHVNNSYECDIPIGAGICASYQTQTNSPRRARSVASQSIIAYTMSLGAENSVAYSNNSIAICTNFTISVTTEILPVSMTKTSVDCTMYICGDSTECSNLLLQYGSFCTQLNRALTGIAVEQDKNTQEVFAQVKQIYKTPPIKDFGGFNFSQILPDPSKPSKRSFIEDLLFNKVTLADAGFIKQYGDCLGDIAARDLICAQKFNGLTVLPPLLTDEMIAQYTSALLAGTITSGWTFGAGAALQIPFAMQMAYRFNGIGVTQNVLYENQKLIANQFNSAIGKIQDSLSSTASALGKLQDVVNQNAQALNTLVKQLSSNFGAISSVLNDILSRLDKVEAEVQIDRLITGRLQSLQTYVTQQLIRAAEIRASANLAATKMSECVLGQSKRVDFCGKGYHLMSFPQSAPHGVVFLHVTYVCAQEKNFTTAPAICHDGKAHFPREGVFVSNGTHWFVTQRNFYEPQIITTDNTFVSGNCDVVIGIVNNTVYDPLQPELDSGGGSGGGQIYEGKLTAEGLRFGIVASRFNHALVDRLVEGAIDAIVRHGGREEDITLVRVPGSWEIPVAAGELARKEDIDAVIAIGVLIRGATPHFDYIASEVSKGLADLSLELRKPITFGVITADTLEQAIERAGTKHGNKGWEAALSAIEMANLFKSLR

SEQ ID NO: 8131 - protein, 1307 aa, Artificial Sequence; identical to SEQ ID NO: 8121
  SARS-CoV-2/England/200990660/2020__EPI_ISL_414523 spike protein (1-1147)(P715C_P1069C) LumSynth construct

SEQ ID NO: 8132 - protein, 1307 aa, Artificial Sequence
  SARS-CoV-2/Australia/NSW09/2020__EPI_ISL_413595 spike protein (1-1147)(P715C_P1069C) LumSynth construct
MFVFLVLLPLVSSQCVNLTTRTQLPPAYTNSFTRGVYYPDKVFRSSVLHSTQDLFLPFFSNVTWFHAIHVSGTNGTKRFDNPVLPFNDGVYFASTEKSNIIRGWIFGTTLDSKTQSLLIVNNATNVVIKVCEFQFCNDPFLGVYYHKNNKSWMESEFRVYSSANNCTFEYVSQPFLMDLEGKQGNFKNLREFVFKNIDGYFKIYSKHTPINLVRDLPQGFSALEPLVDLPIGINITRFQTLLALHRSYLTPGDSSSGWTAGAAAYYVGYLQPRTFLLKYNENGTITDAVDCALDPLSETKCTLKSFTVEKGIYQTSNFRVQPTESIVRFPNITNLCPFGEVFNATRFASVYAWNRKRISNCVADYSVLYNSASFSTFKCYGVSPTKLNDLCFTNVYADSFVIRGDEVRQIAPGQTGKIADYNYKLPDDFTGCVIAWNSNNLDSKVGGNYNYLYRLFRKSNLKPFERDISTEIYQAGSTPCNGVEGFNCYFPLQSYGFQPTNGVGYQPYRVVVLSFELLHAPATVCGPKKSTNLVKNKCVNFNFNGLTGTGVLTESNKKFLPFQQFGRDIADTTDAVRDPQTLEILDITPCSFGGVSVITPGTNTSNQVAVLYQDVNCTEVPVAIHADQLTPTWRVYSTGSNVFQTRAGCLIGAEHVNNSYECDIPIGAGICASYQTQTNSPRRARSVASQSIIAYTMSLGAENSVAYSNNSIAICTNFTISVTTEILPVSMTKTSVDCTMYICGDSTECSNLLLQYGSFCTQLNRALTGIAVEQDKNTQEVFAQVKQIYKTPPIKDFGGFNFSQILPDPSKPSKRSFIEDLLFNKVTLADAGFIKQYGDCLGDIAARDLICAQKFNGLTVLPPLLTDEMIAQYTSALLAGTITSGWTFGAGAALQIPFAMQMAYRFNGIGVTQNVLYENQKLIANQFNSAIGKIQDSLSFTASALGKLQDVVNQNAQALNTLVKQLSSNFGAISSVLNDILSRLDKVEAEVQIDRLITGRLQSLQTYVTQQLIRAAEIRASANLAATKMSECVLGQSKRVDFCGKGYHLMSFPQSAPHGVVFLHVTYVCAQEKNFTTAPAICHDGKAHFPREGVFVSNGTHWFVTQRNFYEPQIITTDNTFVSGNCDVVIGIVNNTVYDPLQPELDSGGGSGGGQIYEGKLTAEGLRFGIVASRFNHALVDRLVEGAIDAIVRHGGREEDITLVRVPGSWEIPVAAGELARKEDIDAVIAIGVLIRGATPHFDYIASEVSKGLADLSLELRKPITFGVITADTLEQAIERAGTKHGNKGWEAALSAIEMANLFKSLR

SEQ ID NO: 8133 - protein, 1307 aa, Artificial Sequence; identical to SEQ ID NO: 8113
  SARS-CoV-2/Australia/NSW10/2020__EPI_ISL_413596 spike protein (1-1147)(P715C_P1069C) LumSynth construct

SEQ ID NO: 8134 - protein, 1307 aa, Artificial Sequence
  SARS-CoV-2/Switzerland/1000477797/2020__EPI_ISL_413023 spike protein (1-1147)(P715C_P1069C) LumSynth construct
MFVFLVLLPLVSSQCVNLTTRTQLPPAYTNSFTRGVYYPDKVFRSSVLHSTQDLFLPFFSNVTWFHAIHVSGTNGTKRFDNPVLPFNDGVYFASTEKSNIIRGWIFGTTLDSKTQSLLIVNNATNVVIKVCEFQFCNDPFLGVYYHKNNKSWMESEFRVYSSANNCTFEYVSQPFLMDLEGKQGNFKNLREFVFKNIDGYFNIYSKHTPINLVRDLPQGFSALEPLVDLPIGINITRFQTLLALHRSYLTPGDSSSGWTAGAAAYYVGYLQPRTFLLKYNENGTITDAVDCALDPLSETKCTLKSFTVEKGIYQTSNFRVQPTESIVRFPNITNLCPFGEVFNATRFASVYAWNRKRISNCVADYSVLYNSASFSTFKCYGVSPTKLNDLCFTNVYADSFVIRGDEVRQIAPGQTGKIADYNYKLPDDFTGCVIAWNSNNLDSKVGGNYNYLYRLFRKSNLKPFERDISTEIYQAGSTPCNGVEGFNCYFPLQSYGFQPTNGVGYQPYRVVVLSFELLHAPATVCGPKKSTNLVKNKCVNFNFNGLTGTGVLTESNKKFLPFQQFGRDIADTTDAVRDPQTLEILDITPCSFGGVSVITPGTNTSNQVAVLYQGVNCTEVPVAIHADQLTPTWRVYSTGSNVFQTRAGCLIGAEHVNNSYECDIPIGAGICASYQTQTNSPRRARSVASQSIIAYTMSLGAENSVAYSNNSIAICTNFTISVTTEILPVSMTKTSVDCTMYICGDSTECSNLLLQYGSFCTQLNRALTGIAVEQDKNTQEVFAQVKQIYKTPPIKDFGGFNFSQILPDPSKPSKRSFIEDLLFNKVTLADAGFIKQYGDCLGDIAARDLICAQKFNGLTVLPPLLTDEMIAQYTSALLAGTITSGWTFGAGAALQIPFAMQMAYRFNGIGVTQNVLYENQKLIANQFNSAIGKIQDSLSSTASALGKLQDVVNQNAQALNTLVKQLSSNFGAISSVLNDILSRLDKVEAEVQIDRLITGRLQSLQTYVTQQLIRAAEIRASANLAATKMSECVLGQSKRVDFCGKGYHLMSFPQSAPHGVVFLHVTYVCAQEKNFTTAPAICHDGKAHFPREGVFVSNGTHWFVTQRNFYEPQIITTDNTFVSGNCDVVIGIVNNTVYDPLQPELDSGGGSGGGQIYEGKLTAEGLRFGIVASRFNHALVDRLVEGAIDAIVRHGGREEDITLVRVPGSWEIPVAAGELARKEDIDAVIAIGVLIRGATPHFDYIASEVSKGLADLSLELRKPITFGVITADTLEQAIERAGTKHGNKGWEAALSAIEMANLFKSLR

SEQ ID NO: 8135 - protein, 1307 aa, Artificial Sequence
  SARS-CoV-2/Belgium/BA-02291/2020__EPI_ISL_415159 spike protein (1-1147)(P715C_P1069C) LumSynth construct
MFVFLVLLPLVSSQCVNLTTRTQLPPAYTNSFTRGVYYPDKVFRSSVLHSTQDLFLPFFSNVTWFHAIHVSGTNGTKRFDNPVLPFNDGVYFASTEKSNIIRGWIFGTTLDSKTQSLLIVNNATNVVIKVCEFQFCNDPFLGVYYHKNNKSWMESEFRVYSSANNCTFEYVSQPFLMDLEGKQGNFKNLREFVFKNIDGYFKIYSKHTPINLVRDLPQGFSALEPLVDLPIGINITRFQTLLALHRSYLTPGDSSSGWTAGAAAYYVGYLQPRTFLLKYNENGTITDAVDCALDPLSETKCTLKSFTVEKGIYQTSNFRVQPTESIVRFPNITNLCPFGEVFNATRFASVYAWNRKRISNCVADYSVLYNSASFSTFKCYGVSPTKLNDLCFTNVYADSFVIRGDEVRQIAPGQTGKIADYNYKLPDDFTGCVIAWNSNNLDSKVGGNYNYLYRLFRRSNLKPFERDISTEIYQAGSTPCNGVEGFNCYFPLQSYGFQPTNGVGYQPYRVVVLSFELLPAPATVCGPKKSTNLVKNKCVNFNFNGLTGTGVLTESNKKFLPFQQFGRDIADTTDAVRDPQTLEILDITPCSFGGVSVITPGTNTSNQVAVLYQGVNCTEVPVAIHADQLTPTWRVYSTGSNVFQTRAGCLIGAEHVNNSYECDIPIGAGICASYQTQTNSPRRARSVASQSIIAYTMSLGAENSVAYSNNSIAICTNFTISVTTEILPVSMTKTSVDCTMYICGDSTECSNLLLQYGSFCTQLNRALTGIAVEQDKNTQEVFAQVKQIYKTPPIKDFGGFNFSQILPDPSKPSKRSFIEDLLFNKVTLADAGFIKQYGDCLGDIAARDLICAQKFNGLTVLPPLLTDEMIAQYTSALLAGTITSGWTFGAGAALQIPFAMQMAYRFNGIGVTQNVLYENQKLIANQFNSAIGKIQDSLSSAAPALGKLQDVVNQNAQALNTLVKQLSSNFGAISSVLNDILSRLDKVEAEVQIDRLITGRLQSLQTYVTQQLIRAAEIRASANLAATKMSECVLGQSKRVDFCGKGYHLMSFPQSAPHGVVFLHVTYVCAQEKNFTTAPAICHDGKAHFPREGVFVSNGTHWFVTQRNFYEPQIITTDNTFVSGNCDVVIGIVNNTVYDPLQPELDSGGGSGGGQIYEGKLTAEGLRFGIVASRFNHALVDRLVEGAIDAIVRHGGREEDITLVRVPGSWEIPVAAGELARKEDIDAVIAIGVLIRGATPHFDYIASEVSKGLADLSLELRKPITFGVITADTLEQAIERAGTKHGNKGWEAALSAIEMANLFKSLR

SEQ ID NO: 8136 - protein, 1307 aa, Artificial Sequence
  SARS-CoV-2/USA/WA8-UW5/2020__EPI_ISL_413486 spike protein (1-1147)(P715C_P1069C) LumSynth construct
MFVFLVLLPLVSSQCVNLTTRTQLPPAYTNSFTRGVYYPDKVFRSSVLHSTQDLFLPFFSNVTWFHAIHVSGTNGTKRFDNPVLPFNDGVYFASTEKSNIIRGWIFGTTLDSKTQSLLIVNNATNVVIKVCEFQFCNDPFLGVYYHKNNKSWMESEFRVYSSANNCTFEYVSQPFLMDLEGKQGNFKNLREFVFKNIDGYFKIYSKHTPINLVRDLPQGFSALEPLVDLPIGINITRFQTLLALHRSYLTPGDSSSGWTAGAAAYYVGYLQPRTFLLKYNENGTITDAVDCALDPLSETKCTLKSFTVEKGIYQTSNFRVQPTESIVRFPNITNLCPFGEVFNATRFASVYAWNRKRISNCVADYSVLYNSASFSTFKCYGVSPTKLNDLCFTNVYADSFVIRGDEVRQIAPGQTGKIADYNYKLPDDFTGCVIAWNSNNLDSKVGGNYNYLYRLFRKSNLKPFERDISTEIYQAGSTPCNGVEGFNCYFPLQSYGFQPTNGVGYQPYRVVVLSFELLHAPATVCGPKKSTNLVKNKCVNFNFNGLTGTGVLTESNKKFLPFQQFGRDIADTTDAVRDPQTLEILDITPCSFGGVSVITPGTNTSNQVAVLYQDVNCTEVPVAIHADQLTPTWRVYSTGSNVFQTRAGCLIGAEYVNNSYECDIPIGAGICASYQTQTNSPRRARSVASQSIIAYTMSLGAENSVAYSNNSIAICTNFTISVTTEILPVSMTKTSVDCTMYICGDSTECSNLLLQYGSFCTQLNRALTGIAVEQDKNTQEVFAQVKQIYKTPPIKDFGGFNFSQILPDPSKPSKRSFIEDLLFNKVTLADAGFIKQYGDCLGDIAARDLICAQKFNGLTVLPPLLTDEMIAQYTSALLAGTITSGWTFGAGAALQIPFAMQMAYRFNGIGVTQNVLYENQKLIANQFNSAIGKIQDSLSSTASALGKLQDVVNQNAQALNTLVKQLSSNFGAISSVLNDILSRLDKVEAEVQIDRLITGRLQSLQTYVTQQLIRAAEIRASANLAATKMSECVLGQSKRVDFCGKGYHLMSFPQSAPHGVVFLHVTYVCAQEKNFTTAPAICHDGKAHFPREGVFVSNGTHWFVTQRNFYEPQIITTDNTFVSGNCDVVIGIVNNTVYDPLQPELDSGGGSGGGQIYEGKLTAEGLRFGIVASRFNHALVDRLVEGAIDAIVRHGGREEDITLVRVPGSWEIPVAAGELARKEDIDAVIAIGVLIRGATPHFDYIASEVSKGLADLSLELRKPITFGVITADTLEQAIERAGTKHGNKGWEAALSAIEMANLFKSLR

SEQ ID NO: 8137 - protein, 1307 aa, Artificial Sequence
  SARS-CoV-2/England/20102000506/2020__EPI_ISL_415147 spike protein (1-1147)(P715C_P1069C) LumSynth construct
MFVFLVLLPLVSSQCVNLTTRTQLPPAYTNSFTRGVYYPDKVFRSSVLHSTQDLFLPFFSNVTWFHAIHVSGTNGTKRFDNPVLPFNDGVYFASTEKSNIIRGWIFGTTLDSKTQSLLIVNNATNVVIKVCEFQFCNDPFLGVYYHKNNKSWMESEFRVYSSANNCTFEYVSQPFLMDLEGKQGNFKNLREFVFKNIDGYFKIYSKHTPINLVRDLPQGFSALEPLVDLPIGINITRFQTLLALHRSYLTPGDSSSGWTAGAAAYYVGYLQPRTFLLKYNENGTITDAVDCALDPLSETKCTLKSFTVEKGIYQTSNFRVQPTESIVRFPNITNLCPFGEVFNATRFASVYAWNRKRISNCVADYSVLYNSASFSTFKCYGVSPTKLNDLCFTNVYADSFVIRGDEVRQIAPGQTGKIADYNYKLPDDFTGCVIAWNSNNLDSKVGGNYNYLYRLFRKSNLKPFERDISTEIYQAGSTPCNGVEGFNCYFPLQSYGFQPTNGVGYQPYRVVVLSFELLHAPATVCGPKKSTNLVKNKCVNFNFNGLTGTGVLTESNKKFLPFQQFGRDIADTTDAVRDPQTLEILDITPCSFGGVSVITPGTNTSNQVAVLYQGVNCTEVPVAIHADQLTPTWRVYSTGSNVFQTRAGCLIGAEHVNNSYECDIPIGAGICASYQTQTNSPRRARSVASQSIIAYTMSLGAENSVAYSNNSIAICTNFTISVTTEILPVSMTKTSVDCTMYICGDSTECSNLLLQYGSFCTQLNRALTGIAVEQDKNTQEVFAQVKQIYKTPPIKDFGGFNFSQILPDPSKPSKRSFIEDLLFNKVTLADAGFIKQYGYCLGDIAARDLICAQKFNGLTVLPPLLTDEMIAQYTSALLAGTITSGWTFGAGAALQIPFAMQMAYRFNGIGVTQNVLYENQKLIANQFNSAIGKIQDSLSSTASALGKLQDVVNQNAQALNTLVKQLSSNFGAISSVLNDILSRLDKVEAEVQIDRLITGRLQSLQTYVTQQLIRAAEIRASANLAATKMSECVLGQSKRVDFCGKGYHLMSFPQSAPHGVVFLHVTYVCAQEKNFTTAPAICHDGKAHFPREGVFVSNGTHWFVTQRNFYEPQIITTDNTFVSGNCDVVIGIVNNTVYDPLQPELDSGGGSGGGQIYEGKLTAEGLRFGIVASRFNHALVDRLVEGAIDAIVRHGGREEDITLVRVPGSWEIPVAAGELARKEDIDAVIAIGVLIRGATPHFDYIASEVSKGLADLSLELRKPITFGVITADTLEQAIERAGTKHGNKGWEAALSAIEMANLFKSLR

SEQ ID NO: 8138 - protein, 1307 aa, Artificial Sequence
  SARS-CoV-2/Belgium/VAG-03013/2020__EPI_ISL_415155 spike protein (1-1147)(P715C_P1069C) LumSynth construct
MFVFLVLLPLVSSQCVNLTTRTQLPPAYTNSFTRGVYYPDKVFRSSVLHSTQDLFLPFFSNVTWFHAIHVSGTNGTKRFDNPVLPFNDGVYFASTEKSNIIRGWIFGTTLDSKTQSLLIVNNATNVVIKVCEFQFCNDPFLGVYYHKNNKSWMESEFRVYSSANNCTFEYVSQPFLMDLEGKQGNFKNLREFVFKNIDGYFKIYSKHTPINLVRDLPQGFSALEPLVDLPIGINITRFQTLLALHRSYLTPGDSSSGWTAGAAAYYVGYLQPRTFLLKYNENGTITDAVDCALDPLSETKCTLKSFTVEKGIYQTSNFRVQPTESIVRFPNITNLCPFGEVFNATRFASVYAWNRKRISNCVADYSVLYNSASFSTFKCYGVSPTKLNDLCFTNVYADSFVIRGDEVRQIAPGQTGKIADYNYKLPDDFTGCVIAWNSNNLDSKVGGNYNYLYRLFRKSNLKPFERDISTEIYQAGSTPCNGVEGFNCYFPLQSYGFQPTNGVGYQPYRVVVLSFELLHAPATVCGPKKSTNLVKNKCVNFNFNGLTGTGVLTESNKKFLPFQQFGRDIADTTDAVRDPQTLEILDITPCSFGGVSVITPGTNTSNQVAVLYQGVNCTEVPVAIHADQLTPTWRVYSTGSNVFQTRAGCLIGAEHVNNSYECDIPIGAGICASYQTQTNSPRRARSVASQSIIAYTMSLGAENSVAYSNNSIAICTNFTISVTTEILPVSMTKTSVDCTMYICGDSTECSNLLLQYGSFCTQLNRALTGIAVEQDKNTQEVFAQVKQIYKTPPIKDFGGFNFSQILPDPSKPSKRSFIEDLLFNKVTLADAGFIKQYGDCLGDIAARDLICAQKFNGLTVLPPLLTDEMIAQYTSALLAGTITSGWTFGAGAALQIPFAMQMAYRFNGIGVTQNVLYENQKLIANQFNSAIGKIQDSLSSTATALGKLQDVVNQNAQALNTLVKQLSSNFGAISSVLNDILSRLDKVEAEVQIDRLITGRLQSLQTYVTQQLIRAAEIRASANLAATKMSECVLGQSKRVDFCGKGYHLMSFPQSAPHGVVFLHVTYVCAQEKNFTTAPAICHDGKAHFPREGVFVSNGTHWFVTQRNFYEPQIITTDNTFVSGNCDVVIGIVNNTVYDPLQPELDSGGGSGGGQIYEGKLTAEGLRFGIVASRFNHALVDRLVEGAIDAIVRHGGREEDITLVRVPGSWEIPVAAGELARKEDIDAVIAIGVLIRGATPHFDYIASEVSKGLADLSLELRKPITFGVITADTLEQAIERAGTKHGNKGWEAALSAIEMANLFKSLR

SEQ ID NO: 8139 - protein, 1307 aa, Artificial Sequence
  SARS-CoV-2/Belgium/BC-03016/2020__EPI_ISL_415157 spike protein (1-1147)(P715C_P1069C) LumSynth construct
MFVFLVLLPLVSSQCVNLTTRTQLPPAYTNSFTRGVYYPDKVFRSSVLHSTQDLFLPFFSNVTWFHAIHVSGTNGTKRFDNPVLPFNDGVYFASTEKSNIIRGWIFGTTLDSKTQSLLIVNNATNVVIKVCEFQFCNDPFLGVYYHKNNKSWMESEFRVYSSANNCTFEYVSQPFLMDLEGKQGNFKNLREFVFKNIDGYFKIYSKHTPINLVRDLPQGFSALEPLVDLPIGINITRFQTLLALHRSYLTPGDSSSGWTAGAAAYYVGYLQPRTFLLKYNENGTITDAVDCALDPLSETKCTLKSFTVEKGIYQTSNFRVQPTESIVRFPNITNLCPFGEVFNATRFASVYAWNRKRISNCVADYSVLYNSASFSTFKCYGVSPTKLNDLCFTNVYADSFVIRGDEVRQIAPGQTGKIADYNYKLPDDFTGCVIAWNSNNLDSKVGGNYNYLYRLFRKSNLKPFERDISTEIYQAGSTPCNGVEGFNCYFPLQSYGFQPTNGVGYQPYRVVVLSFELLHAPATVCGPKKSTNLVKNKCVNFNFNGLTGTGVLTESNKKFLPFQQFGRDIADTTDAVRDPQTLEILDITPCSFGGVSVITPGTNTSNQVAVLYQGVNCTEVPVAIHADQLTPTWRVYSTGSNVFQTRAGCLIGAEHVNNSYECDIPIGAGICASYQTQTNSPRRARSVASQSIIAYTMSLGAENSVAYSNNSIAICTNFTISVTTEILPVSMTKTSVDCTMYICGDSTECSNLLLQYGSFCTQLNRALTGIAVEQDKNTQEVFAQVKQIYKTPPIKDFGGFNFSQILPDPSKPSKRSFIEDLLFNKVTLADAGFIKQYGDCLGDIAARDLICAQKFNGLTVLPPLLTDEMIAQYTSALLAGTITSGWTFGAGAALQIPFAMQMAYRFNGIGVTQNVLYENQKLIANQFNSAIGKIQDSLSSTAPALGKLQDVVNQNAQALNTLVKQLSSNFGAISSVLNDILSRLDKVEAEVQIDRLITGRLQSLQTYVTQQLIRAAEIRASANLAATKMSECVLGQSKRVDFCGKGYHLMSFPQSAPHGVVFLHVTYVCAQEKNFTTAPAICHDGKAHFPREGVFVSNGTHWFVTQRNFYEPQIITTDNTFVSGNCDVVIGIVNNTVYDPLQPELDSGGGSGGGQIYEGKLTAEGLRFGIVASRFNHALVDRLVEGAIDAIVRHGGREEDITLVRVPGSWEIPVAAGELARKEDIDAVIAIGVLIRGATPHFDYIASEVSKGLADLSLELRKPITFGVITADTLEQAIERAGTKHGNKGWEAALSAIEMANLFKSLR

SEQ ID NO: 8140 - protein, 1307 aa, Artificial Sequence
  SARS-CoV-2/Germany/BavPat3/2020__EPI_ISL_414521 spike protein (1-1147)(P715C_P1069C) LumSynth construct
MFVFLVLLPLVSSQCVNLTTRTQLPPAYTNSFTRGVYYPDKVFRSSVLHSTQDLFLPFFSNVTWFHAIHVSGTNGTKRFDNPVLPFNDGVYFASTEKSNIIRGWIFGTTLDSKTQSLLIVNNATNVVIKVCEFQFCNDPFLGVYYHKNNKSWMESEFRVYSSANNCTFEYVSQPFLMDLEGKQGNFKNLREFVFKNIDGYFKIYSKHTPINLVRDLPQGFSALEPLVDLPIGINITRFQTLLALHRSYLTPGDSSSGWTAGAAAYYVGYLQPRTFLLKYNENGTITDAVDCALDPLSETKCTLKSFTVEKGIYQTSNFRVQPTESIVRFPNITNLCPFGEVFNATRFASVYAWNRKRISNCVADYSVLYNSASFSTFKCYGVSPTKLNDLCFTNVYADSFVIRGDEVRQIAPGQTGKIADYNYKLPDDFTGCVIAWNSNNLDSKVGGNYNYLYRLFRKSNLKPFERDISTEIYQAGSTPCNGVEGFNCYFPLQSYGFQPTNGVGYQPYRVVVLSFELLHAPATVCGPKKSTNLVKNKCVNFNFNGLTGTGVLTESNKKFLPFQQFGRDIADTTDAVRDPQTLEILDITPCSFGGVSVITPGTNTSNQVAVLYQDVNCTEVPVAIHADQLTPTWRVYSTGSNVFQTRAGCLIGAEHVNNSYECDIPIGAGICASYQTQTNSPRRARSVASQSIIAYTMSLGAENSVAYSNNSIAICTNFTISVTTEILPVSMTKTSVDCTMYICGDSTECSNLLLQYGSFCTQLNRALTGIAVEQDKNTQQVFAQVKQIYKTPPIKDFGGFNFSQILPDPSKPSKRSFIEDLLFNKVTLADAGFIKQYGDCLGDIAARDLICAQKFNGLTVLPPLLTDEMIAQYTSALLAGTITSGWTFGAGAALQIPFAMQMAYRFNGIGVTQNVLYENQKLIANQFNSAIGKIQDSLSSTASALGKLQDVVNQNAQALNTLVKQLSSNFGAISSVLNDILSRLDKVEAEVQIDRLITGRLQSLQTYVTQQLIRAAEIRASANLAATKMSECVLGQSKRVDFCGKGYHLMSFPQSAPHGVVFLHVTYVCAQEKNFTTAPAICHDGKAHFPREGVFVSNGTHWFVTQRNFYEPQIITTDNTFVSGNCDVVIGIVNNTVYDPLQPELDSGGGSGGGQIYEGKLTAEGLRFGIVASRFNHALVDRLVEGAIDAIVRHGGREEDITLVRVPGSWEIPVAAGELARKEDIDAVIAIGVLIRGATPHFDYIASEVSKGLADLSLELRKPITFGVITADTLEQAIERAGTKHGNKGWEAALSAIEMANLFKSLR

SEQ ID NO: 8141 - protein, 1307 aa, Artificial Sequence
  SARS-CoV-2/France/HF1805/2020__EPI_ISL_414628 spike protein (1-1147)(P715C_P1069C) LumSynth construct
MFVFLVLLPLVSSQCVNLTTRTQLPPAYTNSFTRGVYYPDKVFRSSVLHSTQDLFLPFFSNVTWFHAIHVSGTNGTKRFDNPVLPFNDGVYFASTEKSNIIRGWIFGTTLDSKTQSLLIVNNATNVVIKVCEFQFCNDPFLGVYYHKNNKSWMESEFRVYSSANNCTFEYVSQPFLMDLEGKQGNFKNLREFVFKNIDGYFKIYSKHTPINLVRDLPQGFSALEPLVDLPIGINITRFQTLLALHRSYLTPGDSSSGWTAGAAAYYVGYLQPRTFLLKYNENGTITDAVDCALDPLSETKCTLKSFTVEKGIYQTSNFRVQPTESIVRFPNITNLCPFGEVFNATRFASVYAWNRKRISNCVADYSVLYNSASFSTFKCYGVSPTKLNDLCFTNVYADSFVIRGDEVRQIAPGQTGKIADYNYKLPDDFTGCVIAWNSNNLDSKVGGNYNYLYRLFRKSNLKPFERDISTEIYQAGSTPCNGVEGFNCYFPLQSYGFQPTNGVGYQPYRVVVLSFELLHAPATVCGPKKSTNLVKNKCVNFNFNGLTGTGVLTESNKKFLPFQQFGRDIADTTDAVRDPQTLEILDITPCSFGGVSVITPGTNTSNQVAVLYQGVNCTEVPVAIHADQLTPTWRVYSTGSNVFQTRAGCLIGAEHVNNSYECDIPIGAGICASYQTQTNSPRRARSVASQSIIAYTMSLGAENSVAYSNNSIAICTNFTISVTTEILPVSMTKTSVDCTMYICGDSTECSNLLLQYGSFCTQLNRALTGIAVEQDKNTQEVFAQVKQIYKTPPIKDFGGFNFSQILPDPSKPSKRSFIEDLLFNKVTLADAGFIKQYGDCLGDIAARDLICAQKFNGLTVLPPLLTDEMIAQYTSALLAGTITSGWTFGAGAALQIPFAMQMAYRFNGIGVTQNVLYENQKLIANQFNSAIGKIQDSLSSTASALGKLQDVVNQNAQALNTLVKQLSSNFGAISSVLNDILSRLDKVEAEVQIDRLITGRLQSLQTYVTQQLIRAAEIRASANLAATKMSECVLGQSKRVDFCGKGYHLMSFPQSAPHGVVFLHVTYVCAQEKNFTTAPAICHDGKAHFPREGVFVSNGTHWFVTQRNFYEPQIITTDNTFVSGNCDVVIGVVNNTVYDPLQPELDSGGGSGGGQIYEGKLTAEGLRFGIVASRFNHALVDRLVEGAIDAIVRHGGREEDITLVRVPGSWEIPVAAGELARKEDIDAVIAIGVLIRGATPHFDYIASEVSKGLADLSLELRKPITFGVITADTLEQAIERAGTKHGNKGWEAALSAIEMANLFKSLR

SEQ ID NO: 8142 - protein, 1307 aa, Artificial Sequence
  SARS-CoV-2/Netherlands/ZuidHolland_9/2020__EPI_ISL_414445 spike protein (1-1147)(P715C_P1069C) LumSynth construct
MFVFLVLLPLVSSQCVNLTTRTQLPPAYTNSFTRGVYYPDKVFRSSVLHSTQDLFLPFFSNVTWFHAIHVSGTNGTKRFDNPVLPFNDGVYFASTEKSNIIRGWIFGTTLDSKTQSLLIVNNATNVVIKVCEFQFCNDPFLGVYYHKNNKSWMESEFRVYSSANNCTFEYVSQPFLMDLEGKQGNFKNLREFVFKNIDGYFKIYSKHTPINLVRDLPQGFSALEPLVDLPIGINITRFQTLLALHRSYLTPGDSSSGWTAGAAAYYVGYLQPRTFLLKYNENGTITDAVDCALDPLSETKCTLKSFTVEKGIYQTSNFRVQPTESIVRFPNITNLCPFGEVFNATRFASVYAWNRKRISNCVADYSVLYNSASFSTFKCYGVSPTKLNDLCFTNVYADSFVIRGDEVRQIAPGQTGKIADYNYKLPDDFTGCVIAWNSNNLDSKVGGNYNYLYRLFRKSNLKPFERDISTEIYQAGSTPCNGVEGFNCYFPLQSYGFQPTNGVGYQPYRVVVLSFELLHAPATVCGPKKSTNLVKNKCVNFNFNGLTGTGVLTESNKKFLPFQQFGRDIADTTDAVRDPQTLEILDITPCSFGGVSVITPGTNTSNQVAVLYQGVNCTEVPVAIHADQLTPTWRVYSTGSNVFQTRAGCLIGAEHVNNSYECDIPIGAGICASYQTQTNSPRRARSVASQSIIAYTMSLGAENSVAYSNNSIAICTNFTISVTTEILPVSMTKTSVDCTMYICGDSTECSNLLLQYGSFCTQLNRALTGIAVEQDKNTQEVFAQVKQIYKTPPIKDFGGFNFSQILPDPSKPSKRSFIEDLLFNKVTLADAGFIKQYGDCLGDIAARDLICVQKFNGLTVLPPLLTDEMIAQYTSALLAGTITSGWTFGAGAALQIPFAMQMAYRFNGIGVTQNVLYENQKLIANQFNSAIGKIQDSLSSTASALGKLQDVVNQNAQALNTLVKQLSSNFGAISSVLNDILSRLDKVEAEVQIDRLITGRLQSLQTYVTQQLIRAAEIRASANLAATKMSECVLGQSKRVDFCGKGYHLMSFPQSAPHGVVFLHVTYVCAQEKNFTTAPAICHDGKAHFPREGVFVSNGTHWFVTQRNFYEPQIITTDNTFVSGNCDVVIGIVNNTVYDPLQPELDSGGGSGGGQIYEGKLTAEGLRFGIVASRFNHALVDRLVEGAIDAIVRHGGREEDITLVRVPGSWEIPVAAGELARKEDIDAVIAIGVLIRGATPHFDYIASEVSKGLADLSLELRKPITFGVITADTLEQAIERAGTKHGNKGWEAALSAIEMANLFKSLR

SEQ ID NO: 8143 - protein, 1307 aa, Artificial Sequence
  SARS-CoV-2/Finland/FIN03032020A/2020__EPI_ISL_413602 spike protein (1-1147)(P715C_P1069C) LumSynth construct
MFVFLVLLPLVSSQCVNLTTRTQLPPAYTNSFTRGVYYPDKVFRSSVLHSTQDLFLPFFSNVTWFHAIHVSGTNGTKRFDNPVLPFNDGVYFASTEKSNIIRGWIFGTTLDSKTQSLLIVNNATNVVIKVCEFQFCNDPFLGVYYHKNNKSWMESEFRVYSSANNCTFEYVSQPFLMDLEGKQGNFKNLREFVFKNIDGYFKIYSKHTPINLVRDLPQGFSALEPLVDLPIGINITRFQTLLALHRSYLTPGDSSSGWTAGAAAYYVGYLQPRTFLLKYNENGTITDAVDCALDPLSETKCTLKSFTVEKGIYQTSNFRVQPTESIVRFPNITNLCPFGEVFNATRFASVYAWNRKRISNCVADYSVLYNSASFSTFKCYGVSPTKLNDLCFTNVYADSFVIRGDEVRQIAPGQTGKIADYNYKLPDDFTGCVISWNSNNLDSKVGGNYNYLYRLFRKSNLKPFERDISTEIYQAGSTPCNGVEGFNCYFPLQSYGFQPTNGVGYQPYRVVVLSFELLHAPATVCGPKKSTNLVKNKCVNFNFNGLTGTGVLTESNKKFLPFQQFGRDIADTTDAVRDPQTLEILDITPCSFGGVSVITPGTNTSNQVAVLYQGVNCTEVPVAIHADQLTPTWRVYSTGSNVFQTRAGCLIGAEHVNNSYECDIPIGAGICASYQTQTNSPRRARSVASQSIIAYTMSLGAENSVAYSNNSIAICTNFTISVTTEILPVSMTKTSVDCTMYICGDSTECSNLLLQYGSFCTQLNRALTGIAVEQDKNTQEVFAQVKQIYKTPPIKDFGGFNFSQILPDPSKPSKRSFIEDLLFNKVTLADAGFIKQYGDCLGDIAARDLICAQKFNGLTVLPPLLTDEMIAQYTSALLAGTITSGWTFGAGAALQIPFAMQMAYRFNGIGVTQNVLYENQKLIANQFNSAIGKIQDSLSSTASALGKLQDVVNQNAQALNTLVKQLSSNFGAISSVLNDILSRLDKVEAEVQIDRLITGRLQSLQTYVTQQLIRAAEIRASANLAATKMSECVLGQSKRVDFCGKGYHLMSFPQSAPHGVVFLHVTYVCAQEKNFTTAPAICHDGKAHFPREGVFVSNGTHWFVTQRNFYEPQIITTDNTFVSGNCDVVIGIVNNTVYDPLQPELDSGGGSGGGQIYEGKLTAEGLRFGIVASRFNHALVDRLVEGAIDAIVRHGGREEDITLVRVPGSWEIPVAAGELARKEDIDAVIAIGVLIRGATPHFDYIASEVSKGLADLSLELRKPITFGVITADTLEQAIERAGTKHGNKGWEAALSAIEMANLFKSLR

SEQ ID NO: 8144 - protein, 1307 aa, Artificial Sequence
  SARS-CoV-2/France/GE1977/2020__EPI_ISL_414632 spike protein (1-1147)(P715C_P1069C) LumSynth construct
MFVFLVLLPLVSSQCVNLTTRTQLPPAYTNSFTRGVYYPDKVFRSSVLHSTQDLFLPFFSNVTWFHAIHVSGTNGTKRFDNPVLPFNDGVYFASTEKSNIIRGWIFGTTLDSKTQSLLIVNNATNVVIKVCEFQFCNDPFLGVYYHKNNKSWMESEFRVYSSANNCTFEYVSQPFLMDLEGKQGNFKNLREFVFKNIDGYFKIYSKHTPINLVRDLPQGFSALEPLVDLPIGINITRFQTLLALHRSYLTPGDSSSGWTAGAAAYYVGYLQPRTFLLKYNENGTITDAVDCALDPLSETKCTLKSFTVEKGIYQTSNFRVQPTESIVRFPNITNLCPFGEVFNATRFASVYAWNRKRISNCVADYSVLYNSASFSTFKCYGVSPTKLNDLCFTNVYADSFVIRGDEVRQIAPGQTGKIADYNYKLPDDFTGCVIAWNSNNLDSKVGGNYNYLYRLFRKSNLKPFERDISTEIYQAGSTPCNGVEGFNCYFPLQSYGFQPTNGVGYQPYRVVVLSFELLHAPATVCGPKKSTNLVKNKCVNFNFNGLTGTGVLTESNKKFLPFQQFGRDIADTTDAVRDPQTLEILDITPCSFGGVSVITPGTNTSNQVAVLYQGVNCTEVPVAIHADQLTPTWRVYSTGSNVFQTRAGCLIGAEHVNNSYECDIPIGAGICASYQTQTNSPRRARSVASQSIIAYTMSLGAENSVAYSNNSIAICTNFTISVTTEILPVSMTKTSVDCTMYICGDSTECSNLLLQYGSFCTQLNRALTGIAVEQDKNTQEVFAQVKQIYKTPPIKDFGGFNFSQILPDPSKPSKRSFIEDLLFNKVTLADAGFIKQYGDCLGDIAARDLICAQKFNGLTVLPPLLTDEMIAQYTSALLAGTITSGWTFGAGAALQIPFAMQMAYRFNGIGVTQNVLYENQKLIANQFNSAIGKIQDSLFSTASALGKLQDVVNQNAQALNTLVKQLSSNFGAISSVLNDILSRLDKVEAEVQIDRLITGRLQSLQTYVTQQLIRAAEIRASANLAATKMSECVLGQSKRVDFCGKGYHLMSFPQSAPHGVVFLHVTYVCAQEKNFTTAPAICHDGKAHFPREGVFVSNGTHWFVTQRNFYEPQIITTDNTFVSGNCDVVIGIVNNTVYDPLQPELDSGGGSGGGQIYEGKLTAEGLRFGIVASRFNHALVDRLVEGAIDAIVRHGGREEDITLVRVPGSWEIPVAAGELARKEDIDAVIAIGVLIRGATPHFDYIASEVSKGLADLSLELRKPITFGVITADTLEQAIERAGTKHGNKGWEAALSAIEMANLFKSLR

SEQ ID NO: 8145 - protein, 1307 aa, Artificial Sequence
  SARS-CoV-2/Finland/FIN-313/2020__EPI_ISL_414641 spike protein (1-1147)(P715C_P1069C) LumSynth construct
MFVFLVLLPLVSSQCVNLTTRTQLPPAYTNSFTRGVYYPDKVFRSSVLHSTQDLFLPFFSNVTWFHAIHVSGTNGTKRFDNPVLPFNDGVYFASTEKSNIIRGWIFGTTLDSKTQSLLIVNNATNVVIKVCEFQFCNDPFLGVYYHKNNKSWMESEFRVYSSANNCTFEYVSQPFLMDLEGKQGNFKNLREFVFKNIDGYFKIYSKHTPINLVRDLPQGFSALEPLVDLPIGINITRFKTLLALHRSYLTPGDSSSGWTAGAAAYYVGYLQPRTFLLKYNENGTITDAVDCALDPLSETKCTLKSFTVEKGIYQTSNFRVQPTESIVRFPNITNLCPFGEVFNATRFASVYAWNRKRISNCVADYSVLYNSASFSTFKCYGVSPTKLNDLCFTNVYADSFVIRGDEVRQIAPGQTGKIADYNYKLPDDFTGCVIAWNSNNLDSKVGGNYNYLYRLFRKSNLKPFERDISTEIYQAGSTPCNGVEGFNCYFPLQSYGFQPTNGVGYQPYRVVVLSFELLHAPATVCGPKKSTNLVKNKCVNFNFNGLTGTGVLTESNKKFLPFQQFGRDIADTTDAVRDPQTLEILDITPCSFGGVSVITPGTNTSNQVAVLYQGVNCTEVPVAIHADQLTPTWRVYSTGSNVFQTRAGCLIGAEHVNNSYECDIPIGAGICASYQTQTNSPRRARSVASQSIIAYTMSLGAENSVAYSNNSIAICTNFTISVTTEILPVSMTKTSVDCTMYICGDSTECSNLLLQYGSFCTQLNRALTGIAVEQDKNTQEVFAQVKQIYKTPPIKDFGGFNFSQILPDPSKPSKRSFIEDLLFNKVTLADAGFIKQYGDCLGDIAARDLICAQKFNGLTVLPPLLTDEMIAQYTSALLAGTITSGWTFGAGAALQIPFAMQMAYRFNGIGVTQNVLYENQKLIANQFNSAIGKIQDSLSSTASALGKLQDVVNQNAQALNTLVKQLSSNFGAISSVLNDILSRLDKVEAEVQIDRLITGRLQSLQTYVTQQLIRAAEIRASANLAATKMSECVLGQSKRVDFCGKGYHLMSFPQSAPHGVVFLHVTYVCAQEKNFTTAPAICHDGKAHFPREGVFVSNGTHWFVTQRNFYEPQIITTDNTFVSGNCDVVIGIVNNTVYDPLQPELDSGGGSGGGQIYEGKLTAEGLRFGIVASRFNHALVDRLVEGAIDAIVRHGGREEDITLVRVPGSWEIPVAAGELARKEDIDAVIAIGVLIRGATPHFDYIASEVSKGLADLSLELRKPITFGVITADTLEQAIERAGTKHGNKGWEAALSAIEMANLFKSLR

SEQ ID NO: 8146 - protein, 1307 aa, Artificial Sequence
  SARS-CoV-2/Netherlands/ZuidHolland_2/2020__EPI_ISL_414556 spike protein (1-1147)(P715C_P1069C) LumSynth construct
MFVFLVLLPLVSSQCVNLTTRTQLPPAYTNSFTRGVYYPDKVFRSSVLHSTQDLFLPFFSNVTWFHAIHVSGTNGTKRFDNPVLPFNDGVYFASTEKSNIIRGWIFGTTLDSKTQSLLIVNNATNVVIKVCEFQFCNDPFLGVYYHKNNKSWMESEFRVYSSANNCTFEYVSQPFLMDLEGKQGNFKNLREFVFKNIDGYFKIYSKHTPINLVRDLPQGFSALEPLVDLPIGINITRFQTLLALHRSYLTPGDSSSGWTAGAAAYYVGYLQPRTFLLKYNENGTITDAVDCALDPLSETKCTLKSFTVEKGIYQTSNFRVQPTESIVRFPNITNLCPFGEVFNATRFASVYAWNRKRISNCVADYSVLYNSASFSTFKCYGVSPTKLNDLCFTNVYADSFVIRGDEVRQIAPGQTGKIADYNYKLPDDFTGCVIAWNSNNLDSKVGGNYNYLYRLFRKSNLKPFERDISTEIYQAGSTPCNGVEGFNCYFPLQSYGFQPTNGVGYQPYRVVVLSFELLHAPATVCGPKKSTNLVKNKCVNFNFNGLTGTGVLTESNKKFLPFQQFGRDIADTTDAVRDPQTLEILDITPCSFGGVSVITPGTNTSNQVAVLYQGVNCTEVPVAIHADQLTPTWRVYSTGSNVFQTRAGCLIGAEHVNNSYECDIPIGAGICASYQTQTNSPRRARSVASQSIIAYTMSLGAENSVAYSNNSIAICTNFTISVTTEILPVSMTKTSVDCTMYICGDSTECSNLLLQYGSFCTQLNRALTGIALEQDKNTQEVFAQVKQIYKTPPIKDFGGFNFSQILPDPSKPSKRSFIEDLLFNKVTLADAGFIKQYGDCLGDIAARDLICAQKFNGLTVLPPLLTDEMIAQYTSALLAGTITSGWTFGAGAALQIPFAMQMAYRFNGIGVTQNVLYENQKLIANQFNSAIGKIQDSLSSTASALGKLQDVVNQNAQALNTLVKQLSSNFGAISSVLNDILSRLDKVEAEVQIDRLITGRLQSLQTYVTQQLIRAAEIRASANLAATKMSECVLGQSKRVDFCGKGYHLMSFPQSAPHGVVFLHVTYVCAQEKNFTTAPAICHDGKAHFPREGVFVSNGTHWFVTQRNFYEPQIITTDNTFVSGNCDVVIGIVNNTVYDPLQPELDSGGGSGGGQIYEGKLTAEGLRFGIVASRFNHALVDRLVEGAIDAIVRHGGREEDITLVRVPGSWEIPVAAGELARKEDIDAVIAIGVLIRGATPHFDYIASEVSKGLADLSLELRKPITFGVITADTLEQAIERAGTKHGNKGWEAALSAIEMANLFKSLR

SEQ ID NO: 8147 - protein, 1307 aa, Artificial Sequence
  SARS-CoV-2/USA/WA-UW31/2020__EPI_ISL_414618 spike protein (1-1147)(P715C_P1069C) LumSynth construct
MFVFLVLLPLVSSQCVNLTTRTQLPPAYTNSFTRGVYYPDKVFRSSVLHSTQDLFLPFFSNVTWFHAIHVSGTNGTKRFDNPVLPFNDGVYFASTEKSNIIRGWIFGTTLDSKTQSLLIVNNATNVVIKVCEFQFCNDPFLGVYYHKNNKSWMESEFRVYSSANNCTFEYVSQPFLMDLEGKQGNFKNLREFVFKNIDGYFKIYSKHTPINLVRDLPQGFSALEPLVDLPIGINITRFQTLLALHRSYLTPGDSSSGWTAGAAAYYVGYLQPRTFLLKYNENGTITDAVDCALDPLSETKCTLKSFTVEKGIYQTSNFRVQPTESIVRFPNITNLCPFGEVFNATRFASVYAWNRKRISNCVADYSVLYNSASFSTFKCYGVSPTKLNDLCFTNVYADSFVIRGDEVRQIAPGQTGKIADYNYKLPDDFTGCVIAWNSNNLDSKVGGNYNYLYRLFRKSNLKPFERDISTEIYQAGSTPCNGAEGFNCYFPLQSYGFQPTNGVGYQPYRVVVLSFELLHAPATVCGPKKSTNLVKNKCVNFNFNGLTGTGVLTESNKKFLPFQQFGRDIADTTDAVRDPQTLEILDITPCSFGGVSVITPGTNTSNQVAVLYQDVNCTEVPVAIHADQLTPTWRVYSTGSNVFQTRAGCLIGAEHVNNSYECDIPIGAGICASYQTQTNSPRRARSVASQSIIAYTMSLGAENSVAYSNNSIAICTNFTISVTTEILPVSMTKTSVDCTMYICGDSTECSNLLLQYGSFCTQLNRALTGIAVEQDKNTQEVFAQVKQIYKTPPIKDFGGFNFSQILPDPSKPSKRSFIEDLLFNKVTLADAGFIKQYGDCLGDIAARDLICAQKFNGLTVLPPLLTDEMIAQYTSALLAGTITSGWTFGAGAALQIPFAMQMAYRFNGIGVTQNVLYENQKLIANQFNSAIGKIQDSLSSTASALGKLQDVVNQNAQALNTLVKQLSSNFGAISSVLNDILSRLDKVEAEVQIDRLITGRLQSLQTYVTQQLIRAAEIRASANLAATKMSECVLGQSKRVDFCGKGYHLMSFPQSAPHGVVFLHVTYVCAQEKNFTTAPAICHDGKAHFPREGVFVSNGTHWFVTQRNFYEPQIITTDNTFVSGNCDVVIGIVNNTVYDPLQPELDSGGGSGGGQIYEGKLTAEGLRFGIVASRFNHALVDRLVEGAIDAIVRHGGREEDITLVRVPGSWEIPVAAGELARKEDIDAVIAIGVLIRGATPHFDYIASEVSKGLADLSLELRKPITFGVITADTLEQAIERAGTKHGNKGWEAALSAIEMANLFKSLR

SEQ ID NO: 8148 - protein, 1307 aa, Artificial Sequence
  SARS-CoV-2/South Korea/SNU01/2020__EPI_ISL_411929 spike protein (1-1147)(P715C_P1069C) LumSynth construct
MFVFLVLLPLVSSQCVNLTTRTQLPPAYTNSFTRGVYYPDKVFRSSVLHSTQDLFLPFFSNVTWFHAIHVSGTNGTKRFDNPVLPFNDGVYFASTEKSNIIRGWIFGTTLDSKTQSLLIVNNATNVVIKVCEFQFCNDPFLGVYYHKNNKSWMESEFRVYSSANNCTFEYVSQPFLMDLEGKQGNFKNLREFVFKNIDGYFKIYSKHTPINLVRDLPQGFWALEPLVDLPIGINITRFQTLLALHRSYLTPGDSSSGWTAGAAAYYVGYLQPRTFLLKYNENGTITDAVDCALDPLSETKCTLKSFTVEKGIYQTSNFRVQPTESIVRFPNITNLCPFGEVFNATRFASVYAWNRKRISNCVADYSVLYNSASFSTFKCYGVSPTKLNDLCFTNVYADSFVIRGDEVRQIAPGQTGKIADYNYKLPDDFTGCVIAWNSNNLDSKVGGNYNYLYRLFRKSNLKPFERDISTEIYQAGSTPCNGVEGFNCYFPLQSYGFQPTNGVGYQPYRVVVLSFELLHAPATVCGPKKSTNLVKNKCVNFNFNGLTGTGVLTESNKKFLPFQQFGRDIADTTDAVRDPQTLEILDITPCSFGGVSVITPGTNTSNQVAVLYQDVNCTEVPVAIHADQLTPTWRVYSTGSNVFQTRAGCLIGAEHVNNSYECDIPIGAGICASYQTQTNSPRRARSVASQSIIAYTMSLGAENSVAYSNNSIAICTNFTISVTTEILPVSMTKTSVDCTMYICGDSTECSNLLLQYGSFCTQLNRALTGIAVEQDKNTQEVFAQVKQIYKTPPIKDFGGFNFSQILPDPSKPSKRSFIEDLLFNKVTLADAGFIKQYGDCLGDIAARDLICAQKFNGLTVLPPLLTDEMIAQYTSALLAGTITSGWTFGAGAALQIPFAMQMAYRFNGIGVTQNVLYENQKLIANQFNSAIGKIQDSLSSTASALGKLQDVVNQNAQALNTLVKQLSSNFGAISSVLNDILSRLDKVEAEVQIDRLITGRLQSLQTYVTQQLIRAAEIRASANLAATKMSECVLGQSKRVDFCGKGYHLMSFPQSAPHGVVFLHVTYVCAQEKNFTTAPAICHDGKAHFPREGVFVSNGTHWFVTQRNFYEPQIITTDNTFVSGNCDVVIGIVNNTVYDPLQPELDSGGGSGGGQIYEGKLTAEGLRFGIVASRFNHALVDRLVEGAIDAIVRHGGREEDITLVRVPGSWEIPVAAGELARKEDIDAVIAIGVLIRGATPHFDYIASEVSKGLADLSLELRKPITFGVITADTLEQAIERAGTKHGNKGWEAALSAIEMANLFKSLR

SEQ ID NO: 8149 - protein, 1307 aa, Artificial Sequence
  SARS-CoV-2/China/WF0004/2020__EPI_ISL_413694 spike protein (1-1147)(P715C_P1069C) LumSynth construct
MFVFLVLLPLVSSQCVNLTTRTQLPPAYTNSFTRGVYYPDKVFRSSVLHSTQDLFLPFFSNVTWFHAIHVSGTNGTKRFDNPVLPFNDGVYFASTEKSNIIRGWIFGTTLDSKTQSLLIVNNATNVVIKVCEFQFCNDPFLGVYYHKNNKSWTESEFRVYSSANNCTFEYVSQPFLMDLEGKQGNFKNLREFVFKNIDGYFKIYSKHTPINLVRDLPQGFSALEPLVDLPIGINITRFQTLLALHRSYLTPGDSSSGWTAGAAAYYVGYLQPRTFLLKYNENGTITDAVDCALDPLSETKCTLKSFTVEKGIYQTSNFRVQPTESIVRFPNITNLCPFGEVFNATRFASVYAWNRKRISNCVADYSVLYNSASFSTFKCYGVSPTKLNDLCFTNVYADSFVIRGDEVRQIAPGQTGKIADYNYKLPDDFTGCVIAWNSNNLDSKVGGNYNYLYRLFRKSNLKPFERDISTEIYQAGSTPCNGVEGFNCYFPLQSYGFQPTNGVGYQPYRVVVLSFELLHAPATVCGPKKSTNLVKNKCVNFNFNGLTGTGVLTESNKKFLPFQQFGRDIADTTDAVRDPQTLEILDITPCSFGGVSVITPGTNTSNQVAVLYQDVNCTEVPVAIHADQLTPTWRVYSTGSNVFQTRAGCLIGAEHVNNSYECDIPIGAGICASYQTQTNSPRRARSVASQSIIAYTMSLGAENSVAYSNNSIAICTNFTISVTTEILPVSMTKTSVDCTMYICGDSTECSNLLLQYGSFCTQLNRALTGIAVEQDKNTQEVFAQVKQIYKTPPIKDFGGFNFSQILPDPSKPSKRSFIEDLLFNKVTLADAGFIKQYGDCLGDIAARDLICAQKFNGLTVLPPLLTDEMIAQYTSALLAGTITSGWTFGAGAALQIPFAMQMAYRFNGIGVTQNVLYENQKLIANQFNSAIGKIQDSLSSTASALGKLQDVVNQNAQALNTLVKQLSSNFGAISSVLNDILSRLDKVEAEVQIDRLITGRLQSLQTYVTQQLIRAAEIRASANLAATKMSECVLGQSKRFDFCGKGYHLMSFPQSAPHGVVFLHVTYVCAQEKNFTTAPAICHDGKAHFPREGVFVSNGTHWFVTQRNFYEPQIITTDNTFVSGNCDVVIGIVNNTVYDPLQPELDSGGGSGGGQIYEGKLTAEGLRFGIVASRFNHALVDRLVEGAIDAIVRHGGREEDITLVRVPGSWEIPVAAGELARKEDIDAVIAIGVLIRGATPHFDYIASEVSKGLADLSLELRKPITFGVITADTLEQAIERAGTKHGNKGWEAALSAIEMANLFKSLR

SEQ ID NO: 8150 - protein, 1307 aa, Artificial Sequence
  SARS-CoV-2/China/WF0028/2020__EPI_ISL_413791 spike protein (1-1147)(P715C_P1069C) LumSynth construct
MFVFLVLLPLVSSQCVNLTTRTQLPPAYTNSFTRGVYYPDKVFRSSVLHSTQDLFLPFFSNVTWFHAIHVSGTNGTKRFDNPVLPFNDGVYFASTEKSNIIRGWIFGTTLDSKTQSLLIVNNATNVVIKVCEFQFCNDPFLGVYYHKNNKSWMESEFRVYSSANNCTFEYVSQPFLMDLEGKQGNFKNLREFVFKNIDGYFKIYSKHTPINLVRDLPQGFSALEPLVDLPIGINITRFQTLLALHRSYLTPGDSSSGWTAGAAAYYVGYLQPRTFLLKYNENGTITDAVDCALDPLSETKCTLKSFTVEKGIYQTSNFRVQPTESIVRFPNITNLCPFGEVFNATRFASVYAWNRKRISNCVADYSVLYNSASFSTFKCYGVSPTKLNDLCFTNVYADSFVIRGDEVRQIAPGQTGKIADYNYKLPDDFTGCVIAWNSNNLDSKVGGNYNYLYRLFRKSNLKPFERDISTEIYQAGSTPCNGVEGFNCYFPLQSYGFQPTNGVGYQPYRVVVLSFELLHAPATVCGPKKSTNLVKNKCVNFNFNGLTGTGVLTESNKKFLPFQQFGRDIADTTDAVRDPQTLEILDITPCSFGGVSVITPGTNTSNQVAVLYQDVNCTEVPVAIHADQLTPTWRVYSTGSNVFQTRAGCLIGAEHVNNSYECDIPIGAGICASYQTQTNSPRRARSVASQSIIAYTMSLGAENSVAYSNNSIAICTNFTISVTTEILPVSMTKTSVDCTMYICGDSTECSNLLLQYGSFCTQLNRALTGIAVEQDKNTQEVFAQVKQIYKTPPIKDFGGFNFSQILPDPSKPSKRSFIEDLLFNKVTLADAGFIKQYGDCLGDIAARDLICAQKFNGLTVLPPLLTDEMIAQYTSALLAGTITSGWTFGAGAALQIPFAMQMAYRFNGIGVTQNVLYENQKLIANQFNSAIGKIQDSLSSTASALGKLQDVVNQNAQALNTLVKQLSSNFGAISSVLNDILSRLDKVEAEVQIDRLITGRLQSLQTYVTQQLIRAAEIRASANLAATKMSECVLGQSKRVDFCGKGYHLMSFPQSAPHGVVFLHVTYVCAQEKNFTTAPAICHDGKAHFPREGVFVSNGTHWFVTQRNFYEPQIITTDNTFVSGNCDVVIGIVNNTVYDPLQPELESGGGSGGGQIYEGKLTAEGLRFGIVASRFNHALVDRLVEGAIDAIVRHGGREEDITLVRVPGSWEIPVAAGELARKEDIDAVIAIGVLIRGATPHFDYIASEVSKGLADLSLELRKPITFGVITADTLEQAIERAGTKHGNKGWEAALSAIEMANLFKSLR

SEQ ID NO: 8151 - protein, 1307 aa, Artificial Sequence
  SARS-CoV-2/2019-nCoV/USA-CruiseA-18/2020__MT159716.1 spike protein (1-1147)(P715C_P1069C) LumSynth construct
MFVFLVLLPLVSSQCVNLTTRTQLPPAYTNSFTRGVYYPDKVFRSSVLHSTQDLFLPFFSNVTWFHAIHVSGTNGTKRFDNPVLPFNDGVYFASTEKSNIIRGWIFGTTLDSKTQSLLIVNNATNVVIKVCEFQFCNDPFLGVYYHKNNKSWMESELRVYSSANNCTFEYVSQPFLMDLEGKQGNFKNLREFVFKNIDGYFKIYSKHTPINLVRDLPQGFSALEPLVDLPIGINITRFQTLLALHRSYLTPGDSSSGWTAGAAAYYVGYLQPRTFLLKYNENGTITDAVDCALDPLSETKCTLKSFTVEKGIYQTSNFRVQPTESIVRFPNITNLCPFGEVFNATRFASVYAWNRKRISNCVADYSVLYNSASFSTFKCYGVSPTKLNDLCFTNVYADSFVIRGDEVRQIAPGQTGKIADYNYKLPDDFTGCVIAWNSNNLDSKVGGNYNYLYRLFRKSNLKPFERDISTEIYQAGSTPCNGVEGFNCYFPLQSYGFQPTNGVGYQPYRVVVLSFELLHAPATVCGPKKSTNLVKNKCVNFNFNGLTGTGVLTESNKKFLPFQQFGRDIADTTDAVRDPQTLEILDITPCSFGGVSVITPGTNTSNQVAVLYQDVNCTEVPVAIHADQLTPTWRVYSTGSNVFQTRAGCLIGAEHVNNSYECDIPIGAGICASYQTQTNSPRRARSVASQSIIAYTMSLGAENSVAYSNNSIAICTNFTISVTTEILPVSMTKTSVDCTMYICGDSTECSNLLLQYGSFCTQLNRALTGIAVEQDKNTQEVFAQVKQIYKTPPIKDFGGFNFSQILPDPSKPSKRSFIEDLLFNKVTLADAGFIKQYGDCLGDIAARDLICAQKFNGLTVLPPLLTDEMIAQYTSALLAGTITSGWTFGAGAALQIPFAMQMAYRFNGIGVTQNVLYENQKLIANQFNSAIGKIQDSLSSTASALGKLQDVVNQNAQALNTLVKQLSSNFGAISSVLNDILSRLDKVEAEVQIDRLITGRLQSLQTYVTQQLIRAAEIRASANLAATKMSECVLGQSKRVDFCGKGYHLMSFPQSAPHGVVFLHVTYVCAQEKNFTTAPAICHDGKAHFPREGVFVSNGTHWFVTQRNFYEPQIITTDNTFVSGNCDVVIGIVNNTVYDPLQPELDSGGGSGGGQIYEGKLTAEGLRFGIVASRFNHALVDRLVEGAIDAIVRHGGREEDITLVRVPGSWEIPVAAGELARKEDIDAVIAIGVLIRGATPHFDYIASEVSKGLADLSLELRKPITFGVITADTLEQAIERAGTKHGNKGWEAALSAIEMANLFKSLR

SEQ ID NO: 8152 - protein, 1307 aa, Artificial Sequence
  SARS-CoV-2/SARS-CoV-2/Yunnan-01/human/2020/CHN__MT049951.1 spike protein (1-1147)(P715C_P1069C) LumSynth construct
MFVFLVLLPLVSSQCVNLTTRTQLPPANTNSFTRGVYYPDKVFRSSVLHSTQDLFLPFFSNVTWFHAIHVSGTNGTKRFDNPVLPFNDGVYFASTEKSNIIRGWIFGTTLDSKTQSLLIVNNATNVVIKVCEFQFCNDPFLGVYYHKNNKSWMESEFRVYSSANNCTFEYVSQPFLMDLEGKQGNFKNLREFVFKNIDGYFKIYSKHTPINLVRDLPQGFSALEPLVDLPIGINITRFQTLLALHRSYLTPGDSSSGWTAGAAAYYVGYLQPRTFLLKYNENGTITDAVDCALDPLSETKCTLKSFTVEKGIYQTSNFRVQPTESIVRFPNITNLCPFGEVFNATRFASVYAWNRKRISNCVADYSVLYNSASFSTFKCYGVSPTKLNDLCFTNVYADSFVIRGDEVRQIAPGQTGKIADYNYKLPDDFTGCVIAWNSNNLDSKVGGNYNYLYRLFRKSNLKPFERDISTEIYQAGSTPCNGVEGFNCYFPLQSYGFQPTNGVGYQPYRVVVLSFELLHAPATVCGPKKSTNLVKNKCVNFNFNGLTGTGVLTESNKKFLPFQQFGRDIADTTDAVRDPQTLEILDITPCSFGGVSVITPGTNTSNQVAVLYQDVNCTEVPVAIHADQLTPTWRVYSTGSNVFQTRAGCLIGAEHVNNSYECDIPIGAGICASYQTQTNSPRRARSVASQSIIAYTMSLGAENSVAYSNNSIAICTNFTISVTTEILPVSMTKTSVDCTMYICGDSTECSNLLLQYGSFCTQLNRALTGIAVEQDKNTQEVFAQVKQIYKTPPIKDFGGFNFSQILPDPSKPSKRSFIEDLLFNKVTLADAGFIKQYGDCLGDIAARDLICAQKFNGLTVLPPLLTDEMIAQYTSALLAGTITSGWTFGAGAALQIPFAMQMAYRFNGIGVTQNVLYENQKLIANQFNSAIGKIQDSLSSTASALGKLQDVVNQNAQALNTLVKQLSSNFGAISSVLNDILSRLDKVEAEVQIDRLITGRLQSLQTYVTQQLIRAAEIRASANLAATKMSECVLGQSKRVDFCGKGYHLMSFPQSAPHGVVFLHVTYVCAQEKNFTTAPAICHDGKAHFPREGVFVSNGTHWFVTQRNFYEPQIITTDNTFVSGNCDVVIGIVNNTVYDPLQPELDSGGGSGGGQIYEGKLTAEGLRFGIVASRFNHALVDRLVEGAIDAIVRHGGREEDITLVRVPGSWEIPVAAGELARKEDIDAVIAIGVLIRGATPHFDYIASEVSKGLADLSLELRKPITFGVITADTLEQAIERAGTKHGNKGWEAALSAIEMANLFKSLR

SEQ ID NO: 8153 - protein, 1307 aa, Artificial Sequence
  SARS-CoV-2/USA/WA-UW292/2020__EPI_ISL_418077 spike protein (1-1147)(P715C_P1069C) LumSynth construct
MFVFLVLLPLVSSQCVNLTTRTQLPPAYTNSFTRGVYYPDKVFRSSVLHSTQDLFLPFFSNVTWFHAIHVSGTNGTKRFDNPVLPFNDGVYFASTEKSNIIRGWIFGTTLDSKTQSLLIVNNATNVVIKVCEFQFCNDPFLGVYYHKNNKSWMESEFRVYSSANNCTFEYVSQPFLMDLEGKQGNFKNLREFVFKNIDGYFKIYSKHTPINLVRDLPQGFSALEPLVDLPIGINITRFQTLLALHRSYLTPGDSSSGWTAGAAAYYVGYLQPRTFLLKYNENGTITDAVDCALDPLSETKCTLKSFTVEKGIYQTSNFRVQPTESIVRFPNITNLCPFGEVFNATRFASVYAWNRKRISNCVADYSVLYNSASFSTFKCYGVSPTKLNDLCFTNVYADSFVIRGDEVRQIAPGQTGKIADYNYKLPDDFTGCVIAWNSNNLDSKVGGNYNYLYRLFRKSNLKPFERDISTEIYQASSTPCNGVEGFNCYFPLQSYGFQPTNGVGYQPYRVVVLSFELLHAPATVCGPKKSTNLVKNKCVNFNFNGLTGTGVLTESNKKFLPFQQFGRDIADTTDAVRDPQTLEILDITPCSFGGVSVITPGTNTSNQVAVLYQDVNCTEVPVAIHADQLTPTWRVYSTGSNVFQTRAGCLIGAEHVNNSYECDIPIGAGICASYQTQTNSPRRARSVASQSIIAYTMSLGAENSVAYSNNSIAICTNFTISVTTEILPVSMTKTSVDCTMYICGDSTECSNLLLQYGSFCTQLNRALTGIAVEQDKNTQEVFAQVKQIYKTPPIKDFGGFNFSQILPDPSKPSKRSFIEDLLFNKVTLADAGFIKQYGDCLGDIAARDLICAQKFNGLTVLPPLLTDEMIAQYTSALLAGTITSGWTFGAGAALQIPFAMQMAYRFNGIGVTQNVLYENQKLIANQFNSAIGKIQDSLSSTASALGKLQDVVNQNAQALNTLVKQLSSNFGAISSVLNDILSRLDKVEAEVQIDRLITGRLQSLQTYVTQQLIRAAEIRASANLAATKMSECVLGQSKRVDFCGKGYHLMSFPQSAPHGVVFLHVTYVCAQEKNFTTAPAICHDGKAHFPREGVFVSNGTHWFVTQRNFYEPQIITTDNTFVSGNCDVVIGIVNNTVYDPLQPELDSGGGSGGGQIYEGKLTAEGLRFGIVASRFNHALVDRLVEGAIDAIVRHGGREEDITLVRVPGSWEIPVAAGELARKEDIDAVIAIGVLIRGATPHFDYIASEVSKGLADLSLELRKPITFGVITADTLEQAIERAGTKHGNKGWEAALSAIEMANLFKSLR

SEQ ID NO: 8154 - protein, 1307 aa, Artificial Sequence
  SARS-CoV-2/Iceland/192/2020__EPI_ISL_417819 spike protein (1-1147)(P715C_P1069C) LumSynth construct
MFVFFVLLPLVSSQCVNLTTRTQLPPAYTNSFTRGVYYPDKVFRSSVLHSTQDLFLPFFSNVTWFHAIHVSGTNGTKRFDNPVLPFNDGVYFASTEKSNIIRGWIFGTTLDSKTQSLLIVNNATNVVIKVCEFQFCNDPFLGVYYHKNNKSWMESEFRVYSSANNCTFEYVSQPFLMDLEGKQGNFKNLREFVFKNIDGYFKIYSKHTPINLVRDLPQGFSALEPLVDLPIGINITRFQTLLALHRSYLTPGDSSSGWTAGAAAYYVGYLQPRTFLLKYNENGTITDAVDCALDPLSETKCTLKSFTVEKGIYQTSNFRVQPTESIVRFPNITNLCPFGEVFNATRFASVYAWNRKRISNCVADYSVLYNSASFSTFKCYGVSPTKLNDLCFTNVYADSFVIRGDEVRQIAPGQTGKIADYNYKLPDDFTGCVIAWNSNNLDSKVGGNYNYLYRLFRKSNLKPFERDISTEIYQAGSTPCNGVEGFNCYFPLQSYGFQPTNGVGYQPYRVVVLSFELLHAPATVCGPKKSTNLVKNKCVNFNFNGLTGTGVLTESNKKFLPFQQFGRDIADTTDAVRDPQTLEILDITPCSFGGVSVITPGTNTSNQVAVLYQGVNCTEVPVAIHADQLTPTWRVYSTGSNVFQTRAGCLIGAEHVNNSYECDIPIGAGICASYQTQTNSPRRARSVASQSIIAYTMSLGAENSVAYSNNSIAICTNFTISVTTEILPVSMTKTSVDCTMYICGDSTECSNLLLQYGSFCTQLNRALTGIAVEQDKNTQEVFAQVKQIYKTPPIKDFGGFNFSQILPDPSKPSKRSFIEDLLFNKVTLADAGFIKQYGDCLGDIAARDLICAQKFNGLTVLPPLLTDEMIAQYTSALLAGTITSGWTFGAGAALQIPFAMQMAYRFNGIGVTQNVLYENQKLIANQFNSAIGKIQDSLSSTASALGKLQDVVNQNAQALNTLVKQLSSNFGAISSVLNDILSRLDKVEAEVQIDRLITGRLQSLQTYVTQQLIRAAEIRASANLAATKMSECVLGQSKRVDFCGKGYHLMSFPQSAPHGVVFLHVTYVCAQEKNFTTAPAICHDGKAHFPREGVFVSNGTHWFVTQRNFYEPQIITTDNTFVSGNCDVVIGIVNNTVYDPLQPELDSGGGSGGGQIYEGKLTAEGLRFGIVASRFNHALVDRLVEGAIDAIVRHGGREEDITLVRVPGSWEIPVAAGELARKEDIDAVIAIGVLIRGATPHFDYIASEVSKGLADLSLELRKPITFGVITADTLEQAIERAGTKHGNKGWEAALSAIEMANLFKSLR

SEQ ID NO: 8155 - protein, 1307 aa, Artificial Sequence
  SARS-CoV-2/Belgium/ULG-6939/2020__EPI_ISL_417020 spike protein (1-1147)(P715C_P1069C) LumSynth construct
MFVFLVLLPLVSSQCVNLTTRTQLPPAYTNSFTRGVYYPDKVFRSSVLHSTQDLFLPFFSNVTWFHAIHVSGTNGTKRFDNPVLPFNDGVYFASTEKSNIIRGWIFGTTLDSKTQSLLIVNNATNVVIKVCEFQFCNDPFLGVYYHKNNKSWMESEFRVYSSANNCTFEYVSQPFLMDLEGKQGNFKNLREFVFKNIDGYFKIYSKHTPINLVRDLPQGFSALEPLVDLPIGINITRFQTLLALHRSYLTPGDSSSGWTAGAAAYYVGYLQPRTFLLKYNENGTITDAVDCALDPLSETKCTLKSFTVEKGIYQTSNFRVQPTESIVRFPNITNLCPFGEVFNATRFASVYAWNRKRISNCVADYSVLYNSASFSTFKCYGVSPTKLNDLCFTNVYADSFVIRGDEVRQIAPGQTGKIADYNYKLPDDFTGCVIAWNSNNLDSKVGGNYNYLYRLFRKSNLKPFERDISTEIYQAGSTPCNGVEGFNCYFPLQSYGFQPTNGVGYQPYRVVVLSFELLHAPATVCGPKKSTNLVKNKCVNFNFNGLTGTGVLTESNKKFLPFQQFGRDIADTTDAVRDPQTLEILDITPCSFGGVSVITPGTNTSNQVAVLYQGVNCTEVPVAIHADQLTPTWRVYSTGSNVFQTRAGCLIGAEHVNNSYECDIPIGAGICASYQTQTNSPRRARSVASQSIIAYTMSLGAENSVVYSNNSIAICTNFTISVTTEILPVSMTKTSVDCTMYICGDSTECSNLLLQYGSFCTQLNRALTGIAVEQDKNTQEVFAQVKQIYKTPPIKDFGGFNFSQILPDPSKPSKRSFIEDLLFNKVTLADAGFIKQYGDCLGDIAARDLICAQKFNGLTVLPPLLTDEMIAQYTSALLAGTITSGWTFGAGAALQIPFAMQMAYRFNGIGVTQNVLYENQKLIANQFNSAIGKIQDSLSSTASALGKLQDVVNQNAQALNTLVKQLSSNFGAISSVLNDILSRLDKVEAEVQIDRLITGRLQSLQTYVTQQLIRAAEIRASANLAATKMSECVLGQSKRVDFCGKGYHLMSFPQSAPHGVVFLHVTYVCAQEKNFTTAPAICHDGKAHFPREGVFVSNGTHWFVTQRNFYEPQIITTDNTFVSGNCDVVIGIVNNTVYDPLQPELDSGGGSGGGQIYEGKLTAEGLRFGIVASRFNHALVDRLVEGAIDAIVRHGGREEDITLVRVPGSWEIPVAAGELARKEDIDAVIAIGVLIRGATPHFDYIASEVSKGLADLSLELRKPITFGVITADTLEQAIERAGTKHGNKGWEAALSAIEMANLFKSLR

SEQ ID NO: 8156 - protein, 1307 aa, Artificial Sequence
  SARS-CoV-2/France/HF2496/2020__EPI_ISL_418231 spike protein (1-1147)(P715C_P1069C) LumSynth construct
MFVFLVLLPLVSSQCVNLTTRTQLPPAYTNSFTRGVYYPDKVFRSSVLHSTQDLFLPFFSNVTWFHAIHVSGTNGTKRFDNPVLPFNDGVYFASTEKSNIIRGWIFGTTLDSKTQSLLIVNNATNVVIKVCEFQFCNDPFLGVYYHKNNKSWMESEFRVYSSANNCTFEYVSQPFLMDLEGKQGNFKNLREFVFKNIDGYFKIYSKHTPINLVRDLPQGFSALEPLVDLPIGINITRFQTLLALHRSYLTPGDSSSGWTAGAAAYYVGYLQPRTFLLKYNENGTITDAVDCALDPLSETKCTLKSFTVEKGIYQTSNFRVQPTESIVRFPNITNLCPFGEVFNATRFASVYAWNRKRISNCVADYSVLYNSASFSTFKCYGVSPTKLNDLCFTNVYADSFVIRGDEVRQIAPGQTGKIADYNYKLPDDFTGCVIAWNSNNLDSKVGGNYNYLYRLFRKSNLKPFERDISTEIYQAGSTPCNGVEGFNCYFPLQSYGFQPTNGVGYQPYRVVVLSFELLHAPATVCGPKKSTNLVKNKCVNFNFNGLTGTGVLTESNKKFLPFQQFGRDIADTTDAVRDPQTLEILDITPCSFGGVSVITPGTNTSNQVAVLYQGVNCTEVPVAIHADQLTPTWRVYSTGSNVFQTRAGCLIGAEHVNNSYECDIPIGAGICASYQTQTNSPRRARSVASQSIIAYTMSLGAENSVAYSNNSIAICTNFTISVTTEILPVSMTKTSVDCTMYICGDSTECSNLLLQYGSFCTQLNRALTGIAVEQDKNTQEVFAQVKQIYKTPPIKDFGGFNFSQILPDPSKPSKRSFIEDLLFNKVTLADAGFIKQYGDCLGDIVARDLICAQKFNGLTVLPPLLTDEMIAQYTSALLAGTITSGWTFGAGAALQIPFAMQMAYRFNGIGVTQNVLYENQKLIANQFNSAIGKIQDSLSSTASALGKLQDVVNQNAQALNTLVKQLSSNFGAISSVLNDILSRLDKVEAEVQIDRLITGRLQSLQTYVTQQLIRAAEIRASANLAATKMSECVLGQSKRVDFCGKGYHLMSFPQSAPHGVVFLHVTYVCAQEKNFTTAPAICHDGKAHFPREGVFVSNGTHWFVTQRNFYEPQIITTDNTFVSGNCDVVIGIVNNTVYDPLQPELDSGGGSGGGQIYEGKLTAEGLRFGIVASRFNHALVDRLVEGAIDAIVRHGGREEDITLVRVPGSWEIPVAAGELARKEDIDAVIAIGVLIRGATPHFDYIASEVSKGLADLSLELRKPITFGVITADTLEQAIERAGTKHGNKGWEAALSAIEMANLFKSLR

SEQ ID NO: 8157 - protein, 1307 aa, Artificial Sequence
  SARS-CoV-2/USA/WA-UW291/2020__EPI_ISL_418076 spike protein (1-1147)(P715C_P1069C) LumSynth construct
MFVFLVLLPLVSSQCVNLTTRTQLPPAYTNSFTRGVYYPDKVFRSSVLHSTQDLFLPFFSNVTWFHAIHVSGTNGTKRFDNPVLPFNDGVYFASTEKSNIIRGWIFGTTLDSKTQSLLIVNNATNVVIKVCEFQFCNDPFLGVYYHKNNKSWMESEFRVYSSANNCTFEYVSQPFLMDLEGKQGNFKNLREFVFKNIDGYFKIYSKHTPINLVRDLPQGFSALEPLVDLPIGINITRFQTLLALHRSYLTPGDSSSGWTAGAAAYYVGYLQPRTFLLKYNENGTITDAVDCALDPLSETKCTLKSFTVEKGIYQTSNFRVQPTESIVRFPNITNLCPFGEVFNATRFASVYAWNRKRISNCVADYSVLYNSASFSTFKCYGVSPTKLNDLCFTNVYADSFVIRGDEVRQIAPGQTGKIADYNYKLPDDFTGCVIAWNSNNLDSKVGGNYNYLYRLFRKSNLKPFERDISTEIYQAGSTPCNGVEGFNCYFPLQSYGFQPTNGVGYQPYRVVVLSFELLHAPATVCGPKKSTNLVKNKCVNFNFNGLTGTGVLTESNKKFLPFQQFGRDIADTTDAVRDPQTLEILDITPCSFGGVSVITPGTNTSNQVAVLYQGVNCTEVPVAIHADQLTPTWRVYSTGSNVFQTRAGCLIGAEHVNNSYECDIPIGAGICASYQTQTNSPRRARSVASQSIIAYTMSLGAENSVAYSNNSIAICTNFTISVTTEILPVSMTKTSVDCTMYICGDSTECSNLLLQYGSFCTQLNRALTGIAVEQDKNTQEVFAQVKQIYKTPPIKDFGGFNFSQILPDPSKPSKRSFIEDLLFNKVTLADAGFIKQYGDCLGDIAARDLICAQKFNGLTVLPPLLTDEMIAQYTSALLAGTITSGWTFGAGAALQIPFAMQMAYRFNGIGVTQNVLYENQKLIANQFNSAIGKIQYSLSSTASALGKLQDVVNQNAQALNTLVKQLSSNFGAISSVLNDILSRLDKVEAEVQIDRLITGRLQSLQTYVTQQLIRAAEIRASANLAATKMSECVLGQSKRVDFCGKGYHLMSFPQSAPHGVVFLHVTYVCAQEKNFTTAPAICHDGKAHFPREGVFVSNGTHWFVTQRNFYEPQIITTDNTFVSGNCDVVIGIVNNTVYDPLQPELDSGGGSGGGQIYEGKLTAEGLRFGIVASRFNHALVDRLVEGAIDAIVRHGGREEDITLVRVPGSWEIPVAAGELARKEDIDAVIAIGVLIRGATPHFDYIASEVSKGLADLSLELRKPITFGVITADTLEQAIERAGTKHGNKGWEAALSAIEMANLFKSLR

SEQ ID NO: 8158 - protein, 1307 aa, Artificial Sequence; identical to SEQ ID NO: 8121
  SARS-CoV-2/Portugal/PT0034/2020__EPI_ISL_418019 spike protein (1-1147)(P715C_P1069C) LumSynth construct

SEQ ID NO: 8159 - protein, 1307 aa, Artificial Sequence; identical to SEQ ID NO: 8113
  SARS-CoV-2/Iceland/202/2020__EPI_ISL_417750 spike protein (1-1147)(P715C_P1069C) LumSynth construct

SEQ ID NO: 8160 - protein, 1307 aa, Artificial Sequence
  SARS-CoV-2/USA/WA-UW261/2020__EPI_ISL_418046 spike protein (1-1147)(P715C_P1069C) LumSynth construct
MFVFLVLLPLVSSQCVNLTTRTQLPPAYTNSFTRGVYYPDKVFRSSVLHSTQDLFLPFFSNVTWFHAIHVSGTNGTKRFDNPVLPFNDGVYFASTEKSNIIRGWIFGTTLDSKTQSLLIVNNATNVVIKVCEFQFCNDPFLGVYYHKNNKSWMESEFRVYSSANNCTFEYVSQPFLMDLEGKQGNFKNLREFVFKNIDGYFKIYSKHTPINLVRDLPQGFSALEPLVDLPIGINITRFQTLLALHRSYLTPGDSSSGWTAGAAAYYVGYLQPRTFLLKYNENGTITDAVDCALDPLSETKCTLKSFTVEKGIYQTSNFRVQPTESIVRFPNITNLCPFGEVFNATRFTSVYAWNRKRISNCVADYSVLYNSASFSTFKCYGVSPTKLNDLCFTNVYADSFVIRGDEVRQIAPGQTGKIADYNYKLPDDFTGCVIAWNSNNLDSKVGGNYNYLYRLFRKSNLKPFERDISTEIYQAGSTPCNGVEGFNCYFPLQSYGFQPTNGVGYQPYRVVVLSFELLHAPATVCGPKKSTNLVKNKCVNFNFNGLTGTGVLTESNKKFLPFQQFGRDIADTTDAVRDPQTLEILDITPCSFGGVSVITPGTNTSNQVAVLYQDVNCTEVPVAIHADQLTPTWRVYSTGSNVFQTRAGCLIGAEHVNNSYECDIPIGAGICASYQTQTNSPRRARSVASQSIIAYTMSLGAENSVAYSNNSIAICTNFTISVTTEILPVSMTKTSVDCTMYICGDSTECSNLLLQYGSFCTQLNRALTGIAVEQDKNTQEVFAQVKQIYKTPPIKDFGGFNFSQILPDPSKPSKRSFIEDLLFNKVTLADAGFIKQYGDCLGDIAARDLICAQKFNGLTVLPPLLTDEMIAQYTSALLAGTITSGWTFGAGAALQIPFAMQMAYRFNGIGVTQNVLYENQKLIANQFNSAIGKIQDSLSSTASALGKLQDVVNQNAQALNTLVKQLSSNFGAISSVLNDILSRLDKVEAEVQIDRLITGRLQSLQTYVTQQLIRAAEIRASANLAATKMSECVLGQSKRVDFCGKGYHLMSFPQSAPHGVVFLHVTYVCAQEKNFTTAPAICHDGKAHFPREGVFVSNGTHWFVTQRNFYEPQIITTDNTFVSGNCDVVIGIVNNTVYDPLQPELDSGGGSGGGQIYEGKLTAEGLRFGIVASRFNHALVDRLVEGAIDAIVRHGGREEDITLVRVPGSWEIPVAAGELARKEDIDAVIAIGVLIRGATPHFDYIASEVSKGLADLSLELRKPITFGVITADTLEQAIERAGTKHGNKGWEAALSAIEMANLFKSLR

SEQ ID NO: 8161 - protein, 1307 aa, Artificial Sequence
  SARS-CoV-2/Portugal/PT0035/2020__EPI_ISL_418020 spike protein (1-1147)(P715C_P1069C) LumSynth construct
MFVFLVLLPLVSSQCVNLTTRTQLPPAYTNSFTRGVYYPDKVFRSSVLHSTQDLFLPFFSNVTWFHAIHVSGTNGTKRFDNPVLPFNDGVYFASTEKSNIIRGWIFGTTLDSKTQSLLIVNNATNVVIKVCEFQFCNDPFLGVYYHKNNKSWMESEFRVYSSANNCTFEYVSQPFLMDLEGKQGNFKNLREFVFKNIDGYFKIYSKHTPINLVRDLPQGFSALEPLVDLPIGINITRFQTLLALHRSYLTPGDSSSGWTAGAAAYYVGYLQPRTFLLKYNENGTITDAVDCALDPLSETKCTLKSFTVEKGIYQTSNFRVQPTESIVRFPNITNLCPFGEVFNATRFASVYAWNRKRISNCVADYSVLYNSASFSTFKCYGVSPTKLNDLCFTNVYADSFVIRGDEVRQIAPGQTGKIADYNYKLPDDFTGCVIAWNSNNLDSKVGGNYNYLYRLFRKSNLKPFERDISTEIYQAGSTPCNGVEGFNCYFPLQSYGFQPTNGVGYQPYRVVVLSFELLHAPATVCGPKKSTNLVKNKCVNFNFNGLTGTGVLTESNKKFLPFQQFGRDIADTTDAVRDPQTLEILDITPCSFGGVSVITPGTNTSNQVAVLYQDVNCTEVPVAIHADQLTPTWRVYSTGSNVFQTRAGCLIGAEHVNNSYECDIPIGAGICASYQTQTNSPRRARSVASQSIIAYTMSLGAENSVAYSNNSIAICTNFTISVTTEILPVSMTKTSVDCTMYICGDSTECSNLLLQYGSFCTQLNRALTGIAVEQDKNTQEVFAQVKQIYKTPPIKDFGGFNFSQILPDPSKPSKRSFIEDLLFNKVTLADAGFIKQYGDCLGDISARDLICAQKFNGLTVLPPLLTDEMIAQYTSALLAGTITSGWTFGAGAALQIPFAMQMAYRFNGIGVTQNVLYENQKLIANQFNSAIGKIQDSLSSTASALGKLQDVVNQNAQALNTLVKQLSSNFGAISSVLNDILSRLDKVEAEVQIDRLITGRLQSLQTYVTQQLIRAAEIRASANLAATKMSECVLGQSKRVDFCGKGYHLMSFPQSAPHGVVFLHVTYVCAQEKNFTTAPAICHDGKAHFPREGVFVSNGTHWFVTQRNFYEPQIITTDNTFVSGNCDVVIGIVNNTVYDPLQPELDSGGGSGGGQIYEGKLTAEGLRFGIVASRFNHALVDRLVEGAIDAIVRHGGREEDITLVRVPGSWEIPVAAGELARKEDIDAVIAIGVLIRGATPHFDYIASEVSKGLADLSLELRKPITFGVITADTLEQAIERAGTKHGNKGWEAALSAIEMANLFKSLR

SEQ ID NO: 8162 - protein, 1307 aa, Artificial Sequence
  SARS-CoV-2/USA/NY-NYUMC7/2020__EPI_ISL_418192 spike protein (1-1147)(P715C_P1069C) LumSynth construct
MFVFLVLLPLVSSQCVNLTTRTQLPPAYTNSFTRGVYYPDKVFRSSVLHSTQDLFLPFFSNVTWFHAIHVSGTNGTKRFDNPVLPFNDGVYFASTEKSNIIRGWIFGTTLDSKTQSLLIVNNATNVVIKVCEFQFCNDPFLGVYHHKNNKSWMESEFRVYSSANNCTFEYVSQPFLMDLEGKQGNFKNLREFVFKNIDGYFKIYSKHTPINLVRDLPQGFSALEPLVDLPIGINITRFQTLLALHRSYLTPGDSSSGWTAGAAAYYVGYLQPRTFLLKYNENGTITDAVDCALDPLSETKCTLKSFTVEKGIYQTSNFRVQPTESIVRFPNITNLCPFGEVFNATRFASVYAWNRKRISNCVADYSVLYNSASFSTFKCYGVSPTKLNDLCFTNVYADSFVIRGDEVRQIAPGQTGKIADYNYKLPDDFTGCVIAWNSNNLDSKVGGNYNYLYRLFRKSNLKPFERDISTEIYQAGSTPCNGVEGFNCYFPLQSYGFQPTNGVGYQPYRVVVLSFELLHAPATVCGPKKSTNLVKNKCVNFNFNGLTGTGVLTESNKKFLPFQQFGRDIADTTDAVRDPQTLEILDITPCSFGGVSVITPGTNTSNQVAVLYQGVNCTEVPVAIHADQLTPTWRVYSTGSNVFQTRAGCLIGAEHVNNSYECDIPIGAGICASYQTQTNSPRRARSVASQSIIAYTMSLGAENSVAYSNNSIAICTNFTISVTTEILPVSMTKTSVDCTMYICGDSTECSNLLLQYGSFCTQLNRALTGIAVEQDKNTQEVFAQVKQIYKTPPIKDFGGFNFSQILPDPSKPSKRSFIEDLLFNKVTLADAGFIKQYGDCLGDIAARDLICAQKFNGLTVLPPLLTDEMIAQYTSALLAGTITSGWTFGAGAALQIPFAMQMAYRFNGIGVTQNVLYENQKLIANQFNSAIGKIQDSLSSTASALGKLQDVVNQNAQALNTLVKQLSSNFGAISSVLNDILSRLDKVEAEVQIDRLITGRLQSLQTYVTQQLIRAAEIRASANLAATKMSECVLGQSKRVDFCGKGYHLMSFPQSAPHGVVFLHVTYVCAQEKNFTTAPAICHDGKAHFPREGVFVSNGTHWFVTQRNFYEPQIITTDNTFVSGNCDVVIGIVNNTVYDPLQPELDSGGGSGGGQIYEGKLTAEGLRFGIVASRFNHALVDRLVEGAIDAIVRHGGREEDITLVRVPGSWEIPVAAGELARKEDIDAVIAIGVLIRGATPHFDYIASEVSKGLADLSLELRKPITFGVITADTLEQAIERAGTKHGNKGWEAALSAIEMANLFKSLR

SEQ ID NO: 8163 - protein, 1307 aa, Artificial Sequence
  SARS-CoV-2/Iceland/189/2020__EPI_ISL_417709 spike protein (1-1147)(P715C_P1069C) LumSynth construct
MFVFLVLLPLVSSQCVNLTTRTQLPPAYTNSFTRGVYYPDKVFRSSVLHSTQDLFLPFFSNVTWFHAIHVSGTNGTKRFDNPVLPFNDGVYFASTEKSNIIRGWIFGTTLDSKTQSLLIVNNATNVVIKVCEFQFCNDPFLGVYYHKNNKSWMESEFRVYSSANNCTFEYVSQPFLMDLEGKQGNFKNLREFVFKNIDGYFKIYSKHTPINLVRDLPQGFSALEPLVDLPIGINITRFQTLLALHRSYLTPGDSSSGWTAGAAAYYVGYLQPRTFLLKYNENGTITDAVDCALDPLSETKCTLKSFTVEKGIYQTSNFRVQPTESIVRFPNITNLCPFGEVFNATRFASVYAWNRKRISNCVADYSVLYNSASFSTFKCYGVSPTKLNDLCFTNVYADSFVIRGDEVRQIAPGQTGKIADYNYKLPDDFTGCVIAWNSNNLDSKVGGNYNYLYRLFRKSNLKPFERDISTEIYQAGSTPCNGVEGFNCYFPLQSYGFQPTNGVGYQPYRVVVLSFELLHAPATVCGPKKSTNLVKNKCVNFNFNGLTGTGVLTESNKKFLPFQQFGRDIADTTDAVRDPQTLEILDITPCSFGGVSVITPGTNTSNQVAVLYQGVNCTEVPVAIHADQLTPTWRVYSTGSNVFQTRAGCLIGAEHVNNSYECDIPIGAGICASYQTQTNSPRRARSVASQSIIAYTMSLGAENSVAYSNNSIAICTNFTISVTTEILPVSMTKTSVDCTMYICGDSTECSNLLLQYGSFCTQLNRALTGIAVEQDKNTQEVFAQVKQIYKTPPIKDFGGFNFSQILPDPSKPSKRSFIEDLLFNKVTLADAGFTKQYGDCLGDIAARDLICAQKFNGLTVLPPLLTDEMIAQYTSALLAGTITSGWTFGAGAALQIPFAMQMAYRFNGIGVTQNVLYENQKLIANQFNSAIGKIQDSLSSTASALGKLQDVVNQNAQALNTLVKQLSSNFGAISSVLNDILSRLDKVEAEVQIDRLITGRLQSLQTYVTQQLIRAAEIRASANLAATKMSECVLGQSKRVDFCGKGYHLMSFPQSAPHGVVFLHVTYVCAQEKNFTTAPAICHDGKAHFPREGVFVSNGTHWFVTQRNFYEPQIITTDNTFVSGNCDVVIGIVNNTVYDPLQPELDSGGGSGGGQIYEGKLTAEGLRFGIVASRFNHALVDRLVEGAIDAIVRHGGREEDITLVRVPGSWEIPVAAGELARKEDIDAVIAIGVLIRGATPHFDYIASEVSKGLADLSLELRKPITFGVITADTLEQAIERAGTKHGNKGWEAALSAIEMANLFKSLR

SEQ ID NO: 8164 - protein, 1307 aa, Artificial Sequence
  SARS-CoV-2/Australia/NSW56/2020__EPI_ISL_417408 spike protein (1-1147)(P715C_P1069C) LumSynth construct
MFVFLVLLPLVSSQCVNLTTRTQLPPAYTNSFTRGVYYPDKVFRSSVLHSTQDLFLPFFSNVTWFHAIHVSGTNGTKRFDNPVLPFNDGVYFASTEKSNIIRGWIFGTTLDSKTQSLLIVNNATNVVIKVCEFQFCNDPFLGVYYHKNNKSWMESEFRVYSSANNCTFEYVSQPFLMDLEGKQGNFKNLREFVFKNIDGYFKIYSKHTPINLVRDLPQGFSALEPLVDLPIGINITRFQTLLALHRSYLTPGDSSSGWTAGAAAYYVGYLQPRTFLLKYNENGTITDAVDCALDPLSETKCTLKSFTVEKGIYQTSNFRVQPTESIVRFPNITNLCPFGEVFNATRFASVYAWNRKRISNCVADYSVLYNSASFSTFKCYGVSPTKLNDLCFTNVYADSFVIRGDEVRQIAPGQTGKIADYNYKLPDDFTGCVIAWNSNNLDSKVGGNYNYLYRLFRKSNLKPFERDISTEIYQAGSTPCNGVEGFNCYFPLQSYGFQPTNGVGYQPYRVVVLSFELLHAPATVCGPKKSTNLVKNKCVNFNFNGLTGTGVLTESNKKFLPFQQFGRDIADTTDAVRDPQTLEILDITPCSFGGVSVITPGTNTSNQVAVLYQDVNCTEVPVAIHADQLTPTWRVYSTGSNVFQTRAGCLIGAEHVNNSYECDIPIGAGICASYQTQTNSPRRARSVASQSIIAYTMSLGAENSVAYSNNSIAICTNFTISVTTEILPVSMTKTSVDCTMYICGDSTECSNLLLQYGSFCTQLNRALTGIAVEQDKNTQEVFAQVKQIYKTPPIKDFGGFNFSQILPDSSKPSKRSFIEDLLFNKVTLADAGFIKQYGDCLGDIAARDLICAQKFNGLTVLPPLLTDEMIAQYTSALLAGTITSGWTFGAGAALQIPFAMQMAYRFNGIGVTQNVLYENQKLIANQFNSAIGKIQDSLSSTASALGKLQDVVNQNAQALNTLVKQLSSNFGAISSVLNDILSRLDKVEAEVQIDRLITGRLQSLQTYVTQQLIRAAEIRASANLAATKMSECVLGQSKRVDFCGKGYHLMSFPQSAPHGVVFLHVTYVCAQEKNFTTAPAICHDGKAHFPREGVFVSNGTHWFVTQRNFYEPQIITTDNTFVSGNCDVVIGIVNNTVYDPLQPELDSGGGSGGGQIYEGKLTAEGLRFGIVASRFNHALVDRLVEGAIDAIVRHGGREEDITLVRVPGSWEIPVAAGELARKEDIDAVIAIGVLIRGATPHFDYIASEVSKGLADLSLELRKPITFGVITADTLEQAIERAGTKHGNKGWEAALSAIEMANLFKSLR

SEQ ID NO: 8165 - protein, 1307 aa, Artificial Sequence
  SARS-CoV-2/Iceland/280/2020__EPI_ISL_417608 spike protein (1-1147)(P715C_P1069C) LumSynth construct
MFVFLVLLPLVSSQCVNLTTRTQLPPAYTNSFTRGVYYPDKVFRSSVLHSTQDLFLPFFSNVTWFHAIHVSGTNGTKRFDNPVLPFNDGVYFASTEKSNIIRGWIFGTTLDSKTQSLLIVNNATNVVIKVCEFQFCNDPFLGVYYHKNNKSWMESEFRVYSSANNCTFEYVSQPFLMDLEGKQGNFKNLREFVFKNIDGYFKIYSKHTPINLVRDLPQGFSALEPLVDLPIGINITRFQTLLALHRSYLTPGDSSSGWTAGAAAYYVGYLQPRTFLLKYNENGTITDAVDCALDPLSETKCTLKSFTVEKGIYQTSNFRVQPTESIVRFPNITNLCPFGEVFNATRFASVYAWNRKRISNCVADYSVLYNSASFSTFKCYGVSPTKLNDLCFTNVYADSFVIRGDEVRQIAPGQTGKIADYNYKLPDDFTGCVIAWNSNNLDSKVGGNYNYLYRLFRKSNLKPFERDISTEIYQAGSTPCNGVEGFNCYFPLQSYGFQPTNGVGYQPYRVVVLSFELLHAPATVCGPKKSTNLVKNKCVNFNFNGLTGTGVLTESNKKFLPFQQFGRDIADTTDAVRDPQTLEILDITPCSFGGVSVITPGTNTSNQVAVLYQGVNCTEVPVAIHADQLTPTWRVYSTGSNVFQTRAGCLIGAEHVNNSYECDIPIGAGICASYHTQTNSPRRARSVASQSIIAYTMSLGAENSVAYSNNSIAICTNFTISVTTEILPVSMTKTSVDCTMYICGDSTECSNLLLQYGSFCTQLNRALTGIAVEQDKNTQEVFAQVKQIYKTPPIKDFGGFNFSQILPDPSKPSKRSFIEDLLFNKVTLADAGFIKQYGDCLGDIAARDLICAQKFNGLTVLPPLLTDEMIAQYTSALLAGTITSGWTFGAGAALQIPFAMQMAYRFNGIGVTQNVLYENQKLIANQFNSAIGKIQDSLSSTASALGKLQDVVNQNAQALNTLVKQLSSNFGAISSVLNDILSRLDKVEAEVQIDRLITGRLQSLQTYVTQQLIRAAEIRASANLAATKMSECVLGQSKRVDFCGKGYHLMSFPQSAPHGVVFLHVTYVCAQEKNFTTAPAICHDGKAHFPREGVFVSNGTHWFVTQRNFYEPQIITTDNTFVSGNCDVVIGIVNNTVYDPLQPELDSGGGSGGGQIYEGKLTAEGLRFGIVASRFNHALVDRLVEGAIDAIVRHGGREEDITLVRVPGSWEIPVAAGELARKEDIDAVIAIGVLIRGATPHFDYIASEVSKGLADLSLELRKPITFGVITADTLEQAIERAGTKHGNKGWEAALSAIEMANLFKSLR

SEQ ID NO: 8166 - protein, 1307 aa, Artificial Sequence; identical to SEQ ID NO: 8121
  SARS-CoV-2/Iceland/247/2020__EPI_ISL_417575 spike protein (1-1147)(P715C_P1069C) LumSynth construct

SEQ ID NO: 8167 - protein, 1307 aa, Artificial Sequence
  SARS-CoV-2/Iceland/238/2020__EPI_ISL_417566 spike protein (1-1147)(P715C_P1069C) LumSynth construct
MFVFLVLLPLVSSQCVNLTTRTQLPPAYTNSFTRGVYYPDKVFRSSVLHSTQDLFLPFFSNVTWFHAIHVSGTNGTKRFDNPVLPFNDGVYFASTEKSNIIRGWIFGTTLDSKTQSLLIVNNATNVVIKVCEFQFCNDPFLGVYYHKNNKSWMESEFRVYSSANNCTFEYVSQPFLMDLEGKQGNFKNLREFVFKNIDGYFKIYSKHTPINLVRDLPQGFSALEPLVDLPIGINITRFQTLLALHRSYLTPGDSSSGWTAGAAAYYVGYLQPRTFLLKYNENGTITDAVDCALDPLSETKCTLKSFTVEKGIYQTSNFRVQPTESIVRFPNITNLCPFGEVFNATRFASVYAWNRKRISNCVADYSVLYNSASFSTFKCYGVSPTKLNDLCFTNVYADSFVIRGDEVRQIAPGQTGKIADYNYKLPDDFTGCVIAWNSNNLDSKVGGNYNYLYRLFRKSNLKPFERDISTEIYQAGSTPCNGVEGFNCYFPLQSYGFQPTNGVGYQPYRVVVLSFELLHAPATVCGPKKSTNLVKNKCVNFNFNGLTGTGVLTESNKKFLPFQQFGRDIADTTDAVRDPQTLEILDITPCSFGGVSVITPGTNTSNQVAVLYQGVNCTEVPVAIHADQLTPTWRVYSTGSNVFQTRAGCLIGAEHVNNSYECDIPIGAGICASYQTQTNSPRRARSVASQSIIAYTMSLGAENSVAYSNNSIAICTNFTISVTTEILPVSMTKTSVDCTMYICGDSTECSNLLLQYGSFCTQLNRALTGIAVEQDKNTQEVFAQVKQIYKTPPIKDFGGFNFSQILPDPSKPSKRSFIEDLLFNKVTLADVGFIKQYGDCLGDIAARDLICAQKFNGLTVLPPLLTDEMIAQYTSALLAGTITSGWTFGAGAALQIPFAMQMAYRFNGIGVTQNVLYENQKLIANQFNSAIGKIQDSLSSTASALGKLQDVVNQNAQALNTLVKQLSSNFGAISSVLNDILSRLDKVEAEVQIDRLITGRLQSLQTYVTQQLIRAAEIRASANLAATKMSECVLGQSKRVDFCGKGYHLMSFPQSAPHGVVFLHVTYVCAQEKNFTTAPAICHDGKAHFPREGVFVSNGTHWFVTQRNFYEPQIITTDNTFVSGNCDVVIGIVNNTVYDPLQPELDSGGGSGGGQIYEGKLTAEGLRFGIVASRFNHALVDRLVEGAIDAIVRHGGREEDITLVRVPGSWEIPVAAGELARKEDIDAVIAIGVLIRGATPHFDYIASEVSKGLADLSLELRKPITFGVITADTLEQAIERAGTKHGNKGWEAALSAIEMANLFKSLR

SEQ ID NO: 8168 - protein, 1307 aa, Artificial Sequence
  SARS-CoV-2/Greece/16/2020__EPI_ISL_418265 spike protein (1-1147)(P715C_P1069C) LumSynth construct
MFVFLVLLPLVSSQCVNLTTRTQLPPAYTNSFTRGVYYPDKVFRSSVLHSTQDLFLPFFSNVTWFHAIHVSGTNGTKRFDNPVLPFNDGVYFASTEKSNIIRGWIFGTTLDSKTQSLLIVNNATNVVIKVCEFQFCNDPFLGVYYHKNNKSWMESEFRVYSSANNCTFEYVSQPFLMDLEGKQGNFKNLREFVFKNVDGYFKIYSKHTPINLVRDLPQGFSALEPLVDLPIGINITRFQTLLALHRSYLTPGDSSSGWTAGAAAYYVGYLQPRTFLLKYNENGTITDAVDCALDPLSETKCTLKSFTVEKGIYQTSNFRVQPTESIVRFPNITNLCPFGEVFNATRFASVYAWNRKRISNCVADYSVLYNSASFSTFKCYGVSPTKLNDLCFTNVYADSFVIRGDEVRQIAPGQTGKIADYNYKLPDDFTGCVIAWNSNNLDSKVGGNYNYLYRLFRKSNLKPFERDISTEIYQAGSTPCNGVEGFNCYFPLQSYGFQPTNGVGYQPYRVVVLSFELLHAPATVCGPKKSTNLVKNKCVNFNFNGLTGTGVLTESNKKFLPFQQFGRDIADTTDAVRDPQTLEILDITPCSFGGVSVITPGTNTSNQVAVLYQDVNCTEVPVAIHADQLTPTWRVYSTGSNVFQTRAGCLIGAEHVNNSYECDIPIGAGICASYQTQTNSPRRARSVASQSIIAYTMSLGAENSVAYSNNSIAICTNFTISVTTEILPVSMTKTSVDCTMYICGDSTECSNLLLQYGSFCTQLNRALTGIAVEQDKNTQEVFAQVKQIYKTPPIKDFGGFNFSQILPDPSKPSKRSFIEDLLFNKVTLADAGFIKQYGDCLGDIAARDLICAQKFNGLTVLPPLLTDEMIAQYTSALLAGTITSGWTFGAGAALQIPFAMQMAYRFNGIGVTQNVLYENQKLIANQFNSAIGKIQDSLSSTASALGKLQDVVNQNAQALNTLVKQLSSNFGAISSVLNDILSRLDKVEAEVQIDRLITGRLQSLQTYVTQQLIRAAEIRASANLAATKMSECVLGQSKRVDFCGKGYHLMSFPQSAPHGVVFLHVTYVCAQEKNFTTAPAICHDGKAHFPREGVFVSNGTHWFVTQRNFYEPQIITTDNTFVSGNCDVVIGIVNNTVYDPLQPELDSGGGSGGGQIYEGKLTAEGLRFGIVASRFNHALVDRLVEGAIDAIVRHGGREEDITLVRVPGSWEIPVAAGELARKEDIDAVIAIGVLIRGATPHFDYIASEVSKGLADLSLELRKPITFGVITADTLEQAIERAGTKHGNKGWEAALSAIEMANLFKSLR

SEQ ID NO: 8169 - protein, 1307 aa, Artificial Sequence
  SARS-CoV-2/Iceland/319/2020__EPI_ISL_417648 spike protein (1-1147)(P715C_P1069C) LumSynth construct
MFVFLVLLPLVSSQCVNLTTRTQLPPAYTNSFTRGVYYPDKVFRSSVLHSTQDLFLPFFSNVTWFHAIHVSGTNGTKRFDNPVLPFNDGVYFASTEKSNIIRGWIFGTTLDSKTQSLLIVNNATNVVIKVCEFQFCNDPFLGVYYHKNNKSWMESEFRVYSSANNCTFEYVSQPFLIDLEGKQGNFKNLREFVFKNIDGYFKIYSKHTPINLVRDLPQGFSALEPLVDLPIGINITRFQTLLALHRSYLTPGDSSSGWTAGAAAYYVGYLQPRTFLLKYNENGTITDAVDCALDPLSETKCTLKSFTVEKGIYQTSNFRVQPTESIVRFPNITNLCPFGEVFNATRFASVYAWNRKRISNCVADYSVLYNSASFSTFKCYGVSPTKLNDLCFTNVYADSFVIRGDEVRQIAPGQTGKIADYNYKLPDDFTGCVIAWNSNNLDSKVGGNYNYLYRLFRKSNLKPFERDISTEIYQAGSTPCNGVEGFNCYFPLQSYGFQPTNGVGYQPYRVVVLSFELLHAPATVCGPKKSTNLVKNKCVNFNFNGLTGTGVLTESNKKFLPFQQFGRDIADTTDAVRDPQTLEILDITPCSFGGVSVITPGTNTSNQVAVLYQGVNCTEVPVAIHADQLTPTWRVYSTGSNVFQTRAGCLIGAEHVNNSYECDIPIGAGICASYQTQTNSPRRARSVASQSIIAYTMSLGAENSVAYSNNSIAICTNFTISVTTEILPVSMTKTSVDCTMYICGDSTECSNLLLQYGSFCTQLNRALTGIAVEQDKNTQEVFAQVKQIYKTPPIKDFGGFNFSQILPDPSKPSKRSFIEDLLFNKVTLADAGFIKQYGDCLGDIAARDLICAQKFNGLTVLPPLLTDEMIAQYTSALLAGTITSGWTFGAGAALQIPFAMQMAYRFNGIGVTQNVLYENQKLIANQFNSAIGKIQDSLSSTASALGKLQDVVNQNAQALNTLVKQLSSNFGAISSVLNDILSRLDKVEAEVQIDRLITGRLQSLQTYVTQQLIRAAEIRASANLAATKMSECVLGQSKRVDFCGKGYHLMSFPQSAPHGVVFLHVTYVCAQEKNFTTAPAICHDGKAHFPREGVFVSNGTHWFVTQRNFYEPQIITTDNTFVSGNCDVVIGIVNNTVYDPLQPELDSGGGSGGGQIYEGKLTAEGLRFGIVASRFNHALVDRLVEGAIDAIVRHGGREEDITLVRVPGSWEIPVAAGELARKEDIDAVIAIGVLIRGATPHFDYIASEVSKGLADLSLELRKPITFGVITADTLEQAIERAGTKHGNKGWEAALSAIEMANLFKSLR

SEQ ID NO: 8170 - protein, 1307 aa, Artificial Sequence
  SARS-CoV-2/Congo/94/2020__EPI_ISL_417947 spike protein (1-1147)(P715C_P1069C) LumSynth construct
MFVFLVLLPLVSSQCVNLTTRTQLPPAYTNSFTRGVYYPDKVFRSSVLHSTQDLFLPFFSNVTWFHAIHVSGTNGTKRFDNPVLPFNDGVYFASTEKSNIIRGWIFGTTLDSKTQSLLIVNNATNVVIKVCEFQFCNDPFLGVYYHKNNKSWMESEFRVYSSANNCTFEYVSQPFLMDLEGKQGNFKNLREFVFKNIDGYFKIYSKHTPINLVRDLPQGFSALEPLVDLPIGINITRFQTLLALHRSYLTPGDSSSGWTAGAAAYYVGYLQPRTFLLKYNENGTITDAVDCALDPLSETKCTLKSFTVEKGIYQTSNFRVQPTESIVRFPNITNLCPFGEVFNATRFASVYAWNRKRISNCVADYSVLYNSASFSTFKCYGVSPTKLNDLCFTNVYADSFVIRGDEVRQIAPGQTGKIADYNYKLPDDFTGCVIAWNSNNLDSKVGGNYNYLYRLFRKSNLKPFERDISTEIYQAGSTPCNGVEGFNCYFPLQSYGFQPTNGVGYQPYRVVVLSFELLHAPATVCGPKKSTNLVKNKCVNFNFNGLTGTGVLTESNKKFLPFQQFGRDIADTTDAVRDPQTLEILDITPCSFGGVSVITPGTNTSNQVAVLYQGVNCTEVPVAIHADQLTPTWRVYSTGSNVFQTRAGCLIGAEHVNNSYECDIPIGAGICASYQTQTNSPRRARSVASQSIIAYTMSLGAENSVAYSNNSIAICTNFTISVTTEILPVSMTKTSVDCTMYICGDSTECSNLLLQYGSFCTQLNRALTGIAVEQDKNTQEVFAQVKQIYKTPPIKDFGGFNFSQILPDPSKPSKRSFIEDILFNKVTLADAGFIKQYGDCLGDIAARDLICAQKFNGLTVLPPLLTDEMIAQYTSALLAGTITSGWTFGAGAALQIPFAMQMAYRFNGIGVTQNVLYENQKLIANQFNSAIGKIQDSLSSTASALGKLQDVVNQNAQALNTLVKQLSSNFGAISSVLNDILSRLDKVEAEVQIDRLITGRLQSLQTYVTQQLIRAAEIRASANLAATKMSECVLGQSKRVDFCGKGYHLMSFPQSAPHGVVFLHVTYVCAQEKNFTTAPAICHDGKAHFPREGVFVSNGTHWFVTQRNFYEPQIITTDNTFVSGNCDVVIGIVNNTVYDPLQPELDSGGGSGGGQIYEGKLTAEGLRFGIVASRFNHALVDRLVEGAIDAIVRHGGREEDITLVRVPGSWEIPVAAGELARKEDIDAVIAIGVLIRGATPHFDYIASEVSKGLADLSLELRKPITFGVITADTLEQAIERAGTKHGNKGWEAALSAIEMANLFKSLR

SEQ ID NO: 8171 - protein, 1307 aa, Artificial Sequence
  SARS-CoV-2/Congo/158/2020__EPI_ISL_417950 spike protein (1-1147)(P715C_P1069C) LumSynth construct
MFVFLVLLPLVSSQCVNLTTRTQLPPAYTNSFTRGVYYPDKVFRSSVLHSTQDLFLPFFSNVTWFHAIHVSGTNGTKRFDNPVLPFNDGVYFASTEKSNIIRGWIFGTTLDSKTQSLLIVNNATNVVIKVCEFQFCNDPFLGVYYHKNNKSWMESEFRVYSSANNCTFEYVSQPFLMDLEGKQGNFKNLREFVFKNIDGYFKIYSKHTPINLVRDLPQGFSALEPLVDLPIGINITRFQTLLALHRSYLTPGDSSSGWTAGAAAYYVGYLQPRTFLLKYNENGTITDAVDCALDPLSETKCTLKSFTVEKGIYQTSNFRVQPTESIVRFPNITNLCPFGEVFNATRFASVYAWNRKRISNCVADYSVLYNSASFSTFKCYGVSPTKLNDLCFTNVYADSFVIRGDEVRQIAPGQTGKIADYNYKLPDDFTGCVIAWNSNNLDSKVGGNYNYLYRLFRKSNLKPFERDISTEIYQAGSTPCNGVEGFNCYFPLQSYGFQPTNGVGYQPYRVVVLSFELLHAPATVCGPKKSTNLVKNKCVNFNFNGLTGTGVLTESNKKFLPFQQFGRDIADTTDAVRDPQTLEILDITPCSFGGVSVITPGTNTSNQVAVLYQDVNCTEVPVAIHADQLTPTWRVYSTGSNVFQTRAGCLIGAEHVNNSYECDIPIGAGICASYQTQTNSPRRARSVASQSIIAYTMSLGAENSVAYSNNSIAICTNFTISVTTEILPVSMTKTSVDCTMYICGDSTECSNLLLQYGSFCTQLNRALTGIAVEQDKNTQEVFAQVKQIYKTPPIKDFGGFNFSQILPDPSKPSKRSFIEDLLFNKVTLADAGFIKQYGDCLGDIAARDLICAQKFNGLTVLPPLLTDEMIAQYTSALLAGTITSGWTFGAGAALQIPFAMQMAYRFNGIGVTQNVLYENQKLIANQFNSAIGKIQDSLSSTASALGKLQDVVNQNAQALNTLVKQLSSNFGAISSVLNDILSRLDKVEAEVQIDRLITGRLQSLQTYVTQQLIRAAEIRASANLAATKMSECVLGQSKRVDFCGKGYHLMSFPQSAPHGVVFLHVTYVCAQEKNFTTAPAICHDGKAHFPREGVFVSNGTHWFVTQRNFYEPQIITTDNTFLSGNCDVVIGIVNNTVYDPLQPELDSGGGSGGGQIYEGKLTAEGLRFGIVASRFNHALVDRLVEGAIDAIVRHGGREEDITLVRVPGSWEIPVAAGELARKEDIDAVIAIGVLIRGATPHFDYIASEVSKGLADLSLELRKPITFGVITADTLEQAIERAGTKHGNKGWEAALSAIEMANLFKSLR

SEQ ID NO: 8172 - protein, 1307 aa, Artificial Sequence
  SARS-CoV-2/USA/UT-00034/2020__EPI_ISL_417977 spike protein (1-1147)(P715C_P1069C) LumSynth construct
MFVFLVLLPLVSSQCVNLTTRTQLPPAYTNSFTRGVYYPDKVFRSSVLHSTQDLFLPFFSNVTWFHAIHVSGTNGTKRFDNPVLPFNDGVYFASTEKSNIIRGWIFGTTLDSKTQSLLIVNNATNVVIKVCEFQFCNDPFLGVYYYKNNKSWMESEFRVYSSANNCTFEYVSQPFLMDLEGKQGNFKNLREFVFKNIDGYFKIYSKHTPINLVRDLPQGFSALEPLVDLPIGINITRFQTLLALHRSYLTPGDSSSGWTAGAAAYYVGYLQPRTFLLKYNENGTITDAVDCALDPLSETKCTLKSFTVEKGIYQTSNFRVQPTESIVRFPNITNLCPFGEVFNATRFASVYAWNRKRISNCVADYSVLYNSASFSTFKCYGVSPTKLNDLCFTNVYADSFVIRGDEVRQIAPGQTGKIADYNYKLPDDFTGCVIAWNSNNLDSKVGGNYNYLYRLFRKSNLKPFERDISTEIYQAGSTPCNGVEGFNCYFPLQSYGFQPTNGVGYQPYRVVVLSFELLHAPATVCGPKKSTNLVKNKCVNFNFNGLTGTGVLTESNKKFLPFQQFGRDIADTTDAVRDPQTLEILDITPCSFGGVSVITPGTNTSNQVAVLYQGVNCTEVPVAIHADQLTPTWRVYSTGSNVFQTRAGCLIGAEHVNNSYECDIPIGAGICASYQTQTNSPRRARSVASQSIIAYTMSLGAENSVAYSNNSIAICTNFTISVTTEILPVSMTKTSVDCTMYICGDSTECSNLLLQYGSFCTQLNRALTGIAVEQDKNTQEVFAQVKQIYKTPPIKDFGGFNFSQILPDPSKPSKRSFIEDLLFNKVTLADAGFIKQYGDCLGDIAARDLICAQKFNGLTVLPPLLTDEMIAQYTSALLAGTITSGWTFGAGAALQIPFAMQMAYRFNGIGVTQNVLYENQKLIANQFNSAIGKIQDSLSSTASALGKLQDVVNQNAQALNTLVKQLSSNFGAISSVLNDILSRLDKVEAEVQIDRLITGRLQSLQTYVTQQLIRAAEIRASANLAATKMSECVLGQSKRVDFCGKGYHLMSFPQSAPHGVVFLHVTYVCAQEKNFTTAPAICHDGKAHFPREGVFVSNGTHWFVTQRNFYEPQIITTDNTFVSGNCDVVIGIVNNTVYDPLQPELDSGGGSGGGQIYEGKLTAEGLRFGIVASRFNHALVDRLVEGAIDAIVRHGGREEDITLVRVPGSWEIPVAAGELARKEDIDAVIAIGVLIRGATPHFDYIASEVSKGLADLSLELRKPITFGVITADTLEQAIERAGTKHGNKGWEAALSAIEMANLFKSLR

SEQ ID NO: 8173 - protein, 1307 aa, Artificial Sequence
  SARS-CoV-2/USA/UT-00033/2020__EPI_ISL_417976 spike protein (1-1147)(P715C_P1069C) LumSynth construct
MFVFLVLLPLVSSQCVNLTTRTQLPPAYTNSFTRGVYYPDKVFRSSVLHSTQDLFLPFFSNVTWFHAIHVSGTNGTKRFDNPVLPFNDGVYFASTEKSNIIRGWIFGTTLDSKTQSLLIVNNATNVVIKVCEFQFCNDPFLGVYYHKNNKSWMESEFRVYSSANNCTFEYVSQPFLMDLEGKQGNFKNLREFVFKNIDGYFKIYSKHTPINLVRDLPQGFSALEPLVDLPIGINITRFQTLLALHRSYLTPGDSSSGLTAGAAAYYVGYLQPRTFLLKYNENGTITDAVDCALDPLSETKCTLKSFTVEKGIYQTSNFRVQPTESIVRFPNITNLCPFGEVFNATRFASVYAWNRKRISNCVADYSVLYNSASFSTFKCYGVSPTKLNDLCFTNVYADSFVIRGDEVRQIAPGQTGKIADYNYKLPDDFTGCVIAWNSNNLDSKVGGNYNYLYRLFRKSNLKPFERDISTEIYQAGSTPCNGVEGFNCYFPLQSYGFQPTNGVGYQPYRVVVLSFELLHAPATVCGPKKSTNLVKNKCVNFNFNGLTGTGVLTESNKKFLPFQQFGRDIADTTDAVRDPQTLEILDITPCSFGGVSVITPGTNTSNQVAVLYQGVNCTEVPVAIHADQLTPTWRVYSTGSNVFQTRAGCLIGAEHVNNSYECDIPIGAGICASYQTQTNSPRRARSVASQSIIAYTMSLGAENSVAYSNNSIAICTNFTISVTTEILPVSMTKTSVDCTMYICGDSTECSNLLLQYGSFCTQLNRALTGIAVEQDKNTQEVFAQVKQIYKTPPIKDFGGFNFSQILPDPSKPSKRSFIEDLLFNKVTLADAGFIKQYGDCLGDIAARDLICAQKFNGLTVLPPLLTDEMIAQYTSALLAGTITSGWTFGAGAALQIPFAMQMAYRFNGIGVTQNVLYENQKLIANQFNSAIGKIQDSLSSTASALGKLQDVVNQNAQALNTLVKQLSSNFGAISSVLNDILSRLDKVEAEVQIDRLITGRLQSLQTYVTQQLIRAAEIRASANLAATKMSECVLGQSKRVDFCGKGYHLMSFPQSAPHGVVFLHVTYVCAQEKNFTTAPAICHDGKAHFPREGVFVSNGTHWFVTQRNFYEPQIITTDNTFVSGNCDVVIGIVNNTVYDPLQPELDSGGGSGGGQIYEGKLTAEGLRFGIVASRFNHALVDRLVEGAIDAIVRHGGREEDITLVRVPGSWEIPVAAGELARKEDIDAVIAIGVLIRGATPHFDYIASEVSKGLADLSLELRKPITFGVITADTLEQAIERAGTKHGNKGWEAALSAIEMANLFKSLR

SEQ ID NO: 8174 - protein, 1307 aa, Artificial Sequence
  SARS-CoV-2/USA/WI-13/2020__EPI_ISL_417516 spike protein (1-1147)(P715C_P1069C) LumSynth construct
MFVFLVLLPLVSSQCVNLTTRTQLPPAYTNSFTRGVYYPDKVFRSSVLHSTQDLFLPFFSNVTWFHAIHVSGTNGTKRFDNPVLPFNDGVYFASTEKSNIIRGWIFGTTLDSKTQSLLIVNNATNVVIKVCEFQFCNDPFLGVYYHKNNKSWMESEFRVYSSANNCTFEYVSQPFLMDLEGKQGNFKNLREFVFKNIDGYFKIYSKHTPINLVRDLPQGFSALEPLVDLPIGINITRFQTLLALHRSYLTPGDSSSGWTAGAAAYYVGYLQPRTFLLKYNENGTITDAVDCALDPLSETKCTLKSFTVEKGIYQTSNFRVLPTESIVRFPNITNLCPFGEVFNATRFASVYAWNRKRISNCVADYSVLYNSASFSTFKCYGVSPTKLNDLCFTNVYADSFVIRGDEVRQIAPGQTGKIADYNYKLPDDFTGCVIAWNSNNLDSKVGGNYNYLYRLFRKSNLKPFERDISTEIYQAGSTPCNGVEGFNCYFPLQSYGFQPTNGVGYQPYRVVVLSFELLHAPATVCGPKKSTNLVKNKCVNFNFNGLTGTGVLTESNKKFLPFQQFGRDIADTTDAVRDPQTLEILDITPCSFGGVSVITPGTNTSNQVAVLYQGVNCTEVPVAIHADQLTPTWRVYSTGSNVFQTRAGCLIGAEHVNNSYECDIPIGAGICASYQTQTNSPRRARSVASQSIIAYTMSLGAENSVAYSNNSIAICTNFTISVTTEILPVSMTKTSVDCTMYICGDSTECSNLLLQYGSFCTQLNRALTGIAVEQDKNTQEVFAQVKQIYKTPPIKDFGGFNFSQILPDPSKPSKRSFIEDLLFNKVTLADAGFIKQYGDCLGDIAARDLICAQKFNGLTVLPPLLTDEMIAQYTSALLAGTITSGWTFGAGAALQIPFAMQMAYRFNGIGVTQNVLYENQKLIANQFNSAIGKIQDSLSSTASALGKLQDVVNQNAQALNTLVKQLSSNFGAISSVLNDILSRLDKVEAEVQIDRLITGRLQSLQTYVTQQLIRAAEIRASANLAATKMSECVLGQSKRVDFCGKGYHLMSFPQSAPHGVVFLHVTYVCAQEKNFTTAPAICHDGKAHFPREGVFVSNGTHWFVTQRNFYEPQIITTDNTFVSGNCDVVIGIVNNTVYDPLQPELDSGGGSGGGQIYEGKLTAEGLRFGIVASRFNHALVDRLVEGAIDAIVRHGGREEDITLVRVPGSWEIPVAAGELARKEDIDAVIAIGVLIRGATPHFDYIASEVSKGLADLSLELRKPITFGVITADTLEQAIERAGTKHGNKGWEAALSAIEMANLFKSLR

SEQ ID NO: 8175 - protein, 1306 aa, Artificial Sequence
  SARS-CoV-2/India/1-27/2020__EPI_ISL_413522 spike protein (1-1146)(P714C_P1068C) LumSynth construct
MFVFLVLLPLVSSQCVNLTTRTQLPPAYTNSFTRGVYYPDKVFRSSVLHSTQDLFLPFFSNVTWFHAIHVSGTNGTKRFDNPVLPFNDGVYFASTEKSNIIRGWIFGTTLDSKTQSLLIVNNATNVVIKVCEFQFCNDPFLGVYHKNNKSWMESEFRVYSSANNCTFEYVSQPFLMDLEGKQGNFKNLREFVFKNIDGYFKIYSKHTPINLVRDLPQGFSALEPLVDLPIGINITRFQTLLALHRSYLTPGDSSSGWTAGAAAYYVGYLQPRTFLLKYNENGTITDAVDCALDPLSETKCTLKSFTVEKGIYQTSNFRVQPTESIVRFPNITNLCPFGEVFNATRFASVYAWNRKRISNCVADYSVLYNSASFSTFKCYGVSPTKLNDLCFTNVYADSFVIRGDEVIQIAPGQTGKIADYNYKLPDDFTGCVIAWNSNNLDSKVGGNYNYLYRLFRKSNLKPFERDISTEIYQAGSTPCNGVEGFNCYFPLQSYGFQPTNGVGYQPYRVVVLSFELLHAPATVCGPKKSTNLVKNKCVNFNFNGLTGTGVLTESNKKFLPFQQFGRDIADTTDAVRDPQTLEILDITPCSFGGVSVITPGTNTSNQVAVLYQDVNCTEVPVAIHADQLTPTWRVYSTGSNVFQTRAGCLIGAEHVNNSYECDIPIGAGICASYQTQTNSPRRARSVASQSIIAYTMSLGAENSVAYSNNSIAICTNFTISVTTEILPVSMTKTSVDCTMYICGDSTECSNLLLQYGSFCTQLNRALTGIAVEQDKNTQEVFAQVKQIYKTPPIKDFGGFNFSQILPDPSKPSKRSFIEDLLFNKVTLADAGFIKQYGDCLGDIAARDLICAQKFNGLTVLPPLLTDEMIAQYTSALLAGTITSGWTFGAGAALQIPFAMQMAYRFNGIGVTQNVLYENQKLIANQFNSAIGKIQDSLSSTASALGKLQDVVNQNAQALNTLVKQLSSNFGAISSVLNDILSRLDKVEAEVQIDRLITGRLQSLQTYVTQQLIRAAEIRASANLAATKMSECVLGQSKRVDFCGKGYHLMSFPQSAPHGVVFLHVTYVCAQEKNFTTAPAICHDGKAHFPREGVFVSNGTHWFVTQRNFYEPQIITTDNTFVSGNCDVVIGIVNNTVYDPLQPELDSGGGSGGGQIYEGKLTAEGLRFGIVASRFNHALVDRLVEGAIDAIVRHGGREEDITLVRVPGSWEIPVAAGELARKEDIDAVIAIGVLIRGATPHFDYIASEVSKGLADLSLELRKPITFGVITADTLEQAIERAGTKHGNKGWEAALSAIEMANLFKSLR

SEQ ID NO: 8176 - protein, 1301 aa, Artificial Sequence
  SARS-CoV-2/pangolin/Guangxi/P4L/2017__EPI_ISL_410538 spike protein (1-1141)(P709C_P1063C) LumSynth construct
MFVFLFVLPLVSSQCVNLTTRTGIPPGYTNSSTRGVYYPDKVFRSSILHLTQDLFLPFFSNVTWFNTINYQGGFKKFDNPVLPFNDGVYFASTEKSNIIRGWIFGTTLDARTQSLLIVNNATNVVIKVCEFQFCTDPFLGVYYHNNNKTWVENEFRVYSSANNCTFEYISQPFLMDLEGKQGNFKNLREFVFKNVDGYFKIYSKHTPIDLVRDLPRGFAALEPLVDLPIGINITRFQTLLALHRSYLTPGNLESGWTTGAAAYYVGYLQQRTFLLSYNQNGTITDAVDCSLDPLSETKCTLKSLTVEKGIYQTSNFRVQPTISIVRFPNITNLCPFGEVFNASKFASVYAWNRKRISNCVADYSVLYNSTSFSTFKCYGVSPTKLNDLCFTNVYADSFVVKGDEVRQIAPGQTGVIADYNYKLPDDFTGCVIAWNSVKQDALTGGNYGYLYRLFRKSKLKPFERDISTEIYQAGSTPCNGQVGLNCYYPLERYGFHPTTGVNYQPFRVVVLSFELLNGPATVCGPKLSTTLVKDKCVNFNFNGLTGTGVLTTSKKQFLPFQQFGRDISDTTDAVRDPQTLEILDITPCSFGGVSVITPGTNTSNQVAVLYQDVNCTEVPMAIHAEQLTPAWRVYSAGANVFQTRAGCLVGAEHVNNSYECDIPVGAGICASYHSMSSLRSVNQRSIIAYTMSLGAENSVAYSNNSIAICTNFTISVTTEILPVSMTKTSVDCTMYICGDSIECSNLLLQYGSFCTQLNRALTGIAVEQDKNTQEVFAQVKQIYKTPPIKDFGGFNFSQILPDPSKPSKRSFIEDLLFNKVTLADAGFIKQYGDCLGDIAARDLICAQKFNGLTVLPPLLTDEMIAQYTSALLAGTITSGWTFGAGAALQIPFAMQMAYRFNGIGVTQNVLYENQKLIANQFNSAIGKIQDSLSSTASALGKLQDVVNQNAQALNTLVKQLSSNFGAISSVLNDILSRLDKVEAEVQIDRLITGRLQSLQTYVTQQLIRAAEIRASANLAATKMSECVLGQSKRVDFCGKGYHLMSFPQSAPHGVVFLHVTYVCAQEKNFTTAPAICHEGKAHFPREGVFVSNGTHWFITQRNFYEPQIITTDNTFVSGSCDVVIGIVNNTVYDPLQPELDSGGGSGGGQIYEGKLTAEGLRFGIVASRFNHALVDRLVEGAIDAIVRHGGREEDITLVRVPGSWEIPVAAGELARKEDIDAVIAIGVLIRGATPHFDYIASEVSKGLADLSLELRKPITFGVITADTLEQAIERAGTKHGNKGWEAALSAIEMANLFKSLR

SEQ ID NO: 8177 - protein, 1301 aa, Artificial Sequence
  SARS-CoV-2/pangolin/Guangxi/P5L/2017__EPI_ISL_410540 spike protein (1-1141)(P709C_P1063C) LumSynth construct
MFVFLFVLPLVSSQCVNLTTRTGIPPGYTNSSTRGVYYPDKVFRSSILHLTQDLFLPFFSNVTWFNTINYQGGFKKFDNPVLPFNDGVYFASTEKSNIIRGWIFGTTLDARTQSLLIVNNATNVVIKVCEFQFCTDPFLGVYYHNNNKTWVENEFRVYSSANNCTFEYISQPFLMDLEGKQGNFKNLREFVFKNVDGYFKIYSKHTPIDLVRDLPRGFAALEPLVDLPIGINITRFQTLLALHRSYLTPGKLESGWTTGAAAYYVGYLQQRTFLLSYNQNGTITDAVDCSLDPLSETKCTLKSLTVEKGIYQTSNFRVQPTISIVRFPNITNLCPFGEVFNASKFASVYAWNRKRISNCVADYSVLYNSTSFSTFKCYGVSPTKLNDLCFTNVYADSFVVKGDEVRQIAPGQTGVIADYNYKLPDDFTGCVIAWNSVKQDALTGGNYGYLYRLFRKSKLKPFERDISTEIYQAGSTPCNGQVGLNCYYPLERYGFHPTTGVNYQPFRVVVLSFELLNGPATVCGPKLSTTLVKDKCVNFNFNGLTGTGVLTTSKKQFLPFQQFGRDISDTTDAVRDPQTLEILDITPCSFGGVSVITPGTNTSNQVAVLYQDVNCTEVPMAIHAEQLTPAWRVYSAGANVFQTRAGCLVGAEHVNNSYECDIPVGAGICASYHSMSSFRSVNQRSIIAYTMSLGAENSVAYSNNSIAICTNFTISVTTEILPVSMTKTSVDCTMYICGDSIECSNLLLQYGSFCTQLNRALTGIAVEQDKNTQEVFAQVKQIYKTPPIKDFGGFNFSQILPDPSKPSKRSFIEDLLFNKVTLADAGFIKQYGDCLGDIAARDLICAQKFNGLTVLPPLLTDEMIAQYTSALLAGTITSGWTFGAGAALQIPFAMQMAYRFNGIGVTQNVLYENQKLIANQFNSAIGKIQDSLSSTASALGKLQDVVNQNAQALNTLVKQLSSNFGAISSVLNDILSRLDKVEAEVQIDRLITGRLQSLQTYVTQQLIRAAEIRASANLAATKMSECVLGQSKRVDFCGKGYHLMSFPQSAPHGVVFLHVTYVCAQEKNFTTAPAICHEGKAHFPREGVFVSNGTHWFITQRNFYEPQIITTDNTFVSGSCDVVIGIVNNTVYDPLQPELDSGGGSGGGQIYEGKLTAEGLRFGIVASRFNHALVDRLVEGAIDAIVRHGGREEDITLVRVPGSWEIPVAAGELARKEDIDAVIAIGVLIRGATPHFDYIASEVSKGLADLSLELRKPITFGVITADTLEQAIERAGTKHGNKGWEAALSAIEMANLFKSLR

SEQ ID NO: 8178 - protein, 1301 aa, Artificial Sequence
  SARS-CoV-2/pangolin/Guangxi/P5E/2017__EPI_ISL_410541 spike protein (1-1141)(P709C_P1063C) LumSynth construct
MFVFLFVLPLVSSQCVNLTTRTGIPPGYTNSSTRGVYYPDKVFRSSILHLTQDLFLPFFSNVTWFNTITYQGGSKKFDNPVLPFNDGVYFASTEKSNIIRGWIFGTTLDARTQSLLIVNNATNVVIKVCEFQFCTDPFLGVYYHNNNKTWVENEFRVYSSANNCTFEYISQPFLMDLEGKQGNFKNLREFVFKNVDGYFKIYSKHTPIDLVRDLPRGFAALEPLVDLPIGINITRFQTLLALHRSYLTPGKLESGWTTGAAAYYVGYLQQRTFLLSYNQNGTITDAVDCSLDPLSETKCTLKSLTVEKGIYQTSNFRVQPTISIVRFPNITNLCPFGEVFNASKFASVYAWNRKRISNCVADYSVLYNSTSFSTFKCYGVSPTKLNDLCFTNVYADSFVVKGDEVRQIAPGQTGVIADYNYKLPDDFTGCVIAWNSVKQDALTGDNYGYLYRLFRKSKLKPFERDISTEIYQAGSTPCNGQVGLNCYYPLERYGFHPTTGVNYQPFRVVVLSFELLNGPATVCGPKLSTTLVKDKCVNFNFNGLTGTGVLTTSKKQFLPFQQFGRDISDTTDAVRDPQTLEILDITPCSFGGVSVITPGTNTSNQVAVLYQDVNCTEVPMAIHAEQLTPAWRVYSAGANVFQTRAGCLVGAEHVNNSYECDIPVGAGICASYHSMSSFRSVNQRSIIAYTMSLGAENSVAYSNNSIAICTNFTISVTTEILPVSMTKTSVDCTMYICGDSIECSNLLLQYGSFCTQLNRALTGIAVEQDKNTQEVFAQVKQIYKTPPIKDFGGFNFSQILPDPSKPSKRSFIEDLLFNKVTLADAGFIKQYGDCLGDIAARDLICAQKFNGLTVLPPLLTDEMIAQYTSALLAGTITSGWTFGAGAALQIPFAMQMAYRFNGIGVTQNVLYENQKLIANQFNSAIGKIQDSLSSTASALGKLQDVVNQNAQALNTLVKQLSSNFGAISSVLNDILSRLDKVEAEVQIDRLITGRLQSLQTYVTQQLIRAAEIRASANLAATKMSECVLGQSKRVDFCGKGYHLMSFPQSAPHGVVFLHVTYVCAQEKNFTTAPAICHEGKAHFPREGVFVSNGTHWFITQRNFYEPQIITTDNTFVSGSCDVVIGIVNNTVYDPLQPELDSGGGSGGGQIYEGKLTAEGLRFGIVASRFNHALVDRLVEGAIDAIVRHGGREEDITLVRVPGSWEIPVAAGELARKEDIDAVIAIGVLIRGATPHFDYIASEVSKGLADLSLELRKPITFGVITADTLEQAIERAGTKHGNKGWEAALSAIEMANLFKSLR

SEQ ID NO: 8179 - protein, 1299 aa, Artificial Sequence
  SARS-CoV-2/pangolin/Guangxi/P1E/2017__EPI_ISL_410539 spike protein (1-1139)(P707C_P1061C) LumSynth construct
MFVFLFVLPLVSSQCVNLTTRTGIQPGYTNSSTRGVYYPDKVFRSSILHLTQDLFLPFFSNVTWFNTINYQGGFKKFDNPVLPFNDGVYFASTEKSNIIRGWIFGTTLDARTQSLLIVNNATNVVIKVCEFQFCTDPFLGVYYHNNNKTWVENEFRVYSSANNCTFEYISQPFLMDLEGKQGNFKNLREFVFKNVDGYFKIYSKHTPIDLVRDLPRGFAALEPLVDLPIGINITRFQTLLALHRSYLTPGKLESGWTTGAAAYYVGYLQQRTFLLSYNQNGTITDAVDCSLDPLSETKCTLKSLTVEKGIYQTSNFRVQPTISIVRFPNITNLCPFGEVFNASKFASVYAWNRKRISNCVADYSVLYNSTSFSTFKCYGVSPTKLNDLCFTNVYADSFVVKGDEVRQIAPGQTGVIADYNYKLPDDFTGCVIAWNSVKQDALTGGNYLYRLFRKSKLKPFERDISTEIYQAGSTPCNGQVGLNCYYPLERYGFHPTTGVNYQPFRVVVLSFELLNGPATVCGPKLSTTLVKDKCVNFNFNGLTGTGVLTTSKKQFLPFQQFGRDISDTTDAVRDPQTLEILDITPCSFGGVSVITPGTNTSNQVAVLYQDVNCTEVPMAIHAEQLTPAWRVYSAGANVFQTRAGCLVGAEHVNNSYECDIPVGAGICASYHSMSSLRSVNQRSIIAYTMSLGAENSVAYSNNSIAICTNFTISVTTEILPVSMTKTSVDCTMYICGDSIECSNLLLQYGSFCTQLNRALTGIAVEQDKNTQEVFAQVKQIYKTPPIKDFGGFNFSQILPDPSKPSKRSFIEDLLFNKVTLADAGFIKQYGDCLGDIAARDLICAQKFNGLTVLPPLLTDEMIAQYTSALLAGTITSGWTFGAGAALQIPFAMQMAYRFNGIGVTQNVLYENQKLIANQFNSAIGKIQDSLSSTASALGKLQDVVNQNAQALNTLVKQLSSNFGAISSVLNDILSRLDKVEAEVQIDRLITGRLQSLQTYVTQQLIRAAEIRASANLAATKMSECVLGQSKRVDFCGKGYHLMSFPQSAPHGVVFLHVTYVCAQEKNFTTAPAICHEGKAHFPREGVFVSNGTHWFITQRNFYEPQIITTDNTFVSGSCDVVIGIVNNTVYDPLQPELDSGGGSGGGQIYEGKLTAEGLRFGIVASRFNHALVDRLVEGAIDAIVRHGGREEDITLVRVPGSWEIPVAAGELARKEDIDAVIAIGVLIRGATPHFDYIASEVSKGLADLSLELRKPITFGVITADTLEQAIERAGTKHGNKGWEAALSAIEMANLFKSLR

SEQ ID NO: 8180 - protein, 1307 aa, Artificial Sequence
  SARS-CoV-2/Wuhan/WIV05/2019__EPI_ISL_402128 spike protein (1-1147)(G889C_L1034C) LumSynth construct
MFVFLVLLPLVSSQCVNLTTRTQLPPAYTNSFTRGVYYPDKVFRSSVLHSTQDLFLPFFSNVTWFHAIHVSGTNGTKRFDNPVLPFNDGVYFASTEKSNIIRGWIFGTTLDSKTQSLLIVNNATNVVIKVCEFQFCNDPFLGVYYHKNNKSWMESEFRVYSSANNCTFEYVSQPFLMDLEGKQGNFKNLREFVFKNIDGYFKIYSKHTPINLVRDLPQGFSALEPLVDLPIGINITRFQTLLALHRSYLTPGDSSSGWTAGAAAYYVGYLQPRTFLLKYNENGTITDAVDCALDPLSETKCTLKSFTVEKGIYQTSNFRVQPTESIVRFPNITNLCPFGEVFNATRFASVYAWNRKRISNCVADYSVLYNSASFSTFKCYGVSPTKLNDLCFTNVYADSFVIRGDEVRQIAPGQTGKIADYNYKLPDDFTGCVIAWNSNNLDSKVGGNYNYLYRLFRKSNLKPFERDISTEIYQAGSTPCNGVEGFNCYFPLQSYGFQPTNGVGYQPYRVVVLSFELLHAPATVCGPKKSTNLVKNKCVNFNFNGLTGTGVLTESNKKFLPFQQFGRDIADTTDAVRDPQTLEILDITPCSFGGVSVITPGTNTSNQVAVLYQDVNCTEVPVAIHADQLTPTWRVYSTGSNVFQTRAGCLIGAEHVNNSYECDIPIGAGICASYQTQTNSPRRARSVASQSIIAYTMSLGAENSVAYSNNSIAIPTNFTISVTTEILPVSMTKTSVDCTMYICGDSTECSNLLLQYGSFCTQLNRALTGIAVEQDKNTQEVFAQVKQIYKTPPIKDFGGFNFSQILPDPSKPSKRSFIEDLLFNKVTLADAGFIKQYGDCLGDIAARDLICAQKFNGLTVLPPLLTDEMIAQYTSALLAGTITSGWTFCAGAALQIPFAMQMAYRFNGIGVTQNVLYENQKLIANQFNSAIGKIQDSLSSTASALGKLQDVVNQNAQALNTLVKQLSSNFGAISSVLNDILSRLDKVEAEVQIDRLITGRLQSLQTYVTQQLIRAAEIRASANLAATKMSECVCGQSKRVDFCGKGYHLMSFPQSAPHGVVFLHVTYVPAQEKNFTTAPAICHDGKAHFPREGVFVSNGTHWFVTQRNFYEPQIITTDNTFVSGNCDVVIGIVNNTVYDPLQPELDSGGGSGGGQIYEGKLTAEGLRFGIVASRFNHALVDRLVEGAIDAIVRHGGREEDITLVRVPGSWEIPVAAGELARKEDIDAVIAIGVLIRGATPHFDYIASEVSKGLADLSLELRKPITFGVITADTLEQAIERAGTKHGNKGWEAALSAIEMANLFKSLR

SEQ ID NO: 8181 - protein, 1303 aa, Artificial Sequence
  SARS-CoV-2/bat/Yunnan/RaTG13/2013__EPI_ISL_402131 spike protein (1-1143)(G885C_L1030C) LumSynth construct
MFVFLVLLPLVSSQCVNLTTRTQLPPAYTNSSTRGVYYPDKVFRSSVLHLTQDLFLPFFSNVTWFHAIHVSGTNGIKRFDNPVLPFNDGVYFASTEKSNIIRGWIFGTTLDSKTQSLLIVNNATNVVIKVCEFQFCNDPFLGVYYHKNNKSWMESEFRVYSSANNCTFEYVSQPFLMDLEGKQGNFKNLREFVFKNIDGYFKIYSKHTPINLVRDLPPGFSALEPLVDLPIGINITRFQTLLALHRSYLTPGDSSSGWTAGAAAYYVGYLQPRTFLLKYNENGTITDAVDCALDPLSETKCTLKSFTVEKGIYQTSNFRVQPTDSIVRFPNITNLCPFGEVFNATTFASVYAWNRKRISNCVADYSVLYNSTSFSTFKCYGVSPTKLNDLCFTNVYADSFVITGDEVRQIAPGQTGKIADYNYKLPDDFTGCVIAWNSKHIDAKEGGNFNYLYRLFRKANLKPFERDISTEIYQAGSKPCNGQTGLNCYYPLYRYGFYPTDGVGHQPYRVVVLSFELLNAPATVCGPKKSTNLVKNKCVNFNFNGLTGTGVLTESNKKFLPFQQFGRDIADTTDAVRDPQTLEILDITPCSFGGVSVITPGTNASNQVAVLYQDVNCTEVPVAIHADQLTPTWRVYSTGSNVFQTRAGCLIGAEHVNNSYECDIPIGAGICASYQTQTNSRSVASQSIIAYTMSLGAENSVAYSNNSIAIPTNFTISVTTEILPVSMTKTSVDCTMYICGDSTECSNLLLQYGSFCTQLNRALTGIAVEQDKNTQEVFAQVKQIYKTPPIKDFGGFNFSQILPDPSKPSKRSFIEDLLFNKVTLADAGFIKQYGDCLGDIAARDLICAQKFNGLTVLPPLLTDEMIAQYTSALLAGTITSGWTFCAGAALQIPFAMQMAYRFNGIGVTQNVLYENQKLIANQFNSAIGKIQDSLSSTASALGKLQDVVNQNAQALNTLVKQLSSNFGAISSVLNDILSRLDKVEAEVQIDRLITGRLQSLQTYVTQQLIRAAEIRASANLAATKMSECVCGQSKRVDFCGKGYHLMSFPQSAPHGVVFLHVTYVPAQEKNFTTAPAICHDGKAHFPREGVFVSNGTHWFVTQRNFYEPQIITTDNTFVSGSCDVVIGIVNNTVYDPLQPELDSGGGSGGGQIYEGKLTAEGLRFGIVASRFNHALVDRLVEGAIDAIVRHGGREEDITLVRVPGSWEIPVAAGELARKEDIDAVIAIGVLIRGATPHFDYIASEVSKGLADLSLELRKPITFGVITADTLEQAIERAGTKHGNKGWEAALSAIEMANLFKSLR

SEQ ID NO: 8182 - protein, 1307 aa, Artificial Sequence
  SARS-CoV-2/Wuhan/HBCDC-HB-01/2019__EPI_ISL_402132 spike protein (1-1147)(G889C_L1034C) LumSynth construct
MFVFLVLLPLVSSQCVNLTTRTQLPPAYTNSITRGVYYPDKVFRSSVLHSTQDLFLPFFSNVTWFHAIHVSGTNGTKRFDNPVLPFNDGVYFASTEKSNIIRGWIFGTTLDSKTQSLLIVNNATNVVIKVCEFQFCNDPFLGVYYHKNNKSWMESEFRVYSSANNCTFEYVSQPFLMDLEGKQGNFKNLREFVFKNIDGYFKIYSKHTPINLVRDLPQGFSALEPLVDLPIGINITRFQTLLALHRSYLTPGDSSSGWTAGAAAYYVGYLQPRTFLLKYNENGTITDAVDCALDPLSETKCTLKSFTVEKGIYQTSNFRVQPTESIVRFPNITNLCPFGEVFNATRFASVYAWNRKRISNCVADYSVLYNSASFSTFKCYGVSPTKLNDLCFTNVYADSFVIRGDEVRQIAPGQTGKIADYNYKLPDDFTGCVIAWNSNNLDSKVGGNYNYLYRLFRKSNLKPFERDISTEIYQAGSTPCNGVEGFNCYFPLQSYGFQPTNGVGYQPYRVVVLSFELLHAPATVCGPKKSTNLVKNKCVNFNFNGLTGTGVLTESNKKFLPFQQFGRDIADTTDAVRDPQTLEILDITPCSFGGVSVITPGTNTSNQVAVLYQDVNCTEVPVAIHADQLTPTWRVYSTGSNVFQTRAGCLIGAEHVNNSYECDIPIGAGICASYQTQTNSPRRARSVASQSIIAYTMSLGAENSVAYSNNSIAIPTNFTISVTTEILPVSMTKTSVDCTMYICGDSTECSNLLLQYGSFCTQLNRALTGIAVEQDKNTQEVFAQVKQIYKTPPIKDFGGFNFSQILPDPSKPSKRSFIEDLLFNKVTLADAGFIKQYGDCLGDIAARDLICAQKFNGLTVLPPLLTDEMIAQYTSALLAGTITSGWTFCAGAALQIPFAMQMAYRFNGIGVTQNVLYENQKLIANQFNSAIGKIQDSLSSTASALGKLQDVVNQNAQALNTLVKQLSSNFGAISSVLNDILSRLDKVEAEVQIDRLITGRLQSLQTYVTQQLIRAAEIRASANLAATKMSECVCGQSKRVDFCGKGYHLMSFPQSAPHGVVFLHVTYVPAQEKNFTTAPAICHDGKAHFPREGVFVSNGTHWFVTQRNFYEPQIITTDNTFVSGNCDVVIGIVNNTVYDPLQPELDSGGGSGGGQIYEGKLTAEGLRFGIVASRFNHALVDRLVEGAIDAIVRHGGREEDITLVRVPGSWEIPVAAGELARKEDIDAVIAIGVLIRGATPHFDYIASEVSKGLADLSLELRKPITFGVITADTLEQAIERAGTKHGNKGWEAALSAIEMANLFKSLR

SEQ ID NO: 8183 - protein, 1307 aa, Artificial Sequence
  SARS-CoV-2/Guangdong/20SF028/2020__EPI_ISL_403936 spike protein (1-1147)(G889C_L1034C) LumSynth construct
MFVFLVLLPLVSSQCVNLTTRTQLPPAYTNSFTRGVYYPDKVFRSSVLYSTQDLFLPFFSNVTWFHAIHVSGTNGTKRFDNPVLPFNDGVYFASTEKSNIIRGWIFGTTLDSKTQSLLIVNNATNVVIKVCEFQFCNDPFLGVYYHKNNKSWMESEFRVYSSANNCTFEYVSQPFLMDLEGKQGNFKNLREFVFKNIDGYFKIYSKHTPINLVRDLPQGFSALEPLVDLPIGINITRFQTLLALHRSYLTPGDSSSGWTAGAAAYYVGYLQPRTFLLKYNENGTITDAVDCALDPLSETKCTLKSFTVEKGIYQTSNFRVQPTESIVRFPNITNLCPFGEVFNATRFASVYAWNRKRISNCVADYSVLYNSASFSTFKCYGVSPTKLNDLCFTNVYADSFVIRGDEVRQIAPGQTGKIADYNYKLPDDFTGCVIAWNSNNLDSKVGGNYNYLYRLFRKSNLKPFERDISTEIYQAGSTPCNGVEGFNCYFPLQSYGFQPTNGVGYQPYRVVVLSFELLHAPATVCGPKKSTNLVKNKCVNFNFNGLTGTGVLTESNKKFLPFQQFGRDIADTTDAVRDPQTLEILDITPCSFGGVSVITPGTNTSNQVAVLYQDVNCTEVPVAIHADQLTPTWRVYSTGSNVFQTRAGCLIGAEHVNNSYECDIPIGAGICASYQTQTNSPRRARSVASQSIIAYTMSLGAENSVAYSNNSIAIPTNFTISVTTEILPVSMTKTSVDCTMYICGDSTECSNLLLQYGSFCTQLNRALTGIAVEQDKNTQEVFAQVKQIYKTPPIKDFGGFNFSQILPDPSKPSKRSFIEDLLFNKVTLADAGFIKQYGDCLGDIAARDLICAQKFNGLTVLPPLLTDEMIAQYTSALLAGTITSGWTFCAGAALQIPFAMQMAYRFNGIGVTQNVLYENQKLIANQFNSAIGKIQDSLSSTASALGKLQDVVNQNAQALNTLVKQLSSNFGAISSVLNDILSRLDKVEAEVQIDRLITGRLQSLQTYVTQQLIRAAEIRASANLAATKMSECVCGQSKRVDFCGKGYHLMSFPQSAPHGVVFLHVTYVPAQEKNFTTAPAICHDGKAHFPREGVFVSNGTHWFVTQRNFYEPQIITTDNTFVSGNCDVVIGIVNNTVYDPLQPELDSGGGSGGGQIYEGKLTAEGLRFGIVASRFNHALVDRLVEGAIDAIVRHGGREEDITLVRVPGSWEIPVAAGELARKEDIDAVIAIGVLIRGATPHFDYIASEVSKGLADLSLELRKPITFGVITADTLEQAIERAGTKHGNKGWEAALSAIEMANLFKSLR

SEQ ID NO: 8184 - protein, 1307 aa, Artificial Sequence
  SARS-CoV-2/Shenzhen/SZTH-001/2020__EPI_ISL_406592 spike protein (1-1147)(G889C_L1034C) LumSynth construct
MFVFLVLLPLVSSQCVNLTTRTQLPPAYTNSFTRGVYYPDKVFRSSVLHSTQDLFLPFFSNVTWFHAIHVSGTNGTKRFDNPVLPFNDGVYFASTEKSNIIRGWIFGTTLDSKTQSLLIVNNATNVVIKVCEFQFCNDPFLGVYYHKNNKSWMESEFRVYSSANNCTFEYVSQPFLMDLEGKQGNFKNLREFVFKNIDGYFKIYSKHTPINLVRDLPQGFSALEPLVDLPIGINITRFQTLLALHRSYLTPGDSSSGWTAGAAAYYVGYLQPRTFLLKYNENGTITDAVDCALDPLSETKCTLKSFTVEKGIYQTSNFRVQPTESIVRFPNITNLCPFGEVFNATRFASVYAWNRKRISNCVADYSVLYNSASFSTFKCYGVSPTKLNDLCFTNVYADSFVIRGDEVRQIAPGQTGKIADYNYKLPDDFTGCVIAWNSNNLDSKVGGNYNYLYRLFRKSNLKPFERDISTEIYQAGSTPCNGVEGFNCYFPLQSYGFQPTNGVGYQPYRVVVLSFELLHAPATVCGPKKSTNLVKNKCVNFNFNGLTGTGVLTESNKKFLPFQQFGRDIADTTDAVRDPQTLEILDITPCSFGGVSVITPGTNTSNQVAVLYQDVNCTEVPVAIHADQLTPTWRVYSTGSNVFQTRAGCLIGAEHVNNSYECDIPIGAGICASYQTQTNSPRRARSVASQSIIAYTMSLGAENSVAYSNNSIAIPTNFTISVTTEILPVSMTKTSVDCTMYICGDSTECSNLLLQYGSFCTQLNRALTGIAVEQDKNTQEVFAQVKQIYKTPPIKDFGGFNFSQILPDPSKPSKRSFIEDLLFNKVTLADAGFIKQYGDCLGDIAARDLICAQKFNGLTVLPPLLTDEMIAQYTSALLAGTITSGWTFCAGAALQIPFAMQMAYRFNGIGVTQNVLYENQKLIANQFNSAIGKIQDSLSSTASALGKLQDVVNQNAQALNTLVKQLSSNFGAISSVLNDILSRLDKVEAEVQIDRLITGRLQSLQTYVTQQLIRAAEIRASANLAATKMSECVCGQSKRVDFCGKGYHLMSFPQSAPHGVVFLHVTYVPAQEKNFTTAPAICHDGKAHFPREGVFVSNGTHWFVTQRNFYEPQIITTDNTFVSGNCDVLIGIVNNTVYDPLQPELDSGGGSGGGQIYEGKLTAEGLRFGIVASRFNHALVDRLVEGAIDAIVRHGGREEDITLVRVPGSWEIPVAAGELARKEDIDAVIAIGVLIRGATPHFDYIASEVSKGLADLSLELRKPITFGVITADTLEQAIERAGTKHGNKGWEAALSAIEMANLFKSLR

SEQ ID NO: 8185 - protein, 1307 aa, Artificial Sequence
  SARS-CoV-2/Shenzhen/SZTH-004/2020__EPI_ISL_406595 spike protein (1-1147)(G889C_L1034C) LumSynth construct
MFVFLVLLPLVSSQCVNLTTRTQLPPAYTNSFTRGVYYPDKVFRSSVLHSTQDLFLPFFSNVTWFHAIHVSGTNGTKRFDNPVLPFNDGVYFASTEKSNIIRGWIFGTTLDSKTQSLLIVNNATNVVIKVCEFQFCNDPFLGVYYHKNNKSWMESEFRVYSSANNCTFEYVSQPFLMDLEGKQGNFKNLREFVFKNIDGYFKIYSKHTPINLVRDLPQGFSALEPLVDLPIGINITRFQTLLALHRSYLTPGDSSSGWTAGAAAYYVGYLQPRTFLLKYNENGTITDAVDCALDPLSETKCTLKSFTVEKGIYQTSNFRVQPTESIVRFPNITNLCPFGEVFNATRFASVYAWDRKRISNCVAYYSVLYNSASFSTFKCYGVSPTKLNDLCFTNVYADSFVIRGDEVRQIAPGQTGKIADYNYKLPDDFTGCVIAWNSNNLDSKVGGNYNYLYRLFRKSNLKPFERDISTEIYQAGSTPCNGVEGFNCYFPLQSYGFQPTNGVGYQPYRVVVLSFELLHAPATVCGPKKSTNLVKNKCVNFNFNGLTGTGVLTESNKKFLPFQQFGRDIADTTDAVRDPQTLEILDITPCSFGGVSVITPGTNTSNQVAVLYQDVNCTEVPVAIHADQLTPTWRVYSTGSNVFQTRAGCLIGAEHVNNSYECDIPIGAGICASYQTQTNSPRRARSVASQSIIAYTMSLGAENSVAYSNNSIAIPTNFTISVTTEILPVSMTKTSVDCTMYICGDSTECSNLLLQYGSFCTQLNRALTGIAVEQDKNTQEVFAQVKQIYKTPPIKDFGGFNFSQILPDPSKPSKRSFIEDLLFNKVTLADAGFIKQYGDCLGDIAARDLICAQKFNGLTVLPPLLTDEMIAQYTSALLAGTITSGWTFCAGAALQIPFAMQMAYRFNGIGVTQNVLYENQKLIANQFNSAIGKIQDSLSSTASALGKLQDVVNQNAQALNTLVKQLSSNFGAISSVLNDILSRLDKVEAEVQIDRLITGRLQSLQTYVTQQLIRAAEIRASANLAATKMSECVCGQSKRVDFCGKGYHLMSFPQSAPHGVVFLHVTYVPAQEKNFTTAPAICHDGKAHFPREGVFVSNGTHWFVTQRNFYEPQIITTDNTFVSGNCDVVIGIVNNTVYDPLQPELDSGGGSGGGQIYEGKLTAEGLRFGIVASRFNHALVDRLVEGAIDAIVRHGGREEDITLVRVPGSWEIPVAAGELARKEDIDAVIAIGVLIRGATPHFDYIASEVSKGLADLSLELRKPITFGVITADTLEQAIERAGTKHGNKGWEAALSAIEMANLFKSLR

SEQ ID NO: 8186 - protein, 1307 aa, Artificial Sequence
  SARS-CoV-2/France/IDF0372/2020__EPI_ISL_406596 spike protein (1-1147)(G889C_L1034C) LumSynth construct
MFVFLVLLPLVSSQCVNLTTRTQLPPAYTNSFTRGVYYPDKVFRSSVLHSTQDLFLPFFSNVTWFHAIHVSGTNGTKRFDNPVLPFNDGVYFASTEKSNIIRGWIFGTTLDSKTQSLLIVNNATNVVIKVCEFQFCNDPFLGVYYHKNNKSWMESEFRVYSSANNCTFEYVSQPFLMDLEGKQGNFKNLREFVFKNIDGYFKIYSKHTPINLVRDLPQGFSALEPLVDLPIGINITRFQTLLALHRSYLTPGDSSSGWTAGAAAYYVGYLQPRTFLLKYNENGTITDAVDCALDPLSETKCTLKSFTVEKGIYQTSNFRVQPTESIVRFPNITNLCPFGEVFNATRFASVYAWNRKRISNCVADYSFLYNSASFSTFKCYGVSPTKLNDLCFTNVYADSFVIRGDEVRQIAPGQTGKIADYNYKLPDDFTGCVIAWNSNNLDSKVGGNYNYLYRLFRKSNLKPFERDISTEIYQAGSTPCNGVEGFNCYFPLQSYGFQPTNGVGYQPYRVVVLSFELLHAPATVCGPKKSTNLVKNKCVNFNFNGLTGTGVLTESNKKFLPFQQFGRDIADTTDAVRDPQTLEILDITPCSFGGVSVITPGTNTSNQVAVLYQDVNCTEVPVAIHADQLTPTWRVYSTGSNVFQTRAGCLIGAEHVNNSYECDIPIGAGICASYQTQTNSPRRARSVASQSIIAYTMSLGAENSVAYSNNSIAIPTNFTISVTTEILPVSMTKTSVDCTMYICGDSTECSNLLLQYGSFCTQLNRALTGIAVEQDKNTQEVFAQVKQIYKTPPIKDFGGFNFSQILPDPSKPSKRSFIEDLLFNKVTLADAGFIKQYGDCLGDIAARDLICAQKFNGLTVLPPLLTDEMIAQYTSALLAGTITSGWTFCAGAALQIPFAMQMAYRFNGIGVTQNVLYENQKLIANQFNSAIGKIQDSLSSTASALGKLQDVVNQNAQALNTLVKQLSSNFGAISSVLNDILSRLDKVEAEVQIDRLITGRLQSLQTYVTQQLIRAAEIRASANLAATKMSECVCGQSKRVDFCGKGYHLMSFPQSAPHGVVFLHVTYVPAQEKNFTTAPAICHDGKAHFPREGVFVSNGTHWFVTQRNFYEPQIITTDNTFVSGNCDVVIGIVNNTVYDPLQPELDSGGGSGGGQIYEGKLTAEGLRFGIVASRFNHALVDRLVEGAIDAIVRHGGREEDITLVRVPGSWEIPVAAGELARKEDIDAVIAIGVLIRGATPHFDYIASEVSKGLADLSLELRKPITFGVITADTLEQAIERAGTKHGNKGWEAALSAIEMANLFKSLR

SEQ ID NO: 8187 - protein, 1307 aa, Artificial Sequence
  SARS-CoV-2/Australia/VIC01/2020__EPI_ISL_406844 spike protein (1-1147)(G889C_L1034C) LumSynth construct
MFVFLVLLPLVSSQCVNLTTRTQLPPAYTNSFTRGVYYPDKVFRSSVLHSTQDLFLPFFSNVTWFHAIHVSGTNGTKRFDNPVLPFNDGVYFASTEKSNIIRGWIFGTTLDSKTQSLLIVNNATNVVIKVCEFQFCNDPFLGVYYHKNNKSWMESEFRVYSSANNCTFEYVSQPFLMDLEGKQGNFKNLREFVFKNIDGYFKIYSKHTPINLVRDLPQGFSALEPLVDLPIGINITRFQTLLALHRRYLTPGDSSSGWTAGAAAYYVGYLQPRTFLLKYNENGTITDAVDCALDPLSETKCTLKSFTVEKGIYQTSNFRVQPTESIVRFPNITNLCPFGEVFNATRFASVYAWNRKRISNCVADYSVLYNSASFSTFKCYGVSPTKLNDLCFTNVYADSFVIRGDEVRQIAPGQTGKIADYNYKLPDDFTGCVIAWNSNNLDSKVGGNYNYLYRLFRKSNLKPFERDISTEIYQAGSTPCNGVEGFNCYFPLQSYGFQPTNGVGYQPYRVVVLSFELLHAPATVCGPKKSTNLVKNKCVNFNFNGLTGTGVLTESNKKFLPFQQFGRDIADTTDAVRDPQTLEILDITPCSFGGVSVITPGTNTSNQVAVLYQDVNCTEVPVAIHADQLTPTWRVYSTGSNVFQTRAGCLIGAEHVNNSYECDIPIGAGICASYQTQTNSPRRARSVASQSIIAYTMSLGAENSVAYSNNSIAIPTNFTISVTTEILPVSMTKTSVDCTMYICGDSTECSNLLLQYGSFCTQLNRALTGIAVEQDKNTQEVFAQVKQIYKTPPIKDFGGFNFSQILPDPSKPSKRSFIEDLLFNKVTLADAGFIKQYGDCLGDIAARDLICAQKFNGLTVLPPLLTDEMIAQYTSALLAGTITSGWTFCAGAALQIPFAMQMAYRFNGIGVTQNVLYENQKLIANQFNSAIGKIQDSLSSTASALGKLQDVVNQNAQALNTLVKQLSSNFGAISSVLNDILSRLDKVEAEVQIDRLITGRLQSLQTYVTQQLIRAAEIRASANLAATKMSECVCGQSKRVDFCGKGYHLMSFPQSAPHGVVFLHVTYVPAQEKNFTTAPAICHDGKAHFPREGVFVSNGTHWFVTQRNFYEPQIITTDNTFVSGNCDVVIGIVNNTVYDPLQPELDSGGGSGGGQIYEGKLTAEGLRFGIVASRFNHALVDRLVEGAIDAIVRHGGREEDITLVRVPGSWEIPVAAGELARKEDIDAVIAIGVLIRGATPHFDYIASEVSKGLADLSLELRKPITFGVITADTLEQAIERAGTKHGNKGWEAALSAIEMANLFKSLR

SEQ ID NO: 8188 - protein, 1307 aa, Artificial Sequence
  SARS-CoV-2/Germany/BavPat1/2020__EPI_ISL_406862 spike protein (1-1147)(G889C_L1034C) LumSynth construct
MFVFLVLLPLVSSQCVNLTTRTQLPPAYTNSFTRGVYYPDKVFRSSVLHSTQDLFLPFFSNVTWFHAIHVSGTNGTKRFDNPVLPFNDGVYFASTEKSNIIRGWIFGTTLDSKTQSLLIVNNATNVVIKVCEFQFCNDPFLGVYYHKNNKSWMESEFRVYSSANNCTFEYVSQPFLMDLEGKQGNFKNLREFVFKNIDGYFKIYSKHTPINLVRDLPQGFSALEPLVDLPIGINITRFQTLLALHRSYLTPGDSSSGWTAGAAAYYVGYLQPRTFLLKYNENGTITDAVDCALDPLSETKCTLKSFTVEKGIYQTSNFRVQPTESIVRFPNITNLCPFGEVFNATRFASVYAWNRKRISNCVADYSVLYNSASFSTFKCYGVSPTKLNDLCFTNVYADSFVIRGDEVRQIAPGQTGKIADYNYKLPDDFTGCVIAWNSNNLDSKVGGNYNYLYRLFRKSNLKPFERDISTEIYQAGSTPCNGVEGFNCYFPLQSYGFQPTNGVGYQPYRVVVLSFELLHAPATVCGPKKSTNLVKNKCVNFNFNGLTGTGVLTESNKKFLPFQQFGRDIADTTDAVRDPQTLEILDITPCSFGGVSVITPGTNTSNQVAVLYQGVNCTEVPVAIHADQLTPTWRVYSTGSNVFQTRAGCLIGAEHVNNSYECDIPIGAGICASYQTQTNSPRRARSVASQSIIAYTMSLGAENSVAYSNNSIAIPTNFTISVTTEILPVSMTKTSVDCTMYICGDSTECSNLLLQYGSFCTQLNRALTGIAVEQDKNTQEVFAQVKQIYKTPPIKDFGGFNFSQILPDPSKPSKRSFIEDLLFNKVTLADAGFIKQYGDCLGDIAARDLICAQKFNGLTVLPPLLTDEMIAQYTSALLAGTITSGWTFCAGAALQIPFAMQMAYRFNGIGVTQNVLYENQKLIANQFNSAIGKIQDSLSSTASALGKLQDVVNQNAQALNTLVKQLSSNFGAISSVLNDILSRLDKVEAEVQIDRLITGRLQSLQTYVTQQLIRAAEIRASANLAATKMSECVCGQSKRVDFCGKGYHLMSFPQSAPHGVVFLHVTYVPAQEKNFTTAPAICHDGKAHFPREGVFVSNGTHWFVTQRNFYEPQIITTDNTFVSGNCDVVIGIVNNTVYDPLQPELDSGGGSGGGQIYEGKLTAEGLRFGIVASRFNHALVDRLVEGAIDAIVRHGGREEDITLVRVPGSWEIPVAAGELARKEDIDAVIAIGVLIRGATPHFDYIASEVSKGLADLSLELRKPITFGVITADTLEQAIERAGTKHGNKGWEAALSAIEMANLFKSLR

SEQ ID NO: 8189 - protein, 1307 aa, Artificial Sequence
  SARS-CoV-2/Wuhan/HBCDC-HB-02/2020__EPI_ISL_412978 spike protein (1-1147)(G889C_L1034C) LumSynth construct
MFVFLVLLPLVSSQCVNLTTRTQLPPAYTNSFTRGVYYPDKVFRSSVLHSTQDLFLPFFSNVTWFHAIHVSGTNGTKRFDNPVLPFNDGVYFASTEKSNIIRGWIFGTTLDSKTQSLLIVNNATNVVIKVCEFQFCNDPFLGVYYHKNNKSWMESEFRVYSSANNCTFEYVSQPFLMDLEGKQGNFKNLREFVFKNIDGYFKIYSKHTPINLVRDLPQGFSALEPLVDLPIGINITRFQTLLALHRSYLTPGDSSSGWTAGAAAYYVGYLQPRTFLLKYNENGTITDAVDCALDPLSETKCTLKSFTVEKGIYQTSNFRVQPTESIVRFPNITNLCPFGEVFNATRFASVYAWNRKRISNCVADYSVLYNSASFSTFKCYGVSPTKLNDLCFTNVYADSFVIRGDEVRQIAPGQTGKIADYNYKLPDDFTGCVIAWNSNNLDSKVGGNYNYLYRLFRKSNLKPFERDISTEIYQAGSTPCNGVEGFNCYFPLQSYGFQPTNGVGYQPYRVVVLSFELLHAPATVCGPKKSTNLVKNKCVNFNFNGLTGTGVLTESNKKFLPFQQFGRDIADTTDAVRDPQTLEILDITPCSFGGVSVITPGTNTSNQVAVLYQDVNCTEVPVAIHADQLTPTWRVYSTGSNVFQTRAGCLIGAEHVNNSYECDIPIGAGICASYQTQTNSPRRARSVASQSIIAYTMSLGAENSVAYSNNSIAIPTNFTISVTTEILPVSMTKTSVDCTMYICGDSTECSNFLLQYGSFCTQLNRALTGIAVEQDKNTQEVFAQVKQIYKTPPIKDFGGFNFSQILPDPSKPSKRSFIEDLLFNKVTLADAGFIKQYGDCLGDIAARDLICAQKFNGLTVLPPLLTDEMIAQYTSALLAGTITSGWTFCAGAALQIPFAMQMAYRFNGIGVTQNVLYENQKLIANQFNSAIGKIQDSLSSTASALGKLQDVVNQNAQALNTLVKQLSSNFGAISSVLNDILSRLDKVEAEVQIDRLITGRLQSLQTYVTQQLIRAAEIRASANLAATKMSECVCGQSKRVDFCGKGYHLMSFPQSAPHGVVFLHVTYVPAQEKNFTTAPAICHDGKAHFPREGVFVSNGTHWFVTQRNFYEPQIITTDNTFVSGNCDVVIGIVNNTVYDPLQPELDSGGGSGGGQIYEGKLTAEGLRFGIVASRFNHALVDRLVEGAIDAIVRHGGREEDITLVRVPGSWEIPVAAGELARKEDIDAVIAIGVLIRGATPHFDYIASEVSKGLADLSLELRKPITFGVITADTLEQAIERAGTKHGNKGWEAALSAIEMANLFKSLR

SEQ ID NO: 8190 - protein, 1307 aa, Artificial Sequence
  SARS-CoV-2/Australia/QLD02/2020__EPI_ISL_407896 spike protein (1-1147)(G889C_L1034C) LumSynth construct
MFVFLVLLPLVSSQCVNLTTRTQLPPAYTNSFTRGVYYPDKVFRSSVLHSTQDLFLPFFSNVTWFHAIHVSGTNGTKRFDNPVLPFNDGVYFASTEKSNIIRGWIFGTTLDSKTQSLLIVNNATNVVIKVCEFQFCNDPFLGVYYHKNNKSWMESEFRVYSSANNCTFEYVSQPFLMDLEGKQGNFKNLREFVFKNIDGYFKIYSKHTPINLVRDLPQGFSALEPLVDLPIGINITRFQTLLALHRSYLTPGDSSSGWTAGAAAYYVGYLQPRTFLLKYNENGTITDAVDCALDPLSETKCTLKSFTVEKGIYQTSNFRVQPTESIVRFPNITNLCPFGEVFNATRFASVYAWNRKRISNCVADYSVLYNSASFSTFKCYGVSPTKLNDLCFTNVYADSFVIRGDEVRQIAPGQTGKIADYNYKLPDDFTGCVIAWNSNNLDSKVGGNYNYLYRLFRKSNLKPFERDISTEIYQAGSTPCNGVEGFNCYFPLQSYGFQPTNGVGYQPYRVVVLSFELLHAPATVCGPKKSTNLVKNKCVNFNFNGLTGTGVLTESNKKFLPFQQFGRDIADTTDAVRDPQTLEILDITPCSFGGVSVITPGTNTSNQVAVLYQDVNCTEVPVAIHADQLTPTWRVYSTGSNVFQTRAGCLIGAEHVNNSYECDIPIGAGICASYQTQTNSPRRARSVASQSIIAYTMSLGAENSVAYSNNSIAIPTNFTISVTTEILPVSMTKTSVDCTMYICGDSTECSNLLLQYGSFCTQLNRALTGIAVEQDKNTQEVFAQVKQIYKTPPIKDFGGFNFSQILPDPSKPSKRSFIEDLLFNKVTLADAGFIKQYGDCLGDIAARDLICAQKFNGLTVLPPLLTDEMIAQYTSALLAGTITSGWTFCAGAALQIPFAMQMAYRFNGIGVTQNVLYENQKLIANQFNSAIGKIQDSLSSTASALGKLQDVVNQNAQALNTLVKQLSSNFGAISSVLNDILSRLDKVEAEVQIDRLITGRLQSLQTYVTQQLIRAAEIRASANLAATKMSECVCGQSKRVDFCGKGYHLMSFPQSAPHGVVFLHVTYVPAQEKNFTTAPAICHDGKAHFPREGVFVSNGTHWFVTQRNFYEPQIITTDNTFVSGNCDVVIGIVNNTVYDPLQLELDSGGGSGGGQIYEGKLTAEGLRFGIVASRFNHALVDRLVEGAIDAIVRHGGREEDITLVRVPGSWEIPVAAGELARKEDIDAVIAIGVLIRGATPHFDYIASEVSKGLADLSLELRKPITFGVITADTLEQAIERAGTKHGNKGWEAALSAIEMANLFKSLR

SEQ ID NO: 8191 - protein, 1307 aa, Artificial Sequence
  SARS-CoV-2/India/1-31/2020__EPI_ISL_413523 spike protein (1-1147)(G889C_L1034C) LumSynth construct
MFVFLVLLPLVSSQCVNLTTRTQLPPAYTNSFTRGVYYPDKVFRSSVLHSTQDLFLPFFSNVTWFHAIHVSGTNGTKRFDNPVLPFNDGVYFASTEKSNIIRGWIFGTTLDSKTQSLLIVNNATNVVIKVCEFQFCNDPFLGVYYHKNNKSWMESEFRVYSSANNCTFEYVSQPFLMDLEGKQGNFKNLREFVFKNIDGYFKIYSKHTPINLVRDLPQGFSALEPLVDLPIGINITRFQTLLALHRSYLTPGDSSSGWTAGAAAYYVGYLQPRTFLLKYNENGTITDAVDCALDPLSETKCTLKSFTVEKGIYQTSNFRVQPTESIVRFPNITNLCPFGEVFNATRFASVYAWNRKRISNCVADYSVLYNSASFSTFKCYGVSPTKLNDLCFTNVYADSFVIRGDEVRQIAPGQTGKIADYNYKLPDDFTGCVIAWNSNNLDSKVGGNYNYLYRLFRKSNLKPFERDISTEIYQAGSTPCNGVEGFNCYFPLQSYGFQPTNGVGYQPYRVVVLSFELLHAPATVCGPKKSTNLVKNKCVNFNFNGLTGTGVLTESNKKFLPFQQFGRDIADTTDAVRDPQTLEILDITPCSFGGVSVITPGTNTSNQVAVLYQDVNCTEVPVAIHADQLTPTWRVYSTGSNVFQTRAGCLIGAEHVNNSYECDIPIGAGICASYQTQTNSPRRARSVASQSIIAYTMSLGAENSVAYSNNSIAIPTNFTISVTTEILPVSMTKTSVDCTMYICGDSTECSNLLLQYGSFCTQLNRALTGIAVEQDKNTQEVFAQVKQIYKTPPIKDFGGFNFSQILPDPSKPSKRSFIEDLLFNKVTLADAGFIKQYGDCLGDIAARDLICAQKFNGLTVLPPLLTDEMIAQYTSALLAGTITSGWTFCAGAALQIPFAMQMAYRFNGIGVTQNVLYENQKLIANQFNSVIGKIQDSLSSTASALGKLQDVVNQNAQALNTLVKQLSSNFGAISSVLNDILSRLDKVEAEVQIDRLITGRLQSLQTYVTQQLIRAAEIRASANLAATKMSECVCGQSKRVDFCGKGYHLMSFPQSAPHGVVFLHVTYVPAQEKNFTTAPAICHDGKAHFPREGVFVSNGTHWFVTQRNFYEPQIITTDNTFVSGNCDVVIGIVNNTVYDPLQPELDSGGGSGGGQIYEGKLTAEGLRFGIVASRFNHALVDRLVEGAIDAIVRHGGREEDITLVRVPGSWEIPVAAGELARKEDIDAVIAIGVLIRGATPHFDYIASEVSKGLADLSLELRKPITFGVITADTLEQAIERAGTKHGNKGWEAALSAIEMANLFKSLR

SEQ ID NO: 8192 - protein, 1307 aa, Artificial Sequence
  SARS-CoV-2/Guangdong/GD2020087-P0008/2020__EPI_ISL_413863 spike protein (1-1147)(G889C_L1034C) LumSynth construct
MFVFLVLLPLVSSQCVNLTTRTQLPPAYTNSFTRGVYYPDKVFRSSVLHSTQDLFLPFFSNVTWFHAIHVSGTNGTKRFDNPVLPFNDGVYFASTEKSNIIRGWIFGTTLDSKTQSLLIVNNATNVVIKVCEFQFCNDPFLGVYYHKNNKSWMESEFRVYSSANNCTFEYVSQPFLMDLEGKQGNFKNLREFVFKNIDGYFKIYSKHTPINLVRDLPQGFSALEPLVDLPIGINITRFQTLLALHRSYLTPGDSSSGWTAGAAAYYVGYLQPRTFLLKYNENGTITDAVDCALDPLSETKCTLKSFTVEKGIYQTSNFRVQPTESIVRFPNITNLCPFGEVFNATRFASVYAWNRKRISNCVADYSVLYNSASFSTFKCYGVSPTKLNDLCFTNVYADSFVIRGDEVREIAPGQTGKIADYNYKLPDDFTGCVIAWNSNNLDSKVGGNYNYLYRLFRKSNLKPFERDISTEIYQAGSTPCNGVEGFNCYFPLQSYGFQPTNGVGYQPYRVVVLSFELLHAPATVCGPKKSTNLVKNKCVNFNFNGLTGTGVLTESNKKFLPFQQFGRDIADTTDAVRDPQTLEILDITPCSFGGVSVITPGTNTSNQVAVLYQDVNCTEVPVAIHADQLTPTWRVYSTGSNVFQTRAGCLIGAEHVNNSYECDIPIGAGICASYQTQTNSPRRARSVASQSIIAYTMSLGAENSVAYSNNSIAIPTNFTISVTTEILPVSMTKTSVDCTMYICGDSTECSNLLLQYGSFCTQLNRALTGIAVEQDKNTQEVFAQVKQIYKTPPIKDFGGFNFSQILPDPSKPSKRSFIEDLLFNKVTLADAGFIKQYGDCLGDIAARDLICAQKFNGLTVLPPLLTDEMIAQYTSALLAGTITSGWTFCAGAALQIPFAMQMAYRFNGIGVTQNVLYENQKLIANQFNSAIGKIQDSLSSTASALGKLQDVVNQNAQALNTLVKQLSSNFGAISSVLNDILSRLDKVEAEVQIDRLITGRLQSLQTYVTQQLIRAAEIRASANLAATKMSECVCGQSKRVDFCGKGYHLMSFPQSAPHGVVFLHVTYVPAQEKNFTTAPAICHDGKAHFPREGVFVSNGTHWFVTQRNFYEPQIITTDNTFVSGNCDVVIGIVNNTVYDPLQPELDSGGGSGGGQIYEGKLTAEGLRFGIVASRFNHALVDRLVEGAIDAIVRHGGREEDITLVRVPGSWEIPVAAGELARKEDIDAVIAIGVLIRGATPHFDYIASEVSKGLADLSLELRKPITFGVITADTLEQAIERAGTKHGNKGWEAALSAIEMANLFKSLR

SEQ ID NO: 8193 - protein, 1307 aa, Artificial Sequence
  SARS-CoV-2/Sweden/01/2020__EPI_ISL_411951 spike protein (1-1147)(G889C_L1034C) LumSynth construct
MFVFLVLLPLVSSQCVNLTTRTQLPPAYTNSFTRGVYYPDKVFRSSVLHSTQDLFLPFFSNVTWFHAIHVSGTNGTKRFDNPVLPFNDGVYFASTEKSNIIRGWIFGTTLDSKTQSLLIVNNATNVVIKVCEFQFCNDPFLGVYYHKNNKSWMESEFRVYSSANNCTFEYVSQPFLMDLEGKQGNFKNLREFVFKNIDGYFKIYSKHTPINLVRDLPQGFSALEPLVDLPIGINITRFQTLLALHRSYLTPGDSSSGWTAGAAAYYVGYLQPRTFLLKYNENGTITDAVDCALDPLSETKCTLKSFTVEKGIYQTSNFRVQPTESIVRFPNITNLCPFGEVFNATRFASVYAWNRKRISNCVADYSVLYNSASFSTFKCYGVSPTKLNDLCFTNVYADSFVIRGDEVRQIAPGQTGKIADYNYKLPDDFTGCVIAWNSNNLDSKVGGNYNYLYRLFRKSNLKPFERDISTEIYQAGSTPCNGVEGFNCYFPLQSYGFQPTNGVGYQPYRVVVLSFELLHAPATVCGPKKSTNLVKNKCVNFNFNGLTGTGVLTESNKKFLPFQQFGRDIADTTDAVRDPQTLEILDITPCSFGGVSVITPGTNTSNQVAVLYQDVNCTEVPVAIHADQLTPTWRVYSTGSNVFQTRAGCLIGAEHVNNSYECDIPIGAGICASYQTQTNSPRRARSVASQSIIAYTMSLGAENSVAYSNNSIAIPTNFTISVTTEILPVSMTKTSVDCTMYICGDSTECSNLLLQYGSFCTQLNRALTGIAVEQDKNTQEVFAQVKQIYKTPPIKDCGGFNFSQILPDPSKPSKRSFIEDLLFNKVTLADAGFIKQYGDCLGDIAARDLICAQKFNGLTVLPPLLTDEMIAQYTSALLAGTITSGWTFCAGAALQIPFAMQMAYRFNGIGVTQNVLYENQKLIANQFNSAIGKIQDSLSSTASALGKLQDVVNQNAQALNTLVKQLSSNFGAISSVLNDILSRLDKVEAEVQIDRLITGRLQSLQTYVTQQLIRAAEIRASANLAATKMSECVCGQSKRVDFCGKGYHLMSFPQSAPHGVVFLHVTYVPAQEKNFTTAPAICHDGKAHFPREGVFVSNGTHWFVTQRNFYEPQIITTDNTFVSGNCDVVIGIVNNTVYDPLQPELDSGGGSGGGQIYEGKLTAEGLRFGIVASRFNHALVDRLVEGAIDAIVRHGGREEDITLVRVPGSWEIPVAAGELARKEDIDAVIAIGVLIRGATPHFDYIASEVSKGLADLSLELRKPITFGVITADTLEQAIERAGTKHGNKGWEAALSAIEMANLFKSLR

SEQ ID NO: 8194 - protein, 1307 aa, Artificial Sequence
  SARS-CoV-2/Tianmen/HBCDC-HB-07/2020__EPI_ISL_412983 spike protein (1-1147)(G889C_L1034C) LumSynth construct
MFVFLVLLPLVSSQCVNLTTRTQLPPAYTNSFTRGVYYPDKVFRSSVLHSTQDLFLPFFSNVTWFHAIHVSGTNGTKRFDNPVLPFNDGVYFASTEKSNIIRGWIFGTTLDSKTQSLLIVNNATNVVIKVCEFQFCNDPFLGVYYHKNNKSWMESEFRVYSSANNCTFEYVSQPFLMDLEGKQGNFKNLREFVFKNIDGYFKIYSKHTPINLVRDLPQGFSALEPLVDLPIGINITRFQTLLALHRSYLTPGDSSSGWTAGAAAYYVGYLQPRTFLLKYNENGTITDAVDCALDPLSETKCTLKSFTVEKGIYQTSNFRVQPTESIVRFPNITNLCPFGEVFNATRFASVYAWNRKRISNCVADYSVLYNSASFSTFKCYGVSPTKLNDLCFTNVYADSFVIRGDEVRQIAPGQTGKIADYNYKLPDDFTGCVIAWNSNNLDSKVGGNYNYLYRLFRKSNLKPFERDISTEIYQAGSTPCNGVEGFNCYFPLQSYGFQPTNGVGYQPYRVVVLSFELLHAPATVCGPKKSTNLVKNKCVNFNFNGLTGTGVLTESNKKFLPFQQFGRDIADTTDAVRDPQTLEILDITPCSFGGVSVITPGTNTSNQVAVLYQDLNCTEVPVAIHADQLTPTWRVYSTGSNVFQTRAGCLIGAEHVNNSYECDIPIGAGICASYQTQTNSPRRARSVASQSIIAYTMSLGAENSVAYSNNSIAIPTNFTISVTTEILPVSMTKTSVDCTMYICGDSTECSNLLLQYGSFCTQLNRALTGIAVEQDKNTQEVFAQVKQIYKTPPIKDFGGFNFSQILPDPSKPSKRSFIEDLLFNKVTLADAGFIKQYGDCLGDIAARDLICAQKFNGLTVLPPLLTDEMIAQYTSALLAGTITSGWTFCAGAALQIPFAMQMAYRFNGIGVTQNVLYENQKLIANQFNSAIGKIQDSLSSTASALGKLQDVVNQNAQALNTLVKQLSSNFGAISSVLNDILSRLDKVEAEVQIDRLITGRLQSLQTYVTQQLIRAAEIRASANLAATKMSECVCGQSKRVDFCGKGYHLMSFPQSAPHGVVFLHVTYVPAQEKNFTTAPAICHDGKAHFPREGVFVSNGTHWFVTQRNFYEPQIITTDNTFVSGNCDVVIGIVNNTVYDPLQPELDSGGGSGGGQIYEGKLTAEGLRFGIVASRFNHALVDRLVEGAIDAIVRHGGREEDITLVRVPGSWEIPVAAGELARKEDIDAVIAIGVLIRGATPHFDYIASEVSKGLADLSLELRKPITFGVITADTLEQAIERAGTKHGNKGWEAALSAIEMANLFKSLR

SEQ ID NO: 8195 - protein, 1307 aa, Artificial Sequence
  SARS-CoV-2/Hong Kong/case42_VM20002493/2020__EPI_ISL_414527 spike protein (1-1147)(G889C_L1034C) LumSynth construct
MFVFLVLLPLVSSQCVNLTTRTQLPPAYTNSFTRGVYYPDKVFRSSVLHSTQDLFLPFFSNVTWFHAIHVSGTNGTKRFDNPVLPFNDGVYFASTEKSNIIRGWIFGTTLDSKTQSLLIVNNATNVVIKVCEFQFCNDPFLGVYYHKNNKSWMESEFRVYSSANNCTFEYVSQPFLMDLEGKQGNFKNLREFVFKNIDGYFKIYSKHTPINLVRDLPQGFSALEPLVDLPIGINITRFQTLLALHRSYLTPGDSSSGWTAGAAAYYVGYLQPRTFLLKYNENGTITDAVDCALDPLSETKCTLKSFTVEKGIYQTSNFRVQPTESIVRFPNITNLCPFGEVFNATRFASVYAWNRKRISNCVADYSVLYNSASFSTFKCYGVSPTKLNDLCFTNVYADSFVIRGDEVRQIAPGQTGKIADYNYKLPDDFTGCVIAWNSNNLDSKVGGNYNYLYRLFRKSNLKPFERDISTEIYQAGSTPCNGVEGFNCYFPLQSYGFQPTNGVGYQPYRVVVLSFELLHAPATVCGPKKSTNLVKNKCVNFNFNGLTGTGVLTESNKKFLPFQQFGRDIADTTDAVRDPQTLEILDITPCSFGGVSVITPGTNTSNQVAVLYQDVNCTEVPVAIHADQLTPTWRVYSTGSNVFQTRAGCLIGAEHVNNSYECDIPIGAGICASYQTQTNSPRRARSVASQSIIAYTMSLGAENSVAYSNNSIAIPTNFAISVTTEILPVSMTKTSVDCTMYICGDSTECSNLLLQYGSFCTQLNRALTGIAVEQDKNTQEVFAQVKQIYKTPPIKDFGGFNFSQILPDPSKPSKRSFIEDLLFNKVTLADAGFIKQYGDCLGDIAARDLICAQKFNGLTVLPPLLTDEMIAQYTSALLAGTITSGWTFCAGAALQIPFAMQMAYRFNGIGVTQNVLYENQKLIANQFNSAIGKIQDSLSSTASALGKLQDVVNQNAQALNTLVKQLSSNFGAISSVLNDILSRLDKVEAEVQIDRLITGRLQSLQTYVTQQLIRAAEIRASANLAATKMSECVCGQSKRVDFCGKGYHLMSFPQSAPHGVVFLHVTYVPAQEKNFTTAPAICHDGKAHFPREGVFVSNGTHWFVTQRNFYEPQIITTDNTFVSGNCDVVIGIVNNTVYDPLQPELDSGGGSGGGQIYEGKLTAEGLRFGIVASRFNHALVDRLVEGAIDAIVRHGGREEDITLVRVPGSWEIPVAAGELARKEDIDAVIAIGVLIRGATPHFDYIASEVSKGLADLSLELRKPITFGVITADTLEQAIERAGTKHGNKGWEAALSAIEMANLFKSLR

SEQ ID NO: 8196 - protein, 1307 aa, Artificial Sequence
  SARS-CoV-2/USA/CruiseA-23/2020__EPI_ISL_414482 spike protein (1-1147)(G889C_L1034C) LumSynth construct
MFVFLVLLPLVSSQCVNLTTRTQLPPAYTNSFTRGVYYPDKVFRSSVLHSTQDLFLPFFSNVTWFHAIHVSGTNGTKRFDNPVLPFNDGVYFASTEKSNIIRGWIFGTTLDSKTQSLLIVNNATNVVIKVCEFQFCNDPFLGVYYHKNNKSWMESEFRVYSSANNCTFEYVSQPFLMDLEVKQGNFKNLREFVFKNIDGYFKIYSKHTPINLVRDLPQGFSALEPLVDLPIGINITRFQTLLALHRSYLTPGDSSSGWTAGAAAYYVGYLQPRTFLLKYNENGTITDAVDCALDPLSETKCTLKSFTVEKGIYQTSNFRVQPTESIVRFPNITNLCPFGEVFNATRFASVYAWNRKRISNCVADYSVLYNSASFSTFKCYGVSPTKLNDLCFTNVYADSFVIRGDEVRQIAPGQTGKIADYNYKLPDDFTGCVIAWNSNNLDSKVGGNYNYLYRLFRKSNLKPFERDISTEIYQAGSTPCNGVEGFNCYFPLQSYGFQPTNGVGYQPYRVVVLSFELLHAPATVCGPKKSTNLVKNKCVNFNFNGLTGTGVLTESNKKFLPFQQFGRDIADTTDAVRDPQTLEILDITPCSFGGVSVITPGTNTSNQVAVLYQDVNCTEVPVAIHADQLTPTWRVYSTGSNVFQTRAGCLIGAEHVNNSYECDIPIGAGICASYQTQTNSPRRARSVASQSIIAYTMSLGAENSVAYSNNSIAIPTNFTISVTTEILPVSMTKTSVDCTMYICGDSTECSNLLLQYGSFCTQLNRALTGIAVEQDKNTQEVFAQVKQIYKTPPIKDFGGFNFSQILPDPSKPSKRSFIEDLLFNKVTLADAGFIKQYGDCLGDIAARDLICAQKFNGLTVLPPLLTDEMIAQYTSALLAGTITSGWTFCAGAALQIPFAMQMAYRFNGIGVTQNVLYENQKLIANQFNSAIGKIQDSLSSTASALGKLQDVVNQNAQALNTLVKQLSSNFGAISSVLNDILSRLDKVEAEVQIDRLITGRLQSLQTYVTQQLIRAAEIRASANLAATKMSECVCGQSKRVDFCGKGYHLMSFPQSAPHGVVFLHVTYVPAQEKNFTTAPAICHDGKAHFPREGVFVSNGTHWFVTQRNFYEPQIITTDNTFVSGNCDVVIGIVNNTVYDPLQPELDSGGGSGGGQIYEGKLTAEGLRFGIVASRFNHALVDRLVEGAIDAIVRHGGREEDITLVRVPGSWEIPVAAGELARKEDIDAVIAIGVLIRGATPHFDYIASEVSKGLADLSLELRKPITFGVITADTLEQAIERAGTKHGNKGWEAALSAIEMANLFKSLR

SEQ ID NO: 8197 - protein, 1307 aa, Artificial Sequence
  SARS-CoV-2/Hong Kong/case85_VM20002868/2020__EPI_ISL_414519 spike protein (1-1147)(G889C_L1034C) LumSynth construct
MFVFLVLVPLVSSQCVNLTTRTQLPPAYTNSFTRGVYYPDKVFRSSVLHSTQDLFLPFFSNVTWFHAIHVSGTNGTKRFDNPVLPFNDGVYFASTEKSNIIRGWIFGTTLDSKTQSLLIVNNATNVVIKVCEFQFCNDPFLGVYYHKNNKSWMESEFRVYSSANNCTFEYVSQPFLMDLEGKQGNFKNLREFVFKNIDGYFKIYSKHTPINLVRDLPQGFSALEPLVDLPIGINITRFQTLLALHRSYLTPGDSSSGWTAGAAAYYVGYLQPRTFLLKYNENGTITDAVDCALDPLSETKCTLKSFTVEKGIYQTSNFRVQPTESIVRFPNITNLCPFGEVFNATRFASVYAWNRKRISNCVADYSVLYNSASFSTFKCYGVSPTKLNDLCFTNVYADSFVIRGDEVRQIAPGQTGKIADYNYKLPDDFTGCVIAWNSNNLDSKVGGNYNYLYRLFRKSNLKPFERDISTEIYQAGSTPCNGVEGFNCYFPLQSYGFQPTNGVGYQPYRVVVLSFELLHAPATVCGPKKSTNLVKNKCVNFNFNGLTGTGVLTESNKKFLPFQQFGRDIADTTDAVRDPQTLEILDITPCSFGGVSVITPGTNTSNQVAVLYQDVNCTEVPVAIHADQLTPTWRVYSTGSNVFQTRAGCLIGAEHVNNSYECDIPIGAGICASYQTQTNSPRRARSVASQSIIAYTMSLGAENSVAYSNNSIAIPTNFTISVTTEILPVSMTKTSVDCTMYICGDSTECSNLLLQYGSFCTQLNRALTGIAVEQDKNTQEVFAQVKQIYKTPPIKDFGGFNFSQILPDPSKPSKRSFIEDLLFNKVTLADAGFIKQYGDCLGDIAARDLICAQKFNGLTVLPPLLTDEMIAQYTSALLAGTITSGWTFCAGAALQIPFAMQMAYRFNGIGVTQNVLYENQKLIANQFNSAIGKIQDSLSSTASALGKLQDVVNQNAQALNTLVKQLSSNFGAISSVLNDILSRLDKVEAEVQIDRLITGRLQSLQTYVTQQLIRAAEIRASANLAATKMSECVCGQSKRVDFCGKGYHLMSFPQSAPHGVVFLHVTYVPAQEKNFTTAPAICHDGKAHFPREGVFVSNGTHWFVTQRNFYEPQIITTDNTFVSGNCDVVIGIVNNTVYDPLQPELDSGGGSGGGQIYEGKLTAEGLRFGIVASRFNHALVDRLVEGAIDAIVRHGGREEDITLVRVPGSWEIPVAAGELARKEDIDAVIAIGVLIRGATPHFDYIASEVSKGLADLSLELRKPITFGVITADTLEQAIERAGTKHGNKGWEAALSAIEMANLFKSLR

SEQ ID NO: 8198 - protein, 1307 aa, Artificial Sequence; identical to SEQ ID NO: 8188
  SARS-CoV-2/England/200990660/2020__EPI_ISL_414523 spike protein (1-1147)(G889C_L1034C) LumSynth construct

SEQ ID NO: 8199 - protein, 1307 aa, Artificial Sequence
  SARS-CoV-2/Australia/NSW09/2020__EPI_ISL_413595 spike protein (1-1147)(G889C_L1034C) LumSynth construct
MFVFLVLLPLVSSQCVNLTTRTQLPPAYTNSFTRGVYYPDKVFRSSVLHSTQDLFLPFFSNVTWFHAIHVSGTNGTKRFDNPVLPFNDGVYFASTEKSNIIRGWIFGTTLDSKTQSLLIVNNATNVVIKVCEFQFCNDPFLGVYYHKNNKSWMESEFRVYSSANNCTFEYVSQPFLMDLEGKQGNFKNLREFVFKNIDGYFKIYSKHTPINLVRDLPQGFSALEPLVDLPIGINITRFQTLLALHRSYLTPGDSSSGWTAGAAAYYVGYLQPRTFLLKYNENGTITDAVDCALDPLSETKCTLKSFTVEKGIYQTSNFRVQPTESIVRFPNITNLCPFGEVFNATRFASVYAWNRKRISNCVADYSVLYNSASFSTFKCYGVSPTKLNDLCFTNVYADSFVIRGDEVRQIAPGQTGKIADYNYKLPDDFTGCVIAWNSNNLDSKVGGNYNYLYRLFRKSNLKPFERDISTEIYQAGSTPCNGVEGFNCYFPLQSYGFQPTNGVGYQPYRVVVLSFELLHAPATVCGPKKSTNLVKNKCVNFNFNGLTGTGVLTESNKKFLPFQQFGRDIADTTDAVRDPQTLEILDITPCSFGGVSVITPGTNTSNQVAVLYQDVNCTEVPVAIHADQLTPTWRVYSTGSNVFQTRAGCLIGAEHVNNSYECDIPIGAGICASYQTQTNSPRRARSVASQSIIAYTMSLGAENSVAYSNNSIAIPTNFTISVTTEILPVSMTKTSVDCTMYICGDSTECSNLLLQYGSFCTQLNRALTGIAVEQDKNTQEVFAQVKQIYKTPPIKDFGGFNFSQILPDPSKPSKRSFIEDLLFNKVTLADAGFIKQYGDCLGDIAARDLICAQKFNGLTVLPPLLTDEMIAQYTSALLAGTITSGWTFCAGAALQIPFAMQMAYRFNGIGVTQNVLYENQKLIANQFNSAIGKIQDSLSFTASALGKLQDVVNQNAQALNTLVKQLSSNFGAISSVLNDILSRLDKVEAEVQIDRLITGRLQSLQTYVTQQLIRAAEIRASANLAATKMSECVCGQSKRVDFCGKGYHLMSFPQSAPHGVVFLHVTYVPAQEKNFTTAPAICHDGKAHFPREGVFVSNGTHWFVTQRNFYEPQIITTDNTFVSGNCDVVIGIVNNTVYDPLQPELDSGGGSGGGQIYEGKLTAEGLRFGIVASRFNHALVDRLVEGAIDAIVRHGGREEDITLVRVPGSWEIPVAAGELARKEDIDAVIAIGVLIRGATPHFDYIASEVSKGLADLSLELRKPITFGVITADTLEQAIERAGTKHGNKGWEAALSAIEMANLFKSLR

SEQ ID NO: 8200 - protein, 1307 aa, Artificial Sequence; identical to SEQ ID NO: 8180
  SARS-CoV-2/Australia/NSW10/2020__EPI_ISL_413596 spike protein (1-1147)(G889C_L1034C) LumSynth construct

SEQ ID NO: 8201 - protein, 1307 aa, Artificial Sequence
  SARS-CoV-2/Switzerland/1000477797/2020__EPI_ISL_413023 spike protein (1-1147)(G889C_L1034C) LumSynth construct
MFVFLVLLPLVSSQCVNLTTRTQLPPAYTNSFTRGVYYPDKVFRSSVLHSTQDLFLPFFSNVTWFHAIHVSGTNGTKRFDNPVLPFNDGVYFASTEKSNIIRGWIFGTTLDSKTQSLLIVNNATNVVIKVCEFQFCNDPFLGVYYHKNNKSWMESEFRVYSSANNCTFEYVSQPFLMDLEGKQGNFKNLREFVFKNIDGYFNIYSKHTPINLVRDLPQGFSALEPLVDLPIGINITRFQTLLALHRSYLTPGDSSSGWTAGAAAYYVGYLQPRTFLLKYNENGTITDAVDCALDPLSETKCTLKSFTVEKGIYQTSNFRVQPTESIVRFPNITNLCPFGEVFNATRFASVYAWNRKRISNCVADYSVLYNSASFSTFKCYGVSPTKLNDLCFTNVYADSFVIRGDEVRQIAPGQTGKIADYNYKLPDDFTGCVIAWNSNNLDSKVGGNYNYLYRLFRKSNLKPFERDISTEIYQAGSTPCNGVEGFNCYFPLQSYGFQPTNGVGYQPYRVVVLSFELLHAPATVCGPKKSTNLVKNKCVNFNFNGLTGTGVLTESNKKFLPFQQFGRDIADTTDAVRDPQTLEILDITPCSFGGVSVITPGTNTSNQVAVLYQGVNCTEVPVAIHADQLTPTWRVYSTGSNVFQTRAGCLIGAEHVNNSYECDIPIGAGICASYQTQTNSPRRARSVASQSIIAYTMSLGAENSVAYSNNSIAIPTNFTISVTTEILPVSMTKTSVDCTMYICGDSTECSNLLLQYGSFCTQLNRALTGIAVEQDKNTQEVFAQVKQIYKTPPIKDFGGFNFSQILPDPSKPSKRSFIEDLLFNKVTLADAGFIKQYGDCLGDIAARDLICAQKFNGLTVLPPLLTDEMIAQYTSALLAGTITSGWTFCAGAALQIPFAMQMAYRFNGIGVTQNVLYENQKLIANQFNSAIGKIQDSLSSTASALGKLQDVVNQNAQALNTLVKQLSSNFGAISSVLNDILSRLDKVEAEVQIDRLITGRLQSLQTYVTQQLIRAAEIRASANLAATKMSECVCGQSKRVDFCGKGYHLMSFPQSAPHGVVFLHVTYVPAQEKNFTTAPAICHDGKAHFPREGVFVSNGTHWFVTQRNFYEPQIITTDNTFVSGNCDVVIGIVNNTVYDPLQPELDSGGGSGGGQIYEGKLTAEGLRFGIVASRFNHALVDRLVEGAIDAIVRHGGREEDITLVRVPGSWEIPVAAGELARKEDIDAVIAIGVLIRGATPHFDYIASEVSKGLADLSLELRKPITFGVITADTLEQAIERAGTKHGNKGWEAALSAIEMANLFKSLR

SEQ ID NO: 8202 - protein, 1307 aa, Artificial Sequence
  SARS-CoV-2/Belgium/BA-02291/2020__EPI_ISL_415159 spike protein (1-1147)(G889C_L1034C) LumSynth construct
MFVFLVLLPLVSSQCVNLTTRTQLPPAYTNSFTRGVYYPDKVFRSSVLHSTQDLFLPFFSNVTWFHAIHVSGTNGTKRFDNPVLPFNDGVYFASTEKSNIIRGWIFGTTLDSKTQSLLIVNNATNVVIKVCEFQFCNDPFLGVYYHKNNKSWMESEFRVYSSANNCTFEYVSQPFLMDLEGKQGNFKNLREFVFKNIDGYFKIYSKHTPINLVRDLPQGFSALEPLVDLPIGINITRFQTLLALHRSYLTPGDSSSGWTAGAAAYYVGYLQPRTFLLKYNENGTITDAVDCALDPLSETKCTLKSFTVEKGIYQTSNFRVQPTESIVRFPNITNLCPFGEVFNATRFASVYAWNRKRISNCVADYSVLYNSASFSTFKCYGVSPTKLNDLCFTNVYADSFVIRGDEVRQIAPGQTGKIADYNYKLPDDFTGCVIAWNSNNLDSKVGGNYNYLYRLFRRSNLKPFERDISTEIYQAGSTPCNGVEGFNCYFPLQSYGFQPTNGVGYQPYRVVVLSFELLPAPATVCGPKKSTNLVKNKCVNFNFNGLTGTGVLTESNKKFLPFQQFGRDIADTTDAVRDPQTLEILDITPCSFGGVSVITPGTNTSNQVAVLYQGVNCTEVPVAIHADQLTPTWRVYSTGSNVFQTRAGCLIGAEHVNNSYECDIPIGAGICASYQTQTNSPRRARSVASQSIIAYTMSLGAENSVAYSNNSIAIPTNFTISVTTEILPVSMTKTSVDCTMYICGDSTECSNLLLQYGSFCTQLNRALTGIAVEQDKNTQEVFAQVKQIYKTPPIKDFGGFNFSQILPDPSKPSKRSFIEDLLFNKVTLADAGFIKQYGDCLGDIAARDLICAQKFNGLTVLPPLLTDEMIAQYTSALLAGTITSGWTFCAGAALQIPFAMQMAYRFNGIGVTQNVLYENQKLIANQFNSAIGKIQDSLSSAAPALGKLQDVVNQNAQALNTLVKQLSSNFGAISSVLNDILSRLDKVEAEVQIDRLITGRLQSLQTYVTQQLIRAAEIRASANLAATKMSECVCGQSKRVDFCGKGYHLMSFPQSAPHGVVFLHVTYVPAQEKNFTTAPAICHDGKAHFPREGVFVSNGTHWFVTQRNFYEPQIITTDNTFVSGNCDVVIGIVNNTVYDPLQPELDSGGGSGGGQIYEGKLTAEGLRFGIVASRFNHALVDRLVEGAIDAIVRHGGREEDITLVRVPGSWEIPVAAGELARKEDIDAVIAIGVLIRGATPHFDYIASEVSKGLADLSLELRKPITFGVITADTLEQAIERAGTKHGNKGWEAALSAIEMANLFKSLR

SEQ ID NO: 8203 - protein, 1307 aa, Artificial Sequence
  SARS-CoV-2/USA/WA8-UW5/2020__EPI_ISL_413486 spike protein (1-1147)(G889C_L1034C) LumSynth construct
MFVFLVLLPLVSSQCVNLTTRTQLPPAYTNSFTRGVYYPDKVFRSSVLHSTQDLFLPFFSNVTWFHAIHVSGTNGTKRFDNPVLPFNDGVYFASTEKSNIIRGWIFGTTLDSKTQSLLIVNNATNVVIKVCEFQFCNDPFLGVYYHKNNKSWMESEFRVYSSANNCTFEYVSQPFLMDLEGKQGNFKNLREFVFKNIDGYFKIYSKHTPINLVRDLPQGFSALEPLVDLPIGINITRFQTLLALHRSYLTPGDSSSGWTAGAAAYYVGYLQPRTFLLKYNENGTITDAVDCALDPLSETKCTLKSFTVEKGIYQTSNFRVQPTESIVRFPNITNLCPFGEVFNATRFASVYAWNRKRISNCVADYSVLYNSASFSTFKCYGVSPTKLNDLCFTNVYADSFVIRGDEVRQIAPGQTGKIADYNYKLPDDFTGCVIAWNSNNLDSKVGGNYNYLYRLFRKSNLKPFERDISTEIYQAGSTPCNGVEGFNCYFPLQSYGFQPTNGVGYQPYRVVVLSFELLHAPATVCGPKKSTNLVKNKCVNFNFNGLTGTGVLTESNKKFLPFQQFGRDIADTTDAVRDPQTLEILDITPCSFGGVSVITPGTNTSNQVAVLYQDVNCTEVPVAIHADQLTPTWRVYSTGSNVFQTRAGCLIGAEYVNNSYECDIPIGAGICASYQTQTNSPRRARSVASQSIIAYTMSLGAENSVAYSNNSIAIPTNFTISVTTEILPVSMTKTSVDCTMYICGDSTECSNLLLQYGSFCTQLNRALTGIAVEQDKNTQEVFAQVKQIYKTPPIKDFGGFNFSQILPDPSKPSKRSFIEDLLFNKVTLADAGFIKQYGDCLGDIAARDLICAQKFNGLTVLPPLLTDEMIAQYTSALLAGTITSGWTFCAGAALQIPFAMQMAYRFNGIGVTQNVLYENQKLIANQFNSAIGKIQDSLSSTASALGKLQDVVNQNAQALNTLVKQLSSNFGAISSVLNDILSRLDKVEAEVQIDRLITGRLQSLQTYVTQQLIRAAEIRASANLAATKMSECVCGQSKRVDFCGKGYHLMSFPQSAPHGVVFLHVTYVPAQEKNFTTAPAICHDGKAHFPREGVFVSNGTHWFVTQRNFYEPQIITTDNTFVSGNCDVVIGIVNNTVYDPLQPELDSGGGSGGGQIYEGKLTAEGLRFGIVASRFNHALVDRLVEGAIDAIVRHGGREEDITLVRVPGSWEIPVAAGELARKEDIDAVIAIGVLIRGATPHFDYIASEVSKGLADLSLELRKPITFGVITADTLEQAIERAGTKHGNKGWEAALSAIEMANLFKSLR

SEQ ID NO: 8204 - protein, 1307 aa, Artificial Sequence
  SARS-CoV-2/England/20102000506/2020__EPI_ISL_415147 spike protein (1-1147)(G889C_L1034C) LumSynth construct
MFVFLVLLPLVSSQCVNLTTRTQLPPAYTNSFTRGVYYPDKVFRSSVLHSTQDLFLPFFSNVTWFHAIHVSGTNGTKRFDNPVLPFNDGVYFASTEKSNIIRGWIFGTTLDSKTQSLLIVNNATNVVIKVCEFQFCNDPFLGVYYHKNNKSWMESEFRVYSSANNCTFEYVSQPFLMDLEGKQGNFKNLREFVFKNIDGYFKIYSKHTPINLVRDLPQGFSALEPLVDLPIGINITRFQTLLALHRSYLTPGDSSSGWTAGAAAYYVGYLQPRTFLLKYNENGTITDAVDCALDPLSETKCTLKSFTVEKGIYQTSNFRVQPTESIVRFPNITNLCPFGEVFNATRFASVYAWNRKRISNCVADYSVLYNSASFSTFKCYGVSPTKLNDLCFTNVYADSFVIRGDEVRQIAPGQTGKIADYNYKLPDDFTGCVIAWNSNNLDSKVGGNYNYLYRLFRKSNLKPFERDISTEIYQAGSTPCNGVEGFNCYFPLQSYGFQPTNGVGYQPYRVVVLSFELLHAPATVCGPKKSTNLVKNKCVNFNFNGLTGTGVLTESNKKFLPFQQFGRDIADTTDAVRDPQTLEILDITPCSFGGVSVITPGTNTSNQVAVLYQGVNCTEVPVAIHADQLTPTWRVYSTGSNVFQTRAGCLIGAEHVNNSYECDIPIGAGICASYQTQTNSPRRARSVASQSIIAYTMSLGAENSVAYSNNSIAIPTNFTISVTTEILPVSMTKTSVDCTMYICGDSTECSNLLLQYGSFCTQLNRALTGIAVEQDKNTQEVFAQVKQIYKTPPIKDFGGFNFSQILPDPSKPSKRSFIEDLLFNKVTLADAGFIKQYGYCLGDIAARDLICAQKFNGLTVLPPLLTDEMIAQYTSALLAGTITSGWTFCAGAALQIPFAMQMAYRFNGIGVTQNVLYENQKLIANQFNSAIGKIQDSLSSTASALGKLQDVVNQNAQALNTLVKQLSSNFGAISSVLNDILSRLDKVEAEVQIDRLITGRLQSLQTYVTQQLIRAAEIRASANLAATKMSECVCGQSKRVDFCGKGYHLMSFPQSAPHGVVFLHVTYVPAQEKNFTTAPAICHDGKAHFPREGVFVSNGTHWFVTQRNFYEPQIITTDNTFVSGNCDVVIGIVNNTVYDPLQPELDSGGGSGGGQIYEGKLTAEGLRFGIVASRFNHALVDRLVEGAIDAIVRHGGREEDITLVRVPGSWEIPVAAGELARKEDIDAVIAIGVLIRGATPHFDYIASEVSKGLADLSLELRKPITFGVITADTLEQAIERAGTKHGNKGWEAALSAIEMANLFKSLR

SEQ ID NO: 8205 - protein, 1307 aa, Artificial Sequence
  SARS-CoV-2/Belgium/VAG-03013/2020__EPI_ISL_415155 spike protein (1-1147)(G889C_L1034C) LumSynth construct
MFVFLVLLPLVSSQCVNLTTRTQLPPAYTNSFTRGVYYPDKVFRSSVLHSTQDLFLPFFSNVTWFHAIHVSGTNGTKRFDNPVLPFNDGVYFASTEKSNIIRGWIFGTTLDSKTQSLLIVNNATNVVIKVCEFQFCNDPFLGVYYHKNNKSWMESEFRVYSSANNCTFEYVSQPFLMDLEGKQGNFKNLREFVFKNIDGYFKIYSKHTPINLVRDLPQGFSALEPLVDLPIGINITRFQTLLALHRSYLTPGDSSSGWTAGAAAYYVGYLQPRTFLLKYNENGTITDAVDCALDPLSETKCTLKSFTVEKGIYQTSNFRVQPTESIVRFPNITNLCPFGEVFNATRFASVYAWNRKRISNCVADYSVLYNSASFSTFKCYGVSPTKLNDLCFTNVYADSFVIRGDEVRQIAPGQTGKIADYNYKLPDDFTGCVIAWNSNNLDSKVGGNYNYLYRLFRKSNLKPFERDISTEIYQAGSTPCNGVEGFNCYFPLQSYGFQPTNGVGYQPYRVVVLSFELLHAPATVCGPKKSTNLVKNKCVNFNFNGLTGTGVLTESNKKFLPFQQFGRDIADTTDAVRDPQTLEILDITPCSFGGVSVITPGTNTSNQVAVLYQGVNCTEVPVAIHADQLTPTWRVYSTGSNVFQTRAGCLIGAEHVNNSYECDIPIGAGICASYQTQTNSPRRARSVASQSIIAYTMSLGAENSVAYSNNSIAIPTNFTISVTTEILPVSMTKTSVDCTMYICGDSTECSNLLLQYGSFCTQLNRALTGIAVEQDKNTQEVFAQVKQIYKTPPIKDFGGFNFSQILPDPSKPSKRSFIEDLLFNKVTLADAGFIKQYGDCLGDIAARDLICAQKFNGLTVLPPLLTDEMIAQYTSALLAGTITSGWTFCAGAALQIPFAMQMAYRFNGIGVTQNVLYENQKLIANQFNSAIGKIQDSLSSTATALGKLQDVVNQNAQALNTLVKQLSSNFGAISSVLNDILSRLDKVEAEVQIDRLITGRLQSLQTYVTQQLIRAAEIRASANLAATKMSECVCGQSKRVDFCGKGYHLMSFPQSAPHGVVFLHVTYVPAQEKNFTTAPAICHDGKAHFPREGVFVSNGTHWFVTQRNFYEPQIITTDNTFVSGNCDVVIGIVNNTVYDPLQPELDSGGGSGGGQIYEGKLTAEGLRFGIVASRFNHALVDRLVEGAIDAIVRHGGREEDITLVRVPGSWEIPVAAGELARKEDIDAVIAIGVLIRGATPHFDYIASEVSKGLADLSLELRKPITFGVITADTLEQAIERAGTKHGNKGWEAALSAIEMANLFKSLR

SEQ ID NO: 8206 - protein, 1307 aa, Artificial Sequence
  SARS-CoV-2/Belgium/BC-03016/2020__EPI_ISL_415157 spike protein (1-1147)(G889C_L1034C) LumSynth construct
MFVFLVLLPLVSSQCVNLTTRTQLPPAYTNSFTRGVYYPDKVFRSSVLHSTQDLFLPFFSNVTWFHAIHVSGTNGTKRFDNPVLPFNDGVYFASTEKSNIIRGWIFGTTLDSKTQSLLIVNNATNVVIKVCEFQFCNDPFLGVYYHKNNKSWMESEFRVYSSANNCTFEYVSQPFLMDLEGKQGNFKNLREFVFKNIDGYFKIYSKHTPINLVRDLPQGFSALEPLVDLPIGINITRFQTLLALHRSYLTPGDSSSGWTAGAAAYYVGYLQPRTFLLKYNENGTITDAVDCALDPLSETKCTLKSFTVEKGIYQTSNFRVQPTESIVRFPNITNLCPFGEVFNATRFASVYAWNRKRISNCVADYSVLYNSASFSTFKCYGVSPTKLNDLCFTNVYADSFVIRGDEVRQIAPGQTGKIADYNYKLPDDFTGCVIAWNSNNLDSKVGGNYNYLYRLFRKSNLKPFERDISTEIYQAGSTPCNGVEGFNCYFPLQSYGFQPTNGVGYQPYRVVVLSFELLHAPATVCGPKKSTNLVKNKCVNFNFNGLTGTGVLTESNKKFLPFQQFGRDIADTTDAVRDPQTLEILDITPCSFGGVSVITPGTNTSNQVAVLYQGVNCTEVPVAIHADQLTPTWRVYSTGSNVFQTRAGCLIGAEHVNNSYECDIPIGAGICASYQTQTNSPRRARSVASQSIIAYTMSLGAENSVAYSNNSIAIPTNFTISVTTEILPVSMTKTSVDCTMYICGDSTECSNLLLQYGSFCTQLNRALTGIAVEQDKNTQEVFAQVKQIYKTPPIKDFGGFNFSQILPDPSKPSKRSFIEDLLFNKVTLADAGFIKQYGDCLGDIAARDLICAQKFNGLTVLPPLLTDEMIAQYTSALLAGTITSGWTFCAGAALQIPFAMQMAYRFNGIGVTQNVLYENQKLIANQFNSAIGKIQDSLSSTAPALGKLQDVVNQNAQALNTLVKQLSSNFGAISSVLNDILSRLDKVEAEVQIDRLITGRLQSLQTYVTQQLIRAAEIRASANLAATKMSECVCGQSKRVDFCGKGYHLMSFPQSAPHGVVFLHVTYVPAQEKNFTTAPAICHDGKAHFPREGVFVSNGTHWFVTQRNFYEPQIITTDNTFVSGNCDVVIGIVNNTVYDPLQPELDSGGGSGGGQIYEGKLTAEGLRFGIVASRFNHALVDRLVEGAIDAIVRHGGREEDITLVRVPGSWEIPVAAGELARKEDIDAVIAIGVLIRGATPHFDYIASEVSKGLADLSLELRKPITFGVITADTLEQAIERAGTKHGNKGWEAALSAIEMANLFKSLR

SEQ ID NO: 8207 - protein, 1307 aa, Artificial Sequence
  SARS-CoV-2/Germany/BavPat3/2020__EPI_ISL_414521 spike protein (1-1147)(G889C_L1034C) LumSynth construct
MFVFLVLLPLVSSQCVNLTTRTQLPPAYTNSFTRGVYYPDKVFRSSVLHSTQDLFLPFFSNVTWFHAIHVSGTNGTKRFDNPVLPFNDGVYFASTEKSNIIRGWIFGTTLDSKTQSLLIVNNATNVVIKVCEFQFCNDPFLGVYYHKNNKSWMESEFRVYSSANNCTFEYVSQPFLMDLEGKQGNFKNLREFVFKNIDGYFKIYSKHTPINLVRDLPQGFSALEPLVDLPIGINITRFQTLLALHRSYLTPGDSSSGWTAGAAAYYVGYLQPRTFLLKYNENGTITDAVDCALDPLSETKCTLKSFTVEKGIYQTSNFRVQPTESIVRFPNITNLCPFGEVFNATRFASVYAWNRKRISNCVADYSVLYNSASFSTFKCYGVSPTKLNDLCFTNVYADSFVIRGDEVRQIAPGQTGKIADYNYKLPDDFTGCVIAWNSNNLDSKVGGNYNYLYRLFRKSNLKPFERDISTEIYQAGSTPCNGVEGFNCYFPLQSYGFQPTNGVGYQPYRVVVLSFELLHAPATVCGPKKSTNLVKNKCVNFNFNGLTGTGVLTESNKKFLPFQQFGRDIADTTDAVRDPQTLEILDITPCSFGGVSVITPGTNTSNQVAVLYQDVNCTEVPVAIHADQLTPTWRVYSTGSNVFQTRAGCLIGAEHVNNSYECDIPIGAGICASYQTQTNSPRRARSVASQSIIAYTMSLGAENSVAYSNNSIAIPTNFTISVTTEILPVSMTKTSVDCTMYICGDSTECSNLLLQYGSFCTQLNRALTGIAVEQDKNTQQVFAQVKQIYKTPPIKDFGGFNFSQILPDPSKPSKRSFIEDLLFNKVTLADAGFIKQYGDCLGDIAARDLICAQKFNGLTVLPPLLTDEMIAQYTSALLAGTITSGWTFCAGAALQIPFAMQMAYRFNGIGVTQNVLYENQKLIANQFNSAIGKIQDSLSSTASALGKLQDVVNQNAQALNTLVKQLSSNFGAISSVLNDILSRLDKVEAEVQIDRLITGRLQSLQTYVTQQLIRAAEIRASANLAATKMSECVCGQSKRVDFCGKGYHLMSFPQSAPHGVVFLHVTYVPAQEKNFTTAPAICHDGKAHFPREGVFVSNGTHWFVTQRNFYEPQIITTDNTFVSGNCDVVIGIVNNTVYDPLQPELDSGGGSGGGQIYEGKLTAEGLRFGIVASRFNHALVDRLVEGAIDAIVRHGGREEDITLVRVPGSWEIPVAAGELARKEDIDAVIAIGVLIRGATPHFDYIASEVSKGLADLSLELRKPITFGVITADTLEQAIERAGTKHGNKGWEAALSAIEMANLFKSLR

SEQ ID NO: 8208 - protein, 1307 aa, Artificial Sequence
  SARS-CoV-2/France/HF1805/2020__EPI_ISL_414628 spike protein (1-1147)(G889C_L1034C) LumSynth construct
MFVFLVLLPLVSSQCVNLTTRTQLPPAYTNSFTRGVYYPDKVFRSSVLHSTQDLFLPFFSNVTWFHAIHVSGTNGTKRFDNPVLPFNDGVYFASTEKSNIIRGWIFGTTLDSKTQSLLIVNNATNVVIKVCEFQFCNDPFLGVYYHKNNKSWMESEFRVYSSANNCTFEYVSQPFLMDLEGKQGNFKNLREFVFKNIDGYFKIYSKHTPINLVRDLPQGFSALEPLVDLPIGINITRFQTLLALHRSYLTPGDSSSGWTAGAAAYYVGYLQPRTFLLKYNENGTITDAVDCALDPLSETKCTLKSFTVEKGIYQTSNFRVQPTESIVRFPNITNLCPFGEVFNATRFASVYAWNRKRISNCVADYSVLYNSASFSTFKCYGVSPTKLNDLCFTNVYADSFVIRGDEVRQIAPGQTGKIADYNYKLPDDFTGCVIAWNSNNLDSKVGGNYNYLYRLFRKSNLKPFERDISTEIYQAGSTPCNGVEGFNCYFPLQSYGFQPTNGVGYQPYRVVVLSFELLHAPATVCGPKKSTNLVKNKCVNFNFNGLTGTGVLTESNKKFLPFQQFGRDIADTTDAVRDPQTLEILDITPCSFGGVSVITPGTNTSNQVAVLYQGVNCTEVPVAIHADQLTPTWRVYSTGSNVFQTRAGCLIGAEHVNNSYECDIPIGAGICASYQTQTNSPRRARSVASQSIIAYTMSLGAENSVAYSNNSIAIPTNFTISVTTEILPVSMTKTSVDCTMYICGDSTECSNLLLQYGSFCTQLNRALTGIAVEQDKNTQEVFAQVKQIYKTPPIKDFGGFNFSQILPDPSKPSKRSFIEDLLFNKVTLADAGFIKQYGDCLGDIAARDLICAQKFNGLTVLPPLLTDEMIAQYTSALLAGTITSGWTFCAGAALQIPFAMQMAYRFNGIGVTQNVLYENQKLIANQFNSAIGKIQDSLSSTASALGKLQDVVNQNAQALNTLVKQLSSNFGAISSVLNDILSRLDKVEAEVQIDRLITGRLQSLQTYVTQQLIRAAEIRASANLAATKMSECVCGQSKRVDFCGKGYHLMSFPQSAPHGVVFLHVTYVPAQEKNFTTAPAICHDGKAHFPREGVFVSNGTHWFVTQRNFYEPQIITTDNTFVSGNCDVVIGVVNNTVYDPLQPELDSGGGSGGGQIYEGKLTAEGLRFGIVASRFNHALVDRLVEGAIDAIVRHGGREEDITLVRVPGSWEIPVAAGELARKEDIDAVIAIGVLIRGATPHFDYIASEVSKGLADLSLELRKPITFGVITADTLEQAIERAGTKHGNKGWEAALSAIEMANLFKSLR

SEQ ID NO: 8209 - protein, 1307 aa, Artificial Sequence
  SARS-CoV-2/Netherlands/ZuidHolland_9/2020__EPI_ISL_414445 spike protein (1-1147)(G889C_L1034C) LumSynth construct
MFVFLVLLPLVSSQCVNLTTRTQLPPAYTNSFTRGVYYPDKVFRSSVLHSTQDLFLPFFSNVTWFHAIHVSGTNGTKRFDNPVLPFNDGVYFASTEKSNIIRGWIFGTTLDSKTQSLLIVNNATNVVIKVCEFQFCNDPFLGVYYHKNNKSWMESEFRVYSSANNCTFEYVSQPFLMDLEGKQGNFKNLREFVFKNIDGYFKIYSKHTPINLVRDLPQGFSALEPLVDLPIGINITRFQTLLALHRSYLTPGDSSSGWTAGAAAYYVGYLQPRTFLLKYNENGTITDAVDCALDPLSETKCTLKSFTVEKGIYQTSNFRVQPTESIVRFPNITNLCPFGEVFNATRFASVYAWNRKRISNCVADYSVLYNSASFSTFKCYGVSPTKLNDLCFTNVYADSFVIRGDEVRQIAPGQTGKIADYNYKLPDDFTGCVIAWNSNNLDSKVGGNYNYLYRLFRKSNLKPFERDISTEIYQAGSTPCNGVEGFNCYFPLQSYGFQPTNGVGYQPYRVVVLSFELLHAPATVCGPKKSTNLVKNKCVNFNFNGLTGTGVLTESNKKFLPFQQFGRDIADTTDAVRDPQTLEILDITPCSFGGVSVITPGTNTSNQVAVLYQGVNCTEVPVAIHADQLTPTWRVYSTGSNVFQTRAGCLIGAEHVNNSYECDIPIGAGICASYQTQTNSPRRARSVASQSIIAYTMSLGAENSVAYSNNSIAIPTNFTISVTTEILPVSMTKTSVDCTMYICGDSTECSNLLLQYGSFCTQLNRALTGIAVEQDKNTQEVFAQVKQIYKTPPIKDFGGFNFSQILPDPSKPSKRSFIEDLLFNKVTLADAGFIKQYGDCLGDIAARDLICVQKFNGLTVLPPLLTDEMIAQYTSALLAGTITSGWTFCAGAALQIPFAMQMAYRFNGIGVTQNVLYENQKLIANQFNSAIGKIQDSLSSTASALGKLQDVVNQNAQALNTLVKQLSSNFGAISSVLNDILSRLDKVEAEVQIDRLITGRLQSLQTYVTQQLIRAAEIRASANLAATKMSECVCGQSKRVDFCGKGYHLMSFPQSAPHGVVFLHVTYVPAQEKNFTTAPAICHDGKAHFPREGVFVSNGTHWFVTQRNFYEPQIITTDNTFVSGNCDVVIGIVNNTVYDPLQPELDSGGGSGGGQIYEGKLTAEGLRFGIVASRFNHALVDRLVEGAIDAIVRHGGREEDITLVRVPGSWEIPVAAGELARKEDIDAVIAIGVLIRGATPHFDYIASEVSKGLADLSLELRKPITFGVITADTLEQAIERAGTKHGNKGWEAALSAIEMANLFKSLR

SEQ ID NO: 8210 - protein, 1307 aa, Artificial Sequence
  SARS-CoV-2/Finland/FIN03032020A/2020__EPI_ISL_413602 spike protein (1-1147)(G889C_L1034C) LumSynth construct
MFVFLVLLPLVSSQCVNLTTRTQLPPAYTNSFTRGVYYPDKVFRSSVLHSTQDLFLPFFSNVTWFHAIHVSGTNGTKRFDNPVLPFNDGVYFASTEKSNIIRGWIFGTTLDSKTQSLLIVNNATNVVIKVCEFQFCNDPFLGVYYHKNNKSWMESEFRVYSSANNCTFEYVSQPFLMDLEGKQGNFKNLREFVFKNIDGYFKIYSKHTPINLVRDLPQGFSALEPLVDLPIGINITRFQTLLALHRSYLTPGDSSSGWTAGAAAYYVGYLQPRTFLLKYNENGTITDAVDCALDPLSETKCTLKSFTVEKGIYQTSNFRVQPTESIVRFPNITNLCPFGEVFNATRFASVYAWNRKRISNCVADYSVLYNSASFSTFKCYGVSPTKLNDLCFTNVYADSFVIRGDEVRQIAPGQTGKIADYNYKLPDDFTGCVISWNSNNLDSKVGGNYNYLYRLFRKSNLKPFERDISTEIYQAGSTPCNGVEGFNCYFPLQSYGFQPTNGVGYQPYRVVVLSFELLHAPATVCGPKKSTNLVKNKCVNFNFNGLTGTGVLTESNKKFLPFQQFGRDIADTTDAVRDPQTLEILDITPCSFGGVSVITPGTNTSNQVAVLYQGVNCTEVPVAIHADQLTPTWRVYSTGSNVFQTRAGCLIGAEHVNNSYECDIPIGAGICASYQTQTNSPRRARSVASQSIIAYTMSLGAENSVAYSNNSIAIPTNFTISVTTEILPVSMTKTSVDCTMYICGDSTECSNLLLQYGSFCTQLNRALTGIAVEQDKNTQEVFAQVKQIYKTPPIKDFGGFNFSQILPDPSKPSKRSFIEDLLFNKVTLADAGFIKQYGDCLGDIAARDLICAQKFNGLTVLPPLLTDEMIAQYTSALLAGTITSGWTFCAGAALQIPFAMQMAYRFNGIGVTQNVLYENQKLIANQFNSAIGKIQDSLSSTASALGKLQDVVNQNAQALNTLVKQLSSNFGAISSVLNDILSRLDKVEAEVQIDRLITGRLQSLQTYVTQQLIRAAEIRASANLAATKMSECVCGQSKRVDFCGKGYHLMSFPQSAPHGVVFLHVTYVPAQEKNFTTAPAICHDGKAHFPREGVFVSNGTHWFVTQRNFYEPQIITTDNTFVSGNCDVVIGIVNNTVYDPLQPELDSGGGSGGGQIYEGKLTAEGLRFGIVASRFNHALVDRLVEGAIDAIVRHGGREEDITLVRVPGSWEIPVAAGELARKEDIDAVIAIGVLIRGATPHFDYIASEVSKGLADLSLELRKPITFGVITADTLEQAIERAGTKHGNKGWEAALSAIEMANLFKSLR

SEQ ID NO: 8211 - protein, 1307 aa, Artificial Sequence
  SARS-CoV-2/France/GE1977/2020__EPI_ISL_414632 spike protein (1-1147)(G889C_L1034C) LumSynth construct
MFVFLVLLPLVSSQCVNLTTRTQLPPAYTNSFTRGVYYPDKVFRSSVLHSTQDLFLPFFSNVTWFHAIHVSGTNGTKRFDNPVLPFNDGVYFASTEKSNIIRGWIFGTTLDSKTQSLLIVNNATNVVIKVCEFQFCNDPFLGVYYHKNNKSWMESEFRVYSSANNCTFEYVSQPFLMDLEGKQGNFKNLREFVFKNIDGYFKIYSKHTPINLVRDLPQGFSALEPLVDLPIGINITRFQTLLALHRSYLTPGDSSSGWTAGAAAYYVGYLQPRTFLLKYNENGTITDAVDCALDPLSETKCTLKSFTVEKGIYQTSNFRVQPTESIVRFPNITNLCPFGEVFNATRFASVYAWNRKRISNCVADYSVLYNSASFSTFKCYGVSPTKLNDLCFTNVYADSFVIRGDEVRQIAPGQTGKIADYNYKLPDDFTGCVIAWNSNNLDSKVGGNYNYLYRLFRKSNLKPFERDISTEIYQAGSTPCNGVEGFNCYFPLQSYGFQPTNGVGYQPYRVVVLSFELLHAPATVCGPKKSTNLVKNKCVNFNFNGLTGTGVLTESNKKFLPFQQFGRDIADTTDAVRDPQTLEILDITPCSFGGVSVITPGTNTSNQVAVLYQGVNCTEVPVAIHADQLTPTWRVYSTGSNVFQTRAGCLIGAEHVNNSYECDIPIGAGICASYQTQTNSPRRARSVASQSIIAYTMSLGAENSVAYSNNSIAIPTNFTISVTTEILPVSMTKTSVDCTMYICGDSTECSNLLLQYGSFCTQLNRALTGIAVEQDKNTQEVFAQVKQIYKTPPIKDFGGFNFSQILPDPSKPSKRSFIEDLLFNKVTLADAGFIKQYGDCLGDIAARDLICAQKFNGLTVLPPLLTDEMIAQYTSALLAGTITSGWTFCAGAALQIPFAMQMAYRFNGIGVTQNVLYENQKLIANQFNSAIGKIQDSLFSTASALGKLQDVVNQNAQALNTLVKQLSSNFGAISSVLNDILSRLDKVEAEVQIDRLITGRLQSLQTYVTQQLIRAAEIRASANLAATKMSECVCGQSKRVDFCGKGYHLMSFPQSAPHGVVFLHVTYVPAQEKNFTTAPAICHDGKAHFPREGVFVSNGTHWFVTQRNFYEPQIITTDNTFVSGNCDVVIGIVNNTVYDPLQPELDSGGGSGGGQIYEGKLTAEGLRFGIVASRFNHALVDRLVEGAIDAIVRHGGREEDITLVRVPGSWEIPVAAGELARKEDIDAVIAIGVLIRGATPHFDYIASEVSKGLADLSLELRKPITFGVITADTLEQAIERAGTKHGNKGWEAALSAIEMANLFKSLR

SEQ ID NO: 8212 - protein, 1307 aa, Artificial Sequence
  SARS-CoV-2/Finland/FIN-313/2020__EPI_ISL_414641 spike protein (1-1147)(G889C_L1034C) LumSynth construct
MFVFLVLLPLVSSQCVNLTTRTQLPPAYTNSFTRGVYYPDKVFRSSVLHSTQDLFLPFFSNVTWFHAIHVSGTNGTKRFDNPVLPFNDGVYFASTEKSNIIRGWIFGTTLDSKTQSLLIVNNATNVVIKVCEFQFCNDPFLGVYYHKNNKSWMESEFRVYSSANNCTFEYVSQPFLMDLEGKQGNFKNLREFVFKNIDGYFKIYSKHTPINLVRDLPQGFSALEPLVDLPIGINITRFKTLLALHRSYLTPGDSSSGWTAGAAAYYVGYLQPRTFLLKYNENGTITDAVDCALDPLSETKCTLKSFTVEKGIYQTSNFRVQPTESIVRFPNITNLCPFGEVFNATRFASVYAWNRKRISNCVADYSVLYNSASFSTFKCYGVSPTKLNDLCFTNVYADSFVIRGDEVRQIAPGQTGKIADYNYKLPDDFTGCVIAWNSNNLDSKVGGNYNYLYRLFRKSNLKPFERDISTEIYQAGSTPCNGVEGFNCYFPLQSYGFQPTNGVGYQPYRVVVLSFELLHAPATVCGPKKSTNLVKNKCVNFNFNGLTGTGVLTESNKKFLPFQQFGRDIADTTDAVRDPQTLEILDITPCSFGGVSVITPGTNTSNQVAVLYQGVNCTEVPVAIHADQLTPTWRVYSTGSNVFQTRAGCLIGAEHVNNSYECDIPIGAGICASYQTQTNSPRRARSVASQSIIAYTMSLGAENSVAYSNNSIAIPTNFTISVTTEILPVSMTKTSVDCTMYICGDSTECSNLLLQYGSFCTQLNRALTGIAVEQDKNTQEVFAQVKQIYKTPPIKDFGGFNFSQILPDPSKPSKRSFIEDLLFNKVTLADAGFIKQYGDCLGDIAARDLICAQKFNGLTVLPPLLTDEMIAQYTSALLAGTITSGWTFCAGAALQIPFAMQMAYRFNGIGVTQNVLYENQKLIANQFNSAIGKIQDSLSSTASALGKLQDVVNQNAQALNTLVKQLSSNFGAISSVLNDILSRLDKVEAEVQIDRLITGRLQSLQTYVTQQLIRAAEIRASANLAATKMSECVCGQSKRVDFCGKGYHLMSFPQSAPHGVVFLHVTYVPAQEKNFTTAPAICHDGKAHFPREGVFVSNGTHWFVTQRNFYEPQIITTDNTFVSGNCDVVIGIVNNTVYDPLQPELDSGGGSGGGQIYEGKLTAEGLRFGIVASRFNHALVDRLVEGAIDAIVRHGGREEDITLVRVPGSWEIPVAAGELARKEDIDAVIAIGVLIRGATPHFDYIASEVSKGLADLSLELRKPITFGVITADTLEQAIERAGTKHGNKGWEAALSAIEMANLFKSLR

SEQ ID NO: 8213 - protein, 1307 aa, Artificial Sequence
  SARS-CoV-2/Netherlands/ZuidHolland_2/2020__EPI_ISL_414556 spike protein (1-1147)(G889C_L1034C) LumSynth construct
MFVFLVLLPLVSSQCVNLTTRTQLPPAYTNSFTRGVYYPDKVFRSSVLHSTQDLFLPFFSNVTWFHAIHVSGTNGTKRFDNPVLPFNDGVYFASTEKSNIIRGWIFGTTLDSKTQSLLIVNNATNVVIKVCEFQFCNDPFLGVYYHKNNKSWMESEFRVYSSANNCTFEYVSQPFLMDLEGKQGNFKNLREFVFKNIDGYFKIYSKHTPINLVRDLPQGFSALEPLVDLPIGINITRFQTLLALHRSYLTPGDSSSGWTAGAAAYYVGYLQPRTFLLKYNENGTITDAVDCALDPLSETKCTLKSFTVEKGIYQTSNFRVQPTESIVRFPNITNLCPFGEVFNATRFASVYAWNRKRISNCVADYSVLYNSASFSTFKCYGVSPTKLNDLCFTNVYADSFVIRGDEVRQIAPGQTGKIADYNYKLPDDFTGCVIAWNSNNLDSKVGGNYNYLYRLFRKSNLKPFERDISTEIYQAGSTPCNGVEGFNCYFPLQSYGFQPTNGVGYQPYRVVVLSFELLHAPATVCGPKKSTNLVKNKCVNFNFNGLTGTGVLTESNKKFLPFQQFGRDIADTTDAVRDPQTLEILDITPCSFGGVSVITPGTNTSNQVAVLYQGVNCTEVPVAIHADQLTPTWRVYSTGSNVFQTRAGCLIGAEHVNNSYECDIPIGAGICASYQTQTNSPRRARSVASQSIIAYTMSLGAENSVAYSNNSIAIPTNFTISVTTEILPVSMTKTSVDCTMYICGDSTECSNLLLQYGSFCTQLNRALTGIALEQDKNTQEVFAQVKQIYKTPPIKDFGGFNFSQILPDPSKPSKRSFIEDLLFNKVTLADAGFIKQYGDCLGDIAARDLICAQKFNGLTVLPPLLTDEMIAQYTSALLAGTITSGWTFCAGAALQIPFAMQMAYRFNGIGVTQNVLYENQKLIANQFNSAIGKIQDSLSSTASALGKLQDVVNQNAQALNTLVKQLSSNFGAISSVLNDILSRLDKVEAEVQIDRLITGRLQSLQTYVTQQLIRAAEIRASANLAATKMSECVCGQSKRVDFCGKGYHLMSFPQSAPHGVVFLHVTYVPAQEKNFTTAPAICHDGKAHFPREGVFVSNGTHWFVTQRNFYEPQIITTDNTFVSGNCDVVIGIVNNTVYDPLQPELDSGGGSGGGQIYEGKLTAEGLRFGIVASRFNHALVDRLVEGAIDAIVRHGGREEDITLVRVPGSWEIPVAAGELARKEDIDAVIAIGVLIRGATPHFDYIASEVSKGLADLSLELRKPITFGVITADTLEQAIERAGTKHGNKGWEAALSAIEMANLFKSLR

SEQ ID NO: 8214 - protein, 1307 aa, Artificial Sequence
  SARS-CoV-2/USA/WA-UW31/2020__EPI_ISL_414618 spike protein (1-1147)(G889C_L1034C) LumSynth construct
MFVFLVLLPLVSSQCVNLTTRTQLPPAYTNSFTRGVYYPDKVFRSSVLHSTQDLFLPFFSNVTWFHAIHVSGTNGTKRFDNPVLPFNDGVYFASTEKSNIIRGWIFGTTLDSKTQSLLIVNNATNVVIKVCEFQFCNDPFLGVYYHKNNKSWMESEFRVYSSANNCTFEYVSQPFLMDLEGKQGNFKNLREFVFKNIDGYFKIYSKHTPINLVRDLPQGFSALEPLVDLPIGINITRFQTLLALHRSYLTPGDSSSGWTAGAAAYYVGYLQPRTFLLKYNENGTITDAVDCALDPLSETKCTLKSFTVEKGIYQTSNFRVQPTESIVRFPNITNLCPFGEVFNATRFASVYAWNRKRISNCVADYSVLYNSASFSTFKCYGVSPTKLNDLCFTNVYADSFVIRGDEVRQIAPGQTGKIADYNYKLPDDFTGCVIAWNSNNLDSKVGGNYNYLYRLFRKSNLKPFERDISTEIYQAGSTPCNGAEGFNCYFPLQSYGFQPTNGVGYQPYRVVVLSFELLHAPATVCGPKKSTNLVKNKCVNFNFNGLTGTGVLTESNKKFLPFQQFGRDIADTTDAVRDPQTLEILDITPCSFGGVSVITPGTNTSNQVAVLYQDVNCTEVPVAIHADQLTPTWRVYSTGSNVFQTRAGCLIGAEHVNNSYECDIPIGAGICASYQTQTNSPRRARSVASQSIIAYTMSLGAENSVAYSNNSIAIPTNFTISVTTEILPVSMTKTSVDCTMYICGDSTECSNLLLQYGSFCTQLNRALTGIAVEQDKNTQEVFAQVKQIYKTPPIKDFGGFNFSQILPDPSKPSKRSFIEDLLFNKVTLADAGFIKQYGDCLGDIAARDLICAQKFNGLTVLPPLLTDEMIAQYTSALLAGTITSGWTFCAGAALQIPFAMQMAYRFNGIGVTQNVLYENQKLIANQFNSAIGKIQDSLSSTASALGKLQDVVNQNAQALNTLVKQLSSNFGAISSVLNDILSRLDKVEAEVQIDRLITGRLQSLQTYVTQQLIRAAEIRASANLAATKMSECVCGQSKRVDFCGKGYHLMSFPQSAPHGVVFLHVTYVPAQEKNFTTAPAICHDGKAHFPREGVFVSNGTHWFVTQRNFYEPQIITTDNTFVSGNCDVVIGIVNNTVYDPLQPELDSGGGSGGGQIYEGKLTAEGLRFGIVASRFNHALVDRLVEGAIDAIVRHGGREEDITLVRVPGSWEIPVAAGELARKEDIDAVIAIGVLIRGATPHFDYIASEVSKGLADLSLELRKPITFGVITADTLEQAIERAGTKHGNKGWEAALSAIEMANLFKSLR

SEQ ID NO: 8215 - protein, 1307 aa, Artificial Sequence
  SARS-CoV-2/South Korea/SNU01/2020__EPI_ISL_411929 spike protein (1-1147)(G889C_L1034C) LumSynth construct
MFVFLVLLPLVSSQCVNLTTRTQLPPAYTNSFTRGVYYPDKVFRSSVLHSTQDLFLPFFSNVTWFHAIHVSGTNGTKRFDNPVLPFNDGVYFASTEKSNIIRGWIFGTTLDSKTQSLLIVNNATNVVIKVCEFQFCNDPFLGVYYHKNNKSWMESEFRVYSSANNCTFEYVSQPFLMDLEGKQGNFKNLREFVFKNIDGYFKIYSKHTPINLVRDLPQGFWALEPLVDLPIGINITRFQTLLALHRSYLTPGDSSSGWTAGAAAYYVGYLQPRTFLLKYNENGTITDAVDCALDPLSETKCTLKSFTVEKGIYQTSNFRVQPTESIVRFPNITNLCPFGEVFNATRFASVYAWNRKRISNCVADYSVLYNSASFSTFKCYGVSPTKLNDLCFTNVYADSFVIRGDEVRQIAPGQTGKIADYNYKLPDDFTGCVIAWNSNNLDSKVGGNYNYLYRLFRKSNLKPFERDISTEIYQAGSTPCNGVEGFNCYFPLQSYGFQPTNGVGYQPYRVVVLSFELLHAPATVCGPKKSTNLVKNKCVNFNFNGLTGTGVLTESNKKFLPFQQFGRDIADTTDAVRDPQTLEILDITPCSFGGVSVITPGTNTSNQVAVLYQDVNCTEVPVAIHADQLTPTWRVYSTGSNVFQTRAGCLIGAEHVNNSYECDIPIGAGICASYQTQTNSPRRARSVASQSIIAYTMSLGAENSVAYSNNSIAIPTNFTISVTTEILPVSMTKTSVDCTMYICGDSTECSNLLLQYGSFCTQLNRALTGIAVEQDKNTQEVFAQVKQIYKTPPIKDFGGFNFSQILPDPSKPSKRSFIEDLLFNKVTLADAGFIKQYGDCLGDIAARDLICAQKFNGLTVLPPLLTDEMIAQYTSALLAGTITSGWTFCAGAALQIPFAMQMAYRFNGIGVTQNVLYENQKLIANQFNSAIGKIQDSLSSTASALGKLQDVVNQNAQALNTLVKQLSSNFGAISSVLNDILSRLDKVEAEVQIDRLITGRLQSLQTYVTQQLIRAAEIRASANLAATKMSECVCGQSKRVDFCGKGYHLMSFPQSAPHGVVFLHVTYVPAQEKNFTTAPAICHDGKAHFPREGVFVSNGTHWFVTQRNFYEPQIITTDNTFVSGNCDVVIGIVNNTVYDPLQPELDSGGGSGGGQIYEGKLTAEGLRFGIVASRFNHALVDRLVEGAIDAIVRHGGREEDITLVRVPGSWEIPVAAGELARKEDIDAVIAIGVLIRGATPHFDYIASEVSKGLADLSLELRKPITFGVITADTLEQAIERAGTKHGNKGWEAALSAIEMANLFKSLR

SEQ ID NO: 8216 - protein, 1307 aa, Artificial Sequence
  SARS-CoV-2/China/WF0004/2020__EPI_ISL_413694 spike protein (1-1147)(G889C_L1034C) LumSynth construct
MFVFLVLLPLVSSQCVNLTTRTQLPPAYTNSFTRGVYYPDKVFRSSVLHSTQDLFLPFFSNVTWFHAIHVSGTNGTKRFDNPVLPFNDGVYFASTEKSNIIRGWIFGTTLDSKTQSLLIVNNATNVVIKVCEFQFCNDPFLGVYYHKNNKSWTESEFRVYSSANNCTFEYVSQPFLMDLEGKQGNFKNLREFVFKNIDGYFKIYSKHTPINLVRDLPQGFSALEPLVDLPIGINITRFQTLLALHRSYLTPGDSSSGWTAGAAAYYVGYLQPRTFLLKYNENGTITDAVDCALDPLSETKCTLKSFTVEKGIYQTSNFRVQPTESIVRFPNITNLCPFGEVFNATRFASVYAWNRKRISNCVADYSVLYNSASFSTFKCYGVSPTKLNDLCFTNVYADSFVIRGDEVRQIAPGQTGKIADYNYKLPDDFTGCVIAWNSNNLDSKVGGNYNYLYRLFRKSNLKPFERDISTEIYQAGSTPCNGVEGFNCYFPLQSYGFQPTNGVGYQPYRVVVLSFELLHAPATVCGPKKSTNLVKNKCVNFNFNGLTGTGVLTESNKKFLPFQQFGRDIADTTDAVRDPQTLEILDITPCSFGGVSVITPGTNTSNQVAVLYQDVNCTEVPVAIHADQLTPTWRVYSTGSNVFQTRAGCLIGAEHVNNSYECDIPIGAGICASYQTQTNSPRRARSVASQSIIAYTMSLGAENSVAYSNNSIAIPTNFTISVTTEILPVSMTKTSVDCTMYICGDSTECSNLLLQYGSFCTQLNRALTGIAVEQDKNTQEVFAQVKQIYKTPPIKDFGGFNFSQILPDPSKPSKRSFIEDLLFNKVTLADAGFIKQYGDCLGDIAARDLICAQKFNGLTVLPPLLTDEMIAQYTSALLAGTITSGWTFCAGAALQIPFAMQMAYRFNGIGVTQNVLYENQKLIANQFNSAIGKIQDSLSSTASALGKLQDVVNQNAQALNTLVKQLSSNFGAISSVLNDILSRLDKVEAEVQIDRLITGRLQSLQTYVTQQLIRAAEIRASANLAATKMSECVCGQSKRFDFCGKGYHLMSFPQSAPHGVVFLHVTYVPAQEKNFTTAPAICHDGKAHFPREGVFVSNGTHWFVTQRNFYEPQIITTDNTFVSGNCDVVIGIVNNTVYDPLQPELDSGGGSGGGQIYEGKLTAEGLRFGIVASRFNHALVDRLVEGAIDAIVRHGGREEDITLVRVPGSWEIPVAAGELARKEDIDAVIAIGVLIRGATPHFDYIASEVSKGLADLSLELRKPITFGVITADTLEQAIERAGTKHGNKGWEAALSAIEMANLFKSLR

SEQ ID NO: 8217 - protein, 1307 aa, Artificial Sequence
  SARS-CoV-2/China/WF0028/2020__EPI_ISL_413791 spike protein (1-1147)(G889C_L1034C) LumSynth construct
MFVFLVLLPLVSSQCVNLTTRTQLPPAYTNSFTRGVYYPDKVFRSSVLHSTQDLFLPFFSNVTWFHAIHVSGTNGTKRFDNPVLPFNDGVYFASTEKSNIIRGWIFGTTLDSKTQSLLIVNNATNVVIKVCEFQFCNDPFLGVYYHKNNKSWMESEFRVYSSANNCTFEYVSQPFLMDLEGKQGNFKNLREFVFKNIDGYFKIYSKHTPINLVRDLPQGFSALEPLVDLPIGINITRFQTLLALHRSYLTPGDSSSGWTAGAAAYYVGYLQPRTFLLKYNENGTITDAVDCALDPLSETKCTLKSFTVEKGIYQTSNFRVQPTESIVRFPNITNLCPFGEVFNATRFASVYAWNRKRISNCVADYSVLYNSASFSTFKCYGVSPTKLNDLCFTNVYADSFVIRGDEVRQIAPGQTGKIADYNYKLPDDFTGCVIAWNSNNLDSKVGGNYNYLYRLFRKSNLKPFERDISTEIYQAGSTPCNGVEGFNCYFPLQSYGFQPTNGVGYQPYRVVVLSFELLHAPATVCGPKKSTNLVKNKCVNFNFNGLTGTGVLTESNKKFLPFQQFGRDIADTTDAVRDPQTLEILDITPCSFGGVSVITPGTNTSNQVAVLYQDVNCTEVPVAIHADQLTPTWRVYSTGSNVFQTRAGCLIGAEHVNNSYECDIPIGAGICASYQTQTNSPRRARSVASQSIIAYTMSLGAENSVAYSNNSIAIPTNFTISVTTEILPVSMTKTSVDCTMYICGDSTECSNLLLQYGSFCTQLNRALTGIAVEQDKNTQEVFAQVKQIYKTPPIKDFGGFNFSQILPDPSKPSKRSFIEDLLFNKVTLADAGFIKQYGDCLGDIAARDLICAQKFNGLTVLPPLLTDEMIAQYTSALLAGTITSGWTFCAGAALQIPFAMQMAYRFNGIGVTQNVLYENQKLIANQFNSAIGKIQDSLSSTASALGKLQDVVNQNAQALNTLVKQLSSNFGAISSVLNDILSRLDKVEAEVQIDRLITGRLQSLQTYVTQQLIRAAEIRASANLAATKMSECVCGQSKRVDFCGKGYHLMSFPQSAPHGVVFLHVTYVPAQEKNFTTAPAICHDGKAHFPREGVFVSNGTHWFVTQRNFYEPQIITTDNTFVSGNCDVVIGIVNNTVYDPLQPELESGGGSGGGQIYEGKLTAEGLRFGIVASRFNHALVDRLVEGAIDAIVRHGGREEDITLVRVPGSWEIPVAAGELARKEDIDAVIAIGVLIRGATPHFDYIASEVSKGLADLSLELRKPITFGVITADTLEQAIERAGTKHGNKGWEAALSAIEMANLFKSLR

SEQ ID NO: 8218 - protein, 1307 aa, Artificial Sequence
  SARS-CoV-2/2019-nCoV/USA-CruiseA-18/2020__MT159716.1 spike protein (1-1147)(G889C_L1034C) LumSynth construct
MFVFLVLLPLVSSQCVNLTTRTQLPPAYTNSFTRGVYYPDKVFRSSVLHSTQDLFLPFFSNVTWFHAIHVSGTNGTKRFDNPVLPFNDGVYFASTEKSNIIRGWIFGTTLDSKTQSLLIVNNATNVVIKVCEFQFCNDPFLGVYYHKNNKSWMESELRVYSSANNCTFEYVSQPFLMDLEGKQGNFKNLREFVFKNIDGYFKIYSKHTPINLVRDLPQGFSALEPLVDLPIGINITRFQTLLALHRSYLTPGDSSSGWTAGAAAYYVGYLQPRTFLLKYNENGTITDAVDCALDPLSETKCTLKSFTVEKGIYQTSNFRVQPTESIVRFPNITNLCPFGEVFNATRFASVYAWNRKRISNCVADYSVLYNSASFSTFKCYGVSPTKLNDLCFTNVYADSFVIRGDEVRQIAPGQTGKIADYNYKLPDDFTGCVIAWNSNNLDSKVGGNYNYLYRLFRKSNLKPFERDISTEIYQAGSTPCNGVEGFNCYFPLQSYGFQPTNGVGYQPYRVVVLSFELLHAPATVCGPKKSTNLVKNKCVNFNFNGLTGTGVLTESNKKFLPFQQFGRDIADTTDAVRDPQTLEILDITPCSFGGVSVITPGTNTSNQVAVLYQDVNCTEVPVAIHADQLTPTWRVYSTGSNVFQTRAGCLIGAEHVNNSYECDIPIGAGICASYQTQTNSPRRARSVASQSIIAYTMSLGAENSVAYSNNSIAIPTNFTISVTTEILPVSMTKTSVDCTMYICGDSTECSNLLLQYGSFCTQLNRALTGIAVEQDKNTQEVFAQVKQIYKTPPIKDFGGFNFSQILPDPSKPSKRSFIEDLLFNKVTLADAGFIKQYGDCLGDIAARDLICAQKFNGLTVLPPLLTDEMIAQYTSALLAGTITSGWTFCAGAALQIPFAMQMAYRFNGIGVTQNVLYENQKLIANQFNSAIGKIQDSLSSTASALGKLQDVVNQNAQALNTLVKQLSSNFGAISSVLNDILSRLDKVEAEVQIDRLITGRLQSLQTYVTQQLIRAAEIRASANLAATKMSECVCGQSKRVDFCGKGYHLMSFPQSAPHGVVFLHVTYVPAQEKNFTTAPAICHDGKAHFPREGVFVSNGTHWFVTQRNFYEPQIITTDNTFVSGNCDVVIGIVNNTVYDPLQPELDSGGGSGGGQIYEGKLTAEGLRFGIVASRFNHALVDRLVEGAIDAIVRHGGREEDITLVRVPGSWEIPVAAGELARKEDIDAVIAIGVLIRGATPHFDYIASEVSKGLADLSLELRKPITFGVITADTLEQAIERAGTKHGNKGWEAALSAIEMANLFKSLR

SEQ ID NO: 8219 - protein, 1307 aa, Artificial Sequence
  SARS-CoV-2/SARS-CoV-2/Yunnan-01/human/2020/CHN__MT049951.1 spike protein (1-1147)(G889C_L1034C) LumSynth construct
MFVFLVLLPLVSSQCVNLTTRTQLPPANTNSFTRGVYYPDKVFRSSVLHSTQDLFLPFFSNVTWFHAIHVSGTNGTKRFDNPVLPFNDGVYFASTEKSNIIRGWIFGTTLDSKTQSLLIVNNATNVVIKVCEFQFCNDPFLGVYYHKNNKSWMESEFRVYSSANNCTFEYVSQPFLMDLEGKQGNFKNLREFVFKNIDGYFKIYSKHTPINLVRDLPQGFSALEPLVDLPIGINITRFQTLLALHRSYLTPGDSSSGWTAGAAAYYVGYLQPRTFLLKYNENGTITDAVDCALDPLSETKCTLKSFTVEKGIYQTSNFRVQPTESIVRFPNITNLCPFGEVFNATRFASVYAWNRKRISNCVADYSVLYNSASFSTFKCYGVSPTKLNDLCFTNVYADSFVIRGDEVRQIAPGQTGKIADYNYKLPDDFTGCVIAWNSNNLDSKVGGNYNYLYRLFRKSNLKPFERDISTEIYQAGSTPCNGVEGFNCYFPLQSYGFQPTNGVGYQPYRVVVLSFELLHAPATVCGPKKSTNLVKNKCVNFNFNGLTGTGVLTESNKKFLPFQQFGRDIADTTDAVRDPQTLEILDITPCSFGGVSVITPGTNTSNQVAVLYQDVNCTEVPVAIHADQLTPTWRVYSTGSNVFQTRAGCLIGAEHVNNSYECDIPIGAGICASYQTQTNSPRRARSVASQSIIAYTMSLGAENSVAYSNNSIAIPTNFTISVTTEILPVSMTKTSVDCTMYICGDSTECSNLLLQYGSFCTQLNRALTGIAVEQDKNTQEVFAQVKQIYKTPPIKDFGGFNFSQILPDPSKPSKRSFIEDLLFNKVTLADAGFIKQYGDCLGDIAARDLICAQKFNGLTVLPPLLTDEMIAQYTSALLAGTITSGWTFCAGAALQIPFAMQMAYRFNGIGVTQNVLYENQKLIANQFNSAIGKIQDSLSSTASALGKLQDVVNQNAQALNTLVKQLSSNFGAISSVLNDILSRLDKVEAEVQIDRLITGRLQSLQTYVTQQLIRAAEIRASANLAATKMSECVCGQSKRVDFCGKGYHLMSFPQSAPHGVVFLHVTYVPAQEKNFTTAPAICHDGKAHFPREGVFVSNGTHWFVTQRNFYEPQIITTDNTFVSGNCDVVIGIVNNTVYDPLQPELDSGGGSGGGQIYEGKLTAEGLRFGIVASRFNHALVDRLVEGAIDAIVRHGGREEDITLVRVPGSWEIPVAAGELARKEDIDAVIAIGVLIRGATPHFDYIASEVSKGLADLSLELRKPITFGVITADTLEQAIERAGTKHGNKGWEAALSAIEMANLFKSLR

SEQ ID NO: 8220 - protein, 1307 aa, Artificial Sequence
  SARS-CoV-2/USA/WA-UW292/2020__EPI_ISL_418077 spike protein (1-1147)(G889C_L1034C) LumSynth construct
MFVFLVLLPLVSSQCVNLTTRTQLPPAYTNSFTRGVYYPDKVFRSSVLHSTQDLFLPFFSNVTWFHAIHVSGTNGTKRFDNPVLPFNDGVYFASTEKSNIIRGWIFGTTLDSKTQSLLIVNNATNVVIKVCEFQFCNDPFLGVYYHKNNKSWMESEFRVYSSANNCTFEYVSQPFLMDLEGKQGNFKNLREFVFKNIDGYFKIYSKHTPINLVRDLPQGFSALEPLVDLPIGINITRFQTLLALHRSYLTPGDSSSGWTAGAAAYYVGYLQPRTFLLKYNENGTITDAVDCALDPLSETKCTLKSFTVEKGIYQTSNFRVQPTESIVRFPNITNLCPFGEVFNATRFASVYAWNRKRISNCVADYSVLYNSASFSTFKCYGVSPTKLNDLCFTNVYADSFVIRGDEVRQIAPGQTGKIADYNYKLPDDFTGCVIAWNSNNLDSKVGGNYNYLYRLFRKSNLKPFERDISTEIYQASSTPCNGVEGFNCYFPLQSYGFQPTNGVGYQPYRVVVLSFELLHAPATVCGPKKSTNLVKNKCVNFNFNGLTGTGVLTESNKKFLPFQQFGRDIADTTDAVRDPQTLEILDITPCSFGGVSVITPGTNTSNQVAVLYQDVNCTEVPVAIHADQLTPTWRVYSTGSNVFQTRAGCLIGAEHVNNSYECDIPIGAGICASYQTQTNSPRRARSVASQSIIAYTMSLGAENSVAYSNNSIAIPTNFTISVTTEILPVSMTKTSVDCTMYICGDSTECSNLLLQYGSFCTQLNRALTGIAVEQDKNTQEVFAQVKQIYKTPPIKDFGGFNFSQILPDPSKPSKRSFIEDLLFNKVTLADAGFIKQYGDCLGDIAARDLICAQKFNGLTVLPPLLTDEMIAQYTSALLAGTITSGWTFCAGAALQIPFAMQMAYRFNGIGVTQNVLYENQKLIANQFNSAIGKIQDSLSSTASALGKLQDVVNQNAQALNTLVKQLSSNFGAISSVLNDILSRLDKVEAEVQIDRLITGRLQSLQTYVTQQLIRAAEIRASANLAATKMSECVCGQSKRVDFCGKGYHLMSFPQSAPHGVVFLHVTYVPAQEKNFTTAPAICHDGKAHFPREGVFVSNGTHWFVTQRNFYEPQIITTDNTFVSGNCDVVIGIVNNTVYDPLQPELDSGGGSGGGQIYEGKLTAEGLRFGIVASRFNHALVDRLVEGAIDAIVRHGGREEDITLVRVPGSWEIPVAAGELARKEDIDAVIAIGVLIRGATPHFDYIASEVSKGLADLSLELRKPITFGVITADTLEQAIERAGTKHGNKGWEAALSAIEMANLFKSLR

SEQ ID NO: 8221 - protein, 1307 aa, Artificial Sequence
  SARS-CoV-2/Iceland/192/2020__EPI_ISL_417819 spike protein (1-1147)(G889C_L1034C) LumSynth construct
MFVFFVLLPLVSSQCVNLTTRTQLPPAYTNSFTRGVYYPDKVFRSSVLHSTQDLFLPFFSNVTWFHAIHVSGTNGTKRFDNPVLPFNDGVYFASTEKSNIIRGWIFGTTLDSKTQSLLIVNNATNVVIKVCEFQFCNDPFLGVYYHKNNKSWMESEFRVYSSANNCTFEYVSQPFLMDLEGKQGNFKNLREFVFKNIDGYFKIYSKHTPINLVRDLPQGFSALEPLVDLPIGINITRFQTLLALHRSYLTPGDSSSGWTAGAAAYYVGYLQPRTFLLKYNENGTITDAVDCALDPLSETKCTLKSFTVEKGIYQTSNFRVQPTESIVRFPNITNLCPFGEVFNATRFASVYAWNRKRISNCVADYSVLYNSASFSTFKCYGVSPTKLNDLCFTNVYADSFVIRGDEVRQIAPGQTGKIADYNYKLPDDFTGCVIAWNSNNLDSKVGGNYNYLYRLFRKSNLKPFERDISTEIYQAGSTPCNGVEGFNCYFPLQSYGFQPTNGVGYQPYRVVVLSFELLHAPATVCGPKKSTNLVKNKCVNFNFNGLTGTGVLTESNKKFLPFQQFGRDIADTTDAVRDPQTLEILDITPCSFGGVSVITPGTNTSNQVAVLYQGVNCTEVPVAIHADQLTPTWRVYSTGSNVFQTRAGCLIGAEHVNNSYECDIPIGAGICASYQTQTNSPRRARSVASQSIIAYTMSLGAENSVAYSNNSIAIPTNFTISVTTEILPVSMTKTSVDCTMYICGDSTECSNLLLQYGSFCTQLNRALTGIAVEQDKNTQEVFAQVKQIYKTPPIKDFGGFNFSQILPDPSKPSKRSFIEDLLFNKVTLADAGFIKQYGDCLGDIAARDLICAQKFNGLTVLPPLLTDEMIAQYTSALLAGTITSGWTFCAGAALQIPFAMQMAYRFNGIGVTQNVLYENQKLIANQFNSAIGKIQDSLSSTASALGKLQDVVNQNAQALNTLVKQLSSNFGAISSVLNDILSRLDKVEAEVQIDRLITGRLQSLQTYVTQQLIRAAEIRASANLAATKMSECVCGQSKRVDFCGKGYHLMSFPQSAPHGVVFLHVTYVPAQEKNFTTAPAICHDGKAHFPREGVFVSNGTHWFVTQRNFYEPQIITTDNTFVSGNCDVVIGIVNNTVYDPLQPELDSGGGSGGGQIYEGKLTAEGLRFGIVASRFNHALVDRLVEGAIDAIVRHGGREEDITLVRVPGSWEIPVAAGELARKEDIDAVIAIGVLIRGATPHFDYIASEVSKGLADLSLELRKPITFGVITADTLEQAIERAGTKHGNKGWEAALSAIEMANLFKSLR

SEQ ID NO: 8222 - protein, 1307 aa, Artificial Sequence
  SARS-CoV-2/Belgium/ULG-6939/2020__EPI_ISL_417020 spike protein (1-1147)(G889C_L1034C) LumSynth construct
MFVFLVLLPLVSSQCVNLTTRTQLPPAYTNSFTRGVYYPDKVFRSSVLHSTQDLFLPFFSNVTWFHAIHVSGTNGTKRFDNPVLPFNDGVYFASTEKSNIIRGWIFGTTLDSKTQSLLIVNNATNVVIKVCEFQFCNDPFLGVYYHKNNKSWMESEFRVYSSANNCTFEYVSQPFLMDLEGKQGNFKNLREFVFKNIDGYFKIYSKHTPINLVRDLPQGFSALEPLVDLPIGINITRFQTLLALHRSYLTPGDSSSGWTAGAAAYYVGYLQPRTFLLKYNENGTITDAVDCALDPLSETKCTLKSFTVEKGIYQTSNFRVQPTESIVRFPNITNLCPFGEVFNATRFASVYAWNRKRISNCVADYSVLYNSASFSTFKCYGVSPTKLNDLCFTNVYADSFVIRGDEVRQIAPGQTGKIADYNYKLPDDFTGCVIAWNSNNLDSKVGGNYNYLYRLFRKSNLKPFERDISTEIYQAGSTPCNGVEGFNCYFPLQSYGFQPTNGVGYQPYRVVVLSFELLHAPATVCGPKKSTNLVKNKCVNFNFNGLTGTGVLTESNKKFLPFQQFGRDIADTTDAVRDPQTLEILDITPCSFGGVSVITPGTNTSNQVAVLYQGVNCTEVPVAIHADQLTPTWRVYSTGSNVFQTRAGCLIGAEHVNNSYECDIPIGAGICASYQTQTNSPRRARSVASQSIIAYTMSLGAENSVVYSNNSIAIPTNFTISVTTEILPVSMTKTSVDCTMYICGDSTECSNLLLQYGSFCTQLNRALTGIAVEQDKNTQEVFAQVKQIYKTPPIKDFGGFNFSQILPDPSKPSKRSFIEDLLFNKVTLADAGFIKQYGDCLGDIAARDLICAQKFNGLTVLPPLLTDEMIAQYTSALLAGTITSGWTFCAGAALQIPFAMQMAYRFNGIGVTQNVLYENQKLIANQFNSAIGKIQDSLSSTASALGKLQDVVNQNAQALNTLVKQLSSNFGAISSVLNDILSRLDKVEAEVQIDRLITGRLQSLQTYVTQQLIRAAEIRASANLAATKMSECVCGQSKRVDFCGKGYHLMSFPQSAPHGVVFLHVTYVPAQEKNFTTAPAICHDGKAHFPREGVFVSNGTHWFVTQRNFYEPQIITTDNTFVSGNCDVVIGIVNNTVYDPLQPELDSGGGSGGGQIYEGKLTAEGLRFGIVASRFNHALVDRLVEGAIDAIVRHGGREEDITLVRVPGSWEIPVAAGELARKEDIDAVIAIGVLIRGATPHFDYIASEVSKGLADLSLELRKPITFGVITADTLEQAIERAGTKHGNKGWEAALSAIEMANLFKSLR

SEQ ID NO: 8223 - protein, 1307 aa, Artificial Sequence
  SARS-CoV-2/France/HF2496/2020__EPI_ISL_418231 spike protein (1-1147)(G889C_L1034C) LumSynth construct
MFVFLVLLPLVSSQCVNLTTRTQLPPAYTNSFTRGVYYPDKVFRSSVLHSTQDLFLPFFSNVTWFHAIHVSGTNGTKRFDNPVLPFNDGVYFASTEKSNIIRGWIFGTTLDSKTQSLLIVNNATNVVIKVCEFQFCNDPFLGVYYHKNNKSWMESEFRVYSSANNCTFEYVSQPFLMDLEGKQGNFKNLREFVFKNIDGYFKIYSKHTPINLVRDLPQGFSALEPLVDLPIGINITRFQTLLALHRSYLTPGDSSSGWTAGAAAYYVGYLQPRTFLLKYNENGTITDAVDCALDPLSETKCTLKSFTVEKGIYQTSNFRVQPTESIVRFPNITNLCPFGEVFNATRFASVYAWNRKRISNCVADYSVLYNSASFSTFKCYGVSPTKLNDLCFTNVYADSFVIRGDEVRQIAPGQTGKIADYNYKLPDDFTGCVIAWNSNNLDSKVGGNYNYLYRLFRKSNLKPFERDISTEIYQAGSTPCNGVEGFNCYFPLQSYGFQPTNGVGYQPYRVVVLSFELLHAPATVCGPKKSTNLVKNKCVNFNFNGLTGTGVLTESNKKFLPFQQFGRDIADTTDAVRDPQTLEILDITPCSFGGVSVITPGTNTSNQVAVLYQGVNCTEVPVAIHADQLTPTWRVYSTGSNVFQTRAGCLIGAEHVNNSYECDIPIGAGICASYQTQTNSPRRARSVASQSIIAYTMSLGAENSVAYSNNSIAIPTNFTISVTTEILPVSMTKTSVDCTMYICGDSTECSNLLLQYGSFCTQLNRALTGIAVEQDKNTQEVFAQVKQIYKTPPIKDFGGFNFSQILPDPSKPSKRSFIEDLLFNKVTLADAGFIKQYGDCLGDIVARDLICAQKFNGLTVLPPLLTDEMIAQYTSALLAGTITSGWTFCAGAALQIPFAMQMAYRFNGIGVTQNVLYENQKLIANQFNSAIGKIQDSLSSTASALGKLQDVVNQNAQALNTLVKQLSSNFGAISSVLNDILSRLDKVEAEVQIDRLITGRLQSLQTYVTQQLIRAAEIRASANLAATKMSECVCGQSKRVDFCGKGYHLMSFPQSAPHGVVFLHVTYVPAQEKNFTTAPAICHDGKAHFPREGVFVSNGTHWFVTQRNFYEPQIITTDNTFVSGNCDVVIGIVNNTVYDPLQPELDSGGGSGGGQIYEGKLTAEGLRFGIVASRFNHALVDRLVEGAIDAIVRHGGREEDITLVRVPGSWEIPVAAGELARKEDIDAVIAIGVLIRGATPHFDYIASEVSKGLADLSLELRKPITFGVITADTLEQAIERAGTKHGNKGWEAALSAIEMANLFKSLR

SEQ ID NO: 8224 - protein, 1307 aa, Artificial Sequence
  SARS-CoV-2/USA/WA-UW291/2020__EPI_ISL_418076 spike protein (1-1147)(G889C_L1034C) LumSynth construct
MFVFLVLLPLVSSQCVNLTTRTQLPPAYTNSFTRGVYYPDKVFRSSVLHSTQDLFLPFFSNVTWFHAIHVSGTNGTKRFDNPVLPFNDGVYFASTEKSNIIRGWIFGTTLDSKTQSLLIVNNATNVVIKVCEFQFCNDPFLGVYYHKNNKSWMESEFRVYSSANNCTFEYVSQPFLMDLEGKQGNFKNLREFVFKNIDGYFKIYSKHTPINLVRDLPQGFSALEPLVDLPIGINITRFQTLLALHRSYLTPGDSSSGWTAGAAAYYVGYLQPRTFLLKYNENGTITDAVDCALDPLSETKCTLKSFTVEKGIYQTSNFRVQPTESIVRFPNITNLCPFGEVFNATRFASVYAWNRKRISNCVADYSVLYNSASFSTFKCYGVSPTKLNDLCFTNVYADSFVIRGDEVRQIAPGQTGKIADYNYKLPDDFTGCVIAWNSNNLDSKVGGNYNYLYRLFRKSNLKPFERDISTEIYQAGSTPCNGVEGFNCYFPLQSYGFQPTNGVGYQPYRVVVLSFELLHAPATVCGPKKSTNLVKNKCVNFNFNGLTGTGVLTESNKKFLPFQQFGRDIADTTDAVRDPQTLEILDITPCSFGGVSVITPGTNTSNQVAVLYQGVNCTEVPVAIHADQLTPTWRVYSTGSNVFQTRAGCLIGAEHVNNSYECDIPIGAGICASYQTQTNSPRRARSVASQSIIAYTMSLGAENSVAYSNNSIAIPTNFTISVTTEILPVSMTKTSVDCTMYICGDSTECSNLLLQYGSFCTQLNRALTGIAVEQDKNTQEVFAQVKQIYKTPPIKDFGGFNFSQILPDPSKPSKRSFIEDLLFNKVTLADAGFIKQYGDCLGDIAARDLICAQKFNGLTVLPPLLTDEMIAQYTSALLAGTITSGWTFCAGAALQIPFAMQMAYRFNGIGVTQNVLYENQKLIANQFNSAIGKIQYSLSSTASALGKLQDVVNQNAQALNTLVKQLSSNFGAISSVLNDILSRLDKVEAEVQIDRLITGRLQSLQTYVTQQLIRAAEIRASANLAATKMSECVCGQSKRVDFCGKGYHLMSFPQSAPHGVVFLHVTYVPAQEKNFTTAPAICHDGKAHFPREGVFVSNGTHWFVTQRNFYEPQIITTDNTFVSGNCDVVIGIVNNTVYDPLQPELDSGGGSGGGQIYEGKLTAEGLRFGIVASRFNHALVDRLVEGAIDAIVRHGGREEDITLVRVPGSWEIPVAAGELARKEDIDAVIAIGVLIRGATPHFDYIASEVSKGLADLSLELRKPITFGVITADTLEQAIERAGTKHGNKGWEAALSAIEMANLFKSLR

SEQ ID NO: 8225 - protein, 1307 aa, Artificial Sequence; identical to SEQ ID NO: 8188
  SARS-CoV-2/Portugal/PT0034/2020__EPI_ISL_418019 spike protein (1-1147)(G889C_L1034C) LumSynth construct

SEQ ID NO: 8226 - protein, 1307 aa, Artificial Sequence; identical to SEQ ID NO: 8180
  SARS-CoV-2/Iceland/202/2020__EPI_ISL_417750 spike protein (1-1147)(G889C_L1034C) LumSynth construct

SEQ ID NO: 8227 - protein, 1307 aa, Artificial Sequence
  SARS-CoV-2/USA/WA-UW261/2020__EPI_ISL_418046 spike protein (1-1147)(G889C_L1034C) LumSynth construct
MFVFLVLLPLVSSQCVNLTTRTQLPPAYTNSFTRGVYYPDKVFRSSVLHSTQDLFLPFFSNVTWFHAIHVSGTNGTKRFDNPVLPFNDGVYFASTEKSNIIRGWIFGTTLDSKTQSLLIVNNATNVVIKVCEFQFCNDPFLGVYYHKNNKSWMESEFRVYSSANNCTFEYVSQPFLMDLEGKQGNFKNLREFVFKNIDGYFKIYSKHTPINLVRDLPQGFSALEPLVDLPIGINITRFQTLLALHRSYLTPGDSSSGWTAGAAAYYVGYLQPRTFLLKYNENGTITDAVDCALDPLSETKCTLKSFTVEKGIYQTSNFRVQPTESIVRFPNITNLCPFGEVFNATRFTSVYAWNRKRISNCVADYSVLYNSASFSTFKCYGVSPTKLNDLCFTNVYADSFVIRGDEVRQIAPGQTGKIADYNYKLPDDFTGCVIAWNSNNLDSKVGGNYNYLYRLFRKSNLKPFERDISTEIYQAGSTPCNGVEGFNCYFPLQSYGFQPTNGVGYQPYRVVVLSFELLHAPATVCGPKKSTNLVKNKCVNFNFNGLTGTGVLTESNKKFLPFQQFGRDIADTTDAVRDPQTLEILDITPCSFGGVSVITPGTNTSNQVAVLYQDVNCTEVPVAIHADQLTPTWRVYSTGSNVFQTRAGCLIGAEHVNNSYECDIPIGAGICASYQTQTNSPRRARSVASQSIIAYTMSLGAENSVAYSNNSIAIPTNFTISVTTEILPVSMTKTSVDCTMYICGDSTECSNLLLQYGSFCTQLNRALTGIAVEQDKNTQEVFAQVKQIYKTPPIKDFGGFNFSQILPDPSKPSKRSFIEDLLFNKVTLADAGFIKQYGDCLGDIAARDLICAQKFNGLTVLPPLLTDEMIAQYTSALLAGTITSGWTFCAGAALQIPFAMQMAYRFNGIGVTQNVLYENQKLIANQFNSAIGKIQDSLSSTASALGKLQDVVNQNAQALNTLVKQLSSNFGAISSVLNDILSRLDKVEAEVQIDRLITGRLQSLQTYVTQQLIRAAEIRASANLAATKMSECVCGQSKRVDFCGKGYHLMSFPQSAPHGVVFLHVTYVPAQEKNFTTAPAICHDGKAHFPREGVFVSNGTHWFVTQRNFYEPQIITTDNTFVSGNCDVVIGIVNNTVYDPLQPELDSGGGSGGGQIYEGKLTAEGLRFGIVASRFNHALVDRLVEGAIDAIVRHGGREEDITLVRVPGSWEIPVAAGELARKEDIDAVIAIGVLIRGATPHFDYIASEVSKGLADLSLELRKPITFGVITADTLEQAIERAGTKHGNKGWEAALSAIEMANLFKSLR

SEQ ID NO: 8228 - protein, 1307 aa, Artificial Sequence
  SARS-CoV-2/Portugal/PT0035/2020__EPI_ISL_418020 spike protein (1-1147)(G889C_L1034C) LumSynth construct
MFVFLVLLPLVSSQCVNLTTRTQLPPAYTNSFTRGVYYPDKVFRSSVLHSTQDLFLPFFSNVTWFHAIHVSGTNGTKRFDNPVLPFNDGVYFASTEKSNIIRGWIFGTTLDSKTQSLLIVNNATNVVIKVCEFQFCNDPFLGVYYHKNNKSWMESEFRVYSSANNCTFEYVSQPFLMDLEGKQGNFKNLREFVFKNIDGYFKIYSKHTPINLVRDLPQGFSALEPLVDLPIGINITRFQTLLALHRSYLTPGDSSSGWTAGAAAYYVGYLQPRTFLLKYNENGTITDAVDCALDPLSETKCTLKSFTVEKGIYQTSNFRVQPTESIVRFPNITNLCPFGEVFNATRFASVYAWNRKRISNCVADYSVLYNSASFSTFKCYGVSPTKLNDLCFTNVYADSFVIRGDEVRQIAPGQTGKIADYNYKLPDDFTGCVIAWNSNNLDSKVGGNYNYLYRLFRKSNLKPFERDISTEIYQAGSTPCNGVEGFNCYFPLQSYGFQPTNGVGYQPYRVVVLSFELLHAPATVCGPKKSTNLVKNKCVNFNFNGLTGTGVLTESNKKFLPFQQFGRDIADTTDAVRDPQTLEILDITPCSFGGVSVITPGTNTSNQVAVLYQDVNCTEVPVAIHADQLTPTWRVYSTGSNVFQTRAGCLIGAEHVNNSYECDIPIGAGICASYQTQTNSPRRARSVASQSIIAYTMSLGAENSVAYSNNSIAIPTNFTISVTTEILPVSMTKTSVDCTMYICGDSTECSNLLLQYGSFCTQLNRALTGIAVEQDKNTQEVFAQVKQIYKTPPIKDFGGFNFSQILPDPSKPSKRSFIEDLLFNKVTLADAGFIKQYGDCLGDISARDLICAQKFNGLTVLPPLLTDEMIAQYTSALLAGTITSGWTFCAGAALQIPFAMQMAYRFNGIGVTQNVLYENQKLIANQFNSAIGKIQDSLSSTASALGKLQDVVNQNAQALNTLVKQLSSNFGAISSVLNDILSRLDKVEAEVQIDRLITGRLQSLQTYVTQQLIRAAEIRASANLAATKMSECVCGQSKRVDFCGKGYHLMSFPQSAPHGVVFLHVTYVPAQEKNFTTAPAICHDGKAHFPREGVFVSNGTHWFVTQRNFYEPQIITTDNTFVSGNCDVVIGIVNNTVYDPLQPELDSGGGSGGGQIYEGKLTAEGLRFGIVASRFNHALVDRLVEGAIDAIVRHGGREEDITLVRVPGSWEIPVAAGELARKEDIDAVIAIGVLIRGATPHFDYIASEVSKGLADLSLELRKPITFGVITADTLEQAIERAGTKHGNKGWEAALSAIEMANLFKSLR

SEQ ID NO: 8229 - protein, 1307 aa, Artificial Sequence
  SARS-CoV-2/USA/NY-NYUMC7/2020__EPI_ISL_418192 spike protein (1-1147)(G889C_L1034C) LumSynth construct
MFVFLVLLPLVSSQCVNLTTRTQLPPAYTNSFTRGVYYPDKVFRSSVLHSTQDLFLPFFSNVTWFHAIHVSGTNGTKRFDNPVLPFNDGVYFASTEKSNIIRGWIFGTTLDSKTQSLLIVNNATNVVIKVCEFQFCNDPFLGVYHHKNNKSWMESEFRVYSSANNCTFEYVSQPFLMDLEGKQGNFKNLREFVFKNIDGYFKIYSKHTPINLVRDLPQGFSALEPLVDLPIGINITRFQTLLALHRSYLTPGDSSSGWTAGAAAYYVGYLQPRTFLLKYNENGTITDAVDCALDPLSETKCTLKSFTVEKGIYQTSNFRVQPTESIVRFPNITNLCPFGEVFNATRFASVYAWNRKRISNCVADYSVLYNSASFSTFKCYGVSPTKLNDLCFTNVYADSFVIRGDEVRQIAPGQTGKIADYNYKLPDDFTGCVIAWNSNNLDSKVGGNYNYLYRLFRKSNLKPFERDISTEIYQAGSTPCNGVEGFNCYFPLQSYGFQPTNGVGYQPYRVVVLSFELLHAPATVCGPKKSTNLVKNKCVNFNFNGLTGTGVLTESNKKFLPFQQFGRDIADTTDAVRDPQTLEILDITPCSFGGVSVITPGTNTSNQVAVLYQGVNCTEVPVAIHADQLTPTWRVYSTGSNVFQTRAGCLIGAEHVNNSYECDIPIGAGICASYQTQTNSPRRARSVASQSIIAYTMSLGAENSVAYSNNSIAIPTNFTISVTTEILPVSMTKTSVDCTMYICGDSTECSNLLLQYGSFCTQLNRALTGIAVEQDKNTQEVFAQVKQIYKTPPIKDFGGFNFSQILPDPSKPSKRSFIEDLLFNKVTLADAGFIKQYGDCLGDIAARDLICAQKFNGLTVLPPLLTDEMIAQYTSALLAGTITSGWTFCAGAALQIPFAMQMAYRFNGIGVTQNVLYENQKLIANQFNSAIGKIQDSLSSTASALGKLQDVVNQNAQALNTLVKQLSSNFGAISSVLNDILSRLDKVEAEVQIDRLITGRLQSLQTYVTQQLIRAAEIRASANLAATKMSECVCGQSKRVDFCGKGYHLMSFPQSAPHGVVFLHVTYVPAQEKNFTTAPAICHDGKAHFPREGVFVSNGTHWFVTQRNFYEPQIITTDNTFVSGNCDVVIGIVNNTVYDPLQPELDSGGGSGGGQIYEGKLTAEGLRFGIVASRFNHALVDRLVEGAIDAIVRHGGREEDITLVRVPGSWEIPVAAGELARKEDIDAVIAIGVLIRGATPHFDYIASEVSKGLADLSLELRKPITFGVITADTLEQAIERAGTKHGNKGWEAALSAIEMANLFKSLR

SEQ ID NO: 8230 - protein, 1307 aa, Artificial Sequence
  SARS-CoV-2/Iceland/189/2020__EPI_ISL_417709 spike protein (1-1147)(G889C_L1034C) LumSynth construct
MFVFLVLLPLVSSQCVNLTTRTQLPPAYTNSFTRGVYYPDKVFRSSVLHSTQDLFLPFFSNVTWFHAIHVSGTNGTKRFDNPVLPFNDGVYFASTEKSNIIRGWIFGTTLDSKTQSLLIVNNATNVVIKVCEFQFCNDPFLGVYYHKNNKSWMESEFRVYSSANNCTFEYVSQPFLMDLEGKQGNFKNLREFVFKNIDGYFKIYSKHTPINLVRDLPQGFSALEPLVDLPIGINITRFQTLLALHRSYLTPGDSSSGWTAGAAAYYVGYLQPRTFLLKYNENGTITDAVDCALDPLSETKCTLKSFTVEKGIYQTSNFRVQPTESIVRFPNITNLCPFGEVFNATRFASVYAWNRKRISNCVADYSVLYNSASFSTFKCYGVSPTKLNDLCFTNVYADSFVIRGDEVRQIAPGQTGKIADYNYKLPDDFTGCVIAWNSNNLDSKVGGNYNYLYRLFRKSNLKPFERDISTEIYQAGSTPCNGVEGFNCYFPLQSYGFQPTNGVGYQPYRVVVLSFELLHAPATVCGPKKSTNLVKNKCVNFNFNGLTGTGVLTESNKKFLPFQQFGRDIADTTDAVRDPQTLEILDITPCSFGGVSVITPGTNTSNQVAVLYQGVNCTEVPVAIHADQLTPTWRVYSTGSNVFQTRAGCLIGAEHVNNSYECDIPIGAGICASYQTQTNSPRRARSVASQSIIAYTMSLGAENSVAYSNNSIAIPTNFTISVTTEILPVSMTKTSVDCTMYICGDSTECSNLLLQYGSFCTQLNRALTGIAVEQDKNTQEVFAQVKQIYKTPPIKDFGGFNFSQILPDPSKPSKRSFIEDLLFNKVTLADAGFTKQYGDCLGDIAARDLICAQKFNGLTVLPPLLTDEMIAQYTSALLAGTITSGWTFCAGAALQIPFAMQMAYRFNGIGVTQNVLYENQKLIANQFNSAIGKIQDSLSSTASALGKLQDVVNQNAQALNTLVKQLSSNFGAISSVLNDILSRLDKVEAEVQIDRLITGRLQSLQTYVTQQLIRAAEIRASANLAATKMSECVCGQSKRVDFCGKGYHLMSFPQSAPHGVVFLHVTYVPAQEKNFTTAPAICHDGKAHFPREGVFVSNGTHWFVTQRNFYEPQIITTDNTFVSGNCDVVIGIVNNTVYDPLQPELDSGGGSGGGQIYEGKLTAEGLRFGIVASRFNHALVDRLVEGAIDAIVRHGGREEDITLVRVPGSWEIPVAAGELARKEDIDAVIAIGVLIRGATPHFDYIASEVSKGLADLSLELRKPITFGVITADTLEQAIERAGTKHGNKGWEAALSAIEMANLFKSLR

SEQ ID NO: 8231 - protein, 1307 aa, Artificial Sequence
  SARS-CoV-2/Australia/NSW56/2020__EPI_ISL_417408 spike protein (1-1147)(G889C_L1034C) LumSynth construct
MFVFLVLLPLVSSQCVNLTTRTQLPPAYTNSFTRGVYYPDKVFRSSVLHSTQDLFLPFFSNVTWFHAIHVSGTNGTKRFDNPVLPFNDGVYFASTEKSNIIRGWIFGTTLDSKTQSLLIVNNATNVVIKVCEFQFCNDPFLGVYYHKNNKSWMESEFRVYSSANNCTFEYVSQPFLMDLEGKQGNFKNLREFVFKNIDGYFKIYSKHTPINLVRDLPQGFSALEPLVDLPIGINITRFQTLLALHRSYLTPGDSSSGWTAGAAAYYVGYLQPRTFLLKYNENGTITDAVDCALDPLSETKCTLKSFTVEKGIYQTSNFRVQPTESIVRFPNITNLCPFGEVFNATRFASVYAWNRKRISNCVADYSVLYNSASFSTFKCYGVSPTKLNDLCFTNVYADSFVIRGDEVRQIAPGQTGKIADYNYKLPDDFTGCVIAWNSNNLDSKVGGNYNYLYRLFRKSNLKPFERDISTEIYQAGSTPCNGVEGFNCYFPLQSYGFQPTNGVGYQPYRVVVLSFELLHAPATVCGPKKSTNLVKNKCVNFNFNGLTGTGVLTESNKKFLPFQQFGRDIADTTDAVRDPQTLEILDITPCSFGGVSVITPGTNTSNQVAVLYQDVNCTEVPVAIHADQLTPTWRVYSTGSNVFQTRAGCLIGAEHVNNSYECDIPIGAGICASYQTQTNSPRRARSVASQSIIAYTMSLGAENSVAYSNNSIAIPTNFTISVTTEILPVSMTKTSVDCTMYICGDSTECSNLLLQYGSFCTQLNRALTGIAVEQDKNTQEVFAQVKQIYKTPPIKDFGGFNFSQILPDSSKPSKRSFIEDLLFNKVTLADAGFIKQYGDCLGDIAARDLICAQKFNGLTVLPPLLTDEMIAQYTSALLAGTITSGWTFCAGAALQIPFAMQMAYRFNGIGVTQNVLYENQKLIANQFNSAIGKIQDSLSSTASALGKLQDVVNQNAQALNTLVKQLSSNFGAISSVLNDILSRLDKVEAEVQIDRLITGRLQSLQTYVTQQLIRAAEIRASANLAATKMSECVCGQSKRVDFCGKGYHLMSFPQSAPHGVVFLHVTYVPAQEKNFTTAPAICHDGKAHFPREGVFVSNGTHWFVTQRNFYEPQIITTDNTFVSGNCDVVIGIVNNTVYDPLQPELDSGGGSGGGQIYEGKLTAEGLRFGIVASRFNHALVDRLVEGAIDAIVRHGGREEDITLVRVPGSWEIPVAAGELARKEDIDAVIAIGVLIRGATPHFDYIASEVSKGLADLSLELRKPITFGVITADTLEQAIERAGTKHGNKGWEAALSAIEMANLFKSLR

SEQ ID NO: 8232 - protein, 1307 aa, Artificial Sequence
  SARS-CoV-2/Iceland/280/2020__EPI_ISL_417608 spike protein (1-1147)(G889C_L1034C) LumSynth construct
MFVFLVLLPLVSSQCVNLTTRTQLPPAYTNSFTRGVYYPDKVFRSSVLHSTQDLFLPFFSNVTWFHAIHVSGTNGTKRFDNPVLPFNDGVYFASTEKSNIIRGWIFGTTLDSKTQSLLIVNNATNVVIKVCEFQFCNDPFLGVYYHKNNKSWMESEFRVYSSANNCTFEYVSQPFLMDLEGKQGNFKNLREFVFKNIDGYFKIYSKHTPINLVRDLPQGFSALEPLVDLPIGINITRFQTLLALHRSYLTPGDSSSGWTAGAAAYYVGYLQPRTFLLKYNENGTITDAVDCALDPLSETKCTLKSFTVEKGIYQTSNFRVQPTESIVRFPNITNLCPFGEVFNATRFASVYAWNRKRISNCVADYSVLYNSASFSTFKCYGVSPTKLNDLCFTNVYADSFVIRGDEVRQIAPGQTGKIADYNYKLPDDFTGCVIAWNSNNLDSKVGGNYNYLYRLFRKSNLKPFERDISTEIYQAGSTPCNGVEGFNCYFPLQSYGFQPTNGVGYQPYRVVVLSFELLHAPATVCGPKKSTNLVKNKCVNFNFNGLTGTGVLTESNKKFLPFQQFGRDIADTTDAVRDPQTLEILDITPCSFGGVSVITPGTNTSNQVAVLYQGVNCTEVPVAIHADQLTPTWRVYSTGSNVFQTRAGCLIGAEHVNNSYECDIPIGAGICASYHTQTNSPRRARSVASQSIIAYTMSLGAENSVAYSNNSIAIPTNFTISVTTEILPVSMTKTSVDCTMYICGDSTECSNLLLQYGSFCTQLNRALTGIAVEQDKNTQEVFAQVKQIYKTPPIKDFGGFNFSQILPDPSKPSKRSFIEDLLFNKVTLADAGFIKQYGDCLGDIAARDLICAQKFNGLTVLPPLLTDEMIAQYTSALLAGTITSGWTFCAGAALQIPFAMQMAYRFNGIGVTQNVLYENQKLIANQFNSAIGKIQDSLSSTASALGKLQDVVNQNAQALNTLVKQLSSNFGAISSVLNDILSRLDKVEAEVQIDRLITGRLQSLQTYVTQQLIRAAEIRASANLAATKMSECVCGQSKRVDFCGKGYHLMSFPQSAPHGVVFLHVTYVPAQEKNFTTAPAICHDGKAHFPREGVFVSNGTHWFVTQRNFYEPQIITTDNTFVSGNCDVVIGIVNNTVYDPLQPELDSGGGSGGGQIYEGKLTAEGLRFGIVASRFNHALVDRLVEGAIDAIVRHGGREEDITLVRVPGSWEIPVAAGELARKEDIDAVIAIGVLIRGATPHFDYIASEVSKGLADLSLELRKPITFGVITADTLEQAIERAGTKHGNKGWEAALSAIEMANLFKSLR

SEQ ID NO: 8233 - protein, 1307 aa, Artificial Sequence; identical to SEQ ID NO: 8188
  SARS-CoV-2/Iceland/247/2020__EPI_ISL_417575 spike protein (1-1147)(G889C_L1034C) LumSynth construct

SEQ ID NO: 8234 - protein, 1307 aa, Artificial Sequence
  SARS-CoV-2/Iceland/238/2020__EPI_ISL_417566 spike protein (1-1147)(G889C_L1034C) LumSynth construct
MFVFLVLLPLVSSQCVNLTTRTQLPPAYTNSFTRGVYYPDKVFRSSVLHSTQDLFLPFFSNVTWFHAIHVSGTNGTKRFDNPVLPFNDGVYFASTEKSNIIRGWIFGTTLDSKTQSLLIVNNATNVVIKVCEFQFCNDPFLGVYYHKNNKSWMESEFRVYSSANNCTFEYVSQPFLMDLEGKQGNFKNLREFVFKNIDGYFKIYSKHTPINLVRDLPQGFSALEPLVDLPIGINITRFQTLLALHRSYLTPGDSSSGWTAGAAAYYVGYLQPRTFLLKYNENGTITDAVDCALDPLSETKCTLKSFTVEKGIYQTSNFRVQPTESIVRFPNITNLCPFGEVFNATRFASVYAWNRKRISNCVADYSVLYNSASFSTFKCYGVSPTKLNDLCFTNVYADSFVIRGDEVRQIAPGQTGKIADYNYKLPDDFTGCVIAWNSNNLDSKVGGNYNYLYRLFRKSNLKPFERDISTEIYQAGSTPCNGVEGFNCYFPLQSYGFQPTNGVGYQPYRVVVLSFELLHAPATVCGPKKSTNLVKNKCVNFNFNGLTGTGVLTESNKKFLPFQQFGRDIADTTDAVRDPQTLEILDITPCSFGGVSVITPGTNTSNQVAVLYQGVNCTEVPVAIHADQLTPTWRVYSTGSNVFQTRAGCLIGAEHVNNSYECDIPIGAGICASYQTQTNSPRRARSVASQSIIAYTMSLGAENSVAYSNNSIAIPTNFTISVTTEILPVSMTKTSVDCTMYICGDSTECSNLLLQYGSFCTQLNRALTGIAVEQDKNTQEVFAQVKQIYKTPPIKDFGGFNFSQILPDPSKPSKRSFIEDLLFNKVTLADVGFIKQYGDCLGDIAARDLICAQKFNGLTVLPPLLTDEMIAQYTSALLAGTITSGWTFCAGAALQIPFAMQMAYRFNGIGVTQNVLYENQKLIANQFNSAIGKIQDSLSSTASALGKLQDVVNQNAQALNTLVKQLSSNFGAISSVLNDILSRLDKVEAEVQIDRLITGRLQSLQTYVTQQLIRAAEIRASANLAATKMSECVCGQSKRVDFCGKGYHLMSFPQSAPHGVVFLHVTYVPAQEKNFTTAPAICHDGKAHFPREGVFVSNGTHWFVTQRNFYEPQIITTDNTFVSGNCDVVIGIVNNTVYDPLQPELDSGGGSGGGQIYEGKLTAEGLRFGIVASRFNHALVDRLVEGAIDAIVRHGGREEDITLVRVPGSWEIPVAAGELARKEDIDAVIAIGVLIRGATPHFDYIASEVSKGLADLSLELRKPITFGVITADTLEQAIERAGTKHGNKGWEAALSAIEMANLFKSLR

SEQ ID NO: 8235 - protein, 1307 aa, Artificial Sequence
  SARS-CoV-2/Greece/16/2020__EPI_ISL_418265 spike protein (1-1147)(G889C_L1034C) LumSynth construct
MFVFLVLLPLVSSQCVNLTTRTQLPPAYTNSFTRGVYYPDKVFRSSVLHSTQDLFLPFFSNVTWFHAIHVSGTNGTKRFDNPVLPFNDGVYFASTEKSNIIRGWIFGTTLDSKTQSLLIVNNATNVVIKVCEFQFCNDPFLGVYYHKNNKSWMESEFRVYSSANNCTFEYVSQPFLMDLEGKQGNFKNLREFVFKNVDGYFKIYSKHTPINLVRDLPQGFSALEPLVDLPIGINITRFQTLLALHRSYLTPGDSSSGWTAGAAAYYVGYLQPRTFLLKYNENGTITDAVDCALDPLSETKCTLKSFTVEKGIYQTSNFRVQPTESIVRFPNITNLCPFGEVFNATRFASVYAWNRKRISNCVADYSVLYNSASFSTFKCYGVSPTKLNDLCFTNVYADSFVIRGDEVRQIAPGQTGKIADYNYKLPDDFTGCVIAWNSNNLDSKVGGNYNYLYRLFRKSNLKPFERDISTEIYQAGSTPCNGVEGFNCYFPLQSYGFQPTNGVGYQPYRVVVLSFELLHAPATVCGPKKSTNLVKNKCVNFNFNGLTGTGVLTESNKKFLPFQQFGRDIADTTDAVRDPQTLEILDITPCSFGGVSVITPGTNTSNQVAVLYQDVNCTEVPVAIHADQLTPTWRVYSTGSNVFQTRAGCLIGAEHVNNSYECDIPIGAGICASYQTQTNSPRRARSVASQSIIAYTMSLGAENSVAYSNNSIAIPTNFTISVTTEILPVSMTKTSVDCTMYICGDSTECSNLLLQYGSFCTQLNRALTGIAVEQDKNTQEVFAQVKQIYKTPPIKDFGGFNFSQILPDPSKPSKRSFIEDLLFNKVTLADAGFIKQYGDCLGDIAARDLICAQKFNGLTVLPPLLTDEMIAQYTSALLAGTITSGWTFCAGAALQIPFAMQMAYRFNGIGVTQNVLYENQKLIANQFNSAIGKIQDSLSSTASALGKLQDVVNQNAQALNTLVKQLSSNFGAISSVLNDILSRLDKVEAEVQIDRLITGRLQSLQTYVTQQLIRAAEIRASANLAATKMSECVCGQSKRVDFCGKGYHLMSFPQSAPHGVVFLHVTYVPAQEKNFTTAPAICHDGKAHFPREGVFVSNGTHWFVTQRNFYEPQIITTDNTFVSGNCDVVIGIVNNTVYDPLQPELDSGGGSGGGQIYEGKLTAEGLRFGIVASRFNHALVDRLVEGAIDAIVRHGGREEDITLVRVPGSWEIPVAAGELARKEDIDAVIAIGVLIRGATPHFDYIASEVSKGLADLSLELRKPITFGVITADTLEQAIERAGTKHGNKGWEAALSAIEMANLFKSLR

SEQ ID NO: 8236 - protein, 1307 aa, Artificial Sequence
  SARS-CoV-2/Iceland/319/2020__EPI_ISL_417648 spike protein (1-1147)(G889C_L1034C) LumSynth construct
MFVFLVLLPLVSSQCVNLTTRTQLPPAYTNSFTRGVYYPDKVFRSSVLHSTQDLFLPFFSNVTWFHAIHVSGTNGTKRFDNPVLPFNDGVYFASTEKSNIIRGWIFGTTLDSKTQSLLIVNNATNVVIKVCEFQFCNDPFLGVYYHKNNKSWMESEFRVYSSANNCTFEYVSQPFLIDLEGKQGNFKNLREFVFKNIDGYFKIYSKHTPINLVRDLPQGFSALEPLVDLPIGINITRFQTLLALHRSYLTPGDSSSGWTAGAAAYYVGYLQPRTFLLKYNENGTITDAVDCALDPLSETKCTLKSFTVEKGIYQTSNFRVQPTESIVRFPNITNLCPFGEVFNATRFASVYAWNRKRISNCVADYSVLYNSASFSTFKCYGVSPTKLNDLCFTNVYADSFVIRGDEVRQIAPGQTGKIADYNYKLPDDFTGCVIAWNSNNLDSKVGGNYNYLYRLFRKSNLKPFERDISTEIYQAGSTPCNGVEGFNCYFPLQSYGFQPTNGVGYQPYRVVVLSFELLHAPATVCGPKKSTNLVKNKCVNFNFNGLTGTGVLTESNKKFLPFQQFGRDIADTTDAVRDPQTLEILDITPCSFGGVSVITPGTNTSNQVAVLYQGVNCTEVPVAIHADQLTPTWRVYSTGSNVFQTRAGCLIGAEHVNNSYECDIPIGAGICASYQTQTNSPRRARSVASQSIIAYTMSLGAENSVAYSNNSIAIPTNFTISVTTEILPVSMTKTSVDCTMYICGDSTECSNLLLQYGSFCTQLNRALTGIAVEQDKNTQEVFAQVKQIYKTPPIKDFGGFNFSQILPDPSKPSKRSFIEDLLFNKVTLADAGFIKQYGDCLGDIAARDLICAQKFNGLTVLPPLLTDEMIAQYTSALLAGTITSGWTFCAGAALQIPFAMQMAYRFNGIGVTQNVLYENQKLIANQFNSAIGKIQDSLSSTASALGKLQDVVNQNAQALNTLVKQLSSNFGAISSVLNDILSRLDKVEAEVQIDRLITGRLQSLQTYVTQQLIRAAEIRASANLAATKMSECVCGQSKRVDFCGKGYHLMSFPQSAPHGVVFLHVTYVPAQEKNFTTAPAICHDGKAHFPREGVFVSNGTHWFVTQRNFYEPQIITTDNTFVSGNCDVVIGIVNNTVYDPLQPELDSGGGSGGGQIYEGKLTAEGLRFGIVASRFNHALVDRLVEGAIDAIVRHGGREEDITLVRVPGSWEIPVAAGELARKEDIDAVIAIGVLIRGATPHFDYIASEVSKGLADLSLELRKPITFGVITADTLEQAIERAGTKHGNKGWEAALSAIEMANLFKSLR

SEQ ID NO: 8237 - protein, 1307 aa, Artificial Sequence
  SARS-CoV-2/Congo/94/2020__EPI_ISL_417947 spike protein (1-1147)(G889C_L1034C) LumSynth construct
MFVFLVLLPLVSSQCVNLTTRTQLPPAYTNSFTRGVYYPDKVFRSSVLHSTQDLFLPFFSNVTWFHAIHVSGTNGTKRFDNPVLPFNDGVYFASTEKSNIIRGWIFGTTLDSKTQSLLIVNNATNVVIKVCEFQFCNDPFLGVYYHKNNKSWMESEFRVYSSANNCTFEYVSQPFLMDLEGKQGNFKNLREFVFKNIDGYFKIYSKHTPINLVRDLPQGFSALEPLVDLPIGINITRFQTLLALHRSYLTPGDSSSGWTAGAAAYYVGYLQPRTFLLKYNENGTITDAVDCALDPLSETKCTLKSFTVEKGIYQTSNFRVQPTESIVRFPNITNLCPFGEVFNATRFASVYAWNRKRISNCVADYSVLYNSASFSTFKCYGVSPTKLNDLCFTNVYADSFVIRGDEVRQIAPGQTGKIADYNYKLPDDFTGCVIAWNSNNLDSKVGGNYNYLYRLFRKSNLKPFERDISTEIYQAGSTPCNGVEGFNCYFPLQSYGFQPTNGVGYQPYRVVVLSFELLHAPATVCGPKKSTNLVKNKCVNFNFNGLTGTGVLTESNKKFLPFQQFGRDIADTTDAVRDPQTLEILDITPCSFGGVSVITPGTNTSNQVAVLYQGVNCTEVPVAIHADQLTPTWRVYSTGSNVFQTRAGCLIGAEHVNNSYECDIPIGAGICASYQTQTNSPRRARSVASQSIIAYTMSLGAENSVAYSNNSIAIPTNFTISVTTEILPVSMTKTSVDCTMYICGDSTECSNLLLQYGSFCTQLNRALTGIAVEQDKNTQEVFAQVKQIYKTPPIKDFGGFNFSQILPDPSKPSKRSFIEDILFNKVTLADAGFIKQYGDCLGDIAARDLICAQKFNGLTVLPPLLTDEMIAQYTSALLAGTITSGWTFCAGAALQIPFAMQMAYRFNGIGVTQNVLYENQKLIANQFNSAIGKIQDSLSSTASALGKLQDVVNQNAQALNTLVKQLSSNFGAISSVLNDILSRLDKVEAEVQIDRLITGRLQSLQTYVTQQLIRAAEIRASANLAATKMSECVCGQSKRVDFCGKGYHLMSFPQSAPHGVVFLHVTYVPAQEKNFTTAPAICHDGKAHFPREGVFVSNGTHWFVTQRNFYEPQIITTDNTFVSGNCDVVIGIVNNTVYDPLQPELDSGGGSGGGQIYEGKLTAEGLRFGIVASRFNHALVDRLVEGAIDAIVRHGGREEDITLVRVPGSWEIPVAAGELARKEDIDAVIAIGVLIRGATPHFDYIASEVSKGLADLSLELRKPITFGVITADTLEQAIERAGTKHGNKGWEAALSAIEMANLFKSLR

SEQ ID NO: 8238 - protein, 1307 aa, Artificial Sequence
  SARS-CoV-2/Congo/158/2020__EPI_ISL_417950 spike protein (1-1147)(G889C_L1034C) LumSynth construct
MFVFLVLLPLVSSQCVNLTTRTQLPPAYTNSFTRGVYYPDKVFRSSVLHSTQDLFLPFFSNVTWFHAIHVSGTNGTKRFDNPVLPFNDGVYFASTEKSNIIRGWIFGTTLDSKTQSLLIVNNATNVVIKVCEFQFCNDPFLGVYYHKNNKSWMESEFRVYSSANNCTFEYVSQPFLMDLEGKQGNFKNLREFVFKNIDGYFKIYSKHTPINLVRDLPQGFSALEPLVDLPIGINITRFQTLLALHRSYLTPGDSSSGWTAGAAAYYVGYLQPRTFLLKYNENGTITDAVDCALDPLSETKCTLKSFTVEKGIYQTSNFRVQPTESIVRFPNITNLCPFGEVFNATRFASVYAWNRKRISNCVADYSVLYNSASFSTFKCYGVSPTKLNDLCFTNVYADSFVIRGDEVRQIAPGQTGKIADYNYKLPDDFTGCVIAWNSNNLDSKVGGNYNYLYRLFRKSNLKPFERDISTEIYQAGSTPCNGVEGFNCYFPLQSYGFQPTNGVGYQPYRVVVLSFELLHAPATVCGPKKSTNLVKNKCVNFNFNGLTGTGVLTESNKKFLPFQQFGRDIADTTDAVRDPQTLEILDITPCSFGGVSVITPGTNTSNQVAVLYQDVNCTEVPVAIHADQLTPTWRVYSTGSNVFQTRAGCLIGAEHVNNSYECDIPIGAGICASYQTQTNSPRRARSVASQSIIAYTMSLGAENSVAYSNNSIAIPTNFTISVTTEILPVSMTKTSVDCTMYICGDSTECSNLLLQYGSFCTQLNRALTGIAVEQDKNTQEVFAQVKQIYKTPPIKDFGGFNFSQILPDPSKPSKRSFIEDLLFNKVTLADAGFIKQYGDCLGDIAARDLICAQKFNGLTVLPPLLTDEMIAQYTSALLAGTITSGWTFCAGAALQIPFAMQMAYRFNGIGVTQNVLYENQKLIANQFNSAIGKIQDSLSSTASALGKLQDVVNQNAQALNTLVKQLSSNFGAISSVLNDILSRLDKVEAEVQIDRLITGRLQSLQTYVTQQLIRAAEIRASANLAATKMSECVCGQSKRVDFCGKGYHLMSFPQSAPHGVVFLHVTYVPAQEKNFTTAPAICHDGKAHFPREGVFVSNGTHWFVTQRNFYEPQIITTDNTFLSGNCDVVIGIVNNTVYDPLQPELDSGGGSGGGQIYEGKLTAEGLRFGIVASRFNHALVDRLVEGAIDAIVRHGGREEDITLVRVPGSWEIPVAAGELARKEDIDAVIAIGVLIRGATPHFDYIASEVSKGLADLSLELRKPITFGVITADTLEQAIERAGTKHGNKGWEAALSAIEMANLFKSLR

SEQ ID NO: 8239 - protein, 1307 aa, Artificial Sequence
  SARS-CoV-2/USA/UT-00034/2020__EPI_ISL_417977 spike protein (1-1147)(G889C_L1034C) LumSynth construct
MFVFLVLLPLVSSQCVNLTTRTQLPPAYTNSFTRGVYYPDKVFRSSVLHSTQDLFLPFFSNVTWFHAIHVSGTNGTKRFDNPVLPFNDGVYFASTEKSNIIRGWIFGTTLDSKTQSLLIVNNATNVVIKVCEFQFCNDPFLGVYYYKNNKSWMESEFRVYSSANNCTFEYVSQPFLMDLEGKQGNFKNLREFVFKNIDGYFKIYSKHTPINLVRDLPQGFSALEPLVDLPIGINITRFQTLLALHRSYLTPGDSSSGWTAGAAAYYVGYLQPRTFLLKYNENGTITDAVDCALDPLSETKCTLKSFTVEKGIYQTSNFRVQPTESIVRFPNITNLCPFGEVFNATRFASVYAWNRKRISNCVADYSVLYNSASFSTFKCYGVSPTKLNDLCFTNVYADSFVIRGDEVRQIAPGQTGKIADYNYKLPDDFTGCVIAWNSNNLDSKVGGNYNYLYRLFRKSNLKPFERDISTEIYQAGSTPCNGVEGFNCYFPLQSYGFQPTNGVGYQPYRVVVLSFELLHAPATVCGPKKSTNLVKNKCVNFNFNGLTGTGVLTESNKKFLPFQQFGRDIADTTDAVRDPQTLEILDITPCSFGGVSVITPGTNTSNQVAVLYQGVNCTEVPVAIHADQLTPTWRVYSTGSNVFQTRAGCLIGAEHVNNSYECDIPIGAGICASYQTQTNSPRRARSVASQSIIAYTMSLGAENSVAYSNNSIAIPTNFTISVTTEILPVSMTKTSVDCTMYICGDSTECSNLLLQYGSFCTQLNRALTGIAVEQDKNTQEVFAQVKQIYKTPPIKDFGGFNFSQILPDPSKPSKRSFIEDLLFNKVTLADAGFIKQYGDCLGDIAARDLICAQKFNGLTVLPPLLTDEMIAQYTSALLAGTITSGWTFCAGAALQIPFAMQMAYRFNGIGVTQNVLYENQKLIANQFNSAIGKIQDSLSSTASALGKLQDVVNQNAQALNTLVKQLSSNFGAISSVLNDILSRLDKVEAEVQIDRLITGRLQSLQTYVTQQLIRAAEIRASANLAATKMSECVCGQSKRVDFCGKGYHLMSFPQSAPHGVVFLHVTYVPAQEKNFTTAPAICHDGKAHFPREGVFVSNGTHWFVTQRNFYEPQIITTDNTFVSGNCDVVIGIVNNTVYDPLQPELDSGGGSGGGQIYEGKLTAEGLRFGIVASRFNHALVDRLVEGAIDAIVRHGGREEDITLVRVPGSWEIPVAAGELARKEDIDAVIAIGVLIRGATPHFDYIASEVSKGLADLSLELRKPITFGVITADTLEQAIERAGTKHGNKGWEAALSAIEMANLFKSLR

SEQ ID NO: 8240 - protein, 1307 aa, Artificial Sequence
  SARS-CoV-2/USA/UT-00033/2020__EPI_ISL_417976 spike protein (1-1147)(G889C_L1034C) LumSynth construct
MFVFLVLLPLVSSQCVNLTTRTQLPPAYTNSFTRGVYYPDKVFRSSVLHSTQDLFLPFFSNVTWFHAIHVSGTNGTKRFDNPVLPFNDGVYFASTEKSNIIRGWIFGTTLDSKTQSLLIVNNATNVVIKVCEFQFCNDPFLGVYYHKNNKSWMESEFRVYSSANNCTFEYVSQPFLMDLEGKQGNFKNLREFVFKNIDGYFKIYSKHTPINLVRDLPQGFSALEPLVDLPIGINITRFQTLLALHRSYLTPGDSSSGLTAGAAAYYVGYLQPRTFLLKYNENGTITDAVDCALDPLSETKCTLKSFTVEKGIYQTSNFRVQPTESIVRFPNITNLCPFGEVFNATRFASVYAWNRKRISNCVADYSVLYNSASFSTFKCYGVSPTKLNDLCFTNVYADSFVIRGDEVRQIAPGQTGKIADYNYKLPDDFTGCVIAWNSNNLDSKVGGNYNYLYRLFRKSNLKPFERDISTEIYQAGSTPCNGVEGFNCYFPLQSYGFQPTNGVGYQPYRVVVLSFELLHAPATVCGPKKSTNLVKNKCVNFNFNGLTGTGVLTESNKKFLPFQQFGRDIADTTDAVRDPQTLEILDITPCSFGGVSVITPGTNTSNQVAVLYQGVNCTEVPVAIHADQLTPTWRVYSTGSNVFQTRAGCLIGAEHVNNSYECDIPIGAGICASYQTQTNSPRRARSVASQSIIAYTMSLGAENSVAYSNNSIAIPTNFTISVTTEILPVSMTKTSVDCTMYICGDSTECSNLLLQYGSFCTQLNRALTGIAVEQDKNTQEVFAQVKQIYKTPPIKDFGGFNFSQILPDPSKPSKRSFIEDLLFNKVTLADAGFIKQYGDCLGDIAARDLICAQKFNGLTVLPPLLTDEMIAQYTSALLAGTITSGWTFCAGAALQIPFAMQMAYRFNGIGVTQNVLYENQKLIANQFNSAIGKIQDSLSSTASALGKLQDVVNQNAQALNTLVKQLSSNFGAISSVLNDILSRLDKVEAEVQIDRLITGRLQSLQTYVTQQLIRAAEIRASANLAATKMSECVCGQSKRVDFCGKGYHLMSFPQSAPHGVVFLHVTYVPAQEKNFTTAPAICHDGKAHFPREGVFVSNGTHWFVTQRNFYEPQIITTDNTFVSGNCDVVIGIVNNTVYDPLQPELDSGGGSGGGQIYEGKLTAEGLRFGIVASRFNHALVDRLVEGAIDAIVRHGGREEDITLVRVPGSWEIPVAAGELARKEDIDAVIAIGVLIRGATPHFDYIASEVSKGLADLSLELRKPITFGVITADTLEQAIERAGTKHGNKGWEAALSAIEMANLFKSLR

SEQ ID NO: 8241 - protein, 1307 aa, Artificial Sequence
  SARS-CoV-2/USA/WI-13/2020__EPI_ISL_417516 spike protein (1-1147)(G889C_L1034C) LumSynth construct
MFVFLVLLPLVSSQCVNLTTRTQLPPAYTNSFTRGVYYPDKVFRSSVLHSTQDLFLPFFSNVTWFHAIHVSGTNGTKRFDNPVLPFNDGVYFASTEKSNIIRGWIFGTTLDSKTQSLLIVNNATNVVIKVCEFQFCNDPFLGVYYHKNNKSWMESEFRVYSSANNCTFEYVSQPFLMDLEGKQGNFKNLREFVFKNIDGYFKIYSKHTPINLVRDLPQGFSALEPLVDLPIGINITRFQTLLALHRSYLTPGDSSSGWTAGAAAYYVGYLQPRTFLLKYNENGTITDAVDCALDPLSETKCTLKSFTVEKGIYQTSNFRVLPTESIVRFPNITNLCPFGEVFNATRFASVYAWNRKRISNCVADYSVLYNSASFSTFKCYGVSPTKLNDLCFTNVYADSFVIRGDEVRQIAPGQTGKIADYNYKLPDDFTGCVIAWNSNNLDSKVGGNYNYLYRLFRKSNLKPFERDISTEIYQAGSTPCNGVEGFNCYFPLQSYGFQPTNGVGYQPYRVVVLSFELLHAPATVCGPKKSTNLVKNKCVNFNFNGLTGTGVLTESNKKFLPFQQFGRDIADTTDAVRDPQTLEILDITPCSFGGVSVITPGTNTSNQVAVLYQGVNCTEVPVAIHADQLTPTWRVYSTGSNVFQTRAGCLIGAEHVNNSYECDIPIGAGICASYQTQTNSPRRARSVASQSIIAYTMSLGAENSVAYSNNSIAIPTNFTISVTTEILPVSMTKTSVDCTMYICGDSTECSNLLLQYGSFCTQLNRALTGIAVEQDKNTQEVFAQVKQIYKTPPIKDFGGFNFSQILPDPSKPSKRSFIEDLLFNKVTLADAGFIKQYGDCLGDIAARDLICAQKFNGLTVLPPLLTDEMIAQYTSALLAGTITSGWTFCAGAALQIPFAMQMAYRFNGIGVTQNVLYENQKLIANQFNSAIGKIQDSLSSTASALGKLQDVVNQNAQALNTLVKQLSSNFGAISSVLNDILSRLDKVEAEVQIDRLITGRLQSLQTYVTQQLIRAAEIRASANLAATKMSECVCGQSKRVDFCGKGYHLMSFPQSAPHGVVFLHVTYVPAQEKNFTTAPAICHDGKAHFPREGVFVSNGTHWFVTQRNFYEPQIITTDNTFVSGNCDVVIGIVNNTVYDPLQPELDSGGGSGGGQIYEGKLTAEGLRFGIVASRFNHALVDRLVEGAIDAIVRHGGREEDITLVRVPGSWEIPVAAGELARKEDIDAVIAIGVLIRGATPHFDYIASEVSKGLADLSLELRKPITFGVITADTLEQAIERAGTKHGNKGWEAALSAIEMANLFKSLR

SEQ ID NO: 8242 - protein, 1306 aa, Artificial Sequence
  SARS-CoV-2/India/1-27/2020__EPI_ISL_413522 spike protein (1-1146)(G888C_L1033C) LumSynth construct
MFVFLVLLPLVSSQCVNLTTRTQLPPAYTNSFTRGVYYPDKVFRSSVLHSTQDLFLPFFSNVTWFHAIHVSGTNGTKRFDNPVLPFNDGVYFASTEKSNIIRGWIFGTTLDSKTQSLLIVNNATNVVIKVCEFQFCNDPFLGVYHKNNKSWMESEFRVYSSANNCTFEYVSQPFLMDLEGKQGNFKNLREFVFKNIDGYFKIYSKHTPINLVRDLPQGFSALEPLVDLPIGINITRFQTLLALHRSYLTPGDSSSGWTAGAAAYYVGYLQPRTFLLKYNENGTITDAVDCALDPLSETKCTLKSFTVEKGIYQTSNFRVQPTESIVRFPNITNLCPFGEVFNATRFASVYAWNRKRISNCVADYSVLYNSASFSTFKCYGVSPTKLNDLCFTNVYADSFVIRGDEVIQIAPGQTGKIADYNYKLPDDFTGCVIAWNSNNLDSKVGGNYNYLYRLFRKSNLKPFERDISTEIYQAGSTPCNGVEGFNCYFPLQSYGFQPTNGVGYQPYRVVVLSFELLHAPATVCGPKKSTNLVKNKCVNFNFNGLTGTGVLTESNKKFLPFQQFGRDIADTTDAVRDPQTLEILDITPCSFGGVSVITPGTNTSNQVAVLYQDVNCTEVPVAIHADQLTPTWRVYSTGSNVFQTRAGCLIGAEHVNNSYECDIPIGAGICASYQTQTNSPRRARSVASQSIIAYTMSLGAENSVAYSNNSIAIPTNFTISVTTEILPVSMTKTSVDCTMYICGDSTECSNLLLQYGSFCTQLNRALTGIAVEQDKNTQEVFAQVKQIYKTPPIKDFGGFNFSQILPDPSKPSKRSFIEDLLFNKVTLADAGFIKQYGDCLGDIAARDLICAQKFNGLTVLPPLLTDEMIAQYTSALLAGTITSGWTFCAGAALQIPFAMQMAYRFNGIGVTQNVLYENQKLIANQFNSAIGKIQDSLSSTASALGKLQDVVNQNAQALNTLVKQLSSNFGAISSVLNDILSRLDKVEAEVQIDRLITGRLQSLQTYVTQQLIRAAEIRASANLAATKMSECVCGQSKRVDFCGKGYHLMSFPQSAPHGVVFLHVTYVPAQEKNFTTAPAICHDGKAHFPREGVFVSNGTHWFVTQRNFYEPQIITTDNTFVSGNCDVVIGIVNNTVYDPLQPELDSGGGSGGGQIYEGKLTAEGLRFGIVASRFNHALVDRLVEGAIDAIVRHGGREEDITLVRVPGSWEIPVAAGELARKEDIDAVIAIGVLIRGATPHFDYIASEVSKGLADLSLELRKPITFGVITADTLEQAIERAGTKHGNKGWEAALSAIEMANLFKSLR

SEQ ID NO: 8243 - protein, 1301 aa, Artificial Sequence
  SARS-CoV-2/pangolin/Guangxi/P4L/2017__EPI_ISL_410538 spike protein (1-1141)(G883C_L1028C) LumSynth construct
MFVFLFVLPLVSSQCVNLTTRTGIPPGYTNSSTRGVYYPDKVFRSSILHLTQDLFLPFFSNVTWFNTINYQGGFKKFDNPVLPFNDGVYFASTEKSNIIRGWIFGTTLDARTQSLLIVNNATNVVIKVCEFQFCTDPFLGVYYHNNNKTWVENEFRVYSSANNCTFEYISQPFLMDLEGKQGNFKNLREFVFKNVDGYFKIYSKHTPIDLVRDLPRGFAALEPLVDLPIGINITRFQTLLALHRSYLTPGNLESGWTTGAAAYYVGYLQQRTFLLSYNQNGTITDAVDCSLDPLSETKCTLKSLTVEKGIYQTSNFRVQPTISIVRFPNITNLCPFGEVFNASKFASVYAWNRKRISNCVADYSVLYNSTSFSTFKCYGVSPTKLNDLCFTNVYADSFVVKGDEVRQIAPGQTGVIADYNYKLPDDFTGCVIAWNSVKQDALTGGNYGYLYRLFRKSKLKPFERDISTEIYQAGSTPCNGQVGLNCYYPLERYGFHPTTGVNYQPFRVVVLSFELLNGPATVCGPKLSTTLVKDKCVNFNFNGLTGTGVLTTSKKQFLPFQQFGRDISDTTDAVRDPQTLEILDITPCSFGGVSVITPGTNTSNQVAVLYQDVNCTEVPMAIHAEQLTPAWRVYSAGANVFQTRAGCLVGAEHVNNSYECDIPVGAGICASYHSMSSLRSVNQRSIIAYTMSLGAENSVAYSNNSIAIPTNFTISVTTEILPVSMTKTSVDCTMYICGDSIECSNLLLQYGSFCTQLNRALTGIAVEQDKNTQEVFAQVKQIYKTPPIKDFGGFNFSQILPDPSKPSKRSFIEDLLFNKVTLADAGFIKQYGDCLGDIAARDLICAQKFNGLTVLPPLLTDEMIAQYTSALLAGTITSGWTFCAGAALQIPFAMQMAYRFNGIGVTQNVLYENQKLIANQFNSAIGKIQDSLSSTASALGKLQDVVNQNAQALNTLVKQLSSNFGAISSVLNDILSRLDKVEAEVQIDRLITGRLQSLQTYVTQQLIRAAEIRASANLAATKMSECVCGQSKRVDFCGKGYHLMSFPQSAPHGVVFLHVTYVPAQEKNFTTAPAICHEGKAHFPREGVFVSNGTHWFITQRNFYEPQIITTDNTFVSGSCDVVIGIVNNTVYDPLQPELDSGGGSGGGQIYEGKLTAEGLRFGIVASRFNHALVDRLVEGAIDAIVRHGGREEDITLVRVPGSWEIPVAAGELARKEDIDAVIAIGVLIRGATPHFDYIASEVSKGLADLSLELRKPITFGVITADTLEQAIERAGTKHGNKGWEAALSAIEMANLFKSLR

SEQ ID NO: 8244 - protein, 1301 aa, Artificial Sequence
  SARS-CoV-2/pangolin/Guangxi/P5L/2017__EPI_ISL_410540 spike protein (1-1141)(G883C_L1028C) LumSynth construct
MFVFLFVLPLVSSQCVNLTTRTGIPPGYTNSSTRGVYYPDKVFRSSILHLTQDLFLPFFSNVTWFNTINYQGGFKKFDNPVLPFNDGVYFASTEKSNIIRGWIFGTTLDARTQSLLIVNNATNVVIKVCEFQFCTDPFLGVYYHNNNKTWVENEFRVYSSANNCTFEYISQPFLMDLEGKQGNFKNLREFVFKNVDGYFKIYSKHTPIDLVRDLPRGFAALEPLVDLPIGINITRFQTLLALHRSYLTPGKLESGWTTGAAAYYVGYLQQRTFLLSYNQNGTITDAVDCSLDPLSETKCTLKSLTVEKGIYQTSNFRVQPTISIVRFPNITNLCPFGEVFNASKFASVYAWNRKRISNCVADYSVLYNSTSFSTFKCYGVSPTKLNDLCFTNVYADSFVVKGDEVRQIAPGQTGVIADYNYKLPDDFTGCVIAWNSVKQDALTGGNYGYLYRLFRKSKLKPFERDISTEIYQAGSTPCNGQVGLNCYYPLERYGFHPTTGVNYQPFRVVVLSFELLNGPATVCGPKLSTTLVKDKCVNFNFNGLTGTGVLTTSKKQFLPFQQFGRDISDTTDAVRDPQTLEILDITPCSFGGVSVITPGTNTSNQVAVLYQDVNCTEVPMAIHAEQLTPAWRVYSAGANVFQTRAGCLVGAEHVNNSYECDIPVGAGICASYHSMSSFRSVNQRSIIAYTMSLGAENSVAYSNNSIAIPTNFTISVTTEILPVSMTKTSVDCTMYICGDSIECSNLLLQYGSFCTQLNRALTGIAVEQDKNTQEVFAQVKQIYKTPPIKDFGGFNFSQILPDPSKPSKRSFIEDLLFNKVTLADAGFIKQYGDCLGDIAARDLICAQKFNGLTVLPPLLTDEMIAQYTSALLAGTITSGWTFCAGAALQIPFAMQMAYRFNGIGVTQNVLYENQKLIANQFNSAIGKIQDSLSSTASALGKLQDVVNQNAQALNTLVKQLSSNFGAISSVLNDILSRLDKVEAEVQIDRLITGRLQSLQTYVTQQLIRAAEIRASANLAATKMSECVCGQSKRVDFCGKGYHLMSFPQSAPHGVVFLHVTYVPAQEKNFTTAPAICHEGKAHFPREGVFVSNGTHWFITQRNFYEPQIITTDNTFVSGSCDVVIGIVNNTVYDPLQPELDSGGGSGGGQIYEGKLTAEGLRFGIVASRFNHALVDRLVEGAIDAIVRHGGREEDITLVRVPGSWEIPVAAGELARKEDIDAVIAIGVLIRGATPHFDYIASEVSKGLADLSLELRKPITFGVITADTLEQAIERAGTKHGNKGWEAALSAIEMANLFKSLR

SEQ ID NO: 8245 - protein, 1301 aa, Artificial Sequence
  SARS-CoV-2/pangolin/Guangxi/P5E/2017__EPI_ISL_410541 spike protein (1-1141)(G883C_L1028C) LumSynth construct
MFVFLFVLPLVSSQCVNLTTRTGIPPGYTNSSTRGVYYPDKVFRSSILHLTQDLFLPFFSNVTWFNTITYQGGSKKFDNPVLPFNDGVYFASTEKSNIIRGWIFGTTLDARTQSLLIVNNATNVVIKVCEFQFCTDPFLGVYYHNNNKTWVENEFRVYSSANNCTFEYISQPFLMDLEGKQGNFKNLREFVFKNVDGYFKIYSKHTPIDLVRDLPRGFAALEPLVDLPIGINITRFQTLLALHRSYLTPGKLESGWTTGAAAYYVGYLQQRTFLLSYNQNGTITDAVDCSLDPLSETKCTLKSLTVEKGIYQTSNFRVQPTISIVRFPNITNLCPFGEVFNASKFASVYAWNRKRISNCVADYSVLYNSTSFSTFKCYGVSPTKLNDLCFTNVYADSFVVKGDEVRQIAPGQTGVIADYNYKLPDDFTGCVIAWNSVKQDALTGDNYGYLYRLFRKSKLKPFERDISTEIYQAGSTPCNGQVGLNCYYPLERYGFHPTTGVNYQPFRVVVLSFELLNGPATVCGPKLSTTLVKDKCVNFNFNGLTGTGVLTTSKKQFLPFQQFGRDISDTTDAVRDPQTLEILDITPCSFGGVSVITPGTNTSNQVAVLYQDVNCTEVPMAIHAEQLTPAWRVYSAGANVFQTRAGCLVGAEHVNNSYECDIPVGAGICASYHSMSSFRSVNQRSIIAYTMSLGAENSVAYSNNSIAIPTNFTISVTTEILPVSMTKTSVDCTMYICGDSIECSNLLLQYGSFCTQLNRALTGIAVEQDKNTQEVFAQVKQIYKTPPIKDFGGFNFSQILPDPSKPSKRSFIEDLLFNKVTLADAGFIKQYGDCLGDIAARDLICAQKFNGLTVLPPLLTDEMIAQYTSALLAGTITSGWTFCAGAALQIPFAMQMAYRFNGIGVTQNVLYENQKLIANQFNSAIGKIQDSLSSTASALGKLQDVVNQNAQALNTLVKQLSSNFGAISSVLNDILSRLDKVEAEVQIDRLITGRLQSLQTYVTQQLIRAAEIRASANLAATKMSECVCGQSKRVDFCGKGYHLMSFPQSAPHGVVFLHVTYVPAQEKNFTTAPAICHEGKAHFPREGVFVSNGTHWFITQRNFYEPQIITTDNTFVSGSCDVVIGIVNNTVYDPLQPELDSGGGSGGGQIYEGKLTAEGLRFGIVASRFNHALVDRLVEGAIDAIVRHGGREEDITLVRVPGSWEIPVAAGELARKEDIDAVIAIGVLIRGATPHFDYIASEVSKGLADLSLELRKPITFGVITADTLEQAIERAGTKHGNKGWEAALSAIEMANLFKSLR

SEQ ID NO: 8246 - protein, 1299 aa, Artificial Sequence
  SARS-CoV-2/pangolin/Guangxi/P1E/2017__EPI_ISL_410539 spike protein (1-1139)(G881C_L1026C) LumSynth construct
MFVFLFVLPLVSSQCVNLTTRTGIQPGYTNSSTRGVYYPDKVFRSSILHLTQDLFLPFFSNVTWFNTINYQGGFKKFDNPVLPFNDGVYFASTEKSNIIRGWIFGTTLDARTQSLLIVNNATNVVIKVCEFQFCTDPFLGVYYHNNNKTWVENEFRVYSSANNCTFEYISQPFLMDLEGKQGNFKNLREFVFKNVDGYFKIYSKHTPIDLVRDLPRGFAALEPLVDLPIGINITRFQTLLALHRSYLTPGKLESGWTTGAAAYYVGYLQQRTFLLSYNQNGTITDAVDCSLDPLSETKCTLKSLTVEKGIYQTSNFRVQPTISIVRFPNITNLCPFGEVFNASKFASVYAWNRKRISNCVADYSVLYNSTSFSTFKCYGVSPTKLNDLCFTNVYADSFVVKGDEVRQIAPGQTGVIADYNYKLPDDFTGCVIAWNSVKQDALTGGNYLYRLFRKSKLKPFERDISTEIYQAGSTPCNGQVGLNCYYPLERYGFHPTTGVNYQPFRVVVLSFELLNGPATVCGPKLSTTLVKDKCVNFNFNGLTGTGVLTTSKKQFLPFQQFGRDISDTTDAVRDPQTLEILDITPCSFGGVSVITPGTNTSNQVAVLYQDVNCTEVPMAIHAEQLTPAWRVYSAGANVFQTRAGCLVGAEHVNNSYECDIPVGAGICASYHSMSSLRSVNQRSIIAYTMSLGAENSVAYSNNSIAIPTNFTISVTTEILPVSMTKTSVDCTMYICGDSIECSNLLLQYGSFCTQLNRALTGIAVEQDKNTQEVFAQVKQIYKTPPIKDFGGFNFSQILPDPSKPSKRSFIEDLLFNKVTLADAGFIKQYGDCLGDIAARDLICAQKFNGLTVLPPLLTDEMIAQYTSALLAGTITSGWTFCAGAALQIPFAMQMAYRFNGIGVTQNVLYENQKLIANQFNSAIGKIQDSLSSTASALGKLQDVVNQNAQALNTLVKQLSSNFGAISSVLNDILSRLDKVEAEVQIDRLITGRLQSLQTYVTQQLIRAAEIRASANLAATKMSECVCGQSKRVDFCGKGYHLMSFPQSAPHGVVFLHVTYVPAQEKNFTTAPAICHEGKAHFPREGVFVSNGTHWFITQRNFYEPQIITTDNTFVSGSCDVVIGIVNNTVYDPLQPELDSGGGSGGGQIYEGKLTAEGLRFGIVASRFNHALVDRLVEGAIDAIVRHGGREEDITLVRVPGSWEIPVAAGELARKEDIDAVIAIGVLIRGATPHFDYIASEVSKGLADLSLELRKPITFGVITADTLEQAIERAGTKHGNKGWEAALSAIEMANLFKSLR

SEQ ID NO: 8247 - protein, 1307 aa, Artificial Sequence
  SARS-CoV-2/Wuhan/WIV05/2019__EPI_ISL_402128 spike protein (1-1147)(I909C_Y1047C) LumSynth construct
MFVFLVLLPLVSSQCVNLTTRTQLPPAYTNSFTRGVYYPDKVFRSSVLHSTQDLFLPFFSNVTWFHAIHVSGTNGTKRFDNPVLPFNDGVYFASTEKSNIIRGWIFGTTLDSKTQSLLIVNNATNVVIKVCEFQFCNDPFLGVYYHKNNKSWMESEFRVYSSANNCTFEYVSQPFLMDLEGKQGNFKNLREFVFKNIDGYFKIYSKHTPINLVRDLPQGFSALEPLVDLPIGINITRFQTLLALHRSYLTPGDSSSGWTAGAAAYYVGYLQPRTFLLKYNENGTITDAVDCALDPLSETKCTLKSFTVEKGIYQTSNFRVQPTESIVRFPNITNLCPFGEVFNATRFASVYAWNRKRISNCVADYSVLYNSASFSTFKCYGVSPTKLNDLCFTNVYADSFVIRGDEVRQIAPGQTGKIADYNYKLPDDFTGCVIAWNSNNLDSKVGGNYNYLYRLFRKSNLKPFERDISTEIYQAGSTPCNGVEGFNCYFPLQSYGFQPTNGVGYQPYRVVVLSFELLHAPATVCGPKKSTNLVKNKCVNFNFNGLTGTGVLTESNKKFLPFQQFGRDIADTTDAVRDPQTLEILDITPCSFGGVSVITPGTNTSNQVAVLYQDVNCTEVPVAIHADQLTPTWRVYSTGSNVFQTRAGCLIGAEHVNNSYECDIPIGAGICASYQTQTNSPRRARSVASQSIIAYTMSLGAENSVAYSNNSIAIPTNFTISVTTEILPVSMTKTSVDCTMYICGDSTECSNLLLQYGSFCTQLNRALTGIAVEQDKNTQEVFAQVKQIYKTPPIKDFGGFNFSQILPDPSKPSKRSFIEDLLFNKVTLADAGFIKQYGDCLGDIAARDLICAQKFNGLTVLPPLLTDEMIAQYTSALLAGTITSGWTFGAGAALQIPFAMQMAYRFNGCGVTQNVLYENQKLIANQFNSAIGKIQDSLSSTASALGKLQDVVNQNAQALNTLVKQLSSNFGAISSVLNDILSRLDKVEAEVQIDRLITGRLQSLQTYVTQQLIRAAEIRASANLAATKMSECVLGQSKRVDFCGKGCHLMSFPQSAPHGVVFLHVTYVPAQEKNFTTAPAICHDGKAHFPREGVFVSNGTHWFVTQRNFYEPQIITTDNTFVSGNCDVVIGIVNNTVYDPLQPELDSGGGSGGGQIYEGKLTAEGLRFGIVASRFNHALVDRLVEGAIDAIVRHGGREEDITLVRVPGSWEIPVAAGELARKEDIDAVIAIGVLIRGATPHFDYIASEVSKGLADLSLELRKPITFGVITADTLEQAIERAGTKHGNKGWEAALSAIEMANLFKSLR

SEQ ID NO: 8248 - protein, 1303 aa, Artificial Sequence
  SARS-CoV-2/bat/Yunnan/RaTG13/2013__EPI_ISL_402131 spike protein (1-1143)(I905C_Y1043C) LumSynth construct
MFVFLVLLPLVSSQCVNLTTRTQLPPAYTNSSTRGVYYPDKVFRSSVLHLTQDLFLPFFSNVTWFHAIHVSGTNGIKRFDNPVLPFNDGVYFASTEKSNIIRGWIFGTTLDSKTQSLLIVNNATNVVIKVCEFQFCNDPFLGVYYHKNNKSWMESEFRVYSSANNCTFEYVSQPFLMDLEGKQGNFKNLREFVFKNIDGYFKIYSKHTPINLVRDLPPGFSALEPLVDLPIGINITRFQTLLALHRSYLTPGDSSSGWTAGAAAYYVGYLQPRTFLLKYNENGTITDAVDCALDPLSETKCTLKSFTVEKGIYQTSNFRVQPTDSIVRFPNITNLCPFGEVFNATTFASVYAWNRKRISNCVADYSVLYNSTSFSTFKCYGVSPTKLNDLCFTNVYADSFVITGDEVRQIAPGQTGKIADYNYKLPDDFTGCVIAWNSKHIDAKEGGNFNYLYRLFRKANLKPFERDISTEIYQAGSKPCNGQTGLNCYYPLYRYGFYPTDGVGHQPYRVVVLSFELLNAPATVCGPKKSTNLVKNKCVNFNFNGLTGTGVLTESNKKFLPFQQFGRDIADTTDAVRDPQTLEILDITPCSFGGVSVITPGTNASNQVAVLYQDVNCTEVPVAIHADQLTPTWRVYSTGSNVFQTRAGCLIGAEHVNNSYECDIPIGAGICASYQTQTNSRSVASQSIIAYTMSLGAENSVAYSNNSIAIPTNFTISVTTEILPVSMTKTSVDCTMYICGDSTECSNLLLQYGSFCTQLNRALTGIAVEQDKNTQEVFAQVKQIYKTPPIKDFGGFNFSQILPDPSKPSKRSFIEDLLFNKVTLADAGFIKQYGDCLGDIAARDLICAQKFNGLTVLPPLLTDEMIAQYTSALLAGTITSGWTFGAGAALQIPFAMQMAYRFNGCGVTQNVLYENQKLIANQFNSAIGKIQDSLSSTASALGKLQDVVNQNAQALNTLVKQLSSNFGAISSVLNDILSRLDKVEAEVQIDRLITGRLQSLQTYVTQQLIRAAEIRASANLAATKMSECVLGQSKRVDFCGKGCHLMSFPQSAPHGVVFLHVTYVPAQEKNFTTAPAICHDGKAHFPREGVFVSNGTHWFVTQRNFYEPQIITTDNTFVSGSCDVVIGIVNNTVYDPLQPELDSGGGSGGGQIYEGKLTAEGLRFGIVASRFNHALVDRLVEGAIDAIVRHGGREEDITLVRVPGSWEIPVAAGELARKEDIDAVIAIGVLIRGATPHFDYIASEVSKGLADLSLELRKPITFGVITADTLEQAIERAGTKHGNKGWEAALSAIEMANLFKSLR

SEQ ID NO: 8249 - protein, 1307 aa, Artificial Sequence
  SARS-CoV-2/Wuhan/HBCDC-HB-01/2019__EPI_ISL_402132 spike protein (1-1147)(I909C_Y1047C) LumSynth construct
MFVFLVLLPLVSSQCVNLTTRTQLPPAYTNSITRGVYYPDKVFRSSVLHSTQDLFLPFFSNVTWFHAIHVSGTNGTKRFDNPVLPFNDGVYFASTEKSNIIRGWIFGTTLDSKTQSLLIVNNATNVVIKVCEFQFCNDPFLGVYYHKNNKSWMESEFRVYSSANNCTFEYVSQPFLMDLEGKQGNFKNLREFVFKNIDGYFKIYSKHTPINLVRDLPQGFSALEPLVDLPIGINITRFQTLLALHRSYLTPGDSSSGWTAGAAAYYVGYLQPRTFLLKYNENGTITDAVDCALDPLSETKCTLKSFTVEKGIYQTSNFRVQPTESIVRFPNITNLCPFGEVFNATRFASVYAWNRKRISNCVADYSVLYNSASFSTFKCYGVSPTKLNDLCFTNVYADSFVIRGDEVRQIAPGQTGKIADYNYKLPDDFTGCVIAWNSNNLDSKVGGNYNYLYRLFRKSNLKPFERDISTEIYQAGSTPCNGVEGFNCYFPLQSYGFQPTNGVGYQPYRVVVLSFELLHAPATVCGPKKSTNLVKNKCVNFNFNGLTGTGVLTESNKKFLPFQQFGRDIADTTDAVRDPQTLEILDITPCSFGGVSVITPGTNTSNQVAVLYQDVNCTEVPVAIHADQLTPTWRVYSTGSNVFQTRAGCLIGAEHVNNSYECDIPIGAGICASYQTQTNSPRRARSVASQSIIAYTMSLGAENSVAYSNNSIAIPTNFTISVTTEILPVSMTKTSVDCTMYICGDSTECSNLLLQYGSFCTQLNRALTGIAVEQDKNTQEVFAQVKQIYKTPPIKDFGGFNFSQILPDPSKPSKRSFIEDLLFNKVTLADAGFIKQYGDCLGDIAARDLICAQKFNGLTVLPPLLTDEMIAQYTSALLAGTITSGWTFGAGAALQIPFAMQMAYRFNGCGVTQNVLYENQKLIANQFNSAIGKIQDSLSSTASALGKLQDVVNQNAQALNTLVKQLSSNFGAISSVLNDILSRLDKVEAEVQIDRLITGRLQSLQTYVTQQLIRAAEIRASANLAATKMSECVLGQSKRVDFCGKGCHLMSFPQSAPHGVVFLHVTYVPAQEKNFTTAPAICHDGKAHFPREGVFVSNGTHWFVTQRNFYEPQIITTDNTFVSGNCDVVIGIVNNTVYDPLQPELDSGGGSGGGQIYEGKLTAEGLRFGIVASRFNHALVDRLVEGAIDAIVRHGGREEDITLVRVPGSWEIPVAAGELARKEDIDAVIAIGVLIRGATPHFDYIASEVSKGLADLSLELRKPITFGVITADTLEQAIERAGTKHGNKGWEAALSAIEMANLFKSLR

SEQ ID NO: 8250 - protein, 1307 aa, Artificial Sequence
  SARS-CoV-2/Guangdong/20SF028/2020__EPI_ISL_403936 spike protein (1-1147)(I909C_Y1047C) LumSynth construct
MFVFLVLLPLVSSQCVNLTTRTQLPPAYTNSFTRGVYYPDKVFRSSVLYSTQDLFLPFFSNVTWFHAIHVSGTNGTKRFDNPVLPFNDGVYFASTEKSNIIRGWIFGTTLDSKTQSLLIVNNATNVVIKVCEFQFCNDPFLGVYYHKNNKSWMESEFRVYSSANNCTFEYVSQPFLMDLEGKQGNFKNLREFVFKNIDGYFKIYSKHTPINLVRDLPQGFSALEPLVDLPIGINITRFQTLLALHRSYLTPGDSSSGWTAGAAAYYVGYLQPRTFLLKYNENGTITDAVDCALDPLSETKCTLKSFTVEKGIYQTSNFRVQPTESIVRFPNITNLCPFGEVFNATRFASVYAWNRKRISNCVADYSVLYNSASFSTFKCYGVSPTKLNDLCFTNVYADSFVIRGDEVRQIAPGQTGKIADYNYKLPDDFTGCVIAWNSNNLDSKVGGNYNYLYRLFRKSNLKPFERDISTEIYQAGSTPCNGVEGFNCYFPLQSYGFQPTNGVGYQPYRVVVLSFELLHAPATVCGPKKSTNLVKNKCVNFNFNGLTGTGVLTESNKKFLPFQQFGRDIADTTDAVRDPQTLEILDITPCSFGGVSVITPGTNTSNQVAVLYQDVNCTEVPVAIHADQLTPTWRVYSTGSNVFQTRAGCLIGAEHVNNSYECDIPIGAGICASYQTQTNSPRRARSVASQSIIAYTMSLGAENSVAYSNNSIAIPTNFTISVTTEILPVSMTKTSVDCTMYICGDSTECSNLLLQYGSFCTQLNRALTGIAVEQDKNTQEVFAQVKQIYKTPPIKDFGGFNFSQILPDPSKPSKRSFIEDLLFNKVTLADAGFIKQYGDCLGDIAARDLICAQKFNGLTVLPPLLTDEMIAQYTSALLAGTITSGWTFGAGAALQIPFAMQMAYRFNGCGVTQNVLYENQKLIANQFNSAIGKIQDSLSSTASALGKLQDVVNQNAQALNTLVKQLSSNFGAISSVLNDILSRLDKVEAEVQIDRLITGRLQSLQTYVTQQLIRAAEIRASANLAATKMSECVLGQSKRVDFCGKGCHLMSFPQSAPHGVVFLHVTYVPAQEKNFTTAPAICHDGKAHFPREGVFVSNGTHWFVTQRNFYEPQIITTDNTFVSGNCDVVIGIVNNTVYDPLQPELDSGGGSGGGQIYEGKLTAEGLRFGIVASRFNHALVDRLVEGAIDAIVRHGGREEDITLVRVPGSWEIPVAAGELARKEDIDAVIAIGVLIRGATPHFDYIASEVSKGLADLSLELRKPITFGVITADTLEQAIERAGTKHGNKGWEAALSAIEMANLFKSLR

SEQ ID NO: 8251 - protein, 1307 aa, Artificial Sequence
  SARS-CoV-2/Shenzhen/SZTH-001/2020__EPI_ISL_406592 spike protein (1-1147)(I909C_Y1047C) LumSynth construct
MFVFLVLLPLVSSQCVNLTTRTQLPPAYTNSFTRGVYYPDKVFRSSVLHSTQDLFLPFFSNVTWFHAIHVSGTNGTKRFDNPVLPFNDGVYFASTEKSNIIRGWIFGTTLDSKTQSLLIVNNATNVVIKVCEFQFCNDPFLGVYYHKNNKSWMESEFRVYSSANNCTFEYVSQPFLMDLEGKQGNFKNLREFVFKNIDGYFKIYSKHTPINLVRDLPQGFSALEPLVDLPIGINITRFQTLLALHRSYLTPGDSSSGWTAGAAAYYVGYLQPRTFLLKYNENGTITDAVDCALDPLSETKCTLKSFTVEKGIYQTSNFRVQPTESIVRFPNITNLCPFGEVFNATRFASVYAWNRKRISNCVADYSVLYNSASFSTFKCYGVSPTKLNDLCFTNVYADSFVIRGDEVRQIAPGQTGKIADYNYKLPDDFTGCVIAWNSNNLDSKVGGNYNYLYRLFRKSNLKPFERDISTEIYQAGSTPCNGVEGFNCYFPLQSYGFQPTNGVGYQPYRVVVLSFELLHAPATVCGPKKSTNLVKNKCVNFNFNGLTGTGVLTESNKKFLPFQQFGRDIADTTDAVRDPQTLEILDITPCSFGGVSVITPGTNTSNQVAVLYQDVNCTEVPVAIHADQLTPTWRVYSTGSNVFQTRAGCLIGAEHVNNSYECDIPIGAGICASYQTQTNSPRRARSVASQSIIAYTMSLGAENSVAYSNNSIAIPTNFTISVTTEILPVSMTKTSVDCTMYICGDSTECSNLLLQYGSFCTQLNRALTGIAVEQDKNTQEVFAQVKQIYKTPPIKDFGGFNFSQILPDPSKPSKRSFIEDLLFNKVTLADAGFIKQYGDCLGDIAARDLICAQKFNGLTVLPPLLTDEMIAQYTSALLAGTITSGWTFGAGAALQIPFAMQMAYRFNGCGVTQNVLYENQKLIANQFNSAIGKIQDSLSSTASALGKLQDVVNQNAQALNTLVKQLSSNFGAISSVLNDILSRLDKVEAEVQIDRLITGRLQSLQTYVTQQLIRAAEIRASANLAATKMSECVLGQSKRVDFCGKGCHLMSFPQSAPHGVVFLHVTYVPAQEKNFTTAPAICHDGKAHFPREGVFVSNGTHWFVTQRNFYEPQIITTDNTFVSGNCDVLIGIVNNTVYDPLQPELDSGGGSGGGQIYEGKLTAEGLRFGIVASRFNHALVDRLVEGAIDAIVRHGGREEDITLVRVPGSWEIPVAAGELARKEDIDAVIAIGVLIRGATPHFDYIASEVSKGLADLSLELRKPITFGVITADTLEQAIERAGTKHGNKGWEAALSAIEMANLFKSLR

SEQ ID NO: 8252 - protein, 1307 aa, Artificial Sequence
  SARS-CoV-2/Shenzhen/SZTH-004/2020__EPI_ISL_406595 spike protein (1-1147)(I909C_Y1047C) LumSynth construct
MFVFLVLLPLVSSQCVNLTTRTQLPPAYTNSFTRGVYYPDKVFRSSVLHSTQDLFLPFFSNVTWFHAIHVSGTNGTKRFDNPVLPFNDGVYFASTEKSNIIRGWIFGTTLDSKTQSLLIVNNATNVVIKVCEFQFCNDPFLGVYYHKNNKSWMESEFRVYSSANNCTFEYVSQPFLMDLEGKQGNFKNLREFVFKNIDGYFKIYSKHTPINLVRDLPQGFSALEPLVDLPIGINITRFQTLLALHRSYLTPGDSSSGWTAGAAAYYVGYLQPRTFLLKYNENGTITDAVDCALDPLSETKCTLKSFTVEKGIYQTSNFRVQPTESIVRFPNITNLCPFGEVFNATRFASVYAWDRKRISNCVAYYSVLYNSASFSTFKCYGVSPTKLNDLCFTNVYADSFVIRGDEVRQIAPGQTGKIADYNYKLPDDFTGCVIAWNSNNLDSKVGGNYNYLYRLFRKSNLKPFERDISTEIYQAGSTPCNGVEGFNCYFPLQSYGFQPTNGVGYQPYRVVVLSFELLHAPATVCGPKKSTNLVKNKCVNFNFNGLTGTGVLTESNKKFLPFQQFGRDIADTTDAVRDPQTLEILDITPCSFGGVSVITPGTNTSNQVAVLYQDVNCTEVPVAIHADQLTPTWRVYSTGSNVFQTRAGCLIGAEHVNNSYECDIPIGAGICASYQTQTNSPRRARSVASQSIIAYTMSLGAENSVAYSNNSIAIPTNFTISVTTEILPVSMTKTSVDCTMYICGDSTECSNLLLQYGSFCTQLNRALTGIAVEQDKNTQEVFAQVKQIYKTPPIKDFGGFNFSQILPDPSKPSKRSFIEDLLFNKVTLADAGFIKQYGDCLGDIAARDLICAQKFNGLTVLPPLLTDEMIAQYTSALLAGTITSGWTFGAGAALQIPFAMQMAYRFNGCGVTQNVLYENQKLIANQFNSAIGKIQDSLSSTASALGKLQDVVNQNAQALNTLVKQLSSNFGAISSVLNDILSRLDKVEAEVQIDRLITGRLQSLQTYVTQQLIRAAEIRASANLAATKMSECVLGQSKRVDFCGKGCHLMSFPQSAPHGVVFLHVTYVPAQEKNFTTAPAICHDGKAHFPREGVFVSNGTHWFVTQRNFYEPQIITTDNTFVSGNCDVVIGIVNNTVYDPLQPELDSGGGSGGGQIYEGKLTAEGLRFGIVASRFNHALVDRLVEGAIDAIVRHGGREEDITLVRVPGSWEIPVAAGELARKEDIDAVIAIGVLIRGATPHFDYIASEVSKGLADLSLELRKPITFGVITADTLEQAIERAGTKHGNKGWEAALSAIEMANLFKSLR

SEQ ID NO: 8253 - protein, 1307 aa, Artificial Sequence
  SARS-CoV-2/France/IDF0372/2020__EPI_ISL_406596 spike protein (1-1147)(I909C_Y1047C) LumSynth construct
MFVFLVLLPLVSSQCVNLTTRTQLPPAYTNSFTRGVYYPDKVFRSSVLHSTQDLFLPFFSNVTWFHAIHVSGTNGTKRFDNPVLPFNDGVYFASTEKSNIIRGWIFGTTLDSKTQSLLIVNNATNVVIKVCEFQFCNDPFLGVYYHKNNKSWMESEFRVYSSANNCTFEYVSQPFLMDLEGKQGNFKNLREFVFKNIDGYFKIYSKHTPINLVRDLPQGFSALEPLVDLPIGINITRFQTLLALHRSYLTPGDSSSGWTAGAAAYYVGYLQPRTFLLKYNENGTITDAVDCALDPLSETKCTLKSFTVEKGIYQTSNFRVQPTESIVRFPNITNLCPFGEVFNATRFASVYAWNRKRISNCVADYSFLYNSASFSTFKCYGVSPTKLNDLCFTNVYADSFVIRGDEVRQIAPGQTGKIADYNYKLPDDFTGCVIAWNSNNLDSKVGGNYNYLYRLFRKSNLKPFERDISTEIYQAGSTPCNGVEGFNCYFPLQSYGFQPTNGVGYQPYRVVVLSFELLHAPATVCGPKKSTNLVKNKCVNFNFNGLTGTGVLTESNKKFLPFQQFGRDIADTTDAVRDPQTLEILDITPCSFGGVSVITPGTNTSNQVAVLYQDVNCTEVPVAIHADQLTPTWRVYSTGSNVFQTRAGCLIGAEHVNNSYECDIPIGAGICASYQTQTNSPRRARSVASQSIIAYTMSLGAENSVAYSNNSIAIPTNFTISVTTEILPVSMTKTSVDCTMYICGDSTECSNLLLQYGSFCTQLNRALTGIAVEQDKNTQEVFAQVKQIYKTPPIKDFGGFNFSQILPDPSKPSKRSFIEDLLFNKVTLADAGFIKQYGDCLGDIAARDLICAQKFNGLTVLPPLLTDEMIAQYTSALLAGTITSGWTFGAGAALQIPFAMQMAYRFNGCGVTQNVLYENQKLIANQFNSAIGKIQDSLSSTASALGKLQDVVNQNAQALNTLVKQLSSNFGAISSVLNDILSRLDKVEAEVQIDRLITGRLQSLQTYVTQQLIRAAEIRASANLAATKMSECVLGQSKRVDFCGKGCHLMSFPQSAPHGVVFLHVTYVPAQEKNFTTAPAICHDGKAHFPREGVFVSNGTHWFVTQRNFYEPQIITTDNTFVSGNCDVVIGIVNNTVYDPLQPELDSGGGSGGGQIYEGKLTAEGLRFGIVASRFNHALVDRLVEGAIDAIVRHGGREEDITLVRVPGSWEIPVAAGELARKEDIDAVIAIGVLIRGATPHFDYIASEVSKGLADLSLELRKPITFGVITADTLEQAIERAGTKHGNKGWEAALSAIEMANLFKSLR

SEQ ID NO: 8254 - protein, 1307 aa, Artificial Sequence
  SARS-CoV-2/Australia/VIC01/2020__EPI_ISL_406844 spike protein (1-1147)(I909C_Y1047C) LumSynth construct
MFVFLVLLPLVSSQCVNLTTRTQLPPAYTNSFTRGVYYPDKVFRSSVLHSTQDLFLPFFSNVTWFHAIHVSGTNGTKRFDNPVLPFNDGVYFASTEKSNIIRGWIFGTTLDSKTQSLLIVNNATNVVIKVCEFQFCNDPFLGVYYHKNNKSWMESEFRVYSSANNCTFEYVSQPFLMDLEGKQGNFKNLREFVFKNIDGYFKIYSKHTPINLVRDLPQGFSALEPLVDLPIGINITRFQTLLALHRRYLTPGDSSSGWTAGAAAYYVGYLQPRTFLLKYNENGTITDAVDCALDPLSETKCTLKSFTVEKGIYQTSNFRVQPTESIVRFPNITNLCPFGEVFNATRFASVYAWNRKRISNCVADYSVLYNSASFSTFKCYGVSPTKLNDLCFTNVYADSFVIRGDEVRQIAPGQTGKIADYNYKLPDDFTGCVIAWNSNNLDSKVGGNYNYLYRLFRKSNLKPFERDISTEIYQAGSTPCNGVEGFNCYFPLQSYGFQPTNGVGYQPYRVVVLSFELLHAPATVCGPKKSTNLVKNKCVNFNFNGLTGTGVLTESNKKFLPFQQFGRDIADTTDAVRDPQTLEILDITPCSFGGVSVITPGTNTSNQVAVLYQDVNCTEVPVAIHADQLTPTWRVYSTGSNVFQTRAGCLIGAEHVNNSYECDIPIGAGICASYQTQTNSPRRARSVASQSIIAYTMSLGAENSVAYSNNSIAIPTNFTISVTTEILPVSMTKTSVDCTMYICGDSTECSNLLLQYGSFCTQLNRALTGIAVEQDKNTQEVFAQVKQIYKTPPIKDFGGFNFSQILPDPSKPSKRSFIEDLLFNKVTLADAGFIKQYGDCLGDIAARDLICAQKFNGLTVLPPLLTDEMIAQYTSALLAGTITSGWTFGAGAALQIPFAMQMAYRFNGCGVTQNVLYENQKLIANQFNSAIGKIQDSLSSTASALGKLQDVVNQNAQALNTLVKQLSSNFGAISSVLNDILSRLDKVEAEVQIDRLITGRLQSLQTYVTQQLIRAAEIRASANLAATKMSECVLGQSKRVDFCGKGCHLMSFPQSAPHGVVFLHVTYVPAQEKNFTTAPAICHDGKAHFPREGVFVSNGTHWFVTQRNFYEPQIITTDNTFVSGNCDVVIGIVNNTVYDPLQPELDSGGGSGGGQIYEGKLTAEGLRFGIVASRFNHALVDRLVEGAIDAIVRHGGREEDITLVRVPGSWEIPVAAGELARKEDIDAVIAIGVLIRGATPHFDYIASEVSKGLADLSLELRKPITFGVITADTLEQAIERAGTKHGNKGWEAALSAIEMANLFKSLR

SEQ ID NO: 8255 - protein, 1307 aa, Artificial Sequence
  SARS-CoV-2/Germany/BavPat1/2020__EPI_ISL_406862 spike protein (1-1147)(I909C_Y1047C) LumSynth construct
MFVFLVLLPLVSSQCVNLTTRTQLPPAYTNSFTRGVYYPDKVFRSSVLHSTQDLFLPFFSNVTWFHAIHVSGTNGTKRFDNPVLPFNDGVYFASTEKSNIIRGWIFGTTLDSKTQSLLIVNNATNVVIKVCEFQFCNDPFLGVYYHKNNKSWMESEFRVYSSANNCTFEYVSQPFLMDLEGKQGNFKNLREFVFKNIDGYFKIYSKHTPINLVRDLPQGFSALEPLVDLPIGINITRFQTLLALHRSYLTPGDSSSGWTAGAAAYYVGYLQPRTFLLKYNENGTITDAVDCALDPLSETKCTLKSFTVEKGIYQTSNFRVQPTESIVRFPNITNLCPFGEVFNATRFASVYAWNRKRISNCVADYSVLYNSASFSTFKCYGVSPTKLNDLCFTNVYADSFVIRGDEVRQIAPGQTGKIADYNYKLPDDFTGCVIAWNSNNLDSKVGGNYNYLYRLFRKSNLKPFERDISTEIYQAGSTPCNGVEGFNCYFPLQSYGFQPTNGVGYQPYRVVVLSFELLHAPATVCGPKKSTNLVKNKCVNFNFNGLTGTGVLTESNKKFLPFQQFGRDIADTTDAVRDPQTLEILDITPCSFGGVSVITPGTNTSNQVAVLYQGVNCTEVPVAIHADQLTPTWRVYSTGSNVFQTRAGCLIGAEHVNNSYECDIPIGAGICASYQTQTNSPRRARSVASQSIIAYTMSLGAENSVAYSNNSIAIPTNFTISVTTEILPVSMTKTSVDCTMYICGDSTECSNLLLQYGSFCTQLNRALTGIAVEQDKNTQEVFAQVKQIYKTPPIKDFGGFNFSQILPDPSKPSKRSFIEDLLFNKVTLADAGFIKQYGDCLGDIAARDLICAQKFNGLTVLPPLLTDEMIAQYTSALLAGTITSGWTFGAGAALQIPFAMQMAYRFNGCGVTQNVLYENQKLIANQFNSAIGKIQDSLSSTASALGKLQDVVNQNAQALNTLVKQLSSNFGAISSVLNDILSRLDKVEAEVQIDRLITGRLQSLQTYVTQQLIRAAEIRASANLAATKMSECVLGQSKRVDFCGKGCHLMSFPQSAPHGVVFLHVTYVPAQEKNFTTAPAICHDGKAHFPREGVFVSNGTHWFVTQRNFYEPQIITTDNTFVSGNCDVVIGIVNNTVYDPLQPELDSGGGSGGGQIYEGKLTAEGLRFGIVASRFNHALVDRLVEGAIDAIVRHGGREEDITLVRVPGSWEIPVAAGELARKEDIDAVIAIGVLIRGATPHFDYIASEVSKGLADLSLELRKPITFGVITADTLEQAIERAGTKHGNKGWEAALSAIEMANLFKSLR

SEQ ID NO: 8256 - protein, 1307 aa, Artificial Sequence
  SARS-CoV-2/Wuhan/HBCDC-HB-02/2020__EPI_ISL_412978 spike protein (1-1147)(I909C_Y1047C) LumSynth construct
MFVFLVLLPLVSSQCVNLTTRTQLPPAYTNSFTRGVYYPDKVFRSSVLHSTQDLFLPFFSNVTWFHAIHVSGTNGTKRFDNPVLPFNDGVYFASTEKSNIIRGWIFGTTLDSKTQSLLIVNNATNVVIKVCEFQFCNDPFLGVYYHKNNKSWMESEFRVYSSANNCTFEYVSQPFLMDLEGKQGNFKNLREFVFKNIDGYFKIYSKHTPINLVRDLPQGFSALEPLVDLPIGINITRFQTLLALHRSYLTPGDSSSGWTAGAAAYYVGYLQPRTFLLKYNENGTITDAVDCALDPLSETKCTLKSFTVEKGIYQTSNFRVQPTESIVRFPNITNLCPFGEVFNATRFASVYAWNRKRISNCVADYSVLYNSASFSTFKCYGVSPTKLNDLCFTNVYADSFVIRGDEVRQIAPGQTGKIADYNYKLPDDFTGCVIAWNSNNLDSKVGGNYNYLYRLFRKSNLKPFERDISTEIYQAGSTPCNGVEGFNCYFPLQSYGFQPTNGVGYQPYRVVVLSFELLHAPATVCGPKKSTNLVKNKCVNFNFNGLTGTGVLTESNKKFLPFQQFGRDIADTTDAVRDPQTLEILDITPCSFGGVSVITPGTNTSNQVAVLYQDVNCTEVPVAIHADQLTPTWRVYSTGSNVFQTRAGCLIGAEHVNNSYECDIPIGAGICASYQTQTNSPRRARSVASQSIIAYTMSLGAENSVAYSNNSIAIPTNFTISVTTEILPVSMTKTSVDCTMYICGDSTECSNFLLQYGSFCTQLNRALTGIAVEQDKNTQEVFAQVKQIYKTPPIKDFGGFNFSQILPDPSKPSKRSFIEDLLFNKVTLADAGFIKQYGDCLGDIAARDLICAQKFNGLTVLPPLLTDEMIAQYTSALLAGTITSGWTFGAGAALQIPFAMQMAYRFNGCGVTQNVLYENQKLIANQFNSAIGKIQDSLSSTASALGKLQDVVNQNAQALNTLVKQLSSNFGAISSVLNDILSRLDKVEAEVQIDRLITGRLQSLQTYVTQQLIRAAEIRASANLAATKMSECVLGQSKRVDFCGKGCHLMSFPQSAPHGVVFLHVTYVPAQEKNFTTAPAICHDGKAHFPREGVFVSNGTHWFVTQRNFYEPQIITTDNTFVSGNCDVVIGIVNNTVYDPLQPELDSGGGSGGGQIYEGKLTAEGLRFGIVASRFNHALVDRLVEGAIDAIVRHGGREEDITLVRVPGSWEIPVAAGELARKEDIDAVIAIGVLIRGATPHFDYIASEVSKGLADLSLELRKPITFGVITADTLEQAIERAGTKHGNKGWEAALSAIEMANLFKSLR

SEQ ID NO: 8257 - protein, 1307 aa, Artificial Sequence
  SARS-CoV-2/Australia/QLD02/2020__EPI_ISL_407896 spike protein (1-1147)(I909C_Y1047C) LumSynth construct
MFVFLVLLPLVSSQCVNLTTRTQLPPAYTNSFTRGVYYPDKVFRSSVLHSTQDLFLPFFSNVTWFHAIHVSGTNGTKRFDNPVLPFNDGVYFASTEKSNIIRGWIFGTTLDSKTQSLLIVNNATNVVIKVCEFQFCNDPFLGVYYHKNNKSWMESEFRVYSSANNCTFEYVSQPFLMDLEGKQGNFKNLREFVFKNIDGYFKIYSKHTPINLVRDLPQGFSALEPLVDLPIGINITRFQTLLALHRSYLTPGDSSSGWTAGAAAYYVGYLQPRTFLLKYNENGTITDAVDCALDPLSETKCTLKSFTVEKGIYQTSNFRVQPTESIVRFPNITNLCPFGEVFNATRFASVYAWNRKRISNCVADYSVLYNSASFSTFKCYGVSPTKLNDLCFTNVYADSFVIRGDEVRQIAPGQTGKIADYNYKLPDDFTGCVIAWNSNNLDSKVGGNYNYLYRLFRKSNLKPFERDISTEIYQAGSTPCNGVEGFNCYFPLQSYGFQPTNGVGYQPYRVVVLSFELLHAPATVCGPKKSTNLVKNKCVNFNFNGLTGTGVLTESNKKFLPFQQFGRDIADTTDAVRDPQTLEILDITPCSFGGVSVITPGTNTSNQVAVLYQDVNCTEVPVAIHADQLTPTWRVYSTGSNVFQTRAGCLIGAEHVNNSYECDIPIGAGICASYQTQTNSPRRARSVASQSIIAYTMSLGAENSVAYSNNSIAIPTNFTISVTTEILPVSMTKTSVDCTMYICGDSTECSNLLLQYGSFCTQLNRALTGIAVEQDKNTQEVFAQVKQIYKTPPIKDFGGFNFSQILPDPSKPSKRSFIEDLLFNKVTLADAGFIKQYGDCLGDIAARDLICAQKFNGLTVLPPLLTDEMIAQYTSALLAGTITSGWTFGAGAALQIPFAMQMAYRFNGCGVTQNVLYENQKLIANQFNSAIGKIQDSLSSTASALGKLQDVVNQNAQALNTLVKQLSSNFGAISSVLNDILSRLDKVEAEVQIDRLITGRLQSLQTYVTQQLIRAAEIRASANLAATKMSECVLGQSKRVDFCGKGCHLMSFPQSAPHGVVFLHVTYVPAQEKNFTTAPAICHDGKAHFPREGVFVSNGTHWFVTQRNFYEPQIITTDNTFVSGNCDVVIGIVNNTVYDPLQLELDSGGGSGGGQIYEGKLTAEGLRFGIVASRFNHALVDRLVEGAIDAIVRHGGREEDITLVRVPGSWEIPVAAGELARKEDIDAVIAIGVLIRGATPHFDYIASEVSKGLADLSLELRKPITFGVITADTLEQAIERAGTKHGNKGWEAALSAIEMANLFKSLR

SEQ ID NO: 8258 - protein, 1307 aa, Artificial Sequence
  SARS-CoV-2/India/1-31/2020__EPI_ISL_413523 spike protein (1-1147)(I909C_Y1047C) LumSynth construct
MFVFLVLLPLVSSQCVNLTTRTQLPPAYTNSFTRGVYYPDKVFRSSVLHSTQDLFLPFFSNVTWFHAIHVSGTNGTKRFDNPVLPFNDGVYFASTEKSNIIRGWIFGTTLDSKTQSLLIVNNATNVVIKVCEFQFCNDPFLGVYYHKNNKSWMESEFRVYSSANNCTFEYVSQPFLMDLEGKQGNFKNLREFVFKNIDGYFKIYSKHTPINLVRDLPQGFSALEPLVDLPIGINITRFQTLLALHRSYLTPGDSSSGWTAGAAAYYVGYLQPRTFLLKYNENGTITDAVDCALDPLSETKCTLKSFTVEKGIYQTSNFRVQPTESIVRFPNITNLCPFGEVFNATRFASVYAWNRKRISNCVADYSVLYNSASFSTFKCYGVSPTKLNDLCFTNVYADSFVIRGDEVRQIAPGQTGKIADYNYKLPDDFTGCVIAWNSNNLDSKVGGNYNYLYRLFRKSNLKPFERDISTEIYQAGSTPCNGVEGFNCYFPLQSYGFQPTNGVGYQPYRVVVLSFELLHAPATVCGPKKSTNLVKNKCVNFNFNGLTGTGVLTESNKKFLPFQQFGRDIADTTDAVRDPQTLEILDITPCSFGGVSVITPGTNTSNQVAVLYQDVNCTEVPVAIHADQLTPTWRVYSTGSNVFQTRAGCLIGAEHVNNSYECDIPIGAGICASYQTQTNSPRRARSVASQSIIAYTMSLGAENSVAYSNNSIAIPTNFTISVTTEILPVSMTKTSVDCTMYICGDSTECSNLLLQYGSFCTQLNRALTGIAVEQDKNTQEVFAQVKQIYKTPPIKDFGGFNFSQILPDPSKPSKRSFIEDLLFNKVTLADAGFIKQYGDCLGDIAARDLICAQKFNGLTVLPPLLTDEMIAQYTSALLAGTITSGWTFGAGAALQIPFAMQMAYRFNGCGVTQNVLYENQKLIANQFNSVIGKIQDSLSSTASALGKLQDVVNQNAQALNTLVKQLSSNFGAISSVLNDILSRLDKVEAEVQIDRLITGRLQSLQTYVTQQLIRAAEIRASANLAATKMSECVLGQSKRVDFCGKGCHLMSFPQSAPHGVVFLHVTYVPAQEKNFTTAPAICHDGKAHFPREGVFVSNGTHWFVTQRNFYEPQIITTDNTFVSGNCDVVIGIVNNTVYDPLQPELDSGGGSGGGQIYEGKLTAEGLRFGIVASRFNHALVDRLVEGAIDAIVRHGGREEDITLVRVPGSWEIPVAAGELARKEDIDAVIAIGVLIRGATPHFDYIASEVSKGLADLSLELRKPITFGVITADTLEQAIERAGTKHGNKGWEAALSAIEMANLFKSLR

SEQ ID NO: 8259 - protein, 1307 aa, Artificial Sequence
  SARS-CoV-2/Guangdong/GD2020087-P0008/2020__EPI_ISL_413863 spike protein (1-1147)(I909C_Y1047C) LumSynth construct
MFVFLVLLPLVSSQCVNLTTRTQLPPAYTNSFTRGVYYPDKVFRSSVLHSTQDLFLPFFSNVTWFHAIHVSGTNGTKRFDNPVLPFNDGVYFASTEKSNIIRGWIFGTTLDSKTQSLLIVNNATNVVIKVCEFQFCNDPFLGVYYHKNNKSWMESEFRVYSSANNCTFEYVSQPFLMDLEGKQGNFKNLREFVFKNIDGYFKIYSKHTPINLVRDLPQGFSALEPLVDLPIGINITRFQTLLALHRSYLTPGDSSSGWTAGAAAYYVGYLQPRTFLLKYNENGTITDAVDCALDPLSETKCTLKSFTVEKGIYQTSNFRVQPTESIVRFPNITNLCPFGEVFNATRFASVYAWNRKRISNCVADYSVLYNSASFSTFKCYGVSPTKLNDLCFTNVYADSFVIRGDEVREIAPGQTGKIADYNYKLPDDFTGCVIAWNSNNLDSKVGGNYNYLYRLFRKSNLKPFERDISTEIYQAGSTPCNGVEGFNCYFPLQSYGFQPTNGVGYQPYRVVVLSFELLHAPATVCGPKKSTNLVKNKCVNFNFNGLTGTGVLTESNKKFLPFQQFGRDIADTTDAVRDPQTLEILDITPCSFGGVSVITPGTNTSNQVAVLYQDVNCTEVPVAIHADQLTPTWRVYSTGSNVFQTRAGCLIGAEHVNNSYECDIPIGAGICASYQTQTNSPRRARSVASQSIIAYTMSLGAENSVAYSNNSIAIPTNFTISVTTEILPVSMTKTSVDCTMYICGDSTECSNLLLQYGSFCTQLNRALTGIAVEQDKNTQEVFAQVKQIYKTPPIKDFGGFNFSQILPDPSKPSKRSFIEDLLFNKVTLADAGFIKQYGDCLGDIAARDLICAQKFNGLTVLPPLLTDEMIAQYTSALLAGTITSGWTFGAGAALQIPFAMQMAYRFNGCGVTQNVLYENQKLIANQFNSAIGKIQDSLSSTASALGKLQDVVNQNAQALNTLVKQLSSNFGAISSVLNDILSRLDKVEAEVQIDRLITGRLQSLQTYVTQQLIRAAEIRASANLAATKMSECVLGQSKRVDFCGKGCHLMSFPQSAPHGVVFLHVTYVPAQEKNFTTAPAICHDGKAHFPREGVFVSNGTHWFVTQRNFYEPQIITTDNTFVSGNCDVVIGIVNNTVYDPLQPELDSGGGSGGGQIYEGKLTAEGLRFGIVASRFNHALVDRLVEGAIDAIVRHGGREEDITLVRVPGSWEIPVAAGELARKEDIDAVIAIGVLIRGATPHFDYIASEVSKGLADLSLELRKPITFGVITADTLEQAIERAGTKHGNKGWEAALSAIEMANLFKSLR

SEQ ID NO: 8260 - protein, 1307 aa, Artificial Sequence
  SARS-CoV-2/Sweden/01/2020__EPI_ISL_411951 spike protein (1-1147)(I909C_Y1047C) LumSynth construct
MFVFLVLLPLVSSQCVNLTTRTQLPPAYTNSFTRGVYYPDKVFRSSVLHSTQDLFLPFFSNVTWFHAIHVSGTNGTKRFDNPVLPFNDGVYFASTEKSNIIRGWIFGTTLDSKTQSLLIVNNATNVVIKVCEFQFCNDPFLGVYYHKNNKSWMESEFRVYSSANNCTFEYVSQPFLMDLEGKQGNFKNLREFVFKNIDGYFKIYSKHTPINLVRDLPQGFSALEPLVDLPIGINITRFQTLLALHRSYLTPGDSSSGWTAGAAAYYVGYLQPRTFLLKYNENGTITDAVDCALDPLSETKCTLKSFTVEKGIYQTSNFRVQPTESIVRFPNITNLCPFGEVFNATRFASVYAWNRKRISNCVADYSVLYNSASFSTFKCYGVSPTKLNDLCFTNVYADSFVIRGDEVRQIAPGQTGKIADYNYKLPDDFTGCVIAWNSNNLDSKVGGNYNYLYRLFRKSNLKPFERDISTEIYQAGSTPCNGVEGFNCYFPLQSYGFQPTNGVGYQPYRVVVLSFELLHAPATVCGPKKSTNLVKNKCVNFNFNGLTGTGVLTESNKKFLPFQQFGRDIADTTDAVRDPQTLEILDITPCSFGGVSVITPGTNTSNQVAVLYQDVNCTEVPVAIHADQLTPTWRVYSTGSNVFQTRAGCLIGAEHVNNSYECDIPIGAGICASYQTQTNSPRRARSVASQSIIAYTMSLGAENSVAYSNNSIAIPTNFTISVTTEILPVSMTKTSVDCTMYICGDSTECSNLLLQYGSFCTQLNRALTGIAVEQDKNTQEVFAQVKQIYKTPPIKDCGGFNFSQILPDPSKPSKRSFIEDLLFNKVTLADAGFIKQYGDCLGDIAARDLICAQKFNGLTVLPPLLTDEMIAQYTSALLAGTITSGWTFGAGAALQIPFAMQMAYRFNGCGVTQNVLYENQKLIANQFNSAIGKIQDSLSSTASALGKLQDVVNQNAQALNTLVKQLSSNFGAISSVLNDILSRLDKVEAEVQIDRLITGRLQSLQTYVTQQLIRAAEIRASANLAATKMSECVLGQSKRVDFCGKGCHLMSFPQSAPHGVVFLHVTYVPAQEKNFTTAPAICHDGKAHFPREGVFVSNGTHWFVTQRNFYEPQIITTDNTFVSGNCDVVIGIVNNTVYDPLQPELDSGGGSGGGQIYEGKLTAEGLRFGIVASRFNHALVDRLVEGAIDAIVRHGGREEDITLVRVPGSWEIPVAAGELARKEDIDAVIAIGVLIRGATPHFDYIASEVSKGLADLSLELRKPITFGVITADTLEQAIERAGTKHGNKGWEAALSAIEMANLFKSLR

SEQ ID NO: 8261 - protein, 1307 aa, Artificial Sequence
  SARS-CoV-2/Tianmen/HBCDC-HB-07/2020__EPI_ISL_412983 spike protein (1-1147)(I909C_Y1047C) LumSynth construct
MFVFLVLLPLVSSQCVNLTTRTQLPPAYTNSFTRGVYYPDKVFRSSVLHSTQDLFLPFFSNVTWFHAIHVSGTNGTKRFDNPVLPFNDGVYFASTEKSNIIRGWIFGTTLDSKTQSLLIVNNATNVVIKVCEFQFCNDPFLGVYYHKNNKSWMESEFRVYSSANNCTFEYVSQPFLMDLEGKQGNFKNLREFVFKNIDGYFKIYSKHTPINLVRDLPQGFSALEPLVDLPIGINITRFQTLLALHRSYLTPGDSSSGWTAGAAAYYVGYLQPRTFLLKYNENGTITDAVDCALDPLSETKCTLKSFTVEKGIYQTSNFRVQPTESIVRFPNITNLCPFGEVFNATRFASVYAWNRKRISNCVADYSVLYNSASFSTFKCYGVSPTKLNDLCFTNVYADSFVIRGDEVRQIAPGQTGKIADYNYKLPDDFTGCVIAWNSNNLDSKVGGNYNYLYRLFRKSNLKPFERDISTEIYQAGSTPCNGVEGFNCYFPLQSYGFQPTNGVGYQPYRVVVLSFELLHAPATVCGPKKSTNLVKNKCVNFNFNGLTGTGVLTESNKKFLPFQQFGRDIADTTDAVRDPQTLEILDITPCSFGGVSVITPGTNTSNQVAVLYQDLNCTEVPVAIHADQLTPTWRVYSTGSNVFQTRAGCLIGAEHVNNSYECDIPIGAGICASYQTQTNSPRRARSVASQSIIAYTMSLGAENSVAYSNNSIAIPTNFTISVTTEILPVSMTKTSVDCTMYICGDSTECSNLLLQYGSFCTQLNRALTGIAVEQDKNTQEVFAQVKQIYKTPPIKDFGGFNFSQILPDPSKPSKRSFIEDLLFNKVTLADAGFIKQYGDCLGDIAARDLICAQKFNGLTVLPPLLTDEMIAQYTSALLAGTITSGWTFGAGAALQIPFAMQMAYRFNGCGVTQNVLYENQKLIANQFNSAIGKIQDSLSSTASALGKLQDVVNQNAQALNTLVKQLSSNFGAISSVLNDILSRLDKVEAEVQIDRLITGRLQSLQTYVTQQLIRAAEIRASANLAATKMSECVLGQSKRVDFCGKGCHLMSFPQSAPHGVVFLHVTYVPAQEKNFTTAPAICHDGKAHFPREGVFVSNGTHWFVTQRNFYEPQIITTDNTFVSGNCDVVIGIVNNTVYDPLQPELDSGGGSGGGQIYEGKLTAEGLRFGIVASRFNHALVDRLVEGAIDAIVRHGGREEDITLVRVPGSWEIPVAAGELARKEDIDAVIAIGVLIRGATPHFDYIASEVSKGLADLSLELRKPITFGVITADTLEQAIERAGTKHGNKGWEAALSAIEMANLFKSLR

SEQ ID NO: 8262 - protein, 1307 aa, Artificial Sequence
  SARS-CoV-2/Hong Kong/case42_VM20002493/2020__EPI_ISL_414527 spike protein (1-1147)(I909C_Y1047C) LumSynth construct
MFVFLVLLPLVSSQCVNLTTRTQLPPAYTNSFTRGVYYPDKVFRSSVLHSTQDLFLPFFSNVTWFHAIHVSGTNGTKRFDNPVLPFNDGVYFASTEKSNIIRGWIFGTTLDSKTQSLLIVNNATNVVIKVCEFQFCNDPFLGVYYHKNNKSWMESEFRVYSSANNCTFEYVSQPFLMDLEGKQGNFKNLREFVFKNIDGYFKIYSKHTPINLVRDLPQGFSALEPLVDLPIGINITRFQTLLALHRSYLTPGDSSSGWTAGAAAYYVGYLQPRTFLLKYNENGTITDAVDCALDPLSETKCTLKSFTVEKGIYQTSNFRVQPTESIVRFPNITNLCPFGEVFNATRFASVYAWNRKRISNCVADYSVLYNSASFSTFKCYGVSPTKLNDLCFTNVYADSFVIRGDEVRQIAPGQTGKIADYNYKLPDDFTGCVIAWNSNNLDSKVGGNYNYLYRLFRKSNLKPFERDISTEIYQAGSTPCNGVEGFNCYFPLQSYGFQPTNGVGYQPYRVVVLSFELLHAPATVCGPKKSTNLVKNKCVNFNFNGLTGTGVLTESNKKFLPFQQFGRDIADTTDAVRDPQTLEILDITPCSFGGVSVITPGTNTSNQVAVLYQDVNCTEVPVAIHADQLTPTWRVYSTGSNVFQTRAGCLIGAEHVNNSYECDIPIGAGICASYQTQTNSPRRARSVASQSIIAYTMSLGAENSVAYSNNSIAIPTNFAISVTTEILPVSMTKTSVDCTMYICGDSTECSNLLLQYGSFCTQLNRALTGIAVEQDKNTQEVFAQVKQIYKTPPIKDFGGFNFSQILPDPSKPSKRSFIEDLLFNKVTLADAGFIKQYGDCLGDIAARDLICAQKFNGLTVLPPLLTDEMIAQYTSALLAGTITSGWTFGAGAALQIPFAMQMAYRFNGCGVTQNVLYENQKLIANQFNSAIGKIQDSLSSTASALGKLQDVVNQNAQALNTLVKQLSSNFGAISSVLNDILSRLDKVEAEVQIDRLITGRLQSLQTYVTQQLIRAAEIRASANLAATKMSECVLGQSKRVDFCGKGCHLMSFPQSAPHGVVFLHVTYVPAQEKNFTTAPAICHDGKAHFPREGVFVSNGTHWFVTQRNFYEPQIITTDNTFVSGNCDVVIGIVNNTVYDPLQPELDSGGGSGGGQIYEGKLTAEGLRFGIVASRFNHALVDRLVEGAIDAIVRHGGREEDITLVRVPGSWEIPVAAGELARKEDIDAVIAIGVLIRGATPHFDYIASEVSKGLADLSLELRKPITFGVITADTLEQAIERAGTKHGNKGWEAALSAIEMANLFKSLR

SEQ ID NO: 8263 - protein, 1307 aa, Artificial Sequence
  SARS-CoV-2/USA/CruiseA-23/2020__EPI_ISL_414482 spike protein (1-1147)(I909C_Y1047C) LumSynth construct
MFVFLVLLPLVSSQCVNLTTRTQLPPAYTNSFTRGVYYPDKVFRSSVLHSTQDLFLPFFSNVTWFHAIHVSGTNGTKRFDNPVLPFNDGVYFASTEKSNIIRGWIFGTTLDSKTQSLLIVNNATNVVIKVCEFQFCNDPFLGVYYHKNNKSWMESEFRVYSSANNCTFEYVSQPFLMDLEVKQGNFKNLREFVFKNIDGYFKIYSKHTPINLVRDLPQGFSALEPLVDLPIGINITRFQTLLALHRSYLTPGDSSSGWTAGAAAYYVGYLQPRTFLLKYNENGTITDAVDCALDPLSETKCTLKSFTVEKGIYQTSNFRVQPTESIVRFPNITNLCPFGEVFNATRFASVYAWNRKRISNCVADYSVLYNSASFSTFKCYGVSPTKLNDLCFTNVYADSFVIRGDEVRQIAPGQTGKIADYNYKLPDDFTGCVIAWNSNNLDSKVGGNYNYLYRLFRKSNLKPFERDISTEIYQAGSTPCNGVEGFNCYFPLQSYGFQPTNGVGYQPYRVVVLSFELLHAPATVCGPKKSTNLVKNKCVNFNFNGLTGTGVLTESNKKFLPFQQFGRDIADTTDAVRDPQTLEILDITPCSFGGVSVITPGTNTSNQVAVLYQDVNCTEVPVAIHADQLTPTWRVYSTGSNVFQTRAGCLIGAEHVNNSYECDIPIGAGICASYQTQTNSPRRARSVASQSIIAYTMSLGAENSVAYSNNSIAIPTNFTISVTTEILPVSMTKTSVDCTMYICGDSTECSNLLLQYGSFCTQLNRALTGIAVEQDKNTQEVFAQVKQIYKTPPIKDFGGFNFSQILPDPSKPSKRSFIEDLLFNKVTLADAGFIKQYGDCLGDIAARDLICAQKFNGLTVLPPLLTDEMIAQYTSALLAGTITSGWTFGAGAALQIPFAMQMAYRFNGCGVTQNVLYENQKLIANQFNSAIGKIQDSLSSTASALGKLQDVVNQNAQALNTLVKQLSSNFGAISSVLNDILSRLDKVEAEVQIDRLITGRLQSLQTYVTQQLIRAAEIRASANLAATKMSECVLGQSKRVDFCGKGCHLMSFPQSAPHGVVFLHVTYVPAQEKNFTTAPAICHDGKAHFPREGVFVSNGTHWFVTQRNFYEPQIITTDNTFVSGNCDVVIGIVNNTVYDPLQPELDSGGGSGGGQIYEGKLTAEGLRFGIVASRFNHALVDRLVEGAIDAIVRHGGREEDITLVRVPGSWEIPVAAGELARKEDIDAVIAIGVLIRGATPHFDYIASEVSKGLADLSLELRKPITFGVITADTLEQAIERAGTKHGNKGWEAALSAIEMANLFKSLR

SEQ ID NO: 8264 - protein, 1307 aa, Artificial Sequence
  SARS-CoV-2/Hong Kong/case85_VM20002868/2020__EPI_ISL_414519 spike protein (1-1147)(I909C_Y1047C) LumSynth construct
MFVFLVLVPLVSSQCVNLTTRTQLPPAYTNSFTRGVYYPDKVFRSSVLHSTQDLFLPFFSNVTWFHAIHVSGTNGTKRFDNPVLPFNDGVYFASTEKSNIIRGWIFGTTLDSKTQSLLIVNNATNVVIKVCEFQFCNDPFLGVYYHKNNKSWMESEFRVYSSANNCTFEYVSQPFLMDLEGKQGNFKNLREFVFKNIDGYFKIYSKHTPINLVRDLPQGFSALEPLVDLPIGINITRFQTLLALHRSYLTPGDSSSGWTAGAAAYYVGYLQPRTFLLKYNENGTITDAVDCALDPLSETKCTLKSFTVEKGIYQTSNFRVQPTESIVRFPNITNLCPFGEVFNATRFASVYAWNRKRISNCVADYSVLYNSASFSTFKCYGVSPTKLNDLCFTNVYADSFVIRGDEVRQIAPGQTGKIADYNYKLPDDFTGCVIAWNSNNLDSKVGGNYNYLYRLFRKSNLKPFERDISTEIYQAGSTPCNGVEGFNCYFPLQSYGFQPTNGVGYQPYRVVVLSFELLHAPATVCGPKKSTNLVKNKCVNFNFNGLTGTGVLTESNKKFLPFQQFGRDIADTTDAVRDPQTLEILDITPCSFGGVSVITPGTNTSNQVAVLYQDVNCTEVPVAIHADQLTPTWRVYSTGSNVFQTRAGCLIGAEHVNNSYECDIPIGAGICASYQTQTNSPRRARSVASQSIIAYTMSLGAENSVAYSNNSIAIPTNFTISVTTEILPVSMTKTSVDCTMYICGDSTECSNLLLQYGSFCTQLNRALTGIAVEQDKNTQEVFAQVKQIYKTPPIKDFGGFNFSQILPDPSKPSKRSFIEDLLFNKVTLADAGFIKQYGDCLGDIAARDLICAQKFNGLTVLPPLLTDEMIAQYTSALLAGTITSGWTFGAGAALQIPFAMQMAYRFNGCGVTQNVLYENQKLIANQFNSAIGKIQDSLSSTASALGKLQDVVNQNAQALNTLVKQLSSNFGAISSVLNDILSRLDKVEAEVQIDRLITGRLQSLQTYVTQQLIRAAEIRASANLAATKMSECVLGQSKRVDFCGKGCHLMSFPQSAPHGVVFLHVTYVPAQEKNFTTAPAICHDGKAHFPREGVFVSNGTHWFVTQRNFYEPQIITTDNTFVSGNCDVVIGIVNNTVYDPLQPELDSGGGSGGGQIYEGKLTAEGLRFGIVASRFNHALVDRLVEGAIDAIVRHGGREEDITLVRVPGSWEIPVAAGELARKEDIDAVIAIGVLIRGATPHFDYIASEVSKGLADLSLELRKPITFGVITADTLEQAIERAGTKHGNKGWEAALSAIEMANLFKSLR

SEQ ID NO: 8265 - protein, 1307 aa, Artificial Sequence; identical to SEQ ID NO: 8255
  SARS-CoV-2/England/200990660/2020__EPI_ISL_414523 spike protein (1-1147)(I909C_Y1047C) LumSynth construct

SEQ ID NO: 8266 - protein, 1307 aa, Artificial Sequence
  SARS-CoV-2/Australia/NSW09/2020__EPI_ISL_413595 spike protein (1-1147)(I909C_Y1047C) LumSynth construct
MFVFLVLLPLVSSQCVNLTTRTQLPPAYTNSFTRGVYYPDKVFRSSVLHSTQDLFLPFFSNVTWFHAIHVSGTNGTKRFDNPVLPFNDGVYFASTEKSNIIRGWIFGTTLDSKTQSLLIVNNATNVVIKVCEFQFCNDPFLGVYYHKNNKSWMESEFRVYSSANNCTFEYVSQPFLMDLEGKQGNFKNLREFVFKNIDGYFKIYSKHTPINLVRDLPQGFSALEPLVDLPIGINITRFQTLLALHRSYLTPGDSSSGWTAGAAAYYVGYLQPRTFLLKYNENGTITDAVDCALDPLSETKCTLKSFTVEKGIYQTSNFRVQPTESIVRFPNITNLCPFGEVFNATRFASVYAWNRKRISNCVADYSVLYNSASFSTFKCYGVSPTKLNDLCFTNVYADSFVIRGDEVRQIAPGQTGKIADYNYKLPDDFTGCVIAWNSNNLDSKVGGNYNYLYRLFRKSNLKPFERDISTEIYQAGSTPCNGVEGFNCYFPLQSYGFQPTNGVGYQPYRVVVLSFELLHAPATVCGPKKSTNLVKNKCVNFNFNGLTGTGVLTESNKKFLPFQQFGRDIADTTDAVRDPQTLEILDITPCSFGGVSVITPGTNTSNQVAVLYQDVNCTEVPVAIHADQLTPTWRVYSTGSNVFQTRAGCLIGAEHVNNSYECDIPIGAGICASYQTQTNSPRRARSVASQSIIAYTMSLGAENSVAYSNNSIAIPTNFTISVTTEILPVSMTKTSVDCTMYICGDSTECSNLLLQYGSFCTQLNRALTGIAVEQDKNTQEVFAQVKQIYKTPPIKDFGGFNFSQILPDPSKPSKRSFIEDLLFNKVTLADAGFIKQYGDCLGDIAARDLICAQKFNGLTVLPPLLTDEMIAQYTSALLAGTITSGWTFGAGAALQIPFAMQMAYRFNGCGVTQNVLYENQKLIANQFNSAIGKIQDSLSFTASALGKLQDVVNQNAQALNTLVKQLSSNFGAISSVLNDILSRLDKVEAEVQIDRLITGRLQSLQTYVTQQLIRAAEIRASANLAATKMSECVLGQSKRVDFCGKGCHLMSFPQSAPHGVVFLHVTYVPAQEKNFTTAPAICHDGKAHFPREGVFVSNGTHWFVTQRNFYEPQIITTDNTFVSGNCDVVIGIVNNTVYDPLQPELDSGGGSGGGQIYEGKLTAEGLRFGIVASRFNHALVDRLVEGAIDAIVRHGGREEDITLVRVPGSWEIPVAAGELARKEDIDAVIAIGVLIRGATPHFDYIASEVSKGLADLSLELRKPITFGVITADTLEQAIERAGTKHGNKGWEAALSAIEMANLFKSLR

SEQ ID NO: 8267 - protein, 1307 aa, Artificial Sequence; identical to SEQ ID NO: 8247
  SARS-CoV-2/Australia/NSW10/2020__EPI_ISL_413596 spike protein (1-1147)(I909C_Y1047C) LumSynth construct

SEQ ID NO: 8268 - protein, 1307 aa, Artificial Sequence
  SARS-CoV-2/Switzerland/1000477797/2020__EPI_ISL_413023 spike protein (1-1147)(I909C_Y1047C) LumSynth construct
MFVFLVLLPLVSSQCVNLTTRTQLPPAYTNSFTRGVYYPDKVFRSSVLHSTQDLFLPFFSNVTWFHAIHVSGTNGTKRFDNPVLPFNDGVYFASTEKSNIIRGWIFGTTLDSKTQSLLIVNNATNVVIKVCEFQFCNDPFLGVYYHKNNKSWMESEFRVYSSANNCTFEYVSQPFLMDLEGKQGNFKNLREFVFKNIDGYFNIYSKHTPINLVRDLPQGFSALEPLVDLPIGINITRFQTLLALHRSYLTPGDSSSGWTAGAAAYYVGYLQPRTFLLKYNENGTITDAVDCALDPLSETKCTLKSFTVEKGIYQTSNFRVQPTESIVRFPNITNLCPFGEVFNATRFASVYAWNRKRISNCVADYSVLYNSASFSTFKCYGVSPTKLNDLCFTNVYADSFVIRGDEVRQIAPGQTGKIADYNYKLPDDFTGCVIAWNSNNLDSKVGGNYNYLYRLFRKSNLKPFERDISTEIYQAGSTPCNGVEGFNCYFPLQSYGFQPTNGVGYQPYRVVVLSFELLHAPATVCGPKKSTNLVKNKCVNFNFNGLTGTGVLTESNKKFLPFQQFGRDIADTTDAVRDPQTLEILDITPCSFGGVSVITPGTNTSNQVAVLYQGVNCTEVPVAIHADQLTPTWRVYSTGSNVFQTRAGCLIGAEHVNNSYECDIPIGAGICASYQTQTNSPRRARSVASQSIIAYTMSLGAENSVAYSNNSIAIPTNFTISVTTEILPVSMTKTSVDCTMYICGDSTECSNLLLQYGSFCTQLNRALTGIAVEQDKNTQEVFAQVKQIYKTPPIKDFGGFNFSQILPDPSKPSKRSFIEDLLFNKVTLADAGFIKQYGDCLGDIAARDLICAQKFNGLTVLPPLLTDEMIAQYTSALLAGTITSGWTFGAGAALQIPFAMQMAYRFNGCGVTQNVLYENQKLIANQFNSAIGKIQDSLSSTASALGKLQDVVNQNAQALNTLVKQLSSNFGAISSVLNDILSRLDKVEAEVQIDRLITGRLQSLQTYVTQQLIRAAEIRASANLAATKMSECVLGQSKRVDFCGKGCHLMSFPQSAPHGVVFLHVTYVPAQEKNFTTAPAICHDGKAHFPREGVFVSNGTHWFVTQRNFYEPQIITTDNTFVSGNCDVVIGIVNNTVYDPLQPELDSGGGSGGGQIYEGKLTAEGLRFGIVASRFNHALVDRLVEGAIDAIVRHGGREEDITLVRVPGSWEIPVAAGELARKEDIDAVIAIGVLIRGATPHFDYIASEVSKGLADLSLELRKPITFGVITADTLEQAIERAGTKHGNKGWEAALSAIEMANLFKSLR

SEQ ID NO: 8269 - protein, 1307 aa, Artificial Sequence
  SARS-CoV-2/Belgium/BA-02291/2020__EPI_ISL_415159 spike protein (1-1147)(I909C_Y1047C) LumSynth construct
MFVFLVLLPLVSSQCVNLTTRTQLPPAYTNSFTRGVYYPDKVFRSSVLHSTQDLFLPFFSNVTWFHAIHVSGTNGTKRFDNPVLPFNDGVYFASTEKSNIIRGWIFGTTLDSKTQSLLIVNNATNVVIKVCEFQFCNDPFLGVYYHKNNKSWMESEFRVYSSANNCTFEYVSQPFLMDLEGKQGNFKNLREFVFKNIDGYFKIYSKHTPINLVRDLPQGFSALEPLVDLPIGINITRFQTLLALHRSYLTPGDSSSGWTAGAAAYYVGYLQPRTFLLKYNENGTITDAVDCALDPLSETKCTLKSFTVEKGIYQTSNFRVQPTESIVRFPNITNLCPFGEVFNATRFASVYAWNRKRISNCVADYSVLYNSASFSTFKCYGVSPTKLNDLCFTNVYADSFVIRGDEVRQIAPGQTGKIADYNYKLPDDFTGCVIAWNSNNLDSKVGGNYNYLYRLFRRSNLKPFERDISTEIYQAGSTPCNGVEGFNCYFPLQSYGFQPTNGVGYQPYRVVVLSFELLPAPATVCGPKKSTNLVKNKCVNFNFNGLTGTGVLTESNKKFLPFQQFGRDIADTTDAVRDPQTLEILDITPCSFGGVSVITPGTNTSNQVAVLYQGVNCTEVPVAIHADQLTPTWRVYSTGSNVFQTRAGCLIGAEHVNNSYECDIPIGAGICASYQTQTNSPRRARSVASQSIIAYTMSLGAENSVAYSNNSIAIPTNFTISVTTEILPVSMTKTSVDCTMYICGDSTECSNLLLQYGSFCTQLNRALTGIAVEQDKNTQEVFAQVKQIYKTPPIKDFGGFNFSQILPDPSKPSKRSFIEDLLFNKVTLADAGFIKQYGDCLGDIAARDLICAQKFNGLTVLPPLLTDEMIAQYTSALLAGTITSGWTFGAGAALQIPFAMQMAYRFNGCGVTQNVLYENQKLIANQFNSAIGKIQDSLSSAAPALGKLQDVVNQNAQALNTLVKQLSSNFGAISSVLNDILSRLDKVEAEVQIDRLITGRLQSLQTYVTQQLIRAAEIRASANLAATKMSECVLGQSKRVDFCGKGCHLMSFPQSAPHGVVFLHVTYVPAQEKNFTTAPAICHDGKAHFPREGVFVSNGTHWFVTQRNFYEPQIITTDNTFVSGNCDVVIGIVNNTVYDPLQPELDSGGGSGGGQIYEGKLTAEGLRFGIVASRFNHALVDRLVEGAIDAIVRHGGREEDITLVRVPGSWEIPVAAGELARKEDIDAVIAIGVLIRGATPHFDYIASEVSKGLADLSLELRKPITFGVITADTLEQAIERAGTKHGNKGWEAALSAIEMANLFKSLR

SEQ ID NO: 8270 - protein, 1307 aa, Artificial Sequence
  SARS-CoV-2/USA/WA8-UW5/2020__EPI_ISL_413486 spike protein (1-1147)(I909C_Y1047C) LumSynth construct
MFVFLVLLPLVSSQCVNLTTRTQLPPAYTNSFTRGVYYPDKVFRSSVLHSTQDLFLPFFSNVTWFHAIHVSGTNGTKRFDNPVLPFNDGVYFASTEKSNIIRGWIFGTTLDSKTQSLLIVNNATNVVIKVCEFQFCNDPFLGVYYHKNNKSWMESEFRVYSSANNCTFEYVSQPFLMDLEGKQGNFKNLREFVFKNIDGYFKIYSKHTPINLVRDLPQGFSALEPLVDLPIGINITRFQTLLALHRSYLTPGDSSSGWTAGAAAYYVGYLQPRTFLLKYNENGTITDAVDCALDPLSETKCTLKSFTVEKGIYQTSNFRVQPTESIVRFPNITNLCPFGEVFNATRFASVYAWNRKRISNCVADYSVLYNSASFSTFKCYGVSPTKLNDLCFTNVYADSFVIRGDEVRQIAPGQTGKIADYNYKLPDDFTGCVIAWNSNNLDSKVGGNYNYLYRLFRKSNLKPFERDISTEIYQAGSTPCNGVEGFNCYFPLQSYGFQPTNGVGYQPYRVVVLSFELLHAPATVCGPKKSTNLVKNKCVNFNFNGLTGTGVLTESNKKFLPFQQFGRDIADTTDAVRDPQTLEILDITPCSFGGVSVITPGTNTSNQVAVLYQDVNCTEVPVAIHADQLTPTWRVYSTGSNVFQTRAGCLIGAEYVNNSYECDIPIGAGICASYQTQTNSPRRARSVASQSIIAYTMSLGAENSVAYSNNSIAIPTNFTISVTTEILPVSMTKTSVDCTMYICGDSTECSNLLLQYGSFCTQLNRALTGIAVEQDKNTQEVFAQVKQIYKTPPIKDFGGFNFSQILPDPSKPSKRSFIEDLLFNKVTLADAGFIKQYGDCLGDIAARDLICAQKFNGLTVLPPLLTDEMIAQYTSALLAGTITSGWTFGAGAALQIPFAMQMAYRFNGCGVTQNVLYENQKLIANQFNSAIGKIQDSLSSTASALGKLQDVVNQNAQALNTLVKQLSSNFGAISSVLNDILSRLDKVEAEVQIDRLITGRLQSLQTYVTQQLIRAAEIRASANLAATKMSECVLGQSKRVDFCGKGCHLMSFPQSAPHGVVFLHVTYVPAQEKNFTTAPAICHDGKAHFPREGVFVSNGTHWFVTQRNFYEPQIITTDNTFVSGNCDVVIGIVNNTVYDPLQPELDSGGGSGGGQIYEGKLTAEGLRFGIVASRFNHALVDRLVEGAIDAIVRHGGREEDITLVRVPGSWEIPVAAGELARKEDIDAVIAIGVLIRGATPHFDYIASEVSKGLADLSLELRKPITFGVITADTLEQAIERAGTKHGNKGWEAALSAIEMANLFKSLR

SEQ ID NO: 8271 - protein, 1307 aa, Artificial Sequence
  SARS-CoV-2/England/20102000506/2020__EPI_ISL_415147 spike protein (1-1147)(I909C_Y1047C) LumSynth construct
MFVFLVLLPLVSSQCVNLTTRTQLPPAYTNSFTRGVYYPDKVFRSSVLHSTQDLFLPFFSNVTWFHAIHVSGTNGTKRFDNPVLPFNDGVYFASTEKSNIIRGWIFGTTLDSKTQSLLIVNNATNVVIKVCEFQFCNDPFLGVYYHKNNKSWMESEFRVYSSANNCTFEYVSQPFLMDLEGKQGNFKNLREFVFKNIDGYFKIYSKHTPINLVRDLPQGFSALEPLVDLPIGINITRFQTLLALHRSYLTPGDSSSGWTAGAAAYYVGYLQPRTFLLKYNENGTITDAVDCALDPLSETKCTLKSFTVEKGIYQTSNFRVQPTESIVRFPNITNLCPFGEVFNATRFASVYAWNRKRISNCVADYSVLYNSASFSTFKCYGVSPTKLNDLCFTNVYADSFVIRGDEVRQIAPGQTGKIADYNYKLPDDFTGCVIAWNSNNLDSKVGGNYNYLYRLFRKSNLKPFERDISTEIYQAGSTPCNGVEGFNCYFPLQSYGFQPTNGVGYQPYRVVVLSFELLHAPATVCGPKKSTNLVKNKCVNFNFNGLTGTGVLTESNKKFLPFQQFGRDIADTTDAVRDPQTLEILDITPCSFGGVSVITPGTNTSNQVAVLYQGVNCTEVPVAIHADQLTPTWRVYSTGSNVFQTRAGCLIGAEHVNNSYECDIPIGAGICASYQTQTNSPRRARSVASQSIIAYTMSLGAENSVAYSNNSIAIPTNFTISVTTEILPVSMTKTSVDCTMYICGDSTECSNLLLQYGSFCTQLNRALTGIAVEQDKNTQEVFAQVKQIYKTPPIKDFGGFNFSQILPDPSKPSKRSFIEDLLFNKVTLADAGFIKQYGYCLGDIAARDLICAQKFNGLTVLPPLLTDEMIAQYTSALLAGTITSGWTFGAGAALQIPFAMQMAYRFNGCGVTQNVLYENQKLIANQFNSAIGKIQDSLSSTASALGKLQDVVNQNAQALNTLVKQLSSNFGAISSVLNDILSRLDKVEAEVQIDRLITGRLQSLQTYVTQQLIRAAEIRASANLAATKMSECVLGQSKRVDFCGKGCHLMSFPQSAPHGVVFLHVTYVPAQEKNFTTAPAICHDGKAHFPREGVFVSNGTHWFVTQRNFYEPQIITTDNTFVSGNCDVVIGIVNNTVYDPLQPELDSGGGSGGGQIYEGKLTAEGLRFGIVASRFNHALVDRLVEGAIDAIVRHGGREEDITLVRVPGSWEIPVAAGELARKEDIDAVIAIGVLIRGATPHFDYIASEVSKGLADLSLELRKPITFGVITADTLEQAIERAGTKHGNKGWEAALSAIEMANLFKSLR

SEQ ID NO: 8272 - protein, 1307 aa, Artificial Sequence
  SARS-CoV-2/Belgium/VAG-03013/2020__EPI_ISL_415155 spike protein (1-1147)(I909C_Y1047C) LumSynth construct
MFVFLVLLPLVSSQCVNLTTRTQLPPAYTNSFTRGVYYPDKVFRSSVLHSTQDLFLPFFSNVTWFHAIHVSGTNGTKRFDNPVLPFNDGVYFASTEKSNIIRGWIFGTTLDSKTQSLLIVNNATNVVIKVCEFQFCNDPFLGVYYHKNNKSWMESEFRVYSSANNCTFEYVSQPFLMDLEGKQGNFKNLREFVFKNIDGYFKIYSKHTPINLVRDLPQGFSALEPLVDLPIGINITRFQTLLALHRSYLTPGDSSSGWTAGAAAYYVGYLQPRTFLLKYNENGTITDAVDCALDPLSETKCTLKSFTVEKGIYQTSNFRVQPTESIVRFPNITNLCPFGEVFNATRFASVYAWNRKRISNCVADYSVLYNSASFSTFKCYGVSPTKLNDLCFTNVYADSFVIRGDEVRQIAPGQTGKIADYNYKLPDDFTGCVIAWNSNNLDSKVGGNYNYLYRLFRKSNLKPFERDISTEIYQAGSTPCNGVEGFNCYFPLQSYGFQPTNGVGYQPYRVVVLSFELLHAPATVCGPKKSTNLVKNKCVNFNFNGLTGTGVLTESNKKFLPFQQFGRDIADTTDAVRDPQTLEILDITPCSFGGVSVITPGTNTSNQVAVLYQGVNCTEVPVAIHADQLTPTWRVYSTGSNVFQTRAGCLIGAEHVNNSYECDIPIGAGICASYQTQTNSPRRARSVASQSIIAYTMSLGAENSVAYSNNSIAIPTNFTISVTTEILPVSMTKTSVDCTMYICGDSTECSNLLLQYGSFCTQLNRALTGIAVEQDKNTQEVFAQVKQIYKTPPIKDFGGFNFSQILPDPSKPSKRSFIEDLLFNKVTLADAGFIKQYGDCLGDIAARDLICAQKFNGLTVLPPLLTDEMIAQYTSALLAGTITSGWTFGAGAALQIPFAMQMAYRFNGCGVTQNVLYENQKLIANQFNSAIGKIQDSLSSTATALGKLQDVVNQNAQALNTLVKQLSSNFGAISSVLNDILSRLDKVEAEVQIDRLITGRLQSLQTYVTQQLIRAAEIRASANLAATKMSECVLGQSKRVDFCGKGCHLMSFPQSAPHGVVFLHVTYVPAQEKNFTTAPAICHDGKAHFPREGVFVSNGTHWFVTQRNFYEPQIITTDNTFVSGNCDVVIGIVNNTVYDPLQPELDSGGGSGGGQIYEGKLTAEGLRFGIVASRFNHALVDRLVEGAIDAIVRHGGREEDITLVRVPGSWEIPVAAGELARKEDIDAVIAIGVLIRGATPHFDYIASEVSKGLADLSLELRKPITFGVITADTLEQAIERAGTKHGNKGWEAALSAIEMANLFKSLR

SEQ ID NO: 8273 - protein, 1307 aa, Artificial Sequence
  SARS-CoV-2/Belgium/BC-03016/2020__EPI_ISL_415157 spike protein (1-1147)(I909C_Y1047C) LumSynth construct
MFVFLVLLPLVSSQCVNLTTRTQLPPAYTNSFTRGVYYPDKVFRSSVLHSTQDLFLPFFSNVTWFHAIHVSGTNGTKRFDNPVLPFNDGVYFASTEKSNIIRGWIFGTTLDSKTQSLLIVNNATNVVIKVCEFQFCNDPFLGVYYHKNNKSWMESEFRVYSSANNCTFEYVSQPFLMDLEGKQGNFKNLREFVFKNIDGYFKIYSKHTPINLVRDLPQGFSALEPLVDLPIGINITRFQTLLALHRSYLTPGDSSSGWTAGAAAYYVGYLQPRTFLLKYNENGTITDAVDCALDPLSETKCTLKSFTVEKGIYQTSNFRVQPTESIVRFPNITNLCPFGEVFNATRFASVYAWNRKRISNCVADYSVLYNSASFSTFKCYGVSPTKLNDLCFTNVYADSFVIRGDEVRQIAPGQTGKIADYNYKLPDDFTGCVIAWNSNNLDSKVGGNYNYLYRLFRKSNLKPFERDISTEIYQAGSTPCNGVEGFNCYFPLQSYGFQPTNGVGYQPYRVVVLSFELLHAPATVCGPKKSTNLVKNKCVNFNFNGLTGTGVLTESNKKFLPFQQFGRDIADTTDAVRDPQTLEILDITPCSFGGVSVITPGTNTSNQVAVLYQGVNCTEVPVAIHADQLTPTWRVYSTGSNVFQTRAGCLIGAEHVNNSYECDIPIGAGICASYQTQTNSPRRARSVASQSIIAYTMSLGAENSVAYSNNSIAIPTNFTISVTTEILPVSMTKTSVDCTMYICGDSTECSNLLLQYGSFCTQLNRALTGIAVEQDKNTQEVFAQVKQIYKTPPIKDFGGFNFSQILPDPSKPSKRSFIEDLLFNKVTLADAGFIKQYGDCLGDIAARDLICAQKFNGLTVLPPLLTDEMIAQYTSALLAGTITSGWTFGAGAALQIPFAMQMAYRFNGCGVTQNVLYENQKLIANQFNSAIGKIQDSLSSTAPALGKLQDVVNQNAQALNTLVKQLSSNFGAISSVLNDILSRLDKVEAEVQIDRLITGRLQSLQTYVTQQLIRAAEIRASANLAATKMSECVLGQSKRVDFCGKGCHLMSFPQSAPHGVVFLHVTYVPAQEKNFTTAPAICHDGKAHFPREGVFVSNGTHWFVTQRNFYEPQIITTDNTFVSGNCDVVIGIVNNTVYDPLQPELDSGGGSGGGQIYEGKLTAEGLRFGIVASRFNHALVDRLVEGAIDAIVRHGGREEDITLVRVPGSWEIPVAAGELARKEDIDAVIAIGVLIRGATPHFDYIASEVSKGLADLSLELRKPITFGVITADTLEQAIERAGTKHGNKGWEAALSAIEMANLFKSLR

SEQ ID NO: 8274 - protein, 1307 aa, Artificial Sequence
  SARS-CoV-2/Germany/BavPat3/2020__EPI_ISL_414521 spike protein (1-1147)(I909C_Y1047C) LumSynth construct
MFVFLVLLPLVSSQCVNLTTRTQLPPAYTNSFTRGVYYPDKVFRSSVLHSTQDLFLPFFSNVTWFHAIHVSGTNGTKRFDNPVLPFNDGVYFASTEKSNIIRGWIFGTTLDSKTQSLLIVNNATNVVIKVCEFQFCNDPFLGVYYHKNNKSWMESEFRVYSSANNCTFEYVSQPFLMDLEGKQGNFKNLREFVFKNIDGYFKIYSKHTPINLVRDLPQGFSALEPLVDLPIGINITRFQTLLALHRSYLTPGDSSSGWTAGAAAYYVGYLQPRTFLLKYNENGTITDAVDCALDPLSETKCTLKSFTVEKGIYQTSNFRVQPTESIVRFPNITNLCPFGEVFNATRFASVYAWNRKRISNCVADYSVLYNSASFSTFKCYGVSPTKLNDLCFTNVYADSFVIRGDEVRQIAPGQTGKIADYNYKLPDDFTGCVIAWNSNNLDSKVGGNYNYLYRLFRKSNLKPFERDISTEIYQAGSTPCNGVEGFNCYFPLQSYGFQPTNGVGYQPYRVVVLSFELLHAPATVCGPKKSTNLVKNKCVNFNFNGLTGTGVLTESNKKFLPFQQFGRDIADTTDAVRDPQTLEILDITPCSFGGVSVITPGTNTSNQVAVLYQDVNCTEVPVAIHADQLTPTWRVYSTGSNVFQTRAGCLIGAEHVNNSYECDIPIGAGICASYQTQTNSPRRARSVASQSIIAYTMSLGAENSVAYSNNSIAIPTNFTISVTTEILPVSMTKTSVDCTMYICGDSTECSNLLLQYGSFCTQLNRALTGIAVEQDKNTQQVFAQVKQIYKTPPIKDFGGFNFSQILPDPSKPSKRSFIEDLLFNKVTLADAGFIKQYGDCLGDIAARDLICAQKFNGLTVLPPLLTDEMIAQYTSALLAGTITSGWTFGAGAALQIPFAMQMAYRFNGCGVTQNVLYENQKLIANQFNSAIGKIQDSLSSTASALGKLQDVVNQNAQALNTLVKQLSSNFGAISSVLNDILSRLDKVEAEVQIDRLITGRLQSLQTYVTQQLIRAAEIRASANLAATKMSECVLGQSKRVDFCGKGCHLMSFPQSAPHGVVFLHVTYVPAQEKNFTTAPAICHDGKAHFPREGVFVSNGTHWFVTQRNFYEPQIITTDNTFVSGNCDVVIGIVNNTVYDPLQPELDSGGGSGGGQIYEGKLTAEGLRFGIVASRFNHALVDRLVEGAIDAIVRHGGREEDITLVRVPGSWEIPVAAGELARKEDIDAVIAIGVLIRGATPHFDYIASEVSKGLADLSLELRKPITFGVITADTLEQAIERAGTKHGNKGWEAALSAIEMANLFKSLR

SEQ ID NO: 8275 - protein, 1307 aa, Artificial Sequence
  SARS-CoV-2/France/HF1805/2020__EPI_ISL_414628 spike protein (1-1147)(I909C_Y1047C) LumSynth construct
MFVFLVLLPLVSSQCVNLTTRTQLPPAYTNSFTRGVYYPDKVFRSSVLHSTQDLFLPFFSNVTWFHAIHVSGTNGTKRFDNPVLPFNDGVYFASTEKSNIIRGWIFGTTLDSKTQSLLIVNNATNVVIKVCEFQFCNDPFLGVYYHKNNKSWMESEFRVYSSANNCTFEYVSQPFLMDLEGKQGNFKNLREFVFKNIDGYFKIYSKHTPINLVRDLPQGFSALEPLVDLPIGINITRFQTLLALHRSYLTPGDSSSGWTAGAAAYYVGYLQPRTFLLKYNENGTITDAVDCALDPLSETKCTLKSFTVEKGIYQTSNFRVQPTESIVRFPNITNLCPFGEVFNATRFASVYAWNRKRISNCVADYSVLYNSASFSTFKCYGVSPTKLNDLCFTNVYADSFVIRGDEVRQIAPGQTGKIADYNYKLPDDFTGCVIAWNSNNLDSKVGGNYNYLYRLFRKSNLKPFERDISTEIYQAGSTPCNGVEGFNCYFPLQSYGFQPTNGVGYQPYRVVVLSFELLHAPATVCGPKKSTNLVKNKCVNFNFNGLTGTGVLTESNKKFLPFQQFGRDIADTTDAVRDPQTLEILDITPCSFGGVSVITPGTNTSNQVAVLYQGVNCTEVPVAIHADQLTPTWRVYSTGSNVFQTRAGCLIGAEHVNNSYECDIPIGAGICASYQTQTNSPRRARSVASQSIIAYTMSLGAENSVAYSNNSIAIPTNFTISVTTEILPVSMTKTSVDCTMYICGDSTECSNLLLQYGSFCTQLNRALTGIAVEQDKNTQEVFAQVKQIYKTPPIKDFGGFNFSQILPDPSKPSKRSFIEDLLFNKVTLADAGFIKQYGDCLGDIAARDLICAQKFNGLTVLPPLLTDEMIAQYTSALLAGTITSGWTFGAGAALQIPFAMQMAYRFNGCGVTQNVLYENQKLIANQFNSAIGKIQDSLSSTASALGKLQDVVNQNAQALNTLVKQLSSNFGAISSVLNDILSRLDKVEAEVQIDRLITGRLQSLQTYVTQQLIRAAEIRASANLAATKMSECVLGQSKRVDFCGKGCHLMSFPQSAPHGVVFLHVTYVPAQEKNFTTAPAICHDGKAHFPREGVFVSNGTHWFVTQRNFYEPQIITTDNTFVSGNCDVVIGVVNNTVYDPLQPELDSGGGSGGGQIYEGKLTAEGLRFGIVASRFNHALVDRLVEGAIDAIVRHGGREEDITLVRVPGSWEIPVAAGELARKEDIDAVIAIGVLIRGATPHFDYIASEVSKGLADLSLELRKPITFGVITADTLEQAIERAGTKHGNKGWEAALSAIEMANLFKSLR

SEQ ID NO: 8276 - protein, 1307 aa, Artificial Sequence
  SARS-CoV-2/Netherlands/ZuidHolland_9/2020__EPI_ISL_414445 spike protein (1-1147)(I909C_Y1047C) LumSynth construct
MFVFLVLLPLVSSQCVNLTTRTQLPPAYTNSFTRGVYYPDKVFRSSVLHSTQDLFLPFFSNVTWFHAIHVSGTNGTKRFDNPVLPFNDGVYFASTEKSNIIRGWIFGTTLDSKTQSLLIVNNATNVVIKVCEFQFCNDPFLGVYYHKNNKSWMESEFRVYSSANNCTFEYVSQPFLMDLEGKQGNFKNLREFVFKNIDGYFKIYSKHTPINLVRDLPQGFSALEPLVDLPIGINITRFQTLLALHRSYLTPGDSSSGWTAGAAAYYVGYLQPRTFLLKYNENGTITDAVDCALDPLSETKCTLKSFTVEKGIYQTSNFRVQPTESIVRFPNITNLCPFGEVFNATRFASVYAWNRKRISNCVADYSVLYNSASFSTFKCYGVSPTKLNDLCFTNVYADSFVIRGDEVRQIAPGQTGKIADYNYKLPDDFTGCVIAWNSNNLDSKVGGNYNYLYRLFRKSNLKPFERDISTEIYQAGSTPCNGVEGFNCYFPLQSYGFQPTNGVGYQPYRVVVLSFELLHAPATVCGPKKSTNLVKNKCVNFNFNGLTGTGVLTESNKKFLPFQQFGRDIADTTDAVRDPQTLEILDITPCSFGGVSVITPGTNTSNQVAVLYQGVNCTEVPVAIHADQLTPTWRVYSTGSNVFQTRAGCLIGAEHVNNSYECDIPIGAGICASYQTQTNSPRRARSVASQSIIAYTMSLGAENSVAYSNNSIAIPTNFTISVTTEILPVSMTKTSVDCTMYICGDSTECSNLLLQYGSFCTQLNRALTGIAVEQDKNTQEVFAQVKQIYKTPPIKDFGGFNFSQILPDPSKPSKRSFIEDLLFNKVTLADAGFIKQYGDCLGDIAARDLICVQKFNGLTVLPPLLTDEMIAQYTSALLAGTITSGWTFGAGAALQIPFAMQMAYRFNGCGVTQNVLYENQKLIANQFNSAIGKIQDSLSSTASALGKLQDVVNQNAQALNTLVKQLSSNFGAISSVLNDILSRLDKVEAEVQIDRLITGRLQSLQTYVTQQLIRAAEIRASANLAATKMSECVLGQSKRVDFCGKGCHLMSFPQSAPHGVVFLHVTYVPAQEKNFTTAPAICHDGKAHFPREGVFVSNGTHWFVTQRNFYEPQIITTDNTFVSGNCDVVIGIVNNTVYDPLQPELDSGGGSGGGQIYEGKLTAEGLRFGIVASRFNHALVDRLVEGAIDAIVRHGGREEDITLVRVPGSWEIPVAAGELARKEDIDAVIAIGVLIRGATPHFDYIASEVSKGLADLSLELRKPITFGVITADTLEQAIERAGTKHGNKGWEAALSAIEMANLFKSLR

SEQ ID NO: 8277 - protein, 1307 aa, Artificial Sequence
  SARS-CoV-2/Finland/FIN03032020A/2020__EPI_ISL_413602 spike protein (1-1147)(I909C_Y1047C) LumSynth construct
MFVFLVLLPLVSSQCVNLTTRTQLPPAYTNSFTRGVYYPDKVFRSSVLHSTQDLFLPFFSNVTWFHAIHVSGTNGTKRFDNPVLPFNDGVYFASTEKSNIIRGWIFGTTLDSKTQSLLIVNNATNVVIKVCEFQFCNDPFLGVYYHKNNKSWMESEFRVYSSANNCTFEYVSQPFLMDLEGKQGNFKNLREFVFKNIDGYFKIYSKHTPINLVRDLPQGFSALEPLVDLPIGINITRFQTLLALHRSYLTPGDSSSGWTAGAAAYYVGYLQPRTFLLKYNENGTITDAVDCALDPLSETKCTLKSFTVEKGIYQTSNFRVQPTESIVRFPNITNLCPFGEVFNATRFASVYAWNRKRISNCVADYSVLYNSASFSTFKCYGVSPTKLNDLCFTNVYADSFVIRGDEVRQIAPGQTGKIADYNYKLPDDFTGCVISWNSNNLDSKVGGNYNYLYRLFRKSNLKPFERDISTEIYQAGSTPCNGVEGFNCYFPLQSYGFQPTNGVGYQPYRVVVLSFELLHAPATVCGPKKSTNLVKNKCVNFNFNGLTGTGVLTESNKKFLPFQQFGRDIADTTDAVRDPQTLEILDITPCSFGGVSVITPGTNTSNQVAVLYQGVNCTEVPVAIHADQLTPTWRVYSTGSNVFQTRAGCLIGAEHVNNSYECDIPIGAGICASYQTQTNSPRRARSVASQSIIAYTMSLGAENSVAYSNNSIAIPTNFTISVTTEILPVSMTKTSVDCTMYICGDSTECSNLLLQYGSFCTQLNRALTGIAVEQDKNTQEVFAQVKQIYKTPPIKDFGGFNFSQILPDPSKPSKRSFIEDLLFNKVTLADAGFIKQYGDCLGDIAARDLICAQKFNGLTVLPPLLTDEMIAQYTSALLAGTITSGWTFGAGAALQIPFAMQMAYRFNGCGVTQNVLYENQKLIANQFNSAIGKIQDSLSSTASALGKLQDVVNQNAQALNTLVKQLSSNFGAISSVLNDILSRLDKVEAEVQIDRLITGRLQSLQTYVTQQLIRAAEIRASANLAATKMSECVLGQSKRVDFCGKGCHLMSFPQSAPHGVVFLHVTYVPAQEKNFTTAPAICHDGKAHFPREGVFVSNGTHWFVTQRNFYEPQIITTDNTFVSGNCDVVIGIVNNTVYDPLQPELDSGGGSGGGQIYEGKLTAEGLRFGIVASRFNHALVDRLVEGAIDAIVRHGGREEDITLVRVPGSWEIPVAAGELARKEDIDAVIAIGVLIRGATPHFDYIASEVSKGLADLSLELRKPITFGVITADTLEQAIERAGTKHGNKGWEAALSAIEMANLFKSLR

SEQ ID NO: 8278 - protein, 1307 aa, Artificial Sequence
  SARS-CoV-2/France/GE1977/2020__EPI_ISL_414632 spike protein (1-1147)(I909C_Y1047C) LumSynth construct
MFVFLVLLPLVSSQCVNLTTRTQLPPAYTNSFTRGVYYPDKVFRSSVLHSTQDLFLPFFSNVTWFHAIHVSGTNGTKRFDNPVLPFNDGVYFASTEKSNIIRGWIFGTTLDSKTQSLLIVNNATNVVIKVCEFQFCNDPFLGVYYHKNNKSWMESEFRVYSSANNCTFEYVSQPFLMDLEGKQGNFKNLREFVFKNIDGYFKIYSKHTPINLVRDLPQGFSALEPLVDLPIGINITRFQTLLALHRSYLTPGDSSSGWTAGAAAYYVGYLQPRTFLLKYNENGTITDAVDCALDPLSETKCTLKSFTVEKGIYQTSNFRVQPTESIVRFPNITNLCPFGEVFNATRFASVYAWNRKRISNCVADYSVLYNSASFSTFKCYGVSPTKLNDLCFTNVYADSFVIRGDEVRQIAPGQTGKIADYNYKLPDDFTGCVIAWNSNNLDSKVGGNYNYLYRLFRKSNLKPFERDISTEIYQAGSTPCNGVEGFNCYFPLQSYGFQPTNGVGYQPYRVVVLSFELLHAPATVCGPKKSTNLVKNKCVNFNFNGLTGTGVLTESNKKFLPFQQFGRDIADTTDAVRDPQTLEILDITPCSFGGVSVITPGTNTSNQVAVLYQGVNCTEVPVAIHADQLTPTWRVYSTGSNVFQTRAGCLIGAEHVNNSYECDIPIGAGICASYQTQTNSPRRARSVASQSIIAYTMSLGAENSVAYSNNSIAIPTNFTISVTTEILPVSMTKTSVDCTMYICGDSTECSNLLLQYGSFCTQLNRALTGIAVEQDKNTQEVFAQVKQIYKTPPIKDFGGFNFSQILPDPSKPSKRSFIEDLLFNKVTLADAGFIKQYGDCLGDIAARDLICAQKFNGLTVLPPLLTDEMIAQYTSALLAGTITSGWTFGAGAALQIPFAMQMAYRFNGCGVTQNVLYENQKLIANQFNSAIGKIQDSLFSTASALGKLQDVVNQNAQALNTLVKQLSSNFGAISSVLNDILSRLDKVEAEVQIDRLITGRLQSLQTYVTQQLIRAAEIRASANLAATKMSECVLGQSKRVDFCGKGCHLMSFPQSAPHGVVFLHVTYVPAQEKNFTTAPAICHDGKAHFPREGVFVSNGTHWFVTQRNFYEPQIITTDNTFVSGNCDVVIGIVNNTVYDPLQPELDSGGGSGGGQIYEGKLTAEGLRFGIVASRFNHALVDRLVEGAIDAIVRHGGREEDITLVRVPGSWEIPVAAGELARKEDIDAVIAIGVLIRGATPHFDYIASEVSKGLADLSLELRKPITFGVITADTLEQAIERAGTKHGNKGWEAALSAIEMANLFKSLR

SEQ ID NO: 8279 - protein, 1307 aa, Artificial Sequence
  SARS-CoV-2/Finland/FIN-313/2020__EPI_ISL_414641 spike protein (1-1147)(I909C_Y1047C) LumSynth construct
MFVFLVLLPLVSSQCVNLTTRTQLPPAYTNSFTRGVYYPDKVFRSSVLHSTQDLFLPFFSNVTWFHAIHVSGTNGTKRFDNPVLPFNDGVYFASTEKSNIIRGWIFGTTLDSKTQSLLIVNNATNVVIKVCEFQFCNDPFLGVYYHKNNKSWMESEFRVYSSANNCTFEYVSQPFLMDLEGKQGNFKNLREFVFKNIDGYFKIYSKHTPINLVRDLPQGFSALEPLVDLPIGINITRFKTLLALHRSYLTPGDSSSGWTAGAAAYYVGYLQPRTFLLKYNENGTITDAVDCALDPLSETKCTLKSFTVEKGIYQTSNFRVQPTESIVRFPNITNLCPFGEVFNATRFASVYAWNRKRISNCVADYSVLYNSASFSTFKCYGVSPTKLNDLCFTNVYADSFVIRGDEVRQIAPGQTGKIADYNYKLPDDFTGCVIAWNSNNLDSKVGGNYNYLYRLFRKSNLKPFERDISTEIYQAGSTPCNGVEGFNCYFPLQSYGFQPTNGVGYQPYRVVVLSFELLHAPATVCGPKKSTNLVKNKCVNFNFNGLTGTGVLTESNKKFLPFQQFGRDIADTTDAVRDPQTLEILDITPCSFGGVSVITPGTNTSNQVAVLYQGVNCTEVPVAIHADQLTPTWRVYSTGSNVFQTRAGCLIGAEHVNNSYECDIPIGAGICASYQTQTNSPRRARSVASQSIIAYTMSLGAENSVAYSNNSIAIPTNFTISVTTEILPVSMTKTSVDCTMYICGDSTECSNLLLQYGSFCTQLNRALTGIAVEQDKNTQEVFAQVKQIYKTPPIKDFGGFNFSQILPDPSKPSKRSFIEDLLFNKVTLADAGFIKQYGDCLGDIAARDLICAQKFNGLTVLPPLLTDEMIAQYTSALLAGTITSGWTFGAGAALQIPFAMQMAYRFNGCGVTQNVLYENQKLIANQFNSAIGKIQDSLSSTASALGKLQDVVNQNAQALNTLVKQLSSNFGAISSVLNDILSRLDKVEAEVQIDRLITGRLQSLQTYVTQQLIRAAEIRASANLAATKMSECVLGQSKRVDFCGKGCHLMSFPQSAPHGVVFLHVTYVPAQEKNFTTAPAICHDGKAHFPREGVFVSNGTHWFVTQRNFYEPQIITTDNTFVSGNCDVVIGIVNNTVYDPLQPELDSGGGSGGGQIYEGKLTAEGLRFGIVASRFNHALVDRLVEGAIDAIVRHGGREEDITLVRVPGSWEIPVAAGELARKEDIDAVIAIGVLIRGATPHFDYIASEVSKGLADLSLELRKPITFGVITADTLEQAIERAGTKHGNKGWEAALSAIEMANLFKSLR

SEQ ID NO: 8280 - protein, 1307 aa, Artificial Sequence
  SARS-CoV-2/Netherlands/ZuidHolland_2/2020__EPI_ISL_414556 spike protein (1-1147)(I909C_Y1047C) LumSynth construct
MFVFLVLLPLVSSQCVNLTTRTQLPPAYTNSFTRGVYYPDKVFRSSVLHSTQDLFLPFFSNVTWFHAIHVSGTNGTKRFDNPVLPFNDGVYFASTEKSNIIRGWIFGTTLDSKTQSLLIVNNATNVVIKVCEFQFCNDPFLGVYYHKNNKSWMESEFRVYSSANNCTFEYVSQPFLMDLEGKQGNFKNLREFVFKNIDGYFKIYSKHTPINLVRDLPQGFSALEPLVDLPIGINITRFQTLLALHRSYLTPGDSSSGWTAGAAAYYVGYLQPRTFLLKYNENGTITDAVDCALDPLSETKCTLKSFTVEKGIYQTSNFRVQPTESIVRFPNITNLCPFGEVFNATRFASVYAWNRKRISNCVADYSVLYNSASFSTFKCYGVSPTKLNDLCFTNVYADSFVIRGDEVRQIAPGQTGKIADYNYKLPDDFTGCVIAWNSNNLDSKVGGNYNYLYRLFRKSNLKPFERDISTEIYQAGSTPCNGVEGFNCYFPLQSYGFQPTNGVGYQPYRVVVLSFELLHAPATVCGPKKSTNLVKNKCVNFNFNGLTGTGVLTESNKKFLPFQQFGRDIADTTDAVRDPQTLEILDITPCSFGGVSVITPGTNTSNQVAVLYQGVNCTEVPVAIHADQLTPTWRVYSTGSNVFQTRAGCLIGAEHVNNSYECDIPIGAGICASYQTQTNSPRRARSVASQSIIAYTMSLGAENSVAYSNNSIAIPTNFTISVTTEILPVSMTKTSVDCTMYICGDSTECSNLLLQYGSFCTQLNRALTGIALEQDKNTQEVFAQVKQIYKTPPIKDFGGFNFSQILPDPSKPSKRSFIEDLLFNKVTLADAGFIKQYGDCLGDIAARDLICAQKFNGLTVLPPLLTDEMIAQYTSALLAGTITSGWTFGAGAALQIPFAMQMAYRFNGCGVTQNVLYENQKLIANQFNSAIGKIQDSLSSTASALGKLQDVVNQNAQALNTLVKQLSSNFGAISSVLNDILSRLDKVEAEVQIDRLITGRLQSLQTYVTQQLIRAAEIRASANLAATKMSECVLGQSKRVDFCGKGCHLMSFPQSAPHGVVFLHVTYVPAQEKNFTTAPAICHDGKAHFPREGVFVSNGTHWFVTQRNFYEPQIITTDNTFVSGNCDVVIGIVNNTVYDPLQPELDSGGGSGGGQIYEGKLTAEGLRFGIVASRFNHALVDRLVEGAIDAIVRHGGREEDITLVRVPGSWEIPVAAGELARKEDIDAVIAIGVLIRGATPHFDYIASEVSKGLADLSLELRKPITFGVITADTLEQAIERAGTKHGNKGWEAALSAIEMANLFKSLR

SEQ ID NO: 8281 - protein, 1307 aa, Artificial Sequence
  SARS-CoV-2/USA/WA-UW31/2020__EPI_ISL_414618 spike protein (1-1147)(I909C_Y1047C) LumSynth construct
MFVFLVLLPLVSSQCVNLTTRTQLPPAYTNSFTRGVYYPDKVFRSSVLHSTQDLFLPFFSNVTWFHAIHVSGTNGTKRFDNPVLPFNDGVYFASTEKSNIIRGWIFGTTLDSKTQSLLIVNNATNVVIKVCEFQFCNDPFLGVYYHKNNKSWMESEFRVYSSANNCTFEYVSQPFLMDLEGKQGNFKNLREFVFKNIDGYFKIYSKHTPINLVRDLPQGFSALEPLVDLPIGINITRFQTLLALHRSYLTPGDSSSGWTAGAAAYYVGYLQPRTFLLKYNENGTITDAVDCALDPLSETKCTLKSFTVEKGIYQTSNFRVQPTESIVRFPNITNLCPFGEVFNATRFASVYAWNRKRISNCVADYSVLYNSASFSTFKCYGVSPTKLNDLCFTNVYADSFVIRGDEVRQIAPGQTGKIADYNYKLPDDFTGCVIAWNSNNLDSKVGGNYNYLYRLFRKSNLKPFERDISTEIYQAGSTPCNGAEGFNCYFPLQSYGFQPTNGVGYQPYRVVVLSFELLHAPATVCGPKKSTNLVKNKCVNFNFNGLTGTGVLTESNKKFLPFQQFGRDIADTTDAVRDPQTLEILDITPCSFGGVSVITPGTNTSNQVAVLYQDVNCTEVPVAIHADQLTPTWRVYSTGSNVFQTRAGCLIGAEHVNNSYECDIPIGAGICASYQTQTNSPRRARSVASQSIIAYTMSLGAENSVAYSNNSIAIPTNFTISVTTEILPVSMTKTSVDCTMYICGDSTECSNLLLQYGSFCTQLNRALTGIAVEQDKNTQEVFAQVKQIYKTPPIKDFGGFNFSQILPDPSKPSKRSFIEDLLFNKVTLADAGFIKQYGDCLGDIAARDLICAQKFNGLTVLPPLLTDEMIAQYTSALLAGTITSGWTFGAGAALQIPFAMQMAYRFNGCGVTQNVLYENQKLIANQFNSAIGKIQDSLSSTASALGKLQDVVNQNAQALNTLVKQLSSNFGAISSVLNDILSRLDKVEAEVQIDRLITGRLQSLQTYVTQQLIRAAEIRASANLAATKMSECVLGQSKRVDFCGKGCHLMSFPQSAPHGVVFLHVTYVPAQEKNFTTAPAICHDGKAHFPREGVFVSNGTHWFVTQRNFYEPQIITTDNTFVSGNCDVVIGIVNNTVYDPLQPELDSGGGSGGGQIYEGKLTAEGLRFGIVASRFNHALVDRLVEGAIDAIVRHGGREEDITLVRVPGSWEIPVAAGELARKEDIDAVIAIGVLIRGATPHFDYIASEVSKGLADLSLELRKPITFGVITADTLEQAIERAGTKHGNKGWEAALSAIEMANLFKSLR

SEQ ID NO: 8282 - protein, 1307 aa, Artificial Sequence
  SARS-CoV-2/South Korea/SNU01/2020__EPI_ISL_411929 spike protein (1-1147)(I909C_Y1047C) LumSynth construct
MFVFLVLLPLVSSQCVNLTTRTQLPPAYTNSFTRGVYYPDKVFRSSVLHSTQDLFLPFFSNVTWFHAIHVSGTNGTKRFDNPVLPFNDGVYFASTEKSNIIRGWIFGTTLDSKTQSLLIVNNATNVVIKVCEFQFCNDPFLGVYYHKNNKSWMESEFRVYSSANNCTFEYVSQPFLMDLEGKQGNFKNLREFVFKNIDGYFKIYSKHTPINLVRDLPQGFWALEPLVDLPIGINITRFQTLLALHRSYLTPGDSSSGWTAGAAAYYVGYLQPRTFLLKYNENGTITDAVDCALDPLSETKCTLKSFTVEKGIYQTSNFRVQPTESIVRFPNITNLCPFGEVFNATRFASVYAWNRKRISNCVADYSVLYNSASFSTFKCYGVSPTKLNDLCFTNVYADSFVIRGDEVRQIAPGQTGKIADYNYKLPDDFTGCVIAWNSNNLDSKVGGNYNYLYRLFRKSNLKPFERDISTEIYQAGSTPCNGVEGFNCYFPLQSYGFQPTNGVGYQPYRVVVLSFELLHAPATVCGPKKSTNLVKNKCVNFNFNGLTGTGVLTESNKKFLPFQQFGRDIADTTDAVRDPQTLEILDITPCSFGGVSVITPGTNTSNQVAVLYQDVNCTEVPVAIHADQLTPTWRVYSTGSNVFQTRAGCLIGAEHVNNSYECDIPIGAGICASYQTQTNSPRRARSVASQSIIAYTMSLGAENSVAYSNNSIAIPTNFTISVTTEILPVSMTKTSVDCTMYICGDSTECSNLLLQYGSFCTQLNRALTGIAVEQDKNTQEVFAQVKQIYKTPPIKDFGGFNFSQILPDPSKPSKRSFIEDLLFNKVTLADAGFIKQYGDCLGDIAARDLICAQKFNGLTVLPPLLTDEMIAQYTSALLAGTITSGWTFGAGAALQIPFAMQMAYRFNGCGVTQNVLYENQKLIANQFNSAIGKIQDSLSSTASALGKLQDVVNQNAQALNTLVKQLSSNFGAISSVLNDILSRLDKVEAEVQIDRLITGRLQSLQTYVTQQLIRAAEIRASANLAATKMSECVLGQSKRVDFCGKGCHLMSFPQSAPHGVVFLHVTYVPAQEKNFTTAPAICHDGKAHFPREGVFVSNGTHWFVTQRNFYEPQIITTDNTFVSGNCDVVIGIVNNTVYDPLQPELDSGGGSGGGQIYEGKLTAEGLRFGIVASRFNHALVDRLVEGAIDAIVRHGGREEDITLVRVPGSWEIPVAAGELARKEDIDAVIAIGVLIRGATPHFDYIASEVSKGLADLSLELRKPITFGVITADTLEQAIERAGTKHGNKGWEAALSAIEMANLFKSLR

SEQ ID NO: 8283 - protein, 1307 aa, Artificial Sequence
  SARS-CoV-2/China/WF0004/2020__EPI_ISL_413694 spike protein (1-1147)(I909C_Y1047C) LumSynth construct
MFVFLVLLPLVSSQCVNLTTRTQLPPAYTNSFTRGVYYPDKVFRSSVLHSTQDLFLPFFSNVTWFHAIHVSGTNGTKRFDNPVLPFNDGVYFASTEKSNIIRGWIFGTTLDSKTQSLLIVNNATNVVIKVCEFQFCNDPFLGVYYHKNNKSWTESEFRVYSSANNCTFEYVSQPFLMDLEGKQGNFKNLREFVFKNIDGYFKIYSKHTPINLVRDLPQGFSALEPLVDLPIGINITRFQTLLALHRSYLTPGDSSSGWTAGAAAYYVGYLQPRTFLLKYNENGTITDAVDCALDPLSETKCTLKSFTVEKGIYQTSNFRVQPTESIVRFPNITNLCPFGEVFNATRFASVYAWNRKRISNCVADYSVLYNSASFSTFKCYGVSPTKLNDLCFTNVYADSFVIRGDEVRQIAPGQTGKIADYNYKLPDDFTGCVIAWNSNNLDSKVGGNYNYLYRLFRKSNLKPFERDISTEIYQAGSTPCNGVEGFNCYFPLQSYGFQPTNGVGYQPYRVVVLSFELLHAPATVCGPKKSTNLVKNKCVNFNFNGLTGTGVLTESNKKFLPFQQFGRDIADTTDAVRDPQTLEILDITPCSFGGVSVITPGTNTSNQVAVLYQDVNCTEVPVAIHADQLTPTWRVYSTGSNVFQTRAGCLIGAEHVNNSYECDIPIGAGICASYQTQTNSPRRARSVASQSIIAYTMSLGAENSVAYSNNSIAIPTNFTISVTTEILPVSMTKTSVDCTMYICGDSTECSNLLLQYGSFCTQLNRALTGIAVEQDKNTQEVFAQVKQIYKTPPIKDFGGFNFSQILPDPSKPSKRSFIEDLLFNKVTLADAGFIKQYGDCLGDIAARDLICAQKFNGLTVLPPLLTDEMIAQYTSALLAGTITSGWTFGAGAALQIPFAMQMAYRFNGCGVTQNVLYENQKLIANQFNSAIGKIQDSLSSTASALGKLQDVVNQNAQALNTLVKQLSSNFGAISSVLNDILSRLDKVEAEVQIDRLITGRLQSLQTYVTQQLIRAAEIRASANLAATKMSECVLGQSKRFDFCGKGCHLMSFPQSAPHGVVFLHVTYVPAQEKNFTTAPAICHDGKAHFPREGVFVSNGTHWFVTQRNFYEPQIITTDNTFVSGNCDVVIGIVNNTVYDPLQPELDSGGGSGGGQIYEGKLTAEGLRFGIVASRFNHALVDRLVEGAIDAIVRHGGREEDITLVRVPGSWEIPVAAGELARKEDIDAVIAIGVLIRGATPHFDYIASEVSKGLADLSLELRKPITFGVITADTLEQAIERAGTKHGNKGWEAALSAIEMANLFKSLR

SEQ ID NO: 8284 - protein, 1307 aa, Artificial Sequence
  SARS-CoV-2/China/WF0028/2020__EPI_ISL_413791 spike protein (1-1147)(I909C_Y1047C) LumSynth construct
MFVFLVLLPLVSSQCVNLTTRTQLPPAYTNSFTRGVYYPDKVFRSSVLHSTQDLFLPFFSNVTWFHAIHVSGTNGTKRFDNPVLPFNDGVYFASTEKSNIIRGWIFGTTLDSKTQSLLIVNNATNVVIKVCEFQFCNDPFLGVYYHKNNKSWMESEFRVYSSANNCTFEYVSQPFLMDLEGKQGNFKNLREFVFKNIDGYFKIYSKHTPINLVRDLPQGFSALEPLVDLPIGINITRFQTLLALHRSYLTPGDSSSGWTAGAAAYYVGYLQPRTFLLKYNENGTITDAVDCALDPLSETKCTLKSFTVEKGIYQTSNFRVQPTESIVRFPNITNLCPFGEVFNATRFASVYAWNRKRISNCVADYSVLYNSASFSTFKCYGVSPTKLNDLCFTNVYADSFVIRGDEVRQIAPGQTGKIADYNYKLPDDFTGCVIAWNSNNLDSKVGGNYNYLYRLFRKSNLKPFERDISTEIYQAGSTPCNGVEGFNCYFPLQSYGFQPTNGVGYQPYRVVVLSFELLHAPATVCGPKKSTNLVKNKCVNFNFNGLTGTGVLTESNKKFLPFQQFGRDIADTTDAVRDPQTLEILDITPCSFGGVSVITPGTNTSNQVAVLYQDVNCTEVPVAIHADQLTPTWRVYSTGSNVFQTRAGCLIGAEHVNNSYECDIPIGAGICASYQTQTNSPRRARSVASQSIIAYTMSLGAENSVAYSNNSIAIPTNFTISVTTEILPVSMTKTSVDCTMYICGDSTECSNLLLQYGSFCTQLNRALTGIAVEQDKNTQEVFAQVKQIYKTPPIKDFGGFNFSQILPDPSKPSKRSFIEDLLFNKVTLADAGFIKQYGDCLGDIAARDLICAQKFNGLTVLPPLLTDEMIAQYTSALLAGTITSGWTFGAGAALQIPFAMQMAYRFNGCGVTQNVLYENQKLIANQFNSAIGKIQDSLSSTASALGKLQDVVNQNAQALNTLVKQLSSNFGAISSVLNDILSRLDKVEAEVQIDRLITGRLQSLQTYVTQQLIRAAEIRASANLAATKMSECVLGQSKRVDFCGKGCHLMSFPQSAPHGVVFLHVTYVPAQEKNFTTAPAICHDGKAHFPREGVFVSNGTHWFVTQRNFYEPQIITTDNTFVSGNCDVVIGIVNNTVYDPLQPELESGGGSGGGQIYEGKLTAEGLRFGIVASRFNHALVDRLVEGAIDAIVRHGGREEDITLVRVPGSWEIPVAAGELARKEDIDAVIAIGVLIRGATPHFDYIASEVSKGLADLSLELRKPITFGVITADTLEQAIERAGTKHGNKGWEAALSAIEMANLFKSLR
